United States Patent Application Publication US 2018/0126003 A1 - sequence listing, part 20

SEQ ID NO: 33374 - DNA, 4506 bp, Artificial Sequence
  derived and/or modified sequence
ggcccatcggggctaggggaaccccggcgcagacctggggtggggtcggaaaagctgtttcatcgcccgctcccgggccctccgctccctccctccctccctctctccctggcaggactccccgccaggcctccccgccactctccgcggcgcattccgggaggcagcggccgcagcggcctcgccatgtcccagcccggccagaagcccgccgcctccccgcggccccggcgagcagccgccgcccgccgcacccatgagcatgtcagtgaaaaaaccagtgaatcgccttccaaaccaggagaaaagaaaggatcagatgagaaaaaagcagcaagcctcggcagcagtcaatcctccagaacctatgctggtggaacagcctcggccaccaaggtgtcagcttcctctggtgcaaccagcaagtcttccagtatgaatcccacagaaaccaaggctgtaaaaacagaacctgagaagaagtcacagtcaaccaagccaaaaagcctacccaagcaggcatcagatacaggaagtaacgatgctcacaataaaaaagcagtttccagatcagctgaacagcagccatcagagaaatcaacagaaccaaagactaaaccacaagacatgatttctgctggtggagagagtgttgctggtatcactgcaatatctggcaagccgggtgacaagaaaaaagaaaagaaatcattaaccccagctgtgccagttgaatctaaaccggataaaccatcgggaaagtcaggcatggatgctgctttggatgacttaatagatactttaggaggacctgaagaaactgaagaagaaaatacaacgtatactggaccagaagtttcagatccaatgagttccacctacatagaggaattgggtaaaagagaagtcacaattcctccaaaatatagggaactattggctaaaaaggaagggatcacagggcctcctgcagactcttcgaaacccatagggccagatgatgctatagacgccttgtcatctgacttcacctgtgggtcgcctacagctgctggaaagaaaactgaaaaagaggaatctacagaagttttaaaagctcagtcagcagggacagtcagaagtgctgctccaccccaagagaagaaaagaaaggtggagaaggatacaatgagtgatcaagcactcgaggctctgtcggcttcactgggcacccggcaagcagaacctgagctcgacctccgctcaattaaggaagtcgatgaggcaaaagctaaagaagaaaaactagagaagtgtggtgaggatgatgaaacaatcccatctgagtacagattaaaaccagccacggataaagatggaaaaccactattgccagagcctgaagaaaaacccaagcctcggagtgaatcagaactcattgatgaactttcagaagattttgaccggtctgaatgtaaagagaaaccatctaagccaactgaaaagacagaagaatctaaggccgctgctccagctcctgtgtcggaggctgtgtgtcggacctccatgtgtagtatacagtcagcaccccctgagccggctaccttgaagggcacagtgccagatgatgctgtagaagccttggctgatagcctggggaaaaaggaagcagatccagaagatggaaaacctgtgatggataaagtcaaggagaaggccaaagaagaagaccgtgaaaagcttggtgaaaaagaagaaacaattcctcctgattatagattagaagaggtcaaggataaagatggaaagccactcctgccaaaagagtctaaggaacagcttccacccatgagtgaagacttccttctggatgctttgtctgaggacttctctggtccacaaaatgcttcatctcttaaatttgaagatgctaaacttgctgctgccatctctgaagtggtttcccaaaccccagcttcaacgacccaagctggagccccaccccgtgatacctcgcagagtgacaaagacctcgatgatgccttggataaactctctgacagtctaggacaaaggcagcctgacccagatgagaacaaaccaatggaagataaagtaaaggaaaaagctaaagctgaacatagagacaagcttggagaaagagatgacactatcccacctgaatacagacatctcctggatgataatggacaggacaaaccagtgaagccacctacaaagaaatcagaggattcaaagaaacctgcagatgaccaagaccccattgatgctctctcaggagatctggacagctgtccctccactacagaaacctcacagaacacagcaaaggataagtgcaagaaggctgcttccagctccaaagcacctaagaatggaggtaaagcgaaggattcagcaaagacaacagaggaaacttccaagccaaaagatgactaaagaaatacaagttaaggtatctggtatctgcatgtaaaatcttcagctggtggatggtgacttttgaagaacaaaaggctttggcaacagaaaacaattgttctgggtgatttctagaatggtttttgttgagtctctgaacatcctaaatattggtttgttattcttttccagaaagaaaatgaatttgactggttcacctgtgtactgagtattgataaactttgaatttttttaattgccttcaattgggagagaaagctttatatttgtaagaaatatatttgataaagtttcttaaagcaacaccaaaaaaacaaaagaaaagctaagtgaatttttgcacattctacacacagtgcctgtaaatctcatttgtattttcagtttgcccttaattttttttgttagtgtttagaaaacaatgttttaaacattcttcagtgttctgatttcttattaccccctttcctcttgggcttttgaactgtatttgatgttgctttgggataatgtttataagtcaaacataagatattgtacattgggcacatatctcctcttgggctgctaataataaattaataacaggtaacctggacaaaccaggaagcaccaaaccccttttcagtttgaactcttctttgccaggtgtgaggacttctgcatcttacagtcagcacagaacacactgagacttgaatcaagtcagcaacagagcaaaataaaggttagataagtccttgtgtagcaaatttcgagcataagaaataaaatctaattaattcttagggtactcatctgacttgaactctgttggtttactgtgttagtaaactgtgctttctattatctatacataaaacctgagcagcaactgtgtctttagagctattgccacattagcctttgcactgtatagcgtctggctttatggaacttaagtttaccaaatataaaaagaaacttctgcttttaaaaaaattatatatatatattaaatttgaaacctgcatttctcccacagcaatgtaagaagtaggctctgatgtcctaccactttgaatggttttctaatatcttaatgaatagttcctgaacattgcactgatatcatcgattagaattttgatatttaatttcatctttatttcctggtagagaatgcaggaaaagatgtcaggtacataacataaaacagattgggaatttattgtttccaaagggcatggccttccttagcatcagtttgaagcttttgttatgacttagctgacttgtggcagcggggcaagcaaaaacaataacactgcttataaatggcaccacatcttgttaacctcccccccaaatactctctgaaagtcatgcacatacctatgggattttacacaccaccagcttaaaatgctatgtctctatccatcagaaatagtcattattctatttttaaggcagcaacaagaaaagaaaaaacacttttcctgagggatttctaaccatgtatctaatcctcccatttgggcagtataggtgtttgcttttttgttttctttttttaagaaaaaccttgaaacctttgacactgacagatgtgtttgcaaggatacggcttcagtattactaatttccatgtgtatctggaagtatttttaaatggcataccaaaatccagaagtttaaagatgcctataaaagtaaacaacatttatttaaaaagaactctgaatatgccttcttttttaattagaaatatcttcgagacttgggtgtttgttaataactaataactggagtaagctacaggatctaaagcagccctttttacagtctagttaggagagagaaaataattgcaaatatccacttagaggcaaagaacaattttttattatcaaaaaggtttctgcacattgttgtggcaatattgtatctgtttagaaaatgggcttttccaaaagcaaacaaagataggttcctcaggtgaccaaaactgaaaatcaatatttccatgtttcattaatcaaggcataaaatacaattaaagcaaaatattttacattaaaa

SEQ ID NO: 33375 - DNA, 2253 bp, Artificial Sequence
  derived and/or modified sequence
atgagccagcccggccagaagcccgccgccagccccagacccagaagagccgccgccgccagaagaacccacgagcacgtgagcgagaagaccagcgagagccccagcaagcccggcgagaagaagggcagcgacgagaagaaggccgccagcctgggcagcagccagagcagcagaacctacgccggcggcaccgccagcgccaccaaggtgagcgccagcagcggcgccaccagcaagagcagcagcatgaaccccaccgagaccaaggccgtgaagaccgagcccgagaagaagagccagagcaccaagcccaagagcctgcccaagcaggccagcgacaccggcagcaacgacgcccacaacaagaaggccgtgagcagaagcgccgagcagcagcccagcgagaagagcaccgagcccaagaccaagccccaggacatgatcagcgccggcggcgagagcgtggccggcatcaccgccatcagcggcaagcccggcgacaagaagaaggagaagaagagcctgacccccgccgtgcccgtggagagcaagcccgacaagcccagcggcaagagcggcatggacgccgccctggacgacctgatcgacaccctgggcggccccgaggagaccgaggaggagaacaccacctacaccggccccgaggtgagcgaccccatgagcagcacctacatcgaggagctgggcaagagagaggtgaccatcccccccaagtacagagagctgctggccaagaaggagggcatcaccggcccccccgccgacagcagcaagcccatcggccccgacgacgccatcgacgccctgagcagcgacttcacctgcggcagccccaccgccgccggcaagaagaccgagaaggaggagagcaccgaggtgctgaaggcccagagcgccggcaccgtgagaagcgccgcccccccccaggagaagaagagaaaggtggagaaggacaccatgagcgaccaggccctggaggccctgagcgccagcctgggcaccagacaggccgagcccgagctggacctgagaagcatcaaggaggtggacgaggccaaggccaaggaggagaagctggagaagtgcggcgaggacgacgagaccatccccagcgagtacagactgaagcccgccaccgacaaggacggcaagcccctgctgcccgagcccgaggagaagcccaagcccagaagcgagagcgagctgatcgacgagctgagcgaggacttcgacagaagcgagtgcaaggagaagcccagcaagcccaccgagaagaccgaggagagcaaggccgccgcccccgcccccgtgagcgaggccgtgtgcagaaccagcatgtgcagcatccagagcgccccccccgagcccgccaccctgaagggcaccgtgcccgacgacgccgtggaggccctggccgacagcctgggcaagaaggaggccgaccccgaggacggcaagcccgtgatggacaaggtgaaggagaaggccaaggaggaggacagagagaagctgggcgagaaggaggagaccatcccccccgactacagactggaggaggtgaaggacaaggacggcaagcccctgctgcccaaggagagcaaggagcagctgccccccatgagcgaggacttcctgctggacgccctgagcgaggacttcagcggcccccagaacgccagcagcctgaagttcgaggacgccaagctggccgccgccatcagcgaggtggtgagccagacccccgccagcaccacccaggccggcgccccccccagagacaccagccagagcgacaaggacctggacgacgccctggacaagctgagcgacagcctgggccagagacagcccgaccccgacgagaacaagcccatggaggacaaggtgaaggagaaggccaaggccgagcacagagacaagctgggcgagagagacgacaccatcccccccgagtacagacacctgctggacgacaacggccaggacaagcccgtgaagccccccaccaagaagagcgaggacagcaagaagcccgccgacgaccaggaccccatcgacgccctgagcggcgacctggacagctgccccagcaccaccgagaccagccagaacaccgccaaggacaagtgcaagaaggccgccagcagcagcaaggcccccaagaacggcggcaaggccaaggacagcgccaagaccaccgaggagaccagcaagcccaaggacgactag

SEQ ID NO: 33376 - protein, 354 aa, Artificial Sequence
  derived and/or modified sequence
MAHSPVAVQVPGMQNNIADPEELFTKLERIGKGSFGEVFKGIDNRTQQVVAIKIIDLEEAEDEIEDIQQEITVLSQCDSSYVTKYYGSYLKGSKLWIIMEYLGGGSALDLLRAGPFDEFQIATMLKEILKGLDYLHSEKKIHRDIKAANVLLSEQGDVKLADFGVAGQLTDTQIKRNTFVGTPFWMAPEVIQQSAYDSKRPTAKELLKHKFIVKNSKKTSYLTELIDRFKRWKAEGHSDDESDSEGSDSESTSRENNTHPEWSFTTVRKKPDPKKVQNGAEQDLVQTLSCLSMIITPAFAELKQQDENNASRNQAIEELEKSIAVAEAACPGITDKMVKKLIEKFQKCSADESP

SEQ ID NO: 33377 - DNA, 1065 bp, Artificial Sequence
  derived and/or modified sequence
atggcccacagccccgtggccgtgcaggtgcccggcatgcagaacaacatcgccgaccccgaggagctgttcaccaagctggagagaatcggcaagggcagcttcggcgaggtgttcaagggcatcgacaacagaacccagcaggtggtggccatcaagatcatcgacctggaggaggccgaggacgagatcgaggacatccagcaggagatcaccgtgctgagccagtgcgacagcagctacgtgaccaagtactacggcagctacctgaagggcagcaagctgtggatcatcatggagtacctgggcggcggcagcgccctggacctgctgagagccggccccttcgacgagttccagatcgccaccatgctgaaggagatcctgaagggcctggactacctgcacagcgagaagaagatccacagagacatcaaggccgccaacgtgctgctgagcgagcagggcgacgtgaagctggccgacttcggcgtggccggccagctgaccgacacccagatcaagagaaacaccttcgtgggcacccccttctggatggcccccgaggtgatccagcagagcgcctacgacagcaagagacccaccgccaaggagctgctgaagcacaagttcatcgtgaagaacagcaagaagaccagctacctgaccgagctgatcgacagattcaagagatggaaggccgagggccacagcgacgacgagagcgacagcgagggcagcgacagcgagagcaccagcagagagaacaacacccaccccgagtggagcttcaccaccgtgagaaagaagcccgaccccaagaaggtgcagaacggcgccgagcaggacctggtgcagaccctgagctgcctgagcatgatcatcacccccgccttcgccgagctgaagcagcaggacgagaacaacgccagcagaaaccaggccatcgaggagctggagaagagcatcgccgtggccgaggccgcctgccccggcatcaccgacaagatggtgaagaagctgatcgagaagttccagaagtgcagcgccgacgagagcccctag

SEQ ID NO: 33378 - DNA, 1065 bp, Artificial Sequence
  derived and/or modified sequence
atggcccacagccccgtggcagtgcaggtgcccggtatgcagaacaatatcgcagacccagaggagttgtttaccaaattagaaagaattgggaagggtagcttcggcgaagttttcaaaggcatcgacaaccgaactcagcaggtagtggccatcaaaataatagatttggaagaggcagaggacgagatcgaagatattcagcaggagatcacagtcttgagtcagtgtgacagctcgtatgtcacaaaatactatggatcttatcttaaggggagtaagttatggatcatcatggaatatctggggggaggaagcgccctggaccttttacgagctggaccattcgatgaatttcaaatagctaccatgctgaaggagatattgaagggcctggattacctgcacagcgaaaagaagatccaccgagacattaaagcggccaacgtgctgctctcggaacagggagacgtcaagttagcggacttcggagtcgcggggcagctgaccgatactcagataaagcgcaatacgttcgtcgggacaccattctggatggcgcctgaagttatacaacagagcgcctatgactcaaaaaggccgactgcaaaggagcttctgaagcacaagttcattgttaaaaactcgaagaaaacttcatatctgaccgagctgatagataggttcaaaagatggaaagccgaaggacattccgacgacgaatccgattctgagggctcggactctgagtctacttctcgcgagaataacactcatcctgaatggtcgtttaccacggtacgcaagaagcccgaccccaaaaaggtgcagaacggagcagaacaggatttagttcagactctgtcttgtctctcgatgatcatcacacccgcattcgccgagctcaaacagcaagacgagaataacgcgagtaggaaccaggcgatcgaggagctggagaagtctatagccgtcgctgaggcggcgtgcccaggcatcacagataaaatggtgaaaaagctgatcgaaaaattccagaagtgttccgcggacgaaagcccttag

SEQ ID NO: 33379 - DNA, 1065 bp, Artificial Sequence
  derived and/or modified sequence
atggcccacagccctgtggccgtgcaggtgcccggcatgcagaacaacattgctgaccctgaggagctgttcaccaagctggagcgcatcggcaagggcagctttggagaggtgttcaagggcatcgacaacagaacccagcaggtggtggccatcaagatcatcgacctggaggaggctgaagatgaaattgaggacatccagcaggagatcaccgtgctgagccagtgtgacagcagctatgtgaccaagtactacggcagctacctgaagggcagcaagctgtggatcatcatggagtacctgggcggcggcagcgccctggacctgctgcgggccggcccctttgatgagttccagatcgccaccatgctgaaggagatcctgaagggcctggactacctgcacagcgagaagaagatccaccgggacatcaaggccgccaacgtgctgctgtctgagcagggagatgtgaagctggccgactttggagtggccggccagctgacagacacccagatcaagaggaacacctttgtgggcacccccttctggatggcccctgaggtgatccagcagagcgcctatgacagcaagaggcccacagccaaggagctgctgaagcacaagttcatcgtgaagaacagcaagaagaccagctacctgacagagctgattgaccgcttcaagcgctggaaggccgagggccacagtgatgatgaaagtgacagcgagggcagtgacagcgagagcaccagccgggagaacaacacccaccctgagtggagcttcaccaccgtgaggaagaagccagaccccaagaaggtgcagaatggagctgagcaggacctggtgcagaccctgagctgcctgtccatgatcatcaccccagcctttgctgagctgaagcagcaggatgaaaataatgccagcaggaaccaggccatcgaggagctggagaagagcattgctgtggccgaggccgcctgccccggcatcacagacaagatggtgaagaagctgattgagaagttccagaagtgcagcgcagatgagagcccctag

SEQ ID NO: 33380 - DNA, 1065 bp, Artificial Sequence
  derived and/or modified sequence
atggcccacagccccgtggccgtgcaggtgcccggcatgcagaacaacatcgctgaccccgaggagctgtttacaaagttggagaggatcggcaagggctcctttggcgaggtgtttaaaggaatcgacaacaggacccagcaggtggttgccatcaagatcatcgatctcgaggaagccgaggatgagatcgaggacatccaacaggagataacagtcctgtctcagtgcgatagtagttatgttacgaagtattatggctcctacctcaagggatcaaaactctggataatcatggaatatctgggcggcggaagcgccttggatctactgagagcaggccctttcgatgaattccagattgctactatgttgaaggagatcctcaaagggctcgactacttacacagtgagaaaaagatacatcgcgatatcaaagccgccaacgttctgttgtccgaacaaggggatgttaaactggccgatttcggtgtggcaggacagctgaccgatactcagattaagagaaataccttcgtgggtacccccttctggatggccccagaggttatccagcaatcagcatacgacagtaagagacccaccgcaaaggagttgctcaagcacaagttcatcgttaaaaactccaagaagacaagctacctgaccgagttgattgatcgtttcaaacggtggaaagcggagggtcacagcgacgacgagagcgatagtgagggttccgactccgaatccacctcccgagagaacaatacacatcctgagtggagcttcactacagtgagaaagaagcctgaccctaaaaaggtgcagaacggagctgagcaggatctcgtccaaaccctgtcatgtctgagcatgatcattactcctgcctttgcagaactgaagcagcaggacgagaataatgcctcaaggaaccaggctattgaggagttggagaagtccatcgctgtcgccgaggccgcgtgtcccggaattactgataagatggttaagaagctgattgaaaaatttcagaaatgtagcgccgacgaaagcccatag

SEQ ID NO: 33381 - DNA, 1065 bp, Artificial Sequence
  derived and/or modified sequence
atggcccactcgcctgtcgctgtacaagtgccaggtatgcaaaacaatattgccgatcctgaggagctgtttacgaaactggagaggataggaaaagggtcattcggggaggtgtttaaaggcatcgataaccgcacccagcaagtagtggccattaagatcattgatttagaagaggcagaggacgaaatagaggacattcagcaagaaatcacagtcctttctcagtgcgacagcagttacgtgaccaaatactacggttcctaccttaaaggaagcaaactgtggattataatggaatacttgggcggaggctctgccttggatctccttcgcgcaggcccttttgatgaattccagattgccacaatgttgaaggagattcttaaaggactggactacctgcatagtgaaaaaaagattcacagagatattaaagctgcaaacgttctgttaagtgagcagggcgacgttaagctggccgactttggagtcgcagggcagttaaccgatactcagataaaacgcaacaccttcgttggaacccccttttggatggcccctgaagtgatacagcagtcagcctatgattccaaaaggccaacagctaaagagttgctcaaacataaatttatcgttaagaactctaagaagactagctatctaaccgagctcatagaccggtttaaacgctggaaggccgagggccactccgatgacgagtcggacagcgagggaagcgattcggaaagcacttcaagggaaaataacactcatcctgaatggtctttcactaccgtcaggaaaaagcctgaccccaaaaaggtgcagaatggtgctgaacaggatctggtgcagacgttgagctgtctgtccatgatcatcacacctgcctttgctgagctaaaacagcaggacgagaataatgctagcagaaaccaagcgattgaggaattagagaagagcatagccgtggctgaggcagcttgccctgggattaccgataagatggtcaagaagttaattgagaaattccagaagtgctctgccgacgagtccccttag

SEQ ID NO: 33382 - DNA, 1186 bp, Artificial Sequence
  derived and/or modified sequence
attcgcctccatggcccactcgccggtggctgtccaagtgcctgggatgcagaataacatagctgatccagaagaactgttcacaaaattagagcgcattgggaaaggctcatttggggaagttttcaaaggaattgataaccgtacccagcaagtcgttgctattaaaatcatagaccttgaggaagccgaagatgaaatagaagacattcagcaagaaataactgtcttgagtcaatgtgacagctcatatgtaacaaaatactatgggtcatatttaaaggggtctaaattatggataataatggaatacctgggcggtggttcagcactggatcttcttcgagctggtccatttgatgagttccagattgctaccatgctaaaggaaattttaaaaggtctggactatctgcattcagaaaagaaaattcaccgagacataaaagctgccaatgtcttgctctcagaacaaggagatgttaaacttgctgattttggagttgctggtcagctgacagatacacagattaaaagaaatacctttgtgggaactccattttggatggctcctgaagttattcaacagtcagcttatgactcaaaacgtcctacagcaaaagaacttctgaaacacaaattcattgtaaaaaattcaaagaagacttcttatctgactgaactgatagatcgttttaagagatggaaggcagaaggacacagtgatgatgaatctgattccgagggctctgattcggaatctaccagcagggaaaacaatactcatcctgaatggagctttaccaccgtacgaaagaagcctgatccaaagaaagtacagaatggggcagagcaagatcttgtgcaaaccctgagttgtttgtctatgataatcacacctgcatttgctgaacttaaacagcaggacgagaataacgctagcaggaatcaggcgattgaagaactcgagaaaagtattgctgtggctgaagccgcctgtcccggcatcacagataaaatggtgaagaaactaattgaaaaatttcaaaagtgttcagcagacgaatccccctaagaaacttattattggcttctgtttcatatggacccagagagccccaccaaacctacgtcaagattaacaatgcttaacccatgagctccatgtgccttttggatctttgca

SEQ ID NO: 33383 - protein, 339 aa, Artificial Sequence
  derived and/or modified sequence
MAHSPVAVQVPGMQGSKLWIIMEYLGGGSALDLLRAGPFDEFQIATMLKEILKGLDYLHSEKKIHRDIKAANVLLSEQGDVKLADFGVAGQLTDTQIKRNTFVGTPFWMAPEVIQQSAYDSKADIWSLGITAIELAKGEPPNSDMHPMRVLFLIPKNNPPTLVGDFTKSFKEFIDACLNKDPSFRPTAKELLKHKFIVKNSKKTSYLTELIDRFKRWKAEGHSDDESDSEGSDSESTSRENNTHPEWSFTTVRKKPDPKKVQNGAEQDLVQTLSCLSMIITPAFAELKQQDENNASRNQAIEELEKSIAVAEAACPGITDKMVKKLIEKFQKCSADESP

SEQ ID NO: 33384 - DNA, 1020 bp, Artificial Sequence
  derived and/or modified sequence
atggcccacagccccgtggccgtgcaggtgcccggcatgcagggcagcaagctgtggatcatcatggagtacctgggcggcggcagcgccctggacctgctgagagccggccccttcgacgagttccagatcgccaccatgctgaaggagatcctgaagggcctggactacctgcacagcgagaagaagatccacagagacatcaaggccgccaacgtgctgctgagcgagcagggcgacgtgaagctggccgacttcggcgtggccggccagctgaccgacacccagatcaagagaaacaccttcgtgggcacccccttctggatggcccccgaggtgatccagcagagcgcctacgacagcaaggccgacatctggagcctgggcatcaccgccatcgagctggccaagggcgagccccccaacagcgacatgcaccccatgagagtgctgttcctgatccccaagaacaacccccccaccctggtgggcgacttcaccaagagcttcaaggagttcatcgacgcctgcctgaacaaggaccccagcttcagacccaccgccaaggagctgctgaagcacaagttcatcgtgaagaacagcaagaagaccagctacctgaccgagctgatcgacagattcaagagatggaaggccgagggccacagcgacgacgagagcgacagcgagggcagcgacagcgagagcaccagcagagagaacaacacccaccccgagtggagcttcaccaccgtgagaaagaagcccgaccccaagaaggtgcagaacggcgccgagcaggacctggtgcagaccctgagctgcctgagcatgatcatcacccccgccttcgccgagctgaagcagcaggacgagaacaacgccagcagaaaccaggccatcgaggagctggagaagagcatcgccgtggccgaggccgcctgccccggcatcaccgacaagatggtgaagaagctgatcgagaagttccagaagtgcagcgccgacgagagcccctag

SEQ ID NO: 33385 - DNA, 1020 bp, Artificial Sequence
  derived and/or modified sequence
atggcccattctccggtcgccgtccaggtgccagggatgcagggtagtaagctgtggataataatggagtaccttggcggcgggtccgcgttggatctgctcagagctggccccttcgacgaatttcagatcgctaccatgcttaaggaaatactgaaaggccttgactacctgcactctgagaaaaagatccacagggacattaaagctgctaacgtgctgttatccgagcagggggatgtaaaattggcagatttcggggtcgccgggcagctcaccgacacgcagatcaaaagaaacaccttcgtcgggacacctttctggatggctcctgaggtcatccaacagtccgcctacgattctaaagcagatatttggagtttgggtatcacagccatcgagctagccaagggagaacctcctaacagcgacatgcacccaatgagggtgctctttctgattcccaaaaataatcctccaacccttgtaggcgacttcactaaaagctttaaggagttcatagacgcctgccttaacaaggatccttcatttcgcccgacggccaaagaattgctcaagcataagttcatcgtgaaaaatagcaagaaaacttcttaccttacggaactcatcgatcgatttaagcgctggaaagcggaaggacattccgatgatgagagtgacagcgaggggagcgacagcgagagcacaagccgcgaaaacaacacacatccagagtggtcttttacaacagtccgcaaaaagccagacccaaagaaagtacagaatggtgcagagcaggacctcgttcagacgctgtcctgcctgtctatgatcatcacacccgcatttgccgaacttaagcaacaggacgagaacaacgcatctcgcaaccaggccattgaggagctggagaagtccattgctgtggcggaggccgcgtgtcccgggatcaccgacaaaatggtcaagaaacttatcgagaagttccagaaatgttctgcggacgaatcaccgtag

SEQ ID NO: 33386 - DNA, 1020 bp, Artificial Sequence
  derived and/or modified sequence
atggcccacagccctgtggccgtgcaggtgcccggcatgcagggcagcaagctgtggatcatcatggagtacctgggcggcggcagcgccctggacctgctgcgggccggcccctttgatgagttccagatcgccaccatgctgaaggagatcctgaagggcctggactacctgcacagcgagaagaagatccaccgggacatcaaggccgccaacgtgctgctgtctgagcagggagatgtgaagctggccgactttggagtggccggccagctgacagacacccagatcaagaggaacacctttgtgggcacccccttctggatggcccctgaggtgatccagcagagcgcctatgacagcaaggctgacatctggagcctgggcatcacagccatcgagctggccaagggggagccccccaacagcgacatgcaccccatgagggtgctcttcctgatccccaagaacaacccccccaccctggtgggggacttcaccaagagcttcaaggagttcattgatgcctgcctgaacaaggaccccagcttccggcccacagccaaggagctgctgaagcacaagttcatcgtgaagaacagcaagaagaccagctacctgacagagctgattgaccgcttcaagcgctggaaggccgagggccacagtgatgatgaaagtgacagcgagggcagtgacagcgagagcaccagccgggagaacaacacccaccctgagtggagcttcaccaccgtgaggaagaagccagaccccaagaaggtgcagaatggagctgagcaggacctggtgcagaccctgagctgcctgtccatgatcatcaccccagcctttgctgagctgaagcagcaggatgagaacaatgccagcaggaaccaggccatcgaggagctggagaagagcattgctgtggccgaggccgcctgccccggcatcacagacaagatggtgaagaagctgattgagaagttccagaagtgcagcgcagatgagagcccctag

SEQ ID NO: 33387 - DNA, 3017 bp, Artificial Sequence
  derived and/or modified sequence
actcgagcccaggtcccagccaccaccactcacagcgctcggcgttcaggaagaggagcagcagcggaggcggctgcttcagcggcgggcgggcgccagaaaggccccgatcgaaaagcctgggagggccgccgaactacccccggagggaggagccagtccgaacccaaggcgccaccgccgcagaagcggagcgaggcagcattcgcctccatggcccactcgccggtggctgtccaagtgcctgggatgcaggggtctaaattatggataataatggaatacctgggcggtggttcagcactggatcttcttcgagctggtccatttgatgagttccagattgctaccatgctaaaggaaattttaaaaggtctggactatctgcattcagaaaagaaaattcaccgagacataaaagctgccaatgtcttgctctcagaacaaggagatgttaaacttgctgattttggagttgctggtcagctgacagatacacagattaaaagaaatacctttgtgggaactccattttggatggctcctgaagttattcaacagtcagcttatgactcaaaagctgacatttggtcattgggaattactgctattgaactagccaagggagagccacctaactccgatatgcatccaatgagagttctgtttcttattcccaaaaacaatcctccaactcttgttggagactttactaagtcttttaaggagtttattgatgcttgcctgaacaaagatccatcatttcgtcctacagcaaaagaacttctgaaacacaaattcattgtaaaaaattcaaagaagacttcttatctgactgaactgatagatcgttttaagagatggaaggcagaaggacacagtgatgatgaatctgattccgagggctctgattcggaatctaccagcagggaaaacaatactcatcctgaatggagctttaccaccgtacgaaagaagcctgatccaaagaaagtacagaatggggcagagcaagatcttgtgcaaaccctgagttgtttgtctatgataatcacacctgcatttgctgaacttaaacagcaggacgagaataacgctagcaggaatcaggcgattgaagaactcgagaaaagtattgctgtggctgaagccgcctgtcccggcatcacagataaaatggtgaagaaactaattgaaaaatttcaaaagtgttcagcagacgaatccccctaagaaacttattattggcttctgtttcatatggacccagagagccccaccaaacctacgtcaagattaacaatgcttaacccatgagctccatgtgccttttggatctttgcaacactgaagatttggaagaagctattaaactattttgtgatggcgtttatcattttatattttgaaaggattattttgtaaggaataacttttaatactatagtttcacctgtattctagtaaatgttgagacaccgttttgcttttaagtatccctatttcttaagttacgaggatgaatacctttcacattttgatctttagttgactctacagtcatgaaacatacaggtctttcaaagtcattctcaatattcagcttttgtaaattatcaagcttcaaaaagcttttttttttaaaaaaaaacatgcatattctaaaaatgactattggtggggaggtgtaaataagtcataccttcttaaaacagaaaatttaagtaaagtcttttaaatgaaacctgtaaaagtattgactcttctaccaagttggtatgatattccaggcagctcaatgattatcacatttgagaccctgtgtttgaagcatttacaggcaatgtacagcaacagaggtacctcttggtgtatagtatttacattctcttttaggtagaagaggcaattttacccttatttcacatggttagaaatttaaagcaagatcatttacccaaggataggtgtttggtaatgttgaaggagttagtctggcttcatgttttacatcttcaactaaaatcccatactatctgcttggatttggagagccaaaaaataaagctgattgtcatgtgattaaatatctgatcaacaggtatgaatataacttaaatcagcatatttttgccatggtaataaattgtcctataaactatttatatatttttgttcttcataattatcactaataagcatcagtttgttgtttttaaaaggatatttaagtgagcattttctagttcatatgaaaataaccatagtacaggatgatttctgtccacacaaaggttaaattagattgcacagttaattttcacttatatttatggtactattatgtgggtgatgcctttttcttttaagcccagtacatatattatgcctgcctaagttctgaactggggctgtatttcagtagttgtagaattattgatatttagttttgatagctaatgtttaattgtttggatctgcacagtttggtttttgcacaaaagtcatttaaaaaaatctgagtaattgtcaaatattaaaagaaagatattcttcctgtaaggaatacagtttttagtcaaagtggccattacatcctctttttaatttacataatacagatacttgagaaagttgttgtggtgttgtatgccaagaaaattctttttattggtgcctatattgtaacaattatttttaatgcattgtattttgaagtaacggttcagttaaatttttcacctgctgtgtaactgaaacacaattacagtttataatcatctgtagaagtctggagataattttgcaactcatgttatgggttaaatgaatatttttgtaaaagtaaaagcaacaaatttataaattgattatttgaaactttacaacacaattgcatcccaaatacaaattgtattgcttattcattatagctattcgtcctgtaatctgtttctaggtgaagcatactccagtgttttaggggttttgaaaataaatatttaaatttcacagtc

SEQ ID NO: 33388 - DNA, 1020 bp, Artificial Sequence
  derived and/or modified sequence
atggcccacagccccgtggccgtgcaggtgcccggcatgcagggcagcaagttgtggatcattatggagtaccttggaggaggtagcgcgctcgacctcctccgggccggccccttcgacgaatttcagatagctacaatgctgaaagagattctgaaaggccttgactacctgcattcagagaaaaaaatccacagagatattaaggccgctaacgtcctactatctgagcagggagacgtcaaactggctgactttggcgtggctgggcagctcaccgatacccaaataaagcggaataccttcgtgggaaccccattttggatggcccccgaggtgatccagcaaagtgcctatgattctaaagcagacatctggtccttgggtattaccgcaatcgaacttgccaagggggagccacccaacagcgatatgcatcccatgcgagtgctgtttctgatcccaaaaaacaatccacccaccctggttggagattttaccaagtcctttaaagaatttattgatgcctgcctcaataaggacccctccttccgacccacagcaaaagagctcctcaaacataagttcatcgtgaaaaacagcaaaaagaccagctacttgaccgagctgattgaccgatttaaacgctggaaggcggaaggacacagtgatgatgagtcagacagtgaaggtagtgactcggagagcacatcaagggagaataacacccacccagagtggtccttcacgaccgtgaggaaaaaaccggaccctaaaaaggttcagaacggcgcggaacaggatttggtgcagactctctcttgtctgtcgatgatcattactccggccttcgcagaactgaaacagcaggatgagaataatgcatcaagaaaccaggccatcgaagagctagagaagagcatcgcagtcgccgaagctgcatgcccaggtattacagataaaatggtaaaaaagcttatcgaaaagttccagaagtgcagtgccgatgaatcaccttag

SEQ ID NO: 33389 - DNA, 1020 bp, Artificial Sequence
  derived and/or modified sequence
atggctcactccccagtagcggttcaagtgcctggcatgcaggggtctaaattatggatcattatggagtatctgggagggggatctgccctggacctactccgggctgggcctttcgacgaattccagatcgcaaccatgctcaaggagattctcaaggggctcgactatctccacagtgaaaagaaaattcaccgggacatcaaggccgctaacgtcctgctgtctgagcagggagatgtgaaattagcggactttggggttgccggacaactgaccgacacccaaatcaagcgcaacacatttgtggggacgccattctggatggctcccgaagtgatacagcagagcgcgtacgactcaaaagccgatatttggtctctcggcatcaccgcgattgagctcgccaagggggagccaccaaatagtgacatgcatccaatgagggttctgtttctgatcccaaagaacaatccccctaccctggtgggtgacttcacgaagagctttaaggaatttatcgatgcgtgcttaaacaaagacccgtctttcaggccgacagccaaggaattattgaaacacaaattcatagtgaaaaacagcaagaaaaccagctacctgacagagttaatcgaccgattcaagcgctggaaggccgagggacacagcgatgatgaatccgattcggagggatcagactccgagtcaaccagccgagagaacaacacgcatccggagtggagtttcactacagtccggaaaaagcctgatcccaagaaagtgcaaaatggggctgagcaggatctcgtgcagacactgagctgcctgtctatgatcattacaccagcatttgctgagctgaagcagcaggatgaaaacaatgcaagccgcaatcaggctatcgaagagcttgagaagagcattgcagtagcggaggccgcttgccccggtatcacagataaaatggtcaagaagctcattgagaaattccagaagtgcagcgccgatgagagcccatag

SEQ ID NO: 33390 - protein, 444 aa, Artificial Sequence
  derived and/or modified sequence
MPRSGAPKERPAEPLTPPPSYGHQPQTGSGESSGASGDKDHLYSTVCKPRSPKPAAPAAPPFSSSSGVLGTGLCELDRLLQELNATQFNITDEIMSQFPSSKVASGEQKEDQSEDKKRPSLPSSPSPGLPKASATSATLELDRLMASLSDFRVQNHLPASGPTQPPVVSSTNEGSPSPPEPTGKGSLDTMLGLLQSDLSRRGVPTQAKGLCGSCNKPIAGQVVTALGRAWHPEHFVCGGCSTALGGSSFFEKDGAPFCPECYFERFSPRCGFCNQPIRHKMVTALGTHWHPEHFCCVSCGEPFGDEGFHEREGRPYCRRDFLQLFAPRCQGCQGPILDNYISALSALWHPDCFVCRECFAPFSGGSFFEHEGRPLCENHFHARRGSLCATCGLPVTGRCVSALGRRFHPDHFTCTFCLRPLTKGSFQERAGKPYCQPCFLKLFG

SEQ ID NO: 33391 - protein, 461 aa, Artificial Sequence
  derived and/or modified sequence
MEDLDALLSDLETTTSHMPRSGAPKERPAEPLTPPPSYGHQPQTGSGESSGASGDKDHLYSTVCKPRSPKPAAPAAPPFSSSSGVLGTGLCELDRLLQELNATQFNITDEIMSQFPSSKVASGEQKEDQSEDKKRPSLPSSPSPGLPKASATSATLELDRLMASLSDFRVQNHLPASGPTQPPVVSSTNEGSPSPPEPTGKGSLDTMLGLLQSDLSRRGVPTQAKGLCGSCNKPIAGQVVTALGRAWHPEHFVCGGCSTALGGSSFFEKDGAPFCPECYFERFSPRCGFCNQPIRHKMVTALGTHWHPEHFCCVSCGEPFGDEGFHEREGRPYCRRDFLQLFAPRCQGCQGPILDNYISALSALWHPDCFVCRECFAPFSGGSFFEHEGRPLCENHFHARRGSLCATCGLPVTGRCVSALGRRFHPDHFTCTFCLRPLTKGSFQERAGKPYCQPCFLKLFG

SEQ ID NO: 33392 - DNA, 1812 bp, Artificial Sequence
  derived and/or modified sequence
ggagaataaaataatcaggaggctgggtttgtgcttggctccaagcatgccctgctctctgacctggagactaccacctcgcacatgccaaggtcaggggctcccaaagagcgccctgcggagcctctcacccctcccccatcctatggccaccagccacagacagggtctggggagtcttcaggagcctcgggggacaaggaccacctgtacagcacggtatgcaagcctcggtccccaaagcctgcagccccggcggcccctccattctcctcttccagcggtgtcttgggtaccgggctctgtgagctagatcggttgcttcaggaacttaatgccactcagttcaacatcacagatgaaatcatgtctcagttcccatctagcaaggtggcttcaggagagcagaaggaggaccagtctgaagataagaaaagacccagcctcccttccagcccgtctcctggcctcccaaaggcttctgccacctcagccactctggagctggatagactgatggcctcactctctgacttccgcgttcaaaaccatcttccagcctctgggccaactcagccaccggtggtgagctccacaaatgagggctccccatccccaccagagccgactggcaagggcagcctagacaccatgctggggctgctgcagtccgacctcagccgccggggtgttcccacccaggccaaaggcctctgtggctcctgcaataaacctattgctgggcaagtggtgacggctctgggccgcgcctggcaccccgagcacttcgtttgcggaggctgttccaccgccctgggaggcagcagcttcttcgagaaggatggagcccccttctgccccgagtgctactttgagcgcttctcgccaagatgtggcttctgcaaccagcccatccgacacaagatggtgaccgccttgggcactcactggcacccagagcatttctgctgcgtcagttgcggggagcccttcggagatgagggtttccacgagcgcgagggccgcccctactgccgccgggacttcctgcagctgttcgccccgcgctgccagggctgccagggccccatcctggataactacatctcggcgctcagcgcgctctggcacccggactgtttcgtctgcagggaatgcttcgcgcccttctcgggaggcagctttttcgagcacgagggccgcccgttgtgcgagaaccacttccacgcacgacgcggctcgctgtgcgccacgtgtggcctccctgtgaccggccgctgcgtgtcggccctgggtcgccgcttccacccggaccacttcacatgcaccttctgcctgcgcccgctcaccaaggggtccttccaggagcgcgccggcaagccctactgccagccctgcttcctgaagctcttcggctgacagcccgctcggctcgccctctcccccggaggccgcgccctcccggaaaagccgggtcctccagaccccgaggccttgctctcagagcgggaggccccacccactggagagccccgcccctaaggtactatgagtcctcaggggtcaagttcagaaacggcccagccagacctaaacccacacgcccacaaagtggattgcacacagacaagaactcccgtgcgggcctccactctattcccacccttgagggagcccccttactgggggagggtccttgcaattccagcgaatcggaggccaggccaggacgtccttgctccctgcaccctcactgttctgtgcactttttctacctacataaacacacgcattccacctctcaaaaaaaaa

SEQ ID NO: 33393 - DNA, 1386 bp, Artificial Sequence
  derived and/or modified sequence
atggaggacctggacgccctgctgagcgacctggagaccaccaccagccacatgcccagaagcggcgcccccaaggagagacccgccgagcccctgacccccccccccagctacggccaccagccccagaccggcagcggcgagagcagcggcgccagcggcgacaaggaccacctgtacagcaccgtgtgcaagcccagaagccccaagcccgccgcccccgccgccccccccttcagcagcagcagcggcgtgctgggcaccggcctgtgcgagctggacagactgctgcaggagctgaacgccacccagttcaacatcaccgacgagatcatgagccagttccccagcagcaaggtggccagcggcgagcagaaggaggaccagagcgaggacaagaagagacccagcctgcccagcagccccagccccggcctgcccaaggccagcgccaccagcgccaccctggagctggacagactgatggccagcctgagcgacttcagagtgcagaaccacctgcccgccagcggccccacccagccccccgtggtgagcagcaccaacgagggcagccccagcccccccgagcccaccggcaagggcagcctggacaccatgctgggcctgctgcagagcgacctgagcagaagaggcgtgcccacccaggccaagggcctgtgcggcagctgcaacaagcccatcgccggccaggtggtgaccgccctgggcagagcctggcaccccgagcacttcgtgtgcggcggctgcagcaccgccctgggcggcagcagcttcttcgagaaggacggcgcccccttctgccccgagtgctacttcgagagattcagccccagatgcggcttctgcaaccagcccatcagacacaagatggtgaccgccctgggcacccactggcaccccgagcacttctgctgcgtgagctgcggcgagcccttcggcgacgagggcttccacgagagagagggcagaccctactgcagaagagacttcctgcagctgttcgcccccagatgccagggctgccagggccccatcctggacaactacatcagcgccctgagcgccctgtggcaccccgactgcttcgtgtgcagagagtgcttcgcccccttcagcggcggcagcttcttcgagcacgagggcagacccctgtgcgagaaccacttccacgccagaagaggcagcctgtgcgccacctgcggcctgcccgtgaccggcagatgcgtgagcgccctgggcagaagattccaccccgaccacttcacctgcaccttctgcctgagacccctgaccaagggcagcttccaggagagagccggcaagccctactgccagccctgcttcctgaagctgttcggctag

SEQ ID NO: 33394 - DNA, 1386 bp, Artificial Sequence
  derived and/or modified sequence
atggaagacctggacgcattactgagcgacctggaaactacaaccagccatatgccccggtctggggcccccaaggagcgaccagccgagccattaacacccccaccctcatacgggcatcagccccaaactggctccggcgagagctcaggagcttccggggacaaggatcacctgtattctactgtctgtaaacctagatcccccaaaccagcagcccccgccgccccccctttttcgtctagctcaggggtgctgggcacggggctgtgtgaactcgacaggctgctccaggaactcaacgctactcagtttaacatcacagacgagataatgtcacagttcccttccagcaaagtggcgagtggtgaacagaaagaagaccagtctgaggacaagaagagaccctccctcccatcttccccatctcctgggttgccaaaggccagcgccacctctgcgactcttgagctggaccggttgatggcaagcctcagcgacttccgcgttcagaatcatctgccagcttccggtccgacccagcctcctgttgtttcatccacgaacgagggctctccctccccccccgaacccacaggtaagggaagcttagacaccatgctcgggttactccagagcgatctgtctagacgaggcgtgccgacccaggccaaggggctttgcggctcgtgcaacaaacctatcgctggccaggtagtcacagccctgggacgggcgtggcaccctgagcacttcgtgtgcggagggtgctcaactgctcttggaggctccagcttctttgagaaggacggtgctcctttttgcccagaatgttatttcgaacgatttagcccaaggtgtgggttttgtaatcagcccattaggcacaagatggtcaccgcgctgggcacccactggcaccccgagcatttttgctgcgtgtcatgcggggaacctttcggggacgaggggttccacgagcgtgagggaaggccttattgcaggagagacttcctgcagcttttcgcccctagatgccaggggtgccaagggcccatactcgataattatatttctgcgctgagcgctctctggcatcctgactgctttgtgtgccgggagtgtttcgcccctttttccggcggctcttttttcgaacatgagggtcgtcccctttgtgagaaccatttccacgcgcgacgcgggtcactgtgtgccacctgtgggcttcccgtgactggccgttgtgtctcagcactgggcaggagatttcaccctgaccatttcacgtgcaccttctgtctgcgtcccctgaccaagggaagttttcaagaaagagccggtaagccctattgccagccctgctttcttaaactttttgggtag

SEQ ID NO: 33395 - DNA, 1386 bp, Artificial Sequence
  derived and/or modified sequence
atggaggacctggatgccctgctgagtgacctggagaccaccaccagccacatgcccaggtctggggcccccaaggagaggcctgctgagcccctgaccccacctccttcctatggccaccagccccagacaggcagcggggagagcagcggggccagcggggacaaggaccacctgtacagcacagtgtgcaagcccaggagccccaagccagctgccccagctgccccacccttcagcagcagcagtggagtgctgggcaccggcctgtgtgagctggaccggctgctgcaggagctgaatgccacccagttcaacatcacagatgagatcatgagccagttccccagcagcaaggtggccagcggggagcagaaggaggaccagagcgaggacaagaagaggcccagcctgcccagcagccccagccctggcctgcccaaggccagcgccaccagcgccaccctggagctggaccggctgatggccagcctgagtgacttccgggtgcagaaccacctgcctgccagcggccccacccagccccctgtggtgagcagcaccaatgaaggcagccccagccccccagagcccaccgggaagggcagcctggacaccatgctgggcctgctgcagagcgacctgagcagaagaggagtgcccacccaggccaagggcctgtgtggcagctgcaacaagcccatcgccggccaggtggtgacagccctgggccgggcctggcaccctgagcactttgtgtgtggcggctgcagcacagccctgggcggcagcagcttctttgagaaggatggagcccccttctgcccagagtgctactttgagcgcttcagcccccgctgtggcttctgcaaccagcccatccgccacaagatggtgacagccctgggcacccactggcaccctgagcacttctgctgcgtgtcctgtggggagccctttggagatgagggcttccacgagcgggagggccggccctactgcagaagagacttcctgcagctgtttgccccccgctgccagggctgccagggccccatcctggacaactacatcagcgccctgagcgccctgtggcacccagactgctttgtgtgccgggagtgctttgcccccttcagcggcggcagcttctttgaacatgagggccggcccctgtgtgagaaccacttccacgcccggcggggcagcctgtgtgccacctgtggcctgcctgtgacaggccgctgtgtgtctgccctgggccgccgcttccacccagaccacttcacctgcaccttctgcctgcggcccctgaccaagggcagcttccaggagagagctgggaagccctactgccagccctgcttcctgaagctgtttggatag

SEQ ID NO: 33396 - DNA, 1386 bp, Artificial Sequence
  derived and/or modified sequence
atggaggacctggacgccctgctgagcgacctggagaccaccacctcccacatgccacgctctggggcaccgaaggaacggcctgccgagccactgactccacccccaagctatggccatcaacctcagaccggaagtggcgagtcctccggtgcaagcggcgacaaagaccatttatatagcaccgtctgtaagcccaggagtcccaagccggcggctccagccgctccacccttctcatctagcagcggagtgctgggtacagggctttgtgagttggaccggcttttgcaggaattgaatgcaactcagtttaacattacggatgaaatcatgtctcagttcccatcgtcaaaggttgcttccggagagcagaaagaagaccagtcggaagacaagaaaagaccaagccttccatcatccccttctcccggattacctaaggcaagcgcaacatccgctaccctcgaattagatagactgatggctagcctgtcagatttccgcgtgcagaaccatcttcccgcaagtggaccaacacagcctcccgtagtgagctctacaaatgaggggagcccctccccaccagaaccaacaggcaagggcagcctggatactatgcttggcctactgcagagcgatctttctaggcgaggagtacctactcaggctaaaggtctttgtggctcttgcaataagcctatcgcgggccaggtggtaaccgcgctgggacgcgcatggcaccccgaacacttcgtgtgcggcgggtgttccacagcgttaggtggcagttcctttttcgaaaaagatggcgcaccattttgccccgagtgttatttcgagcggttcagcccaagatgtggcttttgcaaccaaccaatccgccacaaaatggtcaccgccttaggcacacactggcaccctgagcacttctgttgcgttagttgcggggagcccttcggagacgaaggctttcacgaacgggagggccgaccttattgcagacgcgattttctgcaattgtttgcaccacgctgtcagggctgccaggggcctatcttagacaattacatttccgcactgtcggcactgtggcatccagactgctttgtgtgccgcgagtgcttcgccccgtttagcggagggagctttttcgaacacgaaggacggccattgtgtgaaaatcattttcatgcccgccgaggctccttgtgtgccacatgcggactgcctgtaaccggaaggtgcgtgtccgcactgggccgccgatttcaccccgaccattttacttgcactttctgtcttaggcccttgacgaagggctcttttcaagagagggccgggaagccctattgccagccctgcttcctgaaattatttgggtag

SEQ ID NO: 33397 - DNA, 1386 bp, Artificial Sequence
  derived and/or modified sequence
atggaggacctggacgccctgctcagcgacctggaaactaccacctcccacatgcctcgttcaggggctccgaaggagcgccctgcagagccactgaccccgccaccttcttatgggcaccagccacaaaccggctctggcgagtcctccggtgcttccggggacaaggaccatctctacagcaccgtctgtaaacccaggtcccccaagccagcagctcctgccgctcctcccttcagctcctcctccggagtgctcggaacagggctatgcgagctcgaccggctgttacaagaactgaatgctacacagttcaacatcacagatgaaattatgagccaatttcccagcagtaaggtggctagcggtgaacagaaggaggaccagtcagaagataagaagaggccctcccttccaagcagccctagccccggtctgccaaaagcttcagccacctcagctaccctggagttggacagactgatggcttctttatccgattttcgggttcaaaaccacctgccggcatcaggtcctacccagccacctgtggtctcctccactaacgagggctctcctagccccccagaacccactgggaagggctccttagatacaatgttaggcttattgcaaagtgatttgagtcgacggggtgtgccaacccaggccaaagggctttgtggtagttgtaacaagcccatagctggacaagtagtcacagcgctgggacgcgcatggcaccccgagcacttcgtttgcggaggatgcagtactgccctcggaggcagtagcttctttgaaaaggacggagcacctttctgtccagagtgttatttcgagagattctcaccacgctgcggattctgtaatcagcctattagacacaaaatggtcacagctttaggcacccactggcatcctgagcacttctgctgtgtgagttgtggcgaaccatttggcgacgaaggcttccatgagcgagagggccgaccatactgccggagggattttctccagctgtttgcaccacgctgccagggttgccagggccctatcctagataactacatttccgccctgtctgctctctggcaccctgactgcttcgtttgccgagagtgcttcgcgccattttctggtggttcttttttcgagcacgagggcagacccctgtgcgagaatcacttccacgcacgcagagggagcctgtgcgcgacctgtggactgcccgttactggcaggtgtgtgagtgccttggggcgtaggtttcacccagatcacttcacctgtacgttttgcctgcggcctctcacaaagggctcctttcaagagcgtgcaggaaaaccttattgccaaccctgcttcctaaaactattcggctag

SEQ ID NO: 33398 - DNA, 1386 bp, Artificial Sequence
  derived and/or modified sequence
atggaagatctcgacgctctgctttctgacctcgagacaactacgagccatatgccaagatccggagcacccaaagagcggcccgccgagcctcttaccccacctccttcttacggacaccagccacaaaccggaagcggagaatcaagtggggcatccggagataaagatcacctttattccacagtttgtaaaccacgcagccccaagcctgccgcccccgccgccccgcctttctctagttctagtggcgtcctgggaacggggttatgcgagctggatcgactgcttcaagaacttaatgcgacccagttcaacataacagatgagattatgtcacagttcccttcctccaaggtggcctccggagagcaaaaggaggatcagagcgaagacaaaaagcggccttctctcccgagctctccaagcccaggcctcccgaaagctagcgcaacttctgccacgctcgagcttgaccggttaatggctagccttagtgactttagagtccagaaccatttgccggcaagtgggccaactcagccccccgtggtttcttccaccaatgagggatccccatcccccccagaaccaacaggtaagggtagtctcgatacaatgctcggcttgctgcagtcggacctgagtagacgcggggtgcccacacaggccaagggcctgtgtggctcctgcaacaaacccatcgcaggtcaggtggtaactgcccttggaagagcctggcatccagagcacttcgtgtgcggcggctgttccacagcactcgggggctcatcattttttgagaaggacggcgccccattttgcccggagtgttacttcgaacggttttctcccaggtgcgggttctgcaatcagcctattagacataaaatggtcactgcactcggcactcactggcacccagaacacttctgttgtgtctcctgcggagagccctttggagacgaaggtttccacgagagagaaggtaggccatactgcagaagggattttttgcagttgtttgctccacgctgccagggatgccaaggccctatactagataactacatttcagcattgtcggccctgtggcacccagattgctttgtgtgtagggaatgcttcgcccctttcagcggaggatcatttttcgagcacgagggccggccactctgtgaaaatcattttcacgctaggcggggaagtctgtgcgccacctgtggactgcccgttactgggcggtgcgtgtcagctctgggacggagattccaccccgatcatttcacctgtaccttttgcctgaggcctttgaccaaaggatcatttcaagaacgcgcaggaaagccttactgtcagccgtgcttcctaaaactcttcgggtag

SEQ ID NO: 33399 - DNA, 1386 bp, Artificial Sequence
  derived and/or modified sequence
atggaagaccttgatgcgctgctctcagaccttgaaactacaacctcgcatatgcctcgttccggggcgcctaaggaacgacccgctgaacccctgacgcctccaccctcctacggccaccaaccacagacaggcagcggcgagagctctggtgctagcggggataaagaccacctctactctacagtgtgcaaaccaaggagtcctaaaccagccgctccagccgcacctcccttttcatcatccagcggcgtgctgggcacaggactgtgcgagttggaccgcctcctacaggaactcaacgctacccagtttaacataacagacgagatcatgtctcagtttccgtcaagtaaagtagctagtggcgaacagaaggaagaccaatccgaagataaaaagcgaccatccctccctagttctcctagtcctggcctgcctaaagcatctgccacctcagcaaccttggagctagacagactgatggcctccctgagcgactttcgcgtacagaatcacttgcccgctagcggtccaacccagccacctgtggtgtcttcgactaatgaggggagcccttctccacccgagccaaccggaaagggctccctggataccatgctggggctcctccagtccgacttgtctagacgcggcgtcccaacacaggccaagggactgtgtggatcttgtaataaacccattgctggacaggtcgtcactgctttgggcagagcttggcaccccgaacatttcgtgtgcggcggatgtagcaccgcactcgggggatcttctttctttgaaaaggacggtgccccattttgccccgaatgctattttgaacgcttttctccccgctgcggattttgtaaccagccgatccggcataagatggttacggccctcggcacccactggcatcctgaacatttctgctgcgtatcttgtggcgagccttttggtgatgaaggttttcatgagagagaaggtcgtccttactgcagacgggactttctgcaactgtttgcaccgagatgccagggatgccaaggacccattttggacaactacatttcagccctgtcagcactgtggcatcctgactgctttgtttgcagagaatgcttcgccccctttagcggaggttcttttttcgaacatgaaggccgaccactttgtgagaatcatttccatgcccgcagaggctccttgtgtgcaacctgcgggttgccggtaactggtagatgtgtgtccgcgctgggtcgccgctttcaccctgatcacttcacatgtacattctgcttgcgcccactgaccaaaggcagctttcaagagcgcgctggaaaaccgtattgtcagccatgttttctcaaactcttcgggtag

SEQ ID NO: 33400 - DNA, 1773 bp, Artificial Sequence
  derived and/or modified sequence
ggggccggatccccggatgccctgctctctgacctggagactaccacctcgcacatgccaaggtcaggggctcccaaagagcgccctgcggagcctctcacccctcccccatcctatggccaccagccacagacagggtctggggagtcttcaggagcctcgggggacaaggaccacctgtacagcacggtatgcaagcctcggtccccaaagcctgcagccccggcggcccctccattctcctcttccagcggtgtcttgggtaccgggctctgtgagctagatcggttgcttcaggaacttaatgccactcagttcaacatcacagatgaaatcatgtctcagttcccatctagcaaggtggcttcaggagagcagaaggaggaccagtctgaagataagaaaagacccagcctcccttccagcccgtctcctggcctcccaaaggcttctgccacctcagccactctggagctggatagactgatggcctcactctctgacttccgcgttcaaaaccatcttccagcctctgggccaactcagccaccggtggtgagctccacaaatgagggctccccatccccaccagagccgactggcaagggcagcctagacaccatgctggggctgctgcagtccgacctcagccgccggggtgttcccacccaggccaaaggcctctgtggctcctgcaataaacctattgctgggcaagtggtgacggctctgggccgcgcctggcaccccgagcacttcgtttgcggaggctgttccaccgccctgggaggcagcagcttcttcgagaaggatggagcccccttctgccccgagtgctactttgagcgcttctcgccaagatgtggcttctgcaaccagcccatccgacacaagatggtgaccgccttgggcactcactggcacccagagcatttctgctgcgtcagttgcggggagcccttcggagatgagggtttccacgagcgcgagggccgcccctactgccgccgggacttcctgcagctgttcgccccgcgctgccagggctgccagggccccatcctggataactacatctcggcgctcagcgcgctctggcacccggactgtttcgtctgcagggaatgcttcgcgcccttctcgggaggcagctttttcgagcacgagggccgcccgttgtgcgagaaccacttccacgcacgacgcggctcgctgtgcgccacgtgtggcctccctgtgaccggccgctgcgtgtcggccctgggtcgccgcttccacccggaccacttcacatgcaccttctgcctgcgcccgctcaccaaggggtccttccaggagcgcgccggcaagccctactgccagccctgcttcctgaagctcttcggctgacagcccgctcggctcgccctctcccccggaggccgcgccctcccggaaaagccgggtcctccagaccccgaggccttgctctcagagcgggaggccccacccactggagagccccgcccctaaggtactatgagtcctcaggggtcaagttcagaaacggcccagccagacctaaacccacacgcccacaaagtggattgcacacagacaagaactcccgtgcgggcctccactctattcccacccttgagggagcccccttactgggggagggtccttgcaattccagcgaatcggaggccaggccaggacgtccttgctccctgcaccctcactgttctgtgcactttttctacctacataaacacacgcattccacctctc

SEQ ID NO: 33401 - DNA, 1803 bp, Artificial Sequence
  derived and/or modified sequence
ggagaataaaataatcaggaggctgggtttgtgcttggctccaagcatgccctgctctctgacctggagactaccacctcgcacatgccaaggtcaggggctcccaaagagcgccctgcggagcctctcacccctcccccatcctatggccaccagccacagacagggtctggggagtcttcaggagcctcgggggacaaggaccacctgtacagcacggtatgcaagcctcggtccccaaagcctgcagccccggcggcccctccattctcctcttccagcggtgtcttgggtaccgggctctgtgagctagatcggttgcttcaggaacttaatgccactcagttcaacatcacagatgaaatcatgtctcagttcccatctagcaaggtggcttcaggagagcagaaggaggaccagtctgaagataagaaaagacccagcctcccttccagcccgtctcctggcctcccaaaggcttctgccacctcagccactctggagctggatagactgatggcctcactctctgacttccgcgttcaaaaccatcttccagcctctgggccaactcagccaccggtggtgagctccacaaatgagggctccccatccccaccagagccgactggcaagggcagcctagacaccatgctggggctgctgcagtccgacctcagccgccggggtgttcccacccaggccaaaggcctctgtggctcctgcaataaacctattgctgggcaagtggtgacggctctgggccgcgcctggcaccccgagcacttcgtttgcggaggctgttccaccgccctgggaggcagcagcttcttcgagaaggatggagcccccttctgccccgagtgctactttgagcgcttctcgccaagatgtggcttctgcaaccagcccatccgacacaagatggtgaccgccttgggcactcactggcacccagagcatttctgctgcgtcagttgcggggagcccttcggagatgagggtttccacgagcgcgagggccgcccctactgccgccgggacttcctgcagctgttcgccccgcgctgccagggctgccagggccccatcctggataactacatctcggcgctcagcgcgctctggcacccggactgtttcgtctgcagggaatgcttcgcgcccttctcgggaggcagctttttcgagcacgagggccgcccgttgtgcgagaaccacttccacgcacgacgcggctcgctgtgcgccacgtgtggcctccctgtgaccggccgctgcgtgtcggccctgggtcgccgcttccacccggaccacttcacatgcaccttctgcctgcgcccgctcaccaaggggtccttccaggagcgcgccggcaagccctactgccagccctgcttcctgaagctcttcggctgacagcccgctcggctcgccctctcccccggaggccgcgccctcccggaaaagccgggtcctccagaccccgaggccttgctctcagagcgggaggccccacccactggagagccccgcccctaaggtactatgagtcctcaggggtcaagttcagaaacggcccagccagacctaaacccacacgcccacaaagtggattgcacacagacaagaactcccgtgcgggcctccactctattcccacccttgagggagcccccttactgggggagggtccttgcaattccagcgaatcggaggccaggccaggacgtccttgctccctgcaccctcactgttctgtgcactttttctacctacataaacacacgcattccacctctc

SEQ ID NO: 33402 - DNA, 1886 bp, Artificial Sequence
  derived and/or modified sequence
cggcttccttacatggtcacggccgggcttccagctcccggacgtcccccgccccccgcccccaccggacacggcccccgccctgttcgccccgcgccaccggcccgcgccccgccatggaggacctggatgccctgctctctgacctggagactaccacctcgcacatgccaaggtcaggggctcccaaagagcgccctgcggagcctctcacccctcccccatcctatggccaccagccacagacagggtctggggagtcttcaggagcctcgggggacaaggaccacctgtacagcacggtatgcaagcctcggtccccaaagcctgcagccccggcggcccctccattctcctcttccagcggtgtcttgggtaccgggctctgtgagctagatcggttgcttcaggaacttaatgccactcagttcaacatcacagatgaaatcatgtctcagttcccatctagcaaggtggcttcaggagagcagaaggaggaccagtctgaagataagaaaagacccagcctcccttccagcccgtctcctggcctcccaaaggcttctgccacctcagccactctggagctggatagactgatggcctcactctctgacttccgcgttcaaaaccatcttccagcctctgggccaactcagccaccggtggtgagctccacaaatgagggctccccatccccaccagagccgactggcaagggcagcctagacaccatgctggggctgctgcagtccgacctcagccgccggggtgttcccacccaggccaaaggcctctgtggctcctgcaataaacctattgctgggcaagtggtgacggctctgggccgcgcctggcaccccgagcacttcgtttgcggaggctgttccaccgccctgggaggcagcagcttcttcgagaaggatggagcccccttctgccccgagtgctactttgagcgcttctcgccaagatgtggcttctgcaaccagcccatccgacacaagatggtgaccgccttgggcactcactggcacccagagcatttctgctgcgtcagttgcggggagcccttcggagatgagggtttccacgagcgcgagggccgcccctactgccgccgggacttcctgcagctgttcgccccgcgctgccagggctgccagggccccatcctggataactacatctcggcgctcagcgcgctctggcacccggactgtttcgtctgcagggaatgcttcgcgcccttctcgggaggcagctttttcgagcacgagggccgcccgttgtgcgagaaccacttccacgcacgacgcggctcgctgtgcgccacgtgtggcctccctgtgaccggccgctgcgtgtcggccctgggtcgccgcttccacccggaccacttcacatgcaccttctgcctgcgcccgctcaccaaggggtccttccaggagcgcgccggcaagccctactgccagccctgcttcctgaagctcttcggctgacagcccgctcggctcgccctctcccccggaggccgcgccctcccggaaaagccgggtcctccagaccccgaggccttgctctcagagcgggaggccccacccactggagagccccgcccctaaggtactatgagtcctcaggggtcaagttcagaaacggcccagccagacctaaacccacacgcccacaaagtggattgcacacagacaagaactcccgtgcgggcctccactctattcccacccttgagggagcccccttactgggggagggtccttgcaattccagcgaatcggaggccaggccaggacgtccttgctccctgcaccctcactgttctgtgcactttttctacctacataaacacacgcattccacctctc

SEQ ID NO: 33403 - RNA, 1386 nt, Artificial Sequence
  derived and/or modified sequence
auggaagaucucgacgcucugcuuucugaccucgagacaacuacgagccauaugccaagauccggagcacccaaagagcggcccgccgagccucuuaccccaccuccuucuuacggacaccagccacaaaccggaagcggagaaucaaguggggcauccggagauaaagaucaccuuuauuccacaguuuguaaaccacgcagccccaagccugccgcccccgccgccccgccuuucucuaguucuaguggcguccugggaacgggguuaugcgagcuggaucgacugcuucaagaacuuaaugcgacccaguucaacauaacagaugagauuaugucacaguucccuuccuccaagguggccuccggagagcaaaaggaggaucagagcgaagacaaaaagcggccuucucucccgagcucuccaagcccaggccucccgaaagcuagcgcaacuucugccacgcucgagcuugaccgguuaauggcuagccuuagugacuuuagaguccagaaccauuugccggcaagugggccaacucagccccccgugguuucuuccaccaaugagggauccccaucccccccagaaccaacagguaaggguagucucgauacaaugcucggcuugcugcagucggaccugaguagacgcggggugcccacacaggccaagggccuguguggcuccugcaacaaacccaucgcaggucaggugguaacugcccuuggaagagccuggcauccagagcacuucgugugcggcggcuguuccacagcacucgggggcucaucauuuuuugagaaggacggcgccccauuuugcccggaguguuacuucgaacgguuuucucccaggugcggguucugcaaucagccuauuagacauaaaauggucacugcacucggcacucacuggcacccagaacacuucuguugugucuccugcggagagcccuuuggagacgaagguuuccacgagagagaagguaggccauacugcagaagggauuuuuugcaguuguuugcuccacgcugccagggaugccaaggcccuauacuagauaacuacauuucagcauugucggcccuguggcacccagauugcuuuguguguagggaaugcuucgccccuuucagcggaggaucauuuuucgagcacgagggccggccacucugugaaaaucauuuucacgcuaggcggggaagucugugcgccaccuguggacugcccguuacugggcggugcgugucagcucugggacggagauuccaccccgaucauuucaccuguaccuuuugccugaggccuuugaccaaaggaucauuucaagaacgcgcaggaaagccuuacugucagccgugcuuccuaaaacucuucggguag

SEQ ID NO: 33404 - RNA, 1386 nt, Artificial Sequence
  derived and/or modified sequence
auggaagaccuugaugcgcugcucucagaccuugaaacuacaaccucgcauaugccucguuccggggcgccuaaggaacgacccgcugaaccccugacgccuccacccuccuacggccaccaaccacagacaggcagcggcgagagcucuggugcuagcggggauaaagaccaccucuacucuacagugugcaaaccaaggaguccuaaaccagccgcuccagccgcaccucccuuuucaucauccagcggcgugcugggcacaggacugugcgaguuggaccgccuccuacaggaacucaacgcuacccaguuuaacauaacagacgagaucaugucucaguuuccgucaaguaaaguagcuaguggcgaacagaaggaagaccaauccgaagauaaaaagcgaccaucccucccuaguucuccuaguccuggccugccuaaagcaucugccaccucagcaaccuuggagcuagacagacugauggccucccugagcgacuuucgcguacagaaucacuugcccgcuagcgguccaacccagccaccuguggugucuucgacuaaugaggggagcccuucuccacccgagccaaccggaaagggcucccuggauaccaugcuggggcuccuccaguccgacuugucuagacgcggcgucccaacacaggccaagggacuguguggaucuuguaauaaacccauugcuggacaggucgucacugcuuugggcagagcuuggcaccccgaacauuucgugugcggcggauguagcaccgcacucgggggaucuucuuucuuugaaaaggacggugccccauuuugccccgaaugcuauuuugaacgcuuuucuccccgcugcggauuuuguaaccagccgauccggcauaagaugguuacggcccucggcacccacuggcauccugaacauuucugcugcguaucuuguggcgagccuuuuggugaugaagguuuucaugagagagaaggucguccuuacugcagacgggacuuucugcaacuguuugcaccgagaugccagggaugccaaggacccauuuuggacaacuacauuucagcccugucagcacuguggcauccugacugcuuuguuugcagagaaugcuucgcccccuuuagcggagguucuuuuuucgaacaugaaggccgaccacuuugugagaaucauuuccaugcccgcagaggcuccuugugugcaaccugcggguugccgguaacugguagauguguguccgcgcugggucgccgcuuucacccugaucacuucacauguacauucugcuugcgcccacugaccaaaggcagcuuucaagagcgcgcuggaaaaccguauugucagccauguuuucucaaacucuucggguag

SEQ ID NO: 33405 - protein, 1133 aa, Artificial Sequence
  derived and/or modified sequence
MRSRGSDTEGSAQKKFPRHTKGHSFQGPKNMKHRQQDKDSPSESDVILPCPKAEKPHSGNGHQAEDLSRDDLLFLLSILEGELQARDEVIGILKAEKMDLALLEAQYGFVTPKKVLEALQRDAFQAKSTPWQEDIYEKPMNELDKVVEKHKESYRRILGQLLVAEKSRRQTILELEEEKRKHKEYMEKSDEFICLLEQECERLKKLIDQEIKSQEEKEQEKEKRVTTLKEELTKLKSFALMVVDEQQRLTAQLTLQRQKIQELTTNAKETHTKLALAEARVQEEEQKATRLEKELQTQTTKFHQDQDTIMAKLTNEDSQNRQLQQKLAALSRQIDELEETNRSLRKAEEELQDIKEKISKGEYGNAGIMAEVEELRKRVLDMEGKDEELIKMEEQCRDLNKRLERETLQSKDFKLEVEKLSKRIMALEKLEDAFNKSKQECYSLKCNLEKERMTTKQLSQELESLKVRIKELEAIESRLEKTEFTLKEDLTKLKTLTVMFVDERKTMSEKLKKTEDKLQAASSQLQVEQNKVTTVTEKLIEETKRALKSKTDVEEKMYSVTKERDDLKNKLKAEEEKGNDLLSRVNMLKNRLQSLEAIEKDFLKNKLNQDSGKSTTALHQENNKIKELSQEVERLKLKLKDMKAIEDDLMKTEDEYETLERRYANERDKAQFLSKELEHVKMELAKYKLAEKTETSHEQWLFKRLQEEEAKSGHLSREVDALKEKIHEYMATEDLICHLQGDHSVLQKKLNQQENRNRDLGREIENLTKELERYRHFSKSLRPSLNGRRISDPQVFSKEVQTEAVDNEPPDYKSLIPLERAVINGQLYEESENQDEDPNDEGSVLSFKCSQSTPCPVNRKLWIPWMKSKEGHLQNGKMQTKPNANFVQPGDLVLSHTPGQPLHIKVTPDHVQNTATLEITSPTTESPHSYTSTAVIPNCGTPKQRITILQNASITPVKSKTSTEDLMNLEQGMSPITMATFARAQTPESCGSLTPERTMSPIQVLAVTGSASSPEQGRSPEPTEISAKHAIFRVSPDRQSSWQFQRSNSNSSSVITTEDNKIHIHLGSPYMQAVASPVRPASPSAPLQDNRTQGLINGALNKTTNKVTSSITITPTATPLPRQSQITVSNIYN

SEQ ID NO: 33406 - protein, 255 aa, Artificial Sequence
  derived and/or modified sequence
MRSRGSDTEGSAQKKFPRHTKGHSFQGPKNMKHRQQDKDSPSESDVILPCPKAEKPHSGNGHQAEDLSRDDLLFLLSILEGELQARDEVIGILKAEKMDLALLEAQYGFVTPKKVLEALQRDAFQAKSTPWQEDIYEKPMNELDKVVEKHKESYRRILGQLLVAEKSRRQTILELEEEKRKHKEYMEKSDEFICLLEQECERWSLALLPRLECNGMILAHCNLCLLGSSDSPASAFQVAGITGTRHHAQLVFVFL

SEQ ID NO: 33407 - DNA, 4219 bp, Artificial Sequence
  derived and/or modified sequence
acacacacacacacacacagacgtgctcacggagcctgtgcctgcctctacttgtctgctctgcgcagatggttcctggcttttgggtcacctcatcctgcagcccagtccagttagaacctttcttccacagagactggcaagctgtggggtaagagttttggtaaggctgcctgtcttcagagcatgaaggacactgcccggagagggaagagggcaatatttagtgtttgggcctacttgttgttgggctccccactgcctctcctttgcagagctatcactggcccctggttgcaaactctcggtggctttcaagcctacaaaacaaaaactgagagggtgtccaaaaagagaagaagaaaacgttgttgttggtcctggattccactgttggattttggtggggatgagaagaaggaattaccaggtgtgatcaacacctgcacggtacctgcacggctttaaagaatgcgttccagaggcagtgataccgagggctcagcccaaaagaaatttccaagacatactaaaggccacagtttccaagggcctaaaaacatgaagcatagacagcaagacaaagactcccccagtgagtcggatgtaatacttccgtgtcccaaggcagagaagccacacagtggtaatggccaccaagcagaagacctctcaagagatgacctgttatttctcctcagcattctggagggagaactgcaggctcgagatgaggtcataggcattttaaaggctgaaaaaatggacctggctttgctggaagctcagtatgggtttgtcactccaaaaaaggtgttagaggctctccagagagatgcttttcaagcgaaatctaccccttggcaggaggacatctatgagaaaccaatgaatgagttggacaaagttgtggaaaaacataaagaatcttacagacgaatcctgggacagcttttagtggcagaaaaatcccgtaggcaaaccatattggagttggaggaagaaaagagaaaacataaagaatacatggagaagagtgatgaattcatatgcctactagaacaggaatgtgaaagattaaagaagctaattgatcaagaaatcaagtctcaggaggagaaggagcaagaaaaggagaaaagggtcaccaccctgaaagaggagctgaccaagctgaagtcttttgctttgatggtggtggatgaacagcaaaggctgacggcacagctcacccttcaaagacagaaaatccaagagctgaccacaaatgcaaaggaaacacataccaaactagcccttgctgaagccagagttcaggaggaagagcagaaggcaaccagactagagaaggaactgcaaacgcagaccacaaagtttcaccaagaccaagacacaattatggcgaagctcaccaatgaggacagtcaaaatcgccagcttcaacaaaagctggcagcactcagccggcagattgatgagttagaagagacaaacaggtctttacgaaaagcagaagaggagctgcaagatataaaagaaaaaatcagtaagggagaatatggaaacgctggtatcatggctgaagtggaagagctcaggaaacgtgtgctagatatggaagggaaagatgaagagctcataaaaatggaggagcagtgcagagatctcaataagaggcttgaaagggagacgttacagagtaaagactttaaactagaggttgaaaaactcagtaaaagaattatggctctggaaaagttagaagacgctttcaacaaaagcaaacaagaatgctactctctgaaatgcaatttagaaaaagaaaggatgaccacaaagcagttgtctcaagaactggagagtttaaaagtaaggatcaaagagctagaagccattgaaagtcggctagaaaagacagaattcactctaaaagaggatttaactaaactgaaaacattaactgtgatgtttgtagatgaacggaaaacaatgagtgaaaaattaaagaaaactgaagataaattacaagctgcttcttctcagcttcaagtggagcaaaataaagtaacaacagttactgagaagttaattgaggaaactaaaagggcgctcaagtccaaaaccgatgtagaagaaaagatgtacagcgtaaccaaggagagagatgatttaaaaaacaaattgaaagcggaagaagagaaaggaaatgatctcctgtcaagagttaatatgttgaaaaataggcttcaatcattggaagcaattgagaaagatttcctaaaaaacaaattaaatcaagactctgggaaatccacaacagcattacaccaagaaaacaataagattaaggagctctctcaagaagtggaaagactgaaactgaagctaaaggacatgaaagccattgaggatgacctcatgaaaacagaagatgaatatgagactctagaacgaaggtatgctaatgaacgagacaaagctcaatttttatctaaagagctagaacatgttaaaatggaacttgctaagtacaagttagcagaaaagacagagaccagccatgaacaatggcttttcaaaaggcttcaagaagaagaagctaagtcagggcacctctcaagagaagtggatgcattaaaagagaaaattcatgaatacatggcaactgaagacctaatatgtcacctccagggagatcactcagtcctgcaaaaaaaactaaatcaacaagaaaacaggaacagagatttaggaagagagattgaaaacctcactaaggagttagagaggtaccggcatttcagtaagagcctcaggcctagtctcaatggaagaagaatttccgatcctcaagtattttctaaagaagttcagacagaagcagtagacaatgaaccacctgattacaagagcctcattcctctggaacgtgcagtcatcaatggtcagttatatgaggagagtgagaatcaagacgaggaccctaatgatgagggatctgtgctgtccttcaaatgcagccagtctactccatgtcctgttaacagaaagctatggattccctggatgaaatccaaggagggccatcttcagaatggaaaaatgcaaactaaacccaatgccaactttgtgcaacctggagatctagtcctaagccacacacctgggcagccacttcatataaaggttactccagaccatgtacaaaacacagccactcttgaaatcacaagtccaaccacagagagtcctcactcttacacgagtactgcagtgataccgaactgtggcacgccaaagcaaaggataaccatcctccaaaacgcctccataacaccagtaaagtccaaaacctctaccgaagacctcatgaatttagaacaaggcatgtccccaattaccatggcaacctttgccagagcacagaccccagagtcttgtggttctctaactccagaaaggacaatgtcccctattcaggttttggctgtgactggttcagctagctctcctgagcagggacgctccccagaaccaacagaaatcagtgccaagcatgcgatattcagagtctccccagaccggcagtcatcatggcagtttcagcgttcaaacagcaatagctcaagtgtgataactactgaggataataaaatccacattcacttaggaagtccttacatgcaagctgtagccagccctgtgagacctgccagcccttcagcaccactgcaggataaccgaactcaaggcttaattaacggggcactaaacaaaacaaccaataaagtcaccagcagtattactatcacaccaacagccacacctcttcctcgacaatcacaaattacagtaagtaatatatataactgaccacgctcaccctcatccagtccatactgatatttttgcaaggaactcaatccttttttaatcatccctccatatcccccaagactgactgaactcgtactttgggaaggtttgtgcatgaactatacaagagtatctgaaactaactgttgcctgcatagtcatatcgagtgtgcacttactgtatatcttttcatttacatacttgtatggaaaatatttagtctgcacttgtataaatacatctttatgtatttcattttccataactcactttaatttgactgcaacttgtcttggtgaaatactttaacattataaaacagtaaataatttgttattttta

SEQ ID NO: 33408 - DNA, 3274 bp, Artificial Sequence
  derived and/or modified sequence
ataggccgggcgcgctcagcgccccgctcgcattgttcgggcgactctcggagcgcgcacagtcggctcgcagcgcggcactacagcggccccggcccggcccccgcccggccccggcgcaggcagttcagattaaagaagctaattgatcaagaaatcaagtctcaggaggagaaggagcaagaaaaggagaaaagggtcaccaccctgaaagaggagctgaccaagctgaagtcttttgctttgatggtggtggatgaacagcaaaggctgacggcacagctcacccttcaaagacagaaaatccaagagctgaccacaaatgcaaaggaaacacataccaaactagcccttgctgaagccagagttcaggaggaagagcagaaggcaaccagactagagaaggaactgcaaacgcagaccacaaagtttcaccaagaccaagacacaattatggcgaagctcaccaatgaggacagtcaaaatcgccagcttcaacaaaagctggcagcactcagccggcagattgatgagttagaagagacaaacaggtctttacgaaaagcagaagaggagctgcaagatataaaagaaaaaatcagtaagggagaatatggaaacgctggtatcatggctgaagtggaagagctcaggaaacgtgtgctagatatggaagggaaagatgaagagctcataaaaatggaggagcagtgcagagatctcaataagaggcttgaaagggagacgttacagagtaaagactttaaactagaggttgaaaaactcagtaaaagaattatggctctggaaaagttagaagacgctttcaacaaaagcaaacaagaatgctactctctgaaatgcaatttagaaaaagaaaggatgaccacaaagcagttgtctcaagaactggagagtttaaaagtaaggatcaaagagctagaagccattgaaagtcggctagaaaagacagaattcactctaaaagaggatttaactaaactgaaaacattaactgtgatgtttgtagatgaacggaaaacaatgagtgaaaaattaaagaaaactgaagataaattacaagctgcttcttctcagcttcaagtggagcaaaataaagtaacaacagttactgagaagttaattgaggaaactaaaagggcgctcaagtccaaaaccgatgtagaagaaaagatgtacagcgtaaccaaggagagagatgatttaaaaaacaaattgaaagcggaagaagagaaaggaaatgatctcctgtcaagagttaatatgttgaaaaataggcttcaatcattggaagcaattgagaaagatttcctaaaaaacaaattaaatcaagactctgggaaatccacaacagcattacaccaagaaaacaataagattaaggagctctctcaagaagtggaaagactgaaactgaagctaaaggacatgaaagccattgaggatgacctcatgaaaacagaagatgaatatgagactctagaacgaaggtatgctaatgaacgagacaaagctcaatttttatctaaagagctagaacatgttaaaatggaacttgctaagtacaagttagcagaaaagacagagaccagccatgaacaatggcttttcaaaaggcttcaagaagaagaagctaagtcagggcacctctcaagagaagtggatgcattaaaagagaaaattcatgaatacatggcaactgaagacctaatatgtcacctccagggagatcactcagtcctgcaaaaaaaactaaatcaacaagaaaacaggaacagagatttaggaagagagattgaaaacctcactaaggagttagagaggtaccggcatttcagtaagagcctcaggcctagtctcaatggaagaagaatttccgatcctcaagtattttctaaagaagttcagacagaagcagtagacaatgaaccacctgattacaagagcctcattcctctggaacgtgcagtcatcaatggtcagttatatgaggagagtgagaatcaagacgaggaccctaatgatgagggatctgtgctgtccttcaaatgcagccagtctactccatgtcctgttaacagaaagctatggattccctggatgaaatccaaggagggccatcttcagaatggaaaaatgcaaactaaacccaatgccaactttgtgcaacctggagatctagtcctaagccacacacctgggcagccacttcatataaaggttactccagaccatgtacaaaacacagccactcttgaaatcacaagtccaaccacagagagtcctcactcttacacgagtactgcagtgataccgaactgtggcacgccaaagcaaaggataaccatcctccaaaacgcctccataacaccagtaaagtccaaaacctctaccgaagacctcatgaatttagaacaaggcatgtccccaattaccatggcaacctttgccagagcacagaccccagagtcttgtggttctctaactccagaaaggacaatgtcccctattcaggttttggctgtgactggttcagctagctctcctgagcagggacgctccccagaaccaacagaaatcagtgccaagcatgcgatattcagagtctccccagaccggcagtcatcatggcagtttcagcgttcaaacagcaatagctcaagtgtgataactactgaggataataaaatccacattcacttaggaagtccttacatgcaagctgtagccagccctgtgagacctgccagcccttcagcaccactgcaggataaccgaactcaaggcttaattaacggggcactaaacaaaacaaccaataaagtcaccagcagtattactatcacaccaacagccacacctcttcctcgacaatcacaaattacagtaagtaatatatataactgaccacgctcaccctcatccagtccatactgatatttttgcaaggaactcaatccttttttaatcatccctccatatcccccaagactgactgaactcgtactttgggaaggtttgtgcatgaactatacaagagtatctgaaactaactgttgcctgcatagtcatatcgagtgtgcacttactgtatatcttttcatttacatacttgtatggaaaatatttagtctgcacttgtataaatacatctttatgtatttcattttccataactcactttaatttgactgcaacttgtcttggtgaaatactttaacattataaaacagtaaataatttgttattttta

SEQ ID NO: 33409 - DNA, 1712 bp, Artificial Sequence
  derived and/or modified sequence
acacacacacacacacacagacgtgctcacggagcctgtgcctgcctctacttgtctgctctgcgcagatggttcctggcttttgggtcacctcatcctgcagcccagtccagttagaacctttcttccacagagactggcaagctgtggggtaagagttttggtaaggctgcctgtcttcagagcatgaaggacactgcccggagagggaagagggcaatatttagtgtttgggcctacttgttgttgggctccccactgcctctcctttgcagagctatcactggcccctggttgcaaactctcggtggctttcaagcctacaaaacaaaaactgagagggtgtccaaaaagagaagaagaaaacgttgttgttggtcctggattccactgttggattttggtggggatgagaagaaggaattaccaggtgtgatcaacacctgcacggtacctgcacggctttaaagaatgcgttccagaggcagtgataccgagggctcagcccaaaagaaatttccaagacatactaaaggccacagtttccaagggcctaaaaacatgaagcatagacagcaagacaaagactcccccagtgagtcggatgtaatacttccgtgtcccaaggcagagaagccacacagtggtaatggccaccaagcagaagacctctcaagagatgacctgttatttctcctcagcattctggagggagaactgcaggctcgagatgaggtcataggcattttaaaggctgaaaaaatggacctggctttgctggaagctcagtatgggtttgtcactccaaaaaaggtgttagaggctctccagagagatgcttttcaagcgaaatctaccccttggcaggaggacatctatgagaaaccaatgaatgagttggacaaagttgtggaaaaacataaagaatcttacagacgaatcctgggacagcttttagtggcagaaaaatcccgtaggcaaaccatattggagttggaggaagaaaagagaaaacataaagaatacatggagaagagtgatgaattcatatgcctactagaacaggaatgtgaaagatggagtctagctctgctgccgaggctggagtgcaatggcatgatcttggctcactgcaatctctgcctcctgggttcaagtgattctcctgcctcagcattccaagtagctgggattacaggcacccgccatcatgcccagctagtttttgtatttttgtagagacagagtttcaccatgttggccaggctagtcttgaacccctgacctcaggtgatccacccacctcggcctcccaaagtgctgggataacaggcatgagccaacgcgcttgacttgcacatatatttttaatgtgtgagtgggtgcatgtcataattccagatggaaatttgtcaccacaaaacataatttttatttagctgatctttccaggtttctatttataatggaatgaaaagatgaagttgggcttatgaatcaagacaaacacaggccctggtcattgtgtaattccatatagtataatttgtttgcaatctttcattccatacacctacaatacagctctaaaaataatgctacctacaatataaagatatactttttttccaaataaccttcaaaaatgtcaaaatatgcaacaaaaatattgtatcatatctaaaccctcaaataagctacatttaaaccaa

SEQ ID NO: 33410 - DNA, 2837 bp, Artificial Sequence
  derived and/or modified sequence
ggagcgcgcacagtcggctcgcagcgcggcactacagcggccccggcccggcccccgcccggccccggcgcaggcagttcagattaaagaagctaattgatcaagaaatcaagtctcaggaggagaaggagcaagaaaaggagaaaagggtcaccaccctgaaagaggagctgaccaagctgaagtcttttgctttgatggtggtggatgaacagcaaaggctgacggcacagctcacccttcaaagacagaaaatccaagagctgaccacaaatgcaaaggaaacacataccaaactagcccttgctgaagccagagttcaggaggaagagcagaaggcaaccagactagagaaggaactgcaaacgcagaccacaaagtttcaccaagaccaagacacaattatggcgaagctcaccaatgaggacagtcaaaatcgccagcttcaacaaaagctggcagcactcagccggcagattgatgagttagaagagacaaacaggtctttacgaaaagcagaagaggagctgcaagatataaaagaaaaaatcagtaagggagaatatggaaacgctggtatcatggctgaagtggaagagctcataaaaatggaggagcagtgcagagatctcaataagaggcttgaaagggagacgttacagagtaaagactttaaactagaggttgaaaaactcagtaaaagaattatggctctggaaaagttagaagacgctttcaacaaaagcaaacaagaatgctactctctgaaatgcaatttagaaaaagaaaggatgaccacaaagcagttgtctcaagaactggagagtttaaaagtaaggatcaaagagctagaagccattgaaagtcggctagaaaagacagaattcactctaaaagaggatttaactaaactgaaaacattaactgtgatgtttgtagatgaacggaaaacaatgagtgaaaaattaaagaaaactgaagataaattacaagctgcttcttctcagcttcaagtggagcaaaataaagtaacaacagttactgagaagttaattgaggaaactaaaagggcgctcaagtccaaaaccgatgtagaagaaaagatgtacagcgtaaccaaggagagagatgatttaaaaaacaaattgaaagcggaagaagagaaaggaaatgatctcctgtcaagagttaatatgttgaaaaataggcttcaatcattggaagcaattgagaaagatttcctaaaaaacaaattaaatcaagactctgggaaatccacaacagcattacaccaagaaaacaataagattaaggagctctctcaagaagtggaaagactgaaactgaagctaaaggacatgaaagccattgaggatgacctcatgaaaacagaagatgaatatgagactctagaacgaaggtatgctaatgaacgagacaaagctcaatttttatctaaagagctagaacatgttaaaatggaacttgctaagtacaagttagcagaaaagacagagaccagccatgaacaatggcttttcaaaaggcttcaagaagaagaagctaagtcagggcacctctcaagagaagtggatgcattaaaagagaaaattcatgaatacatggcaactgaagacctaatatgtcacctccagggagatcactcagtcctgcaaaaaaaactaaatcaacaagaaaacaggaacagagatttaggaagagagattgaaaacctcactaaggagttagagaggtaccggcatttcagtaagagcctcaggcctagtctcaatggaagaagaatttccgatcctcaagtattttctaaagaagttcagacagaagcagtagacaatgaaccacctgattacaagagcctcattcctctggaacgtgcagtcatcaatggtcagttatatgaggagagtgagaatcaagacgaggaccctaatgatgagggatctgtgctgtccttcaaatgcagccagtctactccatgtcctgttaacagaaagctatggattccctggatgaaatccaaggagggccatcttcagaatggaaaaatgcaaactaaacccaatgccaactttgtgcaacctggagatctagtcctaagccacacacctgggcagccacttcatataaaggttactccagaccatgtacaaaacacagccactcttgaaatcacaagtccaaccacagagagtcctcactcttacacgagtactgcagtgataccgaactgtggcacgccaaagcaaaggataaccatcctccaaaacgcctccataacaccagtaaagtccaaaacctctaccgaagacctcatgaatttagaacaaggcatgtccccaattaccatggcaacctttgccagagcacagaccccagagtcttgtggttctctaactccagaaaggacaatgtcccctattcaggttttggctgtgactggttcagctagctctcctgagcagggacgctccccagaaccaacagaaatcagtgccaagcatgcgatattcagagtctccccagaccggcagtcatcatggcagtttcagcgttcaaacagcaatagctcaagtgtgataactactgaggataataaaatccacattcacttaggaagtccttacatgcaagctgtagccagccctgtgagacctgccagcccttcagcaccactgcaggataaccgaactcaaggcttaattaacggggcactaaacaaaacaaccaataaagtcaccagcagtattactatcacaccaacagccacacctcttcctcgacaatcacaaattacagtaagtaatatatataactga

SEQ ID NO: 33411 - DNA, 2898 bp, Artificial Sequence
  derived and/or modified sequence
acagtcggctcgcagcgcggcactacagcggccccggcccggcccccgcccggccccggcgcaggcagttcagggaagcccaccataatgagaagagcggggccaacacccatgtcactgtggagaagtacagaatatgcaatggaagagttgtttatctgatataagcggtaattggaaactgaaaaattcctgctctggaaaaaagatattctgctcttctgaatctaacagaggaagagacaaacagaaaccatcaattattgtttcagattaaagaagctaattgatcaagaaatcaagtctcaggaggagaaggagcaagaaaaggagaaaagggtcaccaccctgaaagaggagctgaccaagctgaagtcttttgctttgatggtggtggatgaacagcaaaggctgacggcacagctcacccttcaaagacagaaaatccaagagctgaccacaaatgcaaaggaaacacataccaaactagcccttgctgaagccagagttcaggaggaagagcagaaggcaaccagactagagaaggaactgcaaacgcagaccacaaagtttcaccaagaccaagacacaattatggcgaagctcaccaatgaggacagtcaaaatcgccagcttcaacaaaagctggcagcactcagccggcagattgatgagttagaagagacaaacaggtctttacgaaaagcagaagaggagctgcaagatataaaagaaaaaatcagtaagggagaatatggaaacgctggtatcatggctgaagtggaagagctcaggaaacgtgtgctagatatggaagggaaagatgaagagctcataaaaatggaggagcagtgcagagatctcaataagaggcttgaaagggagacgttacagagtaaagactttaaactagaggttgaaaaactcagtaaaagaattatggctctggaaaagttagaagacgctttcaacaaaagcaaacaagaatgctactctctgaaatgcaatttagaaaaagaaaggatgaccacaaagcagttgtctcaagaactggagagtttaaaagtaaggatcaaagagctagaagccattgaaagtcggctagaaaagacagaattcactctaaaagaggatttaactaaactgaaaacattaactgtgatgtttgtagatgaacggaaaacaatgagtgaaaaattaaagaaaactgaagataaattacaagctgcttcttctcagcttcaagtggagcaaaataaagtaacaacagttactgagaagttaattgaggaaactaaaagggcgctcaagtccaaaaccgatgtagaagaaaagatgtacagcgtaaccaaggagagagatgatttaaaaaacaaattgaaagcggaagaagagaaaggaaatgatctcctgtcaagagttaatatgttgaaaaataggcttcaatcattggaagcaattgagaaagatttcctaaaaaacaaattaaatcaagactctgggaaatccacaacagcattacaccaagaaaacaataagattaaggagctctctcaagaagtggaaagactgaaactgaagctaaaggacatgaaagccattgaggatgacctcatgaaaacagaagatgaatatgagactctagaacgaaggtatgctaatgaacgagacaaagctcaatttttatctaaagagctagaacatgttaaaatggaacttgctaagtacaagttagcagaaaagacagagaccagccatgaacaatggcttttcaaaaggcttcaagaagaagaagctaagtcagggcacctctcaagagaagtggatgcattaaaagagaaaattcatgaatacatggcaactgaagacctaatatgtcacctccagggagatcactcagtcctgcaaaaaaaactaaatcaacaagaaaacaggaacagagatttaggaagagagattgaaaacctcactaaggagttagagaggtaccggcatttcagtaagagcctcaggcctagtctcaatggaagaagaatttccgatcctcaagtattttctaaagaagttcagacagaagcagtagacaatgaaccacctgattacaagagcctcattcctctggaacgtgcagtcatcaatggtcagttatatgaggagagtgagaatcaagacgaggaccctaatgatgagggatctgtgctgtccttcaaatgcagccagtctactccatgtcctgttaacagaaagctatggattccctggatgaaatccaaggagggccatcttcagaatggaaaaatgcaaactaaacccaatgccaactttgtgcaacctggagatctagtcctaagccacacacctgggcagccacttcatataaaggttactccagaccatgtacaaaacacagccactcttgaaatcacaagtccaaccacagagagtcctcactcttacacgagtactgcagtgataccgaactgtggcacgccaaagcaaaggataaccatcctccaaaacgcctccataacaccagtaaagtccaaaacctctaccgaagacctcatgaatttagaacaaggcatgtccccaattaccatggcaacctttgccagagcacagaccccagagtcttgtggttctctaactccagaaaggacaatgtcccctattcaggttttggctgtgactggttcagctagctctcctgagcagggacgctccccagaaccaacagaaatcagtgccaagcatgcgatattcagagtctccccagaccggcagtcatcatggcagtttcagcgttcaaacagcaatagctcaagtgtgataactactgaggataataaaatccacattcacttaggaagtccttacatgcaagctgtagccagccct

SEQ ID NO: 33412 - DNA, 3402 bp, Artificial Sequence
  derived and/or modified sequence
atgcggagccgcggcagcgatactgagggaagcgctcaaaagaagttcccacgacacaccaaaggccactcgttccaagggcctaagaatatgaagcatagacaacaggacaaagatagtccatctgagtccgacgttatcctaccctgtccaaaggccgagaagccacactcgggtaatgggcatcaagctgaagatctgagccgagatgatctgctgttcctcctctcaatccttgagggggagctgcaggctcgcgacgaggtgatcggcatattaaaggcagagaagatggacctcgctctactggaggcgcaatacggattcgttactccaaaaaaggttttggaggccctccaacgcgatgcctttcaggccaagagcaccccgtggcaggaggacatctatgaaaaacccatgaacgagctggacaaggttgtcgagaaacacaaagaatcatacagacgcattctgggtcagctcctggtagccgagaagagtcgcaggcaaactatcttagagctagaggaagaaaaacgtaaacacaaggaatatatggaaaaaagtgatgagttcatctgcctcctggaacaggagtgcgagcgcttgaagaagcttatcgatcaggaaataaagagtcaggaggaaaaagaacaggaaaaagagaagagagtgacaactctaaaggaggaactgactaagctcaagagcttcgccctgatggtggtggacgaacagcagcggctcaccgcgcagctcaccttgcaaagacagaaaatacaggaactgacgactaatgcgaaagaaactcataccaagttagcgctagccgaggctagagtccaagaagaagaacagaaagcgactaggctggagaaagaacttcaaacgcagaccacaaagttccatcaagaccaagataccatcatggctaaacttaccaacgaggattctcagaatagacagctgcagcaaaagctcgccgcgttgtctcggcaaattgatgaactcgaagaaactaacaggagtctgcgcaaggccgaagaggagttgcaagacattaaagagaagatttccaaaggcgagtatggaaatgccggcataatggctgaggtggaagaactgcgtaagcgagttttggatatggagggcaaggatgaagaactaatcaagatggaggagcagtgccgtgatttgaataagcggcttgagcgagaaacgctgcagagtaaggactttaagctggaagtggaaaagttaagtaagcgaatcatggcacttgagaaactggaagatgccttcaataagtccaagcaagaatgttattcgctgaaatgtaatctggaaaaggaaagaatgacaaccaagcagcttagccaagagctggagagtctcaaggttcggatcaaggaattggaagctattgagtctagactggaaaagaccgagttcactttaaaagaggacctcactaagctcaaaacactcacggtgatgttcgtagacgagcggaaaaccatgtctgaaaagctcaagaaaaccgaagacaaactacaggcagccagctctcagctgcaagtcgagcaaaacaaagtaacaaccgtgaccgagaagctgatcgaagaaaccaaacgcgctctgaagtcaaaaaccgatgttgaggaaaaaatgtacagcgtgacaaaggagagggatgatctgaaaaataagcttaaagcggaggaagagaagggcaacgatcttcttagccgggtcaatatgttgaagaaccgcttacagtcattagaggccatagagaaggactttctgaaaaataaattgaaccaagactcaggaaagagcacgaccgctttgcatcaagagaataataagatcaaggagctgtcccaggaagtcgagcggttgaagctcaagttaaaggatatgaaagcgatcgaggacgatttgatgaagactgaggacgagtatgagaccctcgagcgtcggtatgccaatgagagggacaaggcccaatttctgagtaaggagctggaacatgtcaagatggaactggcgaaatataagttagcagaaaagaccgagaccagtcacgagcagtggcttttcaaaaggttgcaggaggaggaagcaaaaagcggacatctttcgcgtgaggtcgatgccctaaaagaaaaaatccacgagtacatggctacagaagacctcatctgtcatctgcaaggtgatcacagcgtcctgcaaaaaaaactcaaccagcaagagaaccgcaaccgcgatctcggcagagagatcgagaacctgactaaggagctcgaaagataccgccacttctcaaagtctctgaggccatcactcaatggccgcaggatttcagatccccaagttttctcaaaagaggtccagaccgaggcggtggacaatgagccacctgattacaaaagcttaataccccttgagagagctgtcatcaatggacagctgtatgaagaaagtgagaatcaggatgaagatcccaatgacgagggctcggtcctgtcttttaaatgtagccagagcacgccatgtcccgtgaaccgcaagctatggattccatggatgaagtctaaagagggacatctgcaaaacggaaagatgcagaccaagcccaatgccaattttgtgcagcccggtgacctggtgcttagtcatacaccagggcagcccttacacatcaaggtcacaccagatcacgtgcaaaacaccgcaacactcgagataacttctcccactactgagtccccacactcttacacttccacagcagtcattcctaactgcggtaccccaaaacagagaattactatactccaaaacgcaagcatcactcccgtcaaaagcaaaacgtctacggaggatctgatgaacttggagcagggcatgagtccgatcaccatggccacatttgctcgagcccagacccccgagagttgcggttccttgactcccgaacggaccatgtctccaattcaagtgctagccgttacgggatccgcaagcagtccggagcagggcaggagcccagaacccacagagatctcagccaaacatgccattttccgtgtgagtcccgaccggcagagtagctggcaatttcaaaggtctaacagcaatagcagcagcgttatcaccaccgaggacaacaagatccacatacacctgggaagtccttacatgcaggcagtggccagtcccgtccgacctgctagtccttccgctccactgcaggataaccggacccagggactgatcaacggggcactgaataaaacaacaaataaggttacttcgtcaataaccattaccccgacagccacgcctctgccacgccagtcccagatcacagtgagcaacatctataactag

SEQ ID NO: 33413 - DNA, 2682 bp, Artificial Sequence
  derived and/or modified sequence
atggtggtggatgagcagcagcgtctgacagcgcaactgaccttacagcggcagaaaatccaagaactgactaccaatgctaaagagacgcacaccaagcttgccttggcggaagctcgggttcaggaggaggagcagaaggctacgcgcctcgagaaggagctgcagacgcagacaacaaaatttcaccaggaccaggacaccataatggctaaattgacaaatgaggacagccagaataggcaattgcagcaaaagcttgctgcccttagccggcagatcgacgagctggaggagaccaatcggagcctgcgcaaggcagaggaggagttacaggacattaaggaaaaaatctctaagggcgaatacggtaacgccggcattatggcagaggtggaagagttgagaaagcgagtgctggacatggaaggaaaggacgaagagttgattaaaatggaggagcaatgcagagacttaaataagcgactggaacgggagactttgcagagtaaagactttaagttagaggtcgagaaactgagtaaaaggatcatggcattggagaaactggaggacgcttttaacaagtcaaaacaggagtgttactccttaaagtgcaacctcgagaaagagcgcatgacaacaaagcagctctctcaagaactcgaaagcctgaaggtaagaatcaaggagttagaggcaatcgaaagtcgcctggagaagacggagttcacactgaaggaggatctgacgaagctcaaaacactgaccgtcatgtttgtggacgagcgtaagacaatgtcggaaaagctgaaaaagacagaggataaattgcaggcagctagcagccagcttcaggtggagcagaataaagtgacgacagtcacggagaagttaatcgaagagacaaagagagccctgaaatccaaaaccgatgtcgaagagaagatgtactccgtgaccaaagaacgagatgacttaaaaaacaaattgaaagccgaggaggagaaagggaatgacctcctgtcacgggtcaacatgctcaagaaccggcttcagtctctagaggcgattgaaaaagacttcctcaaaaataaactgaaccaggattctggtaaaagtacaactgcccttcaccaagaaaataacaaaattaaagaactatcacaagaagtggaaagactcaagcttaagcttaaagacatgaaggccatcgaagacgatctcatgaagaccgaggatgaatatgagactctcgaaagaagatacgccaatgaaagagacaaagcacagttcctcagcaaagaactggaacatgtgaaaatggagctggccaagtacaaattggctgaaaagactgagacgtcgcatgaacagtggctgtttaagagactccaagaggaagaggccaaaagcggacacctctcccgagaggtcgacgcactgaaagagaagattcatgagtatatggccactgaggacttaatatgtcacctgcagggggatcatagcgtgttgcagaagaagttgaaccagcaggagaaccggaaccgtgatctcggccgtgaaatagagaacttgaccaaggaactggaaagatacaggcacttcagcaaaagcttgaggccctctttgaatggccggaggataagtgacccacaagtattttccaaggaggtgcaaacagaggccgtggataacgaacccccggattataaatctctgatcccactggaaagagccgtgatcaacggccagttgtatgaggagtcagaaaatcaggatgaggacccgaatgacgagggaagtgttctttcctttaagtgtagccagtccacaccatgtccagtgaatcgaaaactctggataccttggatgaagtccaaagaaggacaccttcagaatggcaagatgcagaccaaacctaacgcaaatttcgtgcaaccaggtgatttggtgcttagccatacgccaggccaaccgctgcacattaaggttactcctgaccacgtacagaataccgcaacgctagagataacaagtcctaccacagagtccccccattcctacacatcaacagctgtcattcctaactgtggaacccccaagcagcggatcacaatcctgcagaacgcgagtataacgcctgtgaagtcaaagacctctacagaggatctcatgaatttggagcagggaatgtcacctataactatggcaactttcgcccgggcccagacgccggaaagctgcggatctctgactcctgagcgtaccatgtccccaattcaggtgctggccgtaactggaagcgcctctagccctgagcagggcaggagtccggagccgactgagatcagtgccaagcatgctatcttccgggtttctccagacaggcagtcgagttggcaattccagaggtctaacagtaattctagttctgtgataactacggaagataataagattcatatacacctcggaagtccctatatgcaggcagtggcgtcccccgtccgccccgcatcccctagcgcacctctgcaagacaacagaacacagggattgatcaatggagcactgaataagaccaccaacaaggtaacctcttctatcacaattacacccacagcaaccccactgccacggcagtcacaaatcaccgtctccaatatttacaactag

SEQ ID NO: 33414 - DNA, 768 bp, Artificial Sequence
  derived and/or modified sequence
atgcgttccagaggatccgatacagagggatcagcccagaagaaattcccccggcacaccaagggccactcatttcagggccctaaaaatatgaagcaccggcaacaggacaaggatagcccatctgaatctgacgtcatattgccgtgcccgaaagctgaaaagccccactctggcaacggacatcaagcggaggatctgagcagggatgacctgttgttcctattgtcaattcttgaaggtgaacttcaggcccgggacgaggtcatcggtatcctgaaagccgagaaaatggatctggcactgctggaggcacaatacgggttcgtaactcccaaaaaagtcctcgaagctttgcagagggatgccttccaggccaaatcgacgccatggcaagaggacatttacgagaagccaatgaacgaactggacaaagtggtagaaaaacacaaagagtcttatcggcggattttgggccagctactggtggcagagaagagtcggcggcagaccatattggaacttgaggaggagaagcgcaagcacaaagaatacatggaaaagagtgacgaattcatctgcttgttggaacaggagtgtgaacggtggtcactggctcttctgcctaggctggagtgtaatgggatgatcttggcccattgtaacctctgtctgctcggcagtagtgattcgcctgccagtgccttccaggtagcggggatcactggtaccaggcatcatgcccagttagtgttcgtctttctttag

SEQ ID NO: 33415 - DNA, 2640 bp, Artificial Sequence
  derived and/or modified sequence
atggtcgtggatgaacagcagagactgacagctcagcttactctgcagaggcagaagatccaggagttgaccacaaacgctaaagaaacacacaccaagctggcacttgccgaggcgagggttcaagaagaggagcaaaaggcaacaaggctcgagaaggagctgcagacgcagacgaccaagttccatcaagaccaggacacaattatggcaaaactgactaacgaggactctcagaatcgtcaactgcaacagaaactggccgctctctctaggcagattgatgagctagaagaaacgaacagaagtcttcggaaagcggaggaggagctccaggatattaaagaaaagataagcaagggtgagtacggcaacgcaggtatcatggctgaagtcgaggagctgatcaagatggaagaacaatgcagagatctaaataagagactggaaagagagacattacaatcaaaggacttcaaactagaagtagaaaagctctccaaaaggatcatggccttagaaaaactggaggatgccttcaacaagtctaaacaggaatgctactctctgaagtgtaatctggagaaagagaggatgactaccaagcagctgagccaggagctagagtcactgaaagtcagaataaaagagttagaggccattgaaagccggcttgagaagactgaattcacgctgaaagaggatctgacaaagctgaagacactgactgtgatgttcgtggacgagagaaagactatgtctgagaagctcaaaaaaaccgaggacaagcttcaggcggccagttcccagctgcaagtggagcaaaacaaggtgacaacagtaacagagaagctgatcgaagaaaccaagcgtgcccttaagagcaagaccgatgttgaagaaaaaatgtattccgtgacaaaggagcgagacgatctaaaaaataagttgaaagctgaagaggagaaaggcaatgatctcctgtctcgggtgaatatgctgaaaaatcgcctgcaatcacttgaagctattgagaaggacttcctgaagaacaaacttaaccaggactcaggtaaaagtaccacagccctccaccaggagaataacaaaatcaaggaactgtctcaagaggtggagaggttaaaactcaagctgaaggacatgaaagccattgaggacgatctgatgaaaacagaggacgagtacgaaactctggaacggaggtatgccaacgaaagagataaggcccagtttctgagcaaagaactggaacatgtaaagatggagctggccaaatacaaactcgccgaaaagacagaaacaagtcacgagcaatggctgtttaaacgattgcaggaggaggaggcaaaatcgggccacctgagccgtgaagtggatgcattaaaagagaagattcatgagtacatggcaactgaagacttgatttgccatctgcagggcgaccactccgtacttcagaagaagctgaatcagcaagagaacagaaaccgggatcttggccgggagatcgaaaatctgacaaaagagctcgaacgataccggcatttttctaaaagcctgcgcccaagtcttaacggaagaaggatctccgaccctcaggtgttttccaaagaagttcagactgaagccgtggacaatgaacctccagattataagtcgctgattcctttggagagggctgtgattaatggacagctgtacgaagagtccgagaaccaggacgaggatccaaacgacgagggtagtgtgctcagctttaaatgctctcagtctaccccttgcccagttaatcgaaagctctggataccctggatgaagtctaaagaaggacacttgcagaacgggaagatgcagaccaagcccaacgctaactttgttcagccgggagatcttgtgctttcacatacacctggacaaccgctgcatattaaagtgacccctgatcacgttcagaatacagcaaccttggagatcacctccccaacaactgagtctcctcatagctatacatctacggctgtgattcctaattgcgggacccctaagcaaagaattacgatcctccagaatgctagcattactccagtaaagagcaagacctctaccgaagatttaatgaacctagagcaaggcatgagccccatcacaatggcgacatttgctcgggcccagactccagagagctgtggaagtttgacccctgagaggacaatgtcccctatccaagtcctcgcagtcacgggatccgcatcatcccctgagcagggcaggagtccggaacctactgagatcagcgcgaagcacgccatctttcgtgtgtcccccgataggcaaagctcatggcagttccagcgtagtaacagcaattcttctagcgtgataacaaccgaagacaataaaatccacatccacttagggtctccctacatgcaggctgtcgccagccccgtgcggcccgccagtccgtctgctccattacaggacaataggacacagggactcattaatggagctttaaataagactaccaataaagtgacatcctcaattactatcactccaacagctaccccactacctcgtcagagtcagattaccgtctccaacatttataactag

SEQ ID NO: 33416 - DNA, 3402 bp, Artificial Sequence
  derived and/or modified sequence
atgaggagccggggcagtgacacagagggcagcgcccagaagaagttccccaggcacaccaagggccacagcttccagggccccaagaacatgaagcaccggcagcaggacaaggacagccccagcgagagtgatgtgatcctgccctgccccaaggccgagaagccccacagcggaaatggccaccaggccgaggacctgagcagagatgacctgctcttcctgctgagcatcctggagggggagctgcaggccagagatgaagtcatcggcatcctgaaggccgagaagatggacctggccctgctggaggcccagtatggctttgtgacccccaagaaggtgctggaggccctgcagagagatgccttccaggccaagagcaccccctggcaggaggacatctatgagaagcccatgaatgagctggacaaggtggtggagaagcacaaggagagctaccgccgcatcctgggccagctgctggtggccgagaagagccggcggcagaccatcctggagctggaggaggagaagaggaagcacaaggagtacatggagaagagtgatgagttcatctgcctgctggagcaggagtgtgagcggctgaagaagctgattgaccaggagatcaagagccaggaggagaaggagcaggagaaggagaagagggtgaccaccctgaaggaggagctgaccaagctgaagagctttgccctgatggtggtggatgagcagcagaggctgacagcccagctgaccctgcagaggcagaagatccaggagctgaccaccaatgccaaggagacccacaccaagctggccctggccgaggcccgggtgcaggaggaggagcagaaggccacccggctggagaaggagctgcagacccagaccaccaagttccaccaggaccaggacaccatcatggccaagctgaccaatgaagacagccagaaccggcagctgcagcagaagctggccgccctgagccggcagattgatgagctggaggagaccaacagaagcctgaggaaggccgaggaggagctgcaggacatcaaggagaagatcagcaagggggagtatggaaatgccggcatcatggccgaggtggaggagctgaggaagagggtgctggacatggagggcaaggatgaggagctgatcaagatggaggagcagtgccgggacctgaacaagaggctggagcgggagaccctgcagagcaaggacttcaagctggaggtggagaagctgagcaagaggatcatggccctggagaagctggaggatgccttcaacaagagcaagcaggagtgctacagcctgaagtgcaacctggagaaggagaggatgaccaccaagcagctgagccaggagctggagagcctgaaggtgcgcatcaaggagctggaggccatcgagagccggctggagaagacagagttcaccctgaaggaggacctgaccaagctgaagaccctgactgtgatgtttgtggatgagaggaagaccatgtctgagaagctgaagaagacagaggacaagctgcaggccgccagcagccagctgcaggtggagcagaacaaggtgaccaccgtgacagagaagctgattgaggagaccaagagggccctgaagagcaagacagatgtggaggagaagatgtacagcgtgaccaaggagagagatgacctgaagaacaagctgaaggccgaggaggagaagggaaatgacctgctgagccgggtgaacatgctgaagaaccggctgcagagcctggaggccatcgagaaggacttcctgaagaacaagctgaaccaggacagcggcaagagcaccacagccctgcaccaggagaacaacaagatcaaggagctgagccaggaggtggagcggctgaagctgaagctgaaggacatgaaggccattgaagatgacctgatgaagacagaagatgaatatgagaccctggagaggagatatgccaatgaaagagacaaggcccagttcctgagcaaggagctggagcacgtgaagatggagctggccaagtacaagctggccgagaagacagagaccagccatgagcagtggctgttcaagaggctgcaggaggaggaggccaagagcggccacctgagccgggaggtggatgccctgaaggagaagatccacgagtacatggccacagaagatctcatctgccacctgcagggcgaccacagcgtgctgcagaagaagctgaaccagcaggagaacagaaacagagacctgggccgggagattgagaacctgaccaaggagctggagcgctaccgccacttcagcaagagcctgcggcccagcctgaatggccgccgcatcagtgacccccaggtgttcagcaaggaggtgcagacagaggccgtggacaatgaacctccagactacaagagcctcatccccctggagagagctgtgatcaatggccagctgtatgaggagagcgagaaccaggatgaggaccccaatgatgagggctctgtgctgtccttcaagtgcagccagagcaccccctgccctgtgaacaggaagctgtggatcccctggatgaagagcaaggagggccacctgcagaatggcaagatgcagaccaagcccaatgccaactttgtgcagcccggggacctggtgctgagccacaccccaggccagcccctgcacatcaaggtgaccccagaccacgtgcagaacacagccaccctggagatcaccagccccaccacagagagcccccacagctacaccagcacagctgtgatccccaactgtggcacccccaagcagaggatcaccatcctgcagaatgccagcatcacccctgtgaagagcaagaccagcacagaggacctgatgaacctggagcagggcatgagccccatcaccatggccacctttgcccgggcccagaccccagagagctgtggcagcctgaccccagagaggaccatgagccccatccaggtgctggccgtgacaggcagcgccagcagccctgagcagggccgcagccctgagcccacagagatcagcgccaagcacgccatcttccgggtgtccccagaccggcagagctcctggcagttccagaggagcaacagcaacagcagcagcgtcatcaccacagaggacaacaagatccacatccacctgggcagcccctacatgcaggccgtggccagccctgtgcggcctgccagccccagcgcccccctgcaggacaacagaacccagggcctcatcaatggagccctgaacaagaccaccaacaaggtgaccagcagcatcaccatcacccccacagccacccccctgccccggcagagccagatcaccgtgagcaacatctacaactag

SEQ ID NO: 33417 - DNA, 2682 bp, Artificial Sequence
  derived and/or modified sequence
atggtggtggatgagcagcagaggctgacagcccagctgaccctgcagaggcagaagatccaggagctgaccaccaatgccaaggagacccacaccaagctggccctggccgaggcccgggtgcaggaggaggagcagaaggccacccggctggagaaggagctgcagacccagaccaccaagttccaccaggaccaggacaccatcatggccaagctgaccaatgaagacagccagaaccggcagctgcagcagaagctggccgccctgagccggcagattgatgagctggaggagaccaacagaagcctgaggaaggccgaggaggagctgcaggacatcaaggagaagatcagcaagggggagtatggaaatgccggcatcatggccgaggtggaggagctgaggaagagggtgctggacatggagggcaaggatgaggagctgatcaagatggaggagcagtgccgggacctgaacaagaggctggagcgggagaccctgcagagcaaggacttcaagctggaggtggagaagctgagcaagaggatcatggccctggagaagctggaggatgccttcaacaagagcaagcaggagtgctacagcctgaagtgcaacctggagaaggagaggatgaccaccaagcagctgagccaggagctggagagcctgaaggtgcgcatcaaggagctggaggccatcgagagccggctggagaagacagagttcaccctgaaggaggacctgaccaagctgaagaccctgactgtgatgtttgtggatgagaggaagaccatgtctgagaagctgaagaagacagaggacaagctgcaggccgccagcagccagctgcaggtggagcagaacaaggtgaccaccgtgacagagaagctgattgaggagaccaagagggccctgaagagcaagacagatgtggaggagaagatgtacagcgtgaccaaggagagagatgacctgaagaacaagctgaaggccgaggaggagaagggaaatgacctgctgagccgggtgaacatgctgaagaaccggctgcagagcctggaggccatcgagaaggacttcctgaagaacaagctgaaccaggacagcggcaagagcaccacagccctgcaccaggagaacaacaagatcaaggagctgagccaggaggtggagcggctgaagctgaagctgaaggacatgaaggccattgaagatgacctgatgaagacagaagatgaatatgagaccctggagaggagatatgccaatgaaagagacaaggcccagttcctgagcaaggagctggagcacgtgaagatggagctggccaagtacaagctggccgagaagacagagaccagccatgagcagtggctgttcaagaggctgcaggaggaggaggccaagagcggccacctgagccgggaggtggatgccctgaaggagaagatccacgagtacatggccacagaagatctcatctgccacctgcagggcgaccacagcgtgctgcagaagaagctgaaccagcaggagaacagaaacagagacctgggccgggagattgagaacctgaccaaggagctggagcgctaccgccacttcagcaagagcctgcggcccagcctgaatggccgccgcatcagtgacccccaggtgttcagcaaggaggtgcagacagaggccgtggacaatgaacctccagactacaagagcctcatccccctggagagagctgtgatcaatggccagctgtatgaggagagcgagaaccaggatgaggaccccaatgatgagggctctgtgctgtccttcaagtgcagccagagcaccccctgccctgtgaacaggaagctgtggatcccctggatgaagagcaaggagggccacctgcagaatggcaagatgcagaccaagcccaatgccaactttgtgcagcccggggacctggtgctgagccacaccccaggccagcccctgcacatcaaggtgaccccagaccacgtgcagaacacagccaccctggagatcaccagccccaccacagagagcccccacagctacaccagcacagctgtgatccccaactgtggcacccccaagcagaggatcaccatcctgcagaatgccagcatcacccctgtgaagagcaagaccagcacagaggacctgatgaacctggagcagggcatgagccccatcaccatggccacctttgcccgggcccagaccccagagagctgtggcagcctgaccccagagaggaccatgagccccatccaggtgctggccgtgacaggcagcgccagcagccctgagcagggccgcagccctgagcccacagagatcagcgccaagcacgccatcttccgggtgtccccagaccggcagagctcctggcagttccagaggagcaacagcaacagcagcagcgtcatcaccacagaggacaacaagatccacatccacctgggcagcccctacatgcaggccgtggccagccctgtgcggcctgccagccccagcgcccccctgcaggacaacagaacccagggcctcatcaatggagccctgaacaagaccaccaacaaggtgaccagcagcatcaccatcacccccacagccacccccctgccccggcagagccagatcaccgtgagcaacatctacaactag

SEQ ID NO: 33418 - DNA, 768 bp, Artificial Sequence
  derived and/or modified sequence
atgaggagccggggcagtgacacagagggcagcgcccagaagaagttccccaggcacaccaagggccacagcttccagggccccaagaacatgaagcaccggcagcaggacaaggacagccccagcgagagtgatgtgatcctgccctgccccaaggccgagaagccccacagcggaaatggccaccaggccgaggacctgagcagagatgacctgctcttcctgctgagcatcctggagggggagctgcaggccagagatgaagtcatcggcatcctgaaggccgagaagatggacctggccctgctggaggcccagtatggctttgtgacccccaagaaggtgctggaggccctgcagagagatgccttccaggccaagagcaccccctggcaggaggacatctatgagaagcccatgaatgagctggacaaggtggtggagaagcacaaggagagctaccgccgcatcctgggccagctgctggtggccgagaagagccggcggcagaccatcctggagctggaggaggagaagaggaagcacaaggagtacatggagaagagtgatgagttcatctgcctgctggagcaggagtgtgagcgctggagcctggccctgctgccccggctggagtgcaatggcatgatcctggcccactgcaacctgtgcctgctgggcagcagtgacagccctgccagcgccttccaggtggccggcatcaccggcaccaggcaccacgcccagctggtgtttgtgttcctgtag

SEQ ID NO: 33419 - DNA, 2640 bp, Artificial Sequence
  derived and/or modified sequence
atggtggtggatgagcagcagaggctgacagcccagctgaccctgcagaggcagaagatccaggagctgaccaccaatgccaaggagacccacaccaagctggccctggccgaggcccgggtgcaggaggaggagcagaaggccacccggctggagaaggagctgcagacccagaccaccaagttccaccaggaccaggacaccatcatggccaagctgaccaatgaagacagccagaaccggcagctgcagcagaagctggccgccctgagccggcagattgatgagctggaggagaccaacagaagcctgaggaaggccgaggaggagctgcaggacatcaaggagaagatcagcaagggggagtatggaaatgccggcatcatggccgaggtggaggagctgatcaagatggaggagcagtgccgggacctgaacaagaggctggagcgggagaccctgcagagcaaggacttcaagctggaggtggagaagctgagcaagaggatcatggccctggagaagctggaggatgccttcaacaagagcaagcaggagtgctacagcctgaagtgcaacctggagaaggagaggatgaccaccaagcagctgagccaggagctggagagcctgaaggtgcgcatcaaggagctggaggccatcgagagccggctggagaagacagagttcaccctgaaggaggacctgaccaagctgaagaccctgactgtgatgtttgtggatgagaggaagaccatgtctgagaagctgaagaagacagaggacaagctgcaggccgccagcagccagctgcaggtggagcagaacaaggtgaccaccgtgacagagaagctgattgaggagaccaagagggccctgaagagcaagacagatgtggaggagaagatgtacagcgtgaccaaggagagagatgacctgaagaacaagctgaaggccgaggaggagaagggaaatgacctgctgagccgggtgaacatgctgaagaaccggctgcagagcctggaggccatcgagaaggacttcctgaagaacaagctgaaccaggacagcggcaagagcaccacagccctgcaccaggagaacaacaagatcaaggagctgagccaggaggtggagcggctgaagctgaagctgaaggacatgaaggccattgaagatgacctgatgaagacagaagatgaatatgagaccctggagaggagatatgccaatgaaagagacaaggcccagttcctgagcaaggagctggagcacgtgaagatggagctggccaagtacaagctggccgagaagacagagaccagccatgagcagtggctgttcaagaggctgcaggaggaggaggccaagagcggccacctgagccgggaggtggatgccctgaaggagaagatccacgagtacatggccacagaagatctcatctgccacctgcagggcgaccacagcgtgctgcagaagaagctgaaccagcaggagaacagaaacagagacctgggccgggagattgagaacctgaccaaggagctggagcgctaccgccacttcagcaagagcctgcggcccagcctgaatggccgccgcatcagtgacccccaggtgttcagcaaggaggtgcagacagaggccgtggacaatgaacctccagactacaagagcctcatccccctggagagagctgtgatcaatggccagctgtatgaggagagcgagaaccaggatgaggaccccaatgatgagggctctgtgctgtccttcaagtgcagccagagcaccccctgccctgtgaacaggaagctgtggatcccctggatgaagagcaaggagggccacctgcagaatggcaagatgcagaccaagcccaatgccaactttgtgcagcccggggacctggtgctgagccacaccccaggccagcccctgcacatcaaggtgaccccagaccacgtgcagaacacagccaccctggagatcaccagccccaccacagagagcccccacagctacaccagcacagctgtgatccccaactgtggcacccccaagcagaggatcaccatcctgcagaatgccagcatcacccctgtgaagagcaagaccagcacagaggacctgatgaacctggagcagggcatgagccccatcaccatggccacctttgcccgggcccagaccccagagagctgtggcagcctgaccccagagaggaccatgagccccatccaggtgctggccgtgacaggcagcgccagcagccctgagcagggccgcagccctgagcccacagagatcagcgccaagcacgccatcttccgggtgtccccagaccggcagagctcctggcagttccagaggagcaacagcaacagcagcagcgtcatcaccacagaggacaacaagatccacatccacctgggcagcccctacatgcaggccgtggccagccctgtgcggcctgccagccccagcgcccccctgcaggacaacagaacccagggcctcatcaatggagccctgaacaagaccaccaacaaggtgaccagcagcatcaccatcacccccacagccacccccctgccccggcagagccagatcaccgtgagcaacatctacaactag

SEQ ID NO: 33420 - DNA, 3402 bp, Artificial Sequence
  derived and/or modified sequence
atgcggagccggggcagcgacaccgagggcagcgcccagaagaagtttccaaggcataccaagggccacagcttccagggacccaagaatatgaagcataggcaacaggacaaagattccccctcagaatcagacgtcatactaccatgtccaaaggctgagaagccccattccggcaatggccatcaagccgaggatctgagccgcgatgatctcctgttcttgttgtccatacttgaaggcgaactgcaggctcgtgatgaagtgatagggatccttaaagctgagaagatggatctggccttattagaggcacagtatggatttgtgacccccaagaaagtgttggaagcactgcagagggatgcatttcaggcaaagagtactccttggcaggaggacatctacgagaaaccgatgaatgaactcgataaagttgttgagaaacataaagagtcctacaggcggatattggggcagctgctggtggccgagaagtctcggcgccagacaattttggagctggaggaagaaaagcgcaaacacaaagagtacatggagaaatcagatgagttcatatgcctattagaacaggaatgtgagcgtctcaagaagctaatcgatcaggagataaaatcccaggaagaaaaagaacaggagaaggagaaacgggtgactacactgaaagaagaactcaccaagctgaagtcttttgcactgatggtggtggatgagcagcagcggctaaccgcacaactgactctacaacgtcagaagattcaggaactcactaccaacgctaaggagactcacacaaaactggccctcgcagaggctcgggtgcaggaagaagagcaaaaggctactcgtctagaaaaagagctccagacgcagacaacaaagttccaccaggatcaggatacaatcatggctaaactgacaaacgaggattcacaaaaccgacagttgcagcaaaagttagccgccttgagtaggcagatcgatgagcttgaggagaccaatcgttctctgcggaaggccgaggaggaactgcaggacattaaagagaaaatcagtaaaggagagtacggcaatgcaggtatcatggctgaggtggaggaactccgtaagcgggtgctggatatggagggcaaagatgaggagctgattaaaatggaggagcagtgtagagacctgaacaagaggcttgaaagagaaactctgcaaagtaaggatttcaagctggaagtggagaaactatcaaaacgcatcatggcactggagaaattggaagacgccttcaacaagtcaaaacaagaatgttatagcttaaagtgtaatcttgagaaggaaaggatgaccactaaacaactatctcaggagttagagtcattgaaagtacgaatcaaagaactggaggcaattgagagcaggcttgaaaagaccgagttcacgctgaaggaggacctcaccaaactcaagaccctgaccgtgatgttcgtcgatgagaggaaaacaatgtcagaaaagcttaaaaaaaccgaggacaaactgcaggcagcctcctcacagttgcaggtggagcagaacaaggtcacgactgttaccgaaaagctcattgaagaaacaaagcgcgcgctgaagagcaagaccgacgtggaggaaaagatgtactctgtgaccaaggagagggatgatttaaagaacaagttgaaagcagaggaagaaaaaggtaacgatctcctcagccgcgtgaatatgctgaagaataggctccagagtctggaagctatcgagaaggactttcttaagaataagttgaaccaagatagcgggaaatccaccacagccctccaccaagagaacaataaaattaaggaactttctcaggaagtcgaaagactgaagctgaaacttaaggacatgaaagccattgaggacgacctgatgaagaccgaagacgaatatgagaccctcgagcgacgctacgccaacgagcgcgacaaagcccagtttcttagcaaggagctcgagcatgtgaagatggaacttgccaagtacaagttagccgaaaagacagagacatctcatgaacagtggctgtttaagcggttgcaggaggaggaggcaaagtcaggacacctgtctagagaagtggatgcgttgaaggaaaagatccatgaatacatggcgaccgaggacctgatatgtcatctccagggcgaccattccgtcctgcagaagaagctgaaccaacaggaaaacagaaatcgggacctcgggcgtgagattgagaacctgacaaaagagctggagaggtataggcatttttcgaaatcattgcggccctccttgaatgggcggcggataagcgaccctcaggtgtttagcaaagaagttcaaacagaggcagtggacaacgaacctccagattataaatctctgataccactggagagggcagtgataaatggacagctatacgaggaaagtgagaaccaggacgaggatccaaacgatgaggggagcgtactgtcctttaagtgtagccagtccacaccatgtcctgttaataggaagttgtggatcccgtggatgaaatccaaagagggccaccttcaaaacgggaagatgcaaacgaaaccgaatgctaatttcgtacagcctggcgatctggtgctgtcgcatacacccggccagcctcttcacatcaaggtcactccagaccacgtacagaatacagccaccctggaaatcacaagccccactaccgagtcgccccactcgtacaccagcaccgccgtcatcccaaattgtggaactcccaagcaaagaataaccatccttcagaacgcctccataacacctgtaaagtcaaaaaccagcacagaggacctgatgaaccttgaacagggcatgtctcctatcacgatggcgaccttcgctagagcacaaactccagaatcctgcggcagcctgacccccgagagaacgatgtccccaatacaggttttggcggtgaccggctccgcctcaagccccgagcagggccgaagtccggagcccaccgagatcagtgccaaacacgccatattccgggtgtccccggacagacagtcctcctggcagttccaacgatctaactctaattcctcctcagtaataaccacagaagacaataagatccacatacacttaggatcgccgtacatgcaggccgtagcgtctccagtcaggcctgcatctccctccgcccccttgcaagacaacagaacgcaaggcctgataaacggcgccctgaacaagaccactaacaaggttacatccagtatcaccattactcccactgcgacccctctcccacgtcagtctcaaattaccgtaagcaatatatataactag

SEQ ID NO: 33421 - DNA, 2682 bp, Artificial Sequence
  derived and/or modified sequence
atggtggtggacgagcagcagcggctgaccgcccagctgaccctgcagaggcaaaagatccaggaattgaccacaaatgctaaggagacccatactaagctcgctttagcagaagctcgcgtccaggaggaagagcagaaggccactcggttggaaaaagagttacagacacaaaccactaagttccaccaggaccaggatacaataatggcaaagctcacaaatgaagactctcagaaccgccagctacagcagaagctggcagcgctgtctcgccaaattgacgagctggaggagaccaaccgaagcctgcggaaggctgaagaggaactccaggacattaaagagaaaatcagtaagggggagtatgggaatgctgggattatggccgaggtggaggaactgcgaaagagagtactagacatggaaggaaaggacgaagaacttatcaaaatggaggaacagtgcagagacctcaataagagattggagcgcgaaacactccaaagtaaagacttcaagcttgaggtggagaagctgtccaagcggatcatggcattggagaaactcgaggacgcttttaacaaaagcaaacaggaatgctacagcttgaaatgcaatctcgagaaggaacgcatgactaccaagcaactgagtcaggagttggagtcacttaaagtgcgtattaaggagctggaggccatcgaatcaaggttggagaaaaccgaatttaccctgaaggaggaccttactaagcttaagacccttaccgtgatgttcgtggacgagcgcaaaacaatgtccgaaaagctgaaaaagactgaggacaaactccaggcagcatccagtcagctccaggttgagcaaaataaagttaccacagtaacagaaaaattaattgaggagactaagagggccctgaagagcaaaactgacgtagaagaaaaaatgtactctgtcacaaaagaaagagacgatctgaagaataaactcaaggccgaagaagagaaagggaatgacctgctgtctcgggtgaacatgctgaaaaatcgcctgcagtcacttgaggccattgaaaaggattttcttaaaaacaaactaaaccaagactctggcaagagtactacagctctacatcaggaaaataataagatcaaagaactctcacaggaagtcgaacgccttaaactcaaattgaaggatatgaaagcgattgaagacgacctgatgaagacggaagacgagtacgagacgttggagcgacgttatgcaaacgagcgcgataaggctcagttcctgagcaaggaacttgaacatgtgaaaatggagttagccaagtacaaactggcagagaagaccgagacctcccatgagcagtggctgtttaagcggctgcaggaggaggaagctaaatcaggtcatctgtcacgggaggtcgacgcgttgaaagagaaaatccacgaatatatggcaacagaggatctgatttgccatctccagggcgaccactccgtcttacagaaaaaactgaaccagcaggaaaaccgtaaccgggacttaggcagggaaattgaaaatttgaccaaagaattggagcggtacagacatttctcgaaatcactcaggcccagtctgaacggacgccgtatctcagatccccaagtgttctccaaagaagtgcagaccgaggcagttgacaatgaacctcccgattataaaagtctgattcctttggagcgcgcagtgattaatgggcagctgtatgaggagtctgagaaccaagacgaagatcctaacgacgagggttcagtgctgtcctttaagtgctcgcagtccacaccctgtcccgtgaaccgcaaactgtggataccatggatgaagagcaaagaggggcacctgcagaatggcaaaatgcagacaaaaccgaatgcaaatttcgtccagcccggtgacctcgtactgtcccatacacctggccagcctctgcatattaaggtgactccggaccatgtccaaaatacagccaccctggaaattaccagtccaactacagagagcccccacagctacacctctacagctgtgattcccaattgtggcacccctaagcaacgcatcaccattttgcagaacgcctcaataactcccgtaaaaagtaagacctccactgaggacctaatgaacctagagcagggcatgagtcctatcactatggccacctttgctcgcgctcagacacctgagtcttgtggaagcctgactccagaacgcaccatgtcccccatccaggtgctcgccgtgacgggcagcgcgagctctccagaacagggacgaagtcccgagcccactgaaatttcggcgaaacacgccatcttcagagtctcaccagataggcagtccagctggcagttccagcgttccaattcgaactcctcgtcggtgataaccacagaagacaacaaaattcacatacatctgggaagcccttacatgcaagctgtcgcgagtcccgtgaggccagccagcccgtccgccccccttcaggacaacagaacacagggactgatcaacggggctcttaataagacaactaataaagtcacctcaagtattaccatcactcccaccgccactccactgccaaggcagagtcagatcaccgtctctaatatatataattag

SEQ ID NO: 33422 - DNA, 768 bp, Artificial Sequence
  derived and/or modified sequence
atgcggagccggggcagcgacaccgagggcagcgcccagaagaagttccctagacatacgaaaggccactcattccagggccccaagaacatgaagcatcgtcagcaggataaggattctccctctgagtccgatgtgattcttccctgtcctaaggccgaaaagccacactccggtaacggacaccaagccgaagatctgtcaagggacgacctgttatttctcctgagcatcctggagggggaactgcaggcacgagatgaagtaatagggatcctgaaagccgagaaaatggatctcgcactcttggaggctcagtacgggttcgtcacccctaaaaaggtgctcgaggcccttcagagggacgcctttcaggctaaaagtactccgtggcaggaagacatctacgaaaagcctatgaatgagctagacaaggttgtcgagaagcacaaggagtcctaccgcagaattcttgggcagctgcttgtagctgagaagtccaggaggcagacgatcctggaactggaagaggaaaagcgaaagcataaggagtacatggagaagtctgacgagttcatctgcttgcttgagcaagaatgtgagagatggtcgcttgcccttttgccgcggttagagtgcaacggtatgattctggcccactgcaatttgtgtctgctgggctcctccgattcccctgccagcgcctttcaggtggccggtataacagggacccgtcaccacgcccagctggtcttcgtgtttctctag

SEQ ID NO: 33423 - DNA, 2640 bp, Artificial Sequence
  derived and/or modified sequence
atggtggtggacgagcagcagcggctgaccgcccagctgaccctgcagcggcagaaaattcaagagctcacgacaaacgcaaaggagacgcacactaaattagcattggcggaggcccgcgtgcaggaagaagagcagaaagccacccgactcgaaaaagagttgcagacacagactacaaaatttcaccaggatcaggatacaatcatggctaaactcactaatgaagactcccagaaccggcagctgcagcagaagctggctgcccttagccggcagatcgacgagctcgaggagaccaatcgaagtctgaggaaggctgaggaggaacttcaggacattaaagagaaaatctcaaagggtgagtacgggaatgcaggtatcatggccgaggtggaggaactgattaagatggaagagcagtgcagggatctgaacaaacgtttggaacgggagacattgcagagcaaagattttaagctcgaggtggaaaagctgagcaaacggataatggcactggaaaagttagaggatgcctttaataagagcaaacaggaatgctattctctgaagtgcaatctcgagaaagaaagaatgacaaccaaacagttgtcacaggagttagagagcttgaaggtccgaataaaggagctcgaggccattgaaagccgcttggaaaaaaccgagtttacattgaaagaagacttaaccaaactgaaaactctgaccgtgatgttcgtcgacgaacgcaaaaccatgagcgaaaagcttaaaaagacagaggataaactccaggcggcttcttcgcagttacaggtggaacagaacaaggtgactaccgtcacggagaaactgatcgaggagacgaaaagagccctgaagtcaaagactgacgtggaagaaaaaatgtattcagttaccaaggaacgcgacgatctgaagaacaagctgaaggccgaagaagagaaggggaacgatcttctcagcagagtaaatatgctcaaaaatcgcctacagtccctcgaggctatcgaaaaagattttctgaaaaataaactgaatcaggattctgggaaaagcaccaccgccctgcatcaggaaaataacaaaatcaaggagttgtcccaggaagtcgagcggctaaagctgaagcttaaagatatgaaggccatcgaagatgatttaatgaagactgaggatgagtacgaaactctagaacgaaggtacgctaacgagagggacaaggctcagttcctgtcaaaagagctcgagcatgtgaaaatggagctcgcaaagtacaagctcgctgagaaaactgaaacatctcacgagcagtggctattcaaacgactgcaggaggaggaagctaagagcggccacctgtccagggaagtggacgccttgaaggaaaaaattcatgaatacatggctacagaggacctgatctgtcacctgcaaggagatcactcagttctgcagaaaaaattgaaccaacaggaaaatagaaaccgagatctggggagggagattgagaacctcacaaaggagctggaaagatacagacacttctccaagagtctgagaccttcattaaatggacggaggatctctgacccacaggtgttctccaaagaggtgcagaccgaggctgtggataatgagcctcctgactacaagtccctgatcccactagagcgggcagtcattaacgggcagctctatgaagaatctgagaaccaggatgaagatcccaatgacgaaggttctgttttgagcttcaagtgttctcagagtacaccttgtccagttaatcgaaaactttggatcccatggatgaagtccaaggaggggcacctgcagaacggcaagatgcagaccaagccaaacgcaaacttcgtgcagccgggcgacctcgtactgtcccacactcctgggcagccgttgcatattaaggtgactcccgatcatgttcagaatactgcgacgctggagattacatctcctactactgaatctcctcatagttacactagtactgccgtgatccccaattgtggcacgcccaagcagagaattaccatactccagaacgcgtccattacgcctgtgaaaagtaagacctccaccgaggatctgatgaatttagaacaggggatgtcgcccatcaccatggctaccttcgcccgggcccagacaccagagagctgcggcagcctcacccctgagagaaccatgtcccctatccaggttctggccgtgaccggaagcgcatccagccccgagcaagggcgtagccctgaacccaccgaaatcagcgctaagcatgctattttccgtgtgagcccagaccgtcagagctcctggcaatttcagcggtccaatagtaatagctcaagcgtgatcactaccgaggacaacaaaatacatatccatctcggatccccctacatgcaggcggttgcttctccagtgcggccggcgagcccctcagccccactccaagacaataggacacaaggcctcattaatggcgcacttaataagacaaccaacaaggtcactagctcgatcactattactcctaccgcaactcccctgcctcgccagtcgcagatcaccgtgagcaacatctacaattag

SEQ ID NO: 33424 - DNA, 3402 bp, Artificial Sequence
  derived and/or modified sequence
atgagaagcagaggaagcgacacggagggatctgcacaaaaaaagttccccaggcataccaaaggccacagcttccagggcccaaagaacatgaaacatagacaacaggataaggactcaccttctgagtctgacgtgatactgccttgtcctaaagccgagaaaccccactctggcaatggccaccaggccgaggacctgtcccgggacgatctgctgtttcttctgtcaatcctcgaaggggagctgcaagccagagacgaagttatcgggatcctgaaagcggagaagatggacttagcgttgctggaggcccaatacggatttgtcactcctaagaaagtgctggaggcgctgcagagagacgcctttcaagcaaaatcaactccctggcaagaagatatctatgaaaagcctatgaatgagttggacaaggtagtggaaaagcacaaagaatcgtaccgccgtatcctcggccaactgctggtggccgaaaagtcccgtcgccagaccatccttgaactcgaagaggaaaagaggaaacacaaggagtacatggagaagtctgacgagtttatctgtttactcgagcaggagtgcgaacgcctgaagaaactgattgatcaggaaattaaatcacaggaggagaaggagcaggagaaagagaaacgcgttacaaccttgaaagaggagttgacgaagctcaagtcattcgccctaatggtagtggacgaacagcagcgactcactgcccaactgaccctgcagagacagaagatccaggaactgaccactaacgctaaagagacacacacaaaactggctctagcagaggccagggtccaggaggaggagcagaaggccacccgcctagagaaggaactgcagacccagaccacaaaattccaccaggaccaggataccatcatggctaagctgaccaatgaggattctcagaatagacagcttcagcagaagctggctgctctctctcgtcagatcgacgagctggaggagactaatcgcagtctgagaaaagctgaggaagaactccaggacattaaagagaagataagtaaaggagaatacggcaacgctggaatcatggctgaggtcgaggaactgcgaaaacgggtcctcgacatggagggcaaggatgaggagcttatcaagatggaggagcaatgccgggatctcaacaaacggctggaaagggagacccttcagagcaaggattttaaacttgaagttgaaaaactgagcaagcgtattatggctctggagaaacttgaggatgctttcaataagagtaagcaggagtgctactcattaaaatgcaacctggaaaaggaacgcatgacaacgaagcagctttctcaggaacttgaatctctgaaggttagaataaaggagctcgaagctattgagtcaaggctcgagaaaaccgagtttactctaaaggaggacttgaccaagctcaagaccctgactgtgatgttcgtcgatgagcggaaaacaatgagcgagaaattgaaaaaaaccgaggataaactacaggccgcatcgtcccagttgcaggtagagcagaacaaggtaaccaccgtcaccgaaaaactaattgaggagacgaaacgcgcactaaaaagcaagaccgacgtcgaagaaaagatgtacagcgtgaccaaagagcgcgacgacttgaagaataagcttaaggctgaagaagagaagggcaacgatctactgtctagggtgaatatgctcaaaaatcgcttgcagtcgctggaagcaatcgaaaaagactttctcaaaaacaagttaaaccaggacagcggtaaatctacaaccgccttacaccaggaaaacaataaaataaaggagttgagccaagaggttgaaagactgaaactgaagttgaaggatatgaaagcaatagaggacgacttgatgaagactgaggatgagtatgagaccttggagcggaggtacgccaacgaacgcgacaaggcacagttcctctctaaagaattagagcacgtgaaaatggagctggccaaatacaagttggctgagaaaaccgagaccagccacgaacagtggctgtttaaaaggcttcaggaggaagaggctaagtccgggcacttatcaagggaggtcgacgccttgaaggaaaaaatccatgagtacatggccaccgaggatttaatctgtcatctacaaggggatcactcggtgttacagaaaaagctgaatcaacaggagaaccgcaatagagacttgggacgcgaaattgaaaatctgacgaaagaactggagcgctatagacacttttctaagtcgcttcggccatctctaaatgggagaaggatatcggatccccaggtgttctcaaaggaagtccagacggaggctgttgataacgagccccctgattacaaatctcttatccctcttgagagagcagttatcaacggtcaactgtatgaagagtccgaaaatcaggatgaggatcctaatgacgagggctccgtcctctcgttcaaatgtagccaatctacgccatgccccgtaaacagaaagttgtggattccatggatgaagtccaaggaaggtcatttacaaaacggtaaaatgcagaccaagccgaatgcgaactttgtacaacccggtgacttggtactttcccacacgccaggacagcctctacacattaaggtcacccctgaccatgtgcaaaatactgcaactctcgagataacatcacctaccacagaaagcccgcattcctacacgagtactgcggttattcctaactgtggcacaccaaaacagcgtattacaatcctgcaaaacgctagtataactcccgtgaagtctaagacctcaaccgaggatcttatgaacctcgaacagggtatgtcgccaatcaccatggccactttcgcccgagcgcaaacacccgaaagctgcggtagtctcacacctgagcggacgatgtcgcccattcaggtgctggcggtcaccggttctgctagctctcccgagcagggcagatctcccgaaccaacagagatcagtgccaaacacgctatctttcgggtgtcgccggatcgacagtcatcttggcagtttcagagatccaacagcaatagcagcagcgtgataactaccgaggacaacaagattcatatacacctgggttctccctatatgcaggccgtcgcttccccagtgcgtccagcttcgccttccgctccactgcaagataacagaacgcaagggctcataaacggcgctctgaataaaacaaccaacaaggtgacttccagcattacaataactcccactgcgactccactcccccgacagagtcagatcaccgtgtcaaatatctataactag

SEQ ID NO: 33425 - DNA, 2682 bp, Artificial Sequence
  derived and/or modified sequence
atggtggtagatgaacaacagcggctcaccgcacagcttacccttcaacggcagaagatccaggagctgactaccaacgcaaaggagacccacaccaaacttgctctggcagaggcccgagtccaggaagaggagcagaaggccactagattggaaaaagagcttcagacacaaacgaccaaatttcatcaggaccaggacaccattatggctaaattaacgaacgaagattctcagaacagacagctgcagcaaaaattggccgctctctctagacagatcgatgagcttgaagagaccaaccgatccttacgtaaagcagaggaagagcttcaagatatcaaggagaaaattagtaagggcgagtatggtaacgccggaatcatggcggaggtggaggaactgcggaagagagtgcttgacatggagggaaaggacgaggagctcatcaagatggaagagcagtgccgtgacctcaataagaggctcgagcgtgagacccttcagagcaaagacttcaaattggaagttgagaagctcagtaaacgcatcatggctttggagaagctggaggacgcctttaacaagagtaaacaggagtgctactcacttaagtgtaacttggagaaggaaagaatgaccacaaagcagctgtctcaggaactggaaagcctgaaggtccggatcaaagaactggaggccatcgagtcaagattggagaagactgagttcaccttgaaagaggatttgaccaagttaaaaactctgactgtgatgttcgttgatgagaggaaaacgatgagcgagaagctgaaaaagacggaggacaaactgcaggcagcctcgtcccagctgcaggttgagcagaataaagttactaccgtcaccgagaagctgatcgaggagacaaaaagggcactgaaatccaagactgatgtagaagagaaaatgtacagcgtgactaaagagcgcgatgacctgaagaacaaactcaaggccgaggaggagaaaggaaatgacctcctctcgagggtgaatatgttaaagaatcgcttacagtcactggaagccatagagaaggactttttgaaaaacaagctaaatcaggattccgggaaaagcactacagctttacaccaggagaataacaaaataaaggagctgtctcaagaggtggaacgcttaaagcttaagctgaaggatatgaaagccatcgaagatgacctcatgaagaccgaagacgaatacgaaacactcgaacggcgttacgcgaatgaacgcgacaaggcccagttcctctccaaagaacttgaacacgtgaagatggagctcgccaaatataaactggccgaaaagaccgaaacttcacacgagcagtggttgttcaaacgccttcaggaagaagaggccaagtctggtcatttaagtcgtgaagtggatgccttgaaagaaaagatccacgaatatatggcaacagaagatctaatttgccacctccagggcgatcacagcgtgctgcagaagaaactaaatcaacaggagaaccggaatcgtgacctgggtcgggaaattgaaaacttgactaaggaacttgaacggtaccggcacttttcaaagtctctgcgacctagccttaatggacggagaatttctgacccccaggtcttctcgaaagaagtgcagaccgaggccgtagacaatgagccaccggactacaagtctcttataccgctcgaaagagcagttattaacggacaactgtacgaggaaagcgagaaccaggatgaagacccaaacgatgaaggcagtgtgctcagcttcaaatgctctcagtcgaccccttgccccgtgaatcgcaagctgtggatcccttggatgaagagcaaggaaggtcaccttcaaaacggaaagatgcagaccaagccaaacgcaaatttcgttcagccaggcgacctggttcttagccatactcctggccagccactgcacatcaaggtcacccccgatcatgtgcagaacacagccaccctggaaatcacaagcccaaccaccgagtctccacattcctatacctctacagcagtgataccgaattgcggcacaccaaagcaaagaatcacaatccttcaaaatgcgagcatcactcccgtgaagagcaagacttccaccgaggaccttatgaatctcgaacaggggatgtctccaatcacgatggctacatttgctcgggcacagaccccagagagctgtggaagcttgaccccagaaagaacaatgtctcccatccaggtactcgccgttaccgggtccgcgtcctcacctgaacagggcagaagtcctgaacctacggagatcagcgcaaagcatgccatctttagggtgtccccagatcggcagtcctcttggcaattccagagatccaattcgaacagctcttccgtgattacaactgaggataacaagatccacattcatcttgggagtccatacatgcaagccgttgctagccccgtgcgaccagccagccccagcgcccctctgcaggacaacagaacacagggtcttataaatggcgcactgaataaaacgaccaacaaggtcactagctccattacgatcacaccaacagctacacccctgcctcggcagtctcaaatcacggtatcaaatatttataattag

SEQ ID NO: 33426 - DNA, 768 bp, Artificial Sequence
  derived and/or modified sequence
atgaggtcccgcggttcggacacagaagggtctgcccagaagaaatttcctagacacacaaaaggccatagctttcagggccctaagaacatgaagcatcgtcagcaagacaaggactccccttccgaatccgatgtcattctgccctgcccaaaggcagagaagccacattccggcaatggacaccaagcggaggatctgtcaagggacgatctgctctttttactgtccatcctggagggcgaattgcaggctagggatgaggtgattggaatcctgaaagccgaaaaaatggacctggcactgctcgaagcccagtatgggttcgtaacccccaagaaagtgctcgaggctctgcagcgcgacgcttttcaagcaaagtcgaccccttggcaggaggacatctatgagaagcccatgaatgagctggacaaagtggtcgagaagcataaggagtcttaccgtcgaatcctggggcagctccttgtggcagagaaaagcaggcggcaaacaatcctagagctggaggaggagaagcgtaagcacaaggaatacatggagaagtctgacgaattcatctgtcttctcgagcaagagtgtgagaggtggagtctggctcttctgcccagactggagtgtaacgggatgatattggcccattgtaacctctgccttctcggttcaagtgattcccctgcttccgcgtttcaggtggccggtatcactggtactaggcaccatgcccagctggtttttgtgttcctgtag

SEQ ID NO: 33427 - DNA, 2640 bp, Artificial Sequence
  derived and/or modified sequence
atggtagtcgacgagcagcagagattaacagcgcaattgaccctgcagcgccagaaaatccaggagctgacaacaaatgcaaaggaaacacacaccaaactggcgcttgccgaggccagagtgcaggaagaagagcaaaaggctaccagactggagaaagagcttcagactcagaccaccaagtttcaccaggaccaggatacgatcatggccaagttaacaaatgaggattcgcaaaatcgccaactgcagcaaaaattggctgctctgtcccggcaaattgatgagctggaagaaactaacaggtccctgcggaaagccgaagaggagctgcaggacattaaggaaaaaatcagcaagggagaatacggcaacgcaggcatcatggccgaggtggaggagttgatcaagatggaggagcagtgtagggacctcaataagcgtctcgaacgcgagactctgcaaagcaaagacttcaaactagaagtggagaaacttagtaagagaatcatggccctggagaagttagaggatgctttcaacaagtccaagcaggagtgctactctctgaaatgcaatctcgaaaaggagaggatgacaacaaagcagttaagccaggagctggaatcccttaaagtacgcatcaaggaactggaagccatcgagtcacggctagaaaagacggaatttactctgaaggaagacctcacaaagcttaagactttgactgtgatgtttgtcgacgaacgcaagactatgtcagagaagctgaaaaaaacagaggacaagctgcaggccgcttcatcacagctgcaggtggaacagaataaagttaccaccgtaacagaaaaacttatagaggagacgaaacgagcgctgaagagcaaaaccgatgtcgaagagaagatgtactccgttacaaaagagcgagacgatctgaaaaataagctgaaagccgaggaggaaaaaggaaatgatctcctgagtcgtgttaatatgctcaagaatcggctacagtcactagaagccattgagaaagactttcttaagaacaaactgaaccaggatagcgggaaatcgactactgcacttcatcaagaaaacaacaagattaaagaactgagccaagaagttgagagactcaagctgaaactgaaagacatgaaagcaatcgaggatgacttaatgaaaactgaggacgaatacgagactctggaacggcgttacgctaacgaacgggacaaggcccagttcctttcaaaagaactggaacatgtcaaaatggaacttgccaagtataagcttgcggaaaaaacagaaacaagccacgagcagtggttgttcaaacgtctgcaggaagaggaagctaagtctgggcatctgagtcgggaagtcgacgccctcaaagaaaaaatccatgagtatatggctaccgaagacctgatttgccacctgcagggcgaccattcggtgctgcagaaaaagctcaaccagcaggaaaatagaaatagggatctgggaagggaaatagagaacctgacgaaggagctggagcgctataggcacttctccaaatctctgcgcccttccctgaacggtaggcggatcagtgaccctcaagtattctcaaaagaagtacagacagaagccgtggataacgaacctcccgactataaatcacttatcccacttgagagagctgttatcaatgggcagctgtacgaggaatctgaaaaccaggatgaggaccccaacgatgaaggctctgtcttgtcttttaagtgctcccagagcacaccttgcccagtcaatcgcaaactgtggattccatggatgaagagcaaggaaggccacctgcagaatggcaagatgcagacaaagccaaacgccaacttcgttcaaccaggtgacctggtgctgtctcatacacccggtcaaccgctccacattaaggtgactcctgaccatgtgcagaacaccgccaccctagaaatcacaagcccaaccacagaatcccctcacagctacaccagtactgcagtcattcctaattgtggcaccccaaagcagagaattacaattctccagaatgcttcaatcactcctgtgaagagcaagacatccacagaagatctgatgaaccttgagcagggcatgagcccaatcaccatggccactttcgcaagagcccagacaccagagagctgcggaagcctaacccccgagcgcactatgtccccgattcaagtcttagccgttacgggttccgcaagctccccagaacagggaaggtctcctgaaccaaccgagatttcggcaaaacacgctatcttcagagtctcgcccgatcggcagtcatcctggcagttccaacggtcaaacagtaacagtagtagtgtcattacaaccgaggataacaagatccacatacacctaggatctccttatatgcaagccgtggcatctcccgtgcgacccgctagtccctctgcccctttgcaggacaacaggacccagggactgatcaacggtgccttgaacaagaccacaaacaaggtcaccagctcaataaccattaccccgaccgcaactcccttacctcgccagtcccaaatcaccgtgtcaaacatctacaactag

SEQ ID NO: 33428 - DNA, 3402 bp, Artificial Sequence
  derived and/or modified sequence
atgagaagcagaggcagcgacaccgagggcagcgcccagaagaagttccccagacacaccaagggccacagcttccagggccccaagaacatgaagcacagacagcaggacaaggacagccccagcgagagcgacgtgatcctgccctgccccaaggccgagaagccccacagcggcaacggccaccaggccgaggacctgagcagagacgacctgctgttcctgctgagcatcctggagggcgagctgcaggccagagacgaggtgatcggcatcctgaaggccgagaagatggacctggccctgctggaggcccagtacggcttcgtgacccccaagaaggtgctggaggccctgcagagagacgccttccaggccaagagcaccccctggcaggaggacatctacgagaagcccatgaacgagctggacaaggtggtggagaagcacaaggagagctacagaagaatcctgggccagctgctggtggccgagaagagcagaagacagaccatcctggagctggaggaggagaagagaaagcacaaggagtacatggagaagagcgacgagttcatctgcctgctggagcaggagtgcgagagactgaagaagctgatcgaccaggagatcaagagccaggaggagaaggagcaggagaaggagaagagagtgaccaccctgaaggaggagctgaccaagctgaagagcttcgccctgatggtggtggacgagcagcagagactgaccgcccagctgaccctgcagagacagaagatccaggagctgaccaccaacgccaaggagacccacaccaagctggccctggccgaggccagagtgcaggaggaggagcagaaggccaccagactggagaaggagctgcagacccagaccaccaagttccaccaggaccaggacaccatcatggccaagctgaccaacgaggacagccagaacagacagctgcagcagaagctggccgccctgagcagacagatcgacgagctggaggagaccaacagaagcctgagaaaggccgaggaggagctgcaggacatcaaggagaagatcagcaagggcgagtacggcaacgccggcatcatggccgaggtggaggagctgagaaagagagtgctggacatggagggcaaggacgaggagctgatcaagatggaggagcagtgcagagacctgaacaagagactggagagagagaccctgcagagcaaggacttcaagctggaggtggagaagctgagcaagagaatcatggccctggagaagctggaggacgccttcaacaagagcaagcaggagtgctacagcctgaagtgcaacctggagaaggagagaatgaccaccaagcagctgagccaggagctggagagcctgaaggtgagaatcaaggagctggaggccatcgagagcagactggagaagaccgagttcaccctgaaggaggacctgaccaagctgaagaccctgaccgtgatgttcgtggacgagagaaagaccatgagcgagaagctgaagaagaccgaggacaagctgcaggccgccagcagccagctgcaggtggagcagaacaaggtgaccaccgtgaccgagaagctgatcgaggagaccaagagagccctgaagagcaagaccgacgtggaggagaagatgtacagcgtgaccaaggagagagacgacctgaagaacaagctgaaggccgaggaggagaagggcaacgacctgctgagcagagtgaacatgctgaagaacagactgcagagcctggaggccatcgagaaggacttcctgaagaacaagctgaaccaggacagcggcaagagcaccaccgccctgcaccaggagaacaacaagatcaaggagctgagccaggaggtggagagactgaagctgaagctgaaggacatgaaggccatcgaggacgacctgatgaagaccgaggacgagtacgagaccctggagagaagatacgccaacgagagagacaaggcccagttcctgagcaaggagctggagcacgtgaagatggagctggccaagtacaagctggccgagaagaccgagaccagccacgagcagtggctgttcaagagactgcaggaggaggaggccaagagcggccacctgagcagagaggtggacgccctgaaggagaagatccacgagtacatggccaccgaggacctgatctgccacctgcagggcgaccacagcgtgctgcagaagaagctgaaccagcaggagaacagaaacagagacctgggcagagagatcgagaacctgaccaaggagctggagagatacagacacttcagcaagagcctgagacccagcctgaacggcagaagaatcagcgacccccaggtgttcagcaaggaggtgcagaccgaggccgtggacaacgagccccccgactacaagagcctgatccccctggagagagccgtgatcaacggccagctgtacgaggagagcgagaaccaggacgaggaccccaacgacgagggcagcgtgctgagcttcaagtgcagccagagcaccccctgccccgtgaacagaaagctgtggatcccctggatgaagagcaaggagggccacctgcagaacggcaagatgcagaccaagcccaacgccaacttcgtgcagcccggcgacctggtgctgagccacacccccggccagcccctgcacatcaaggtgacccccgaccacgtgcagaacaccgccaccctggagatcaccagccccaccaccgagagcccccacagctacaccagcaccgccgtgatccccaactgcggcacccccaagcagagaatcaccatcctgcagaacgccagcatcacccccgtgaagagcaagaccagcaccgaggacctgatgaacctggagcagggcatgagccccatcaccatggccaccttcgccagagcccagacccccgagagctgcggcagcctgacccccgagagaaccatgagccccatccaggtgctggccgtgaccggcagcgccagcagccccgagcagggcagaagccccgagcccaccgagatcagcgccaagcacgccatcttcagagtgagccccgacagacagagcagctggcagttccagagaagcaacagcaacagcagcagcgtgatcaccaccgaggacaacaagatccacatccacctgggcagcccctacatgcaggccgtggccagccccgtgagacccgccagccccagcgcccccctgcaggacaacagaacccagggcctgatcaacggcgccctgaacaagaccaccaacaaggtgaccagcagcatcaccatcacccccaccgccacccccctgcccagacagagccagatcaccgtgagcaacatctacaactag

SEQ ID NO: 33429 - DNA, 2682 bp, Artificial Sequence
  derived and/or modified sequence
atggtggtggacgagcagcagagactgaccgcccagctgaccctgcagagacagaagatccaggagctgaccaccaacgccaaggagacccacaccaagctggccctggccgaggccagagtgcaggaggaggagcagaaggccaccagactggagaaggagctgcagacccagaccaccaagttccaccaggaccaggacaccatcatggccaagctgaccaacgaggacagccagaacagacagctgcagcagaagctggccgccctgagcagacagatcgacgagctggaggagaccaacagaagcctgagaaaggccgaggaggagctgcaggacatcaaggagaagatcagcaagggcgagtacggcaacgccggcatcatggccgaggtggaggagctgagaaagagagtgctggacatggagggcaaggacgaggagctgatcaagatggaggagcagtgcagagacctgaacaagagactggagagagagaccctgcagagcaaggacttcaagctggaggtggagaagctgagcaagagaatcatggccctggagaagctggaggacgccttcaacaagagcaagcaggagtgctacagcctgaagtgcaacctggagaaggagagaatgaccaccaagcagctgagccaggagctggagagcctgaaggtgagaatcaaggagctggaggccatcgagagcagactggagaagaccgagttcaccctgaaggaggacctgaccaagctgaagaccctgaccgtgatgttcgtggacgagagaaagaccatgagcgagaagctgaagaagaccgaggacaagctgcaggccgccagcagccagctgcaggtggagcagaacaaggtgaccaccgtgaccgagaagctgatcgaggagaccaagagagccctgaagagcaagaccgacgtggaggagaagatgtacagcgtgaccaaggagagagacgacctgaagaacaagctgaaggccgaggaggagaagggcaacgacctgctgagcagagtgaacatgctgaagaacagactgcagagcctggaggccatcgagaaggacttcctgaagaacaagctgaaccaggacagcggcaagagcaccaccgccctgcaccaggagaacaacaagatcaaggagctgagccaggaggtggagagactgaagctgaagctgaaggacatgaaggccatcgaggacgacctgatgaagaccgaggacgagtacgagaccctggagagaagatacgccaacgagagagacaaggcccagttcctgagcaaggagctggagcacgtgaagatggagctggccaagtacaagctggccgagaagaccgagaccagccacgagcagtggctgttcaagagactgcaggaggaggaggccaagagcggccacctgagcagagaggtggacgccctgaaggagaagatccacgagtacatggccaccgaggacctgatctgccacctgcagggcgaccacagcgtgctgcagaagaagctgaaccagcaggagaacagaaacagagacctgggcagagagatcgagaacctgaccaaggagctggagagatacagacacttcagcaagagcctgagacccagcctgaacggcagaagaatcagcgacccccaggtgttcagcaaggaggtgcagaccgaggccgtggacaacgagccccccgactacaagagcctgatccccctggagagagccgtgatcaacggccagctgtacgaggagagcgagaaccaggacgaggaccccaacgacgagggcagcgtgctgagcttcaagtgcagccagagcaccccctgccccgtgaacagaaagctgtggatcccctggatgaagagcaaggagggccacctgcagaacggcaagatgcagaccaagcccaacgccaacttcgtgcagcccggcgacctggtgctgagccacacccccggccagcccctgcacatcaaggtgacccccgaccacgtgcagaacaccgccaccctggagatcaccagccccaccaccgagagcccccacagctacaccagcaccgccgtgatccccaactgcggcacccccaagcagagaatcaccatcctgcagaacgccagcatcacccccgtgaagagcaagaccagcaccgaggacctgatgaacctggagcagggcatgagccccatcaccatggccaccttcgccagagcccagacccccgagagctgcggcagcctgacccccgagagaaccatgagccccatccaggtgctggccgtgaccggcagcgccagcagccccgagcagggcagaagccccgagcccaccgagatcagcgccaagcacgccatcttcagagtgagccccgacagacagagcagctggcagttccagagaagcaacagcaacagcagcagcgtgatcaccaccgaggacaacaagatccacatccacctgggcagcccctacatgcaggccgtggccagccccgtgagacccgccagccccagcgcccccctgcaggacaacagaacccagggcctgatcaacggcgccctgaacaagaccaccaacaaggtgaccagcagcatcaccatcacccccaccgccacccccctgcccagacagagccagatcaccgtgagcaacatctacaactag

SEQ ID NO: 33430 - DNA, 768 bp, Artificial Sequence
  derived and/or modified sequence
atgagaagcagaggcagcgacaccgagggcagcgcccagaagaagttccccagacacaccaagggccacagcttccagggccccaagaacatgaagcacagacagcaggacaaggacagccccagcgagagcgacgtgatcctgccctgccccaaggccgagaagccccacagcggcaacggccaccaggccgaggacctgagcagagacgacctgctgttcctgctgagcatcctggagggcgagctgcaggccagagacgaggtgatcggcatcctgaaggccgagaagatggacctggccctgctggaggcccagtacggcttcgtgacccccaagaaggtgctggaggccctgcagagagacgccttccaggccaagagcaccccctggcaggaggacatctacgagaagcccatgaacgagctggacaaggtggtggagaagcacaaggagagctacagaagaatcctgggccagctgctggtggccgagaagagcagaagacagaccatcctggagctggaggaggagaagagaaagcacaaggagtacatggagaagagcgacgagttcatctgcctgctggagcaggagtgcgagagatggagcctggccctgctgcccagactggagtgcaacggcatgatcctggcccactgcaacctgtgcctgctgggcagcagcgacagccccgccagcgccttccaggtggccggcatcaccggcaccagacaccacgcccagctggtgttcgtgttcctgtag

SEQ ID NO: 33431 - DNA, 2640 bp, Artificial Sequence
  derived and/or modified sequence
atggtggtggacgagcagcagagactgaccgcccagctgaccctgcagagacagaagatccaggagctgaccaccaacgccaaggagacccacaccaagctggccctggccgaggccagagtgcaggaggaggagcagaaggccaccagactggagaaggagctgcagacccagaccaccaagttccaccaggaccaggacaccatcatggccaagctgaccaacgaggacagccagaacagacagctgcagcagaagctggccgccctgagcagacagatcgacgagctggaggagaccaacagaagcctgagaaaggccgaggaggagctgcaggacatcaaggagaagatcagcaagggcgagtacggcaacgccggcatcatggccgaggtggaggagctgatcaagatggaggagcagtgcagagacctgaacaagagactggagagagagaccctgcagagcaaggacttcaagctggaggtggagaagctgagcaagagaatcatggccctggagaagctggaggacgccttcaacaagagcaagcaggagtgctacagcctgaagtgcaacctggagaaggagagaatgaccaccaagcagctgagccaggagctggagagcctgaaggtgagaatcaaggagctggaggccatcgagagcagactggagaagaccgagttcaccctgaaggaggacctgaccaagctgaagaccctgaccgtgatgttcgtggacgagagaaagaccatgagcgagaagctgaagaagaccgaggacaagctgcaggccgccagcagccagctgcaggtggagcagaacaaggtgaccaccgtgaccgagaagctgatcgaggagaccaagagagccctgaagagcaagaccgacgtggaggagaagatgtacagcgtgaccaaggagagagacgacctgaagaacaagctgaaggccgaggaggagaagggcaacgacctgctgagcagagtgaacatgctgaagaacagactgcagagcctggaggccatcgagaaggacttcctgaagaacaagctgaaccaggacagcggcaagagcaccaccgccctgcaccaggagaacaacaagatcaaggagctgagccaggaggtggagagactgaagctgaagctgaaggacatgaaggccatcgaggacgacctgatgaagaccgaggacgagtacgagaccctggagagaagatacgccaacgagagagacaaggcccagttcctgagcaaggagctggagcacgtgaagatggagctggccaagtacaagctggccgagaagaccgagaccagccacgagcagtggctgttcaagagactgcaggaggaggaggccaagagcggccacctgagcagagaggtggacgccctgaaggagaagatccacgagtacatggccaccgaggacctgatctgccacctgcagggcgaccacagcgtgctgcagaagaagctgaaccagcaggagaacagaaacagagacctgggcagagagatcgagaacctgaccaaggagctggagagatacagacacttcagcaagagcctgagacccagcctgaacggcagaagaatcagcgacccccaggtgttcagcaaggaggtgcagaccgaggccgtggacaacgagccccccgactacaagagcctgatccccctggagagagccgtgatcaacggccagctgtacgaggagagcgagaaccaggacgaggaccccaacgacgagggcagcgtgctgagcttcaagtgcagccagagcaccccctgccccgtgaacagaaagctgtggatcccctggatgaagagcaaggagggccacctgcagaacggcaagatgcagaccaagcccaacgccaacttcgtgcagcccggcgacctggtgctgagccacacccccggccagcccctgcacatcaaggtgacccccgaccacgtgcagaacaccgccaccctggagatcaccagccccaccaccgagagcccccacagctacaccagcaccgccgtgatccccaactgcggcacccccaagcagagaatcaccatcctgcagaacgccagcatcacccccgtgaagagcaagaccagcaccgaggacctgatgaacctggagcagggcatgagccccatcaccatggccaccttcgccagagcccagacccccgagagctgcggcagcctgacccccgagagaaccatgagccccatccaggtgctggccgtgaccggcagcgccagcagccccgagcagggcagaagccccgagcccaccgagatcagcgccaagcacgccatcttcagagtgagccccgacagacagagcagctggcagttccagagaagcaacagcaacagcagcagcgtgatcaccaccgaggacaacaagatccacatccacctgggcagcccctacatgcaggccgtggccagccccgtgagacccgccagccccagcgcccccctgcaggacaacagaacccagggcctgatcaacggcgccctgaacaagaccaccaacaaggtgaccagcagcatcaccatcacccccaccgccacccccctgcccagacagagccagatcaccgtgagcaacatctacaactag

SEQ ID NO: 33432 - protein, 34 aa, Artificial Sequence
  derived and/or modified sequence
DAECEICKFVIQQVEAFIESNHSQAEIQKELNKL

SEQ ID NO: 33433 - protein, 527 aa, Artificial Sequence
  derived and/or modified sequence
MYALFLLASLLGAALAGPVLGLKECTRGSAVWCQNVKTASDCGAVKHCLQTVWNKPTVKSLPCDICKDVVTAAGDMLKDNATEEEILVYLEKTCDWLPKPNMSASCKEIVDSYLPVILDIIKGEMSRPGEVCSALNLCESLQKHLAELNHQKQLESNKIPELDMTEVVAPFMANIPLLLYPQDGPRSKPQPKDNGDVCQDCIQMVTDIQTAVRTNSTFVQALVEHVKEECDRLGPGMADICKNYISQYSEIAIQMMMHMSAEQPKEICALVGFCDEVKEMPMQTLVPAKVASKNVIPALELVEPIKKHEVPAKSDVYCEVCEFLVKEVTKLIDNNKTEKEILDAFDKMCSKLPKSLSEECQEVVDTYGSSILSILLEEVSPELVCSMLHLCSGTRLPALTVHVTQPKDGGFCEVCKKLVGYLDRNLEKNSTKQEILAALEKGCSFLPDPYQKQCDQFVAEYEPVLIEILVEVMDPSFVCLKIGACPSAHKPLLGTEKCIWGPSYWCQNTETAAQCNAVEHCKRHVWN

SEQ ID NO: 33434 - protein, 530 aa, Artificial Sequence
  derived and/or modified sequence
DGAMYALFLLASLLGAALAGPVLGLKECTRGSAVWCQNVKTASDCGAVKHCLQTVWNKPTVKSLPCDICKDVVTAAGDMLKDNATEEEILVYLEKTCDWLPKPNMSASCKEIVDSYLPVILDIIKGEMSRPGEVCSALNLCESLQKHLAELNHQKQLESNKIPELDMTEVVAPFMANIPLLLYPQDGPRSKPQPKDNGDVCQDCIQMVTDIQTAVRTNSTFVQALVEHVKEECDRLGPGMADICKNYISQYSEIAIQMMMHMSAEQPKEICALVGFCDEVKEMPMQTLVPAKVASKNVIPALELVEPIKKHEVPAKSDVYCEVCEFLVKEVTKLIDNNKTEKEILDAFDKMCSKLPKSLSEECQEVVDTYGSSILSILLEEVSPELVCSMLHLCSGTRLPALTVHVTQPKDGGFCEVCKKLVGYLDRNLEKNSTKQEILAALEKGCSFLPDPYQKQCDQFVAEYEPVLIEILVEVMDPSFVCLKIGACPSAHKPLLGTEKCIWGPSYWCQNTETAAQCNAVEHCKRHVWN

SEQ ID NO: 33435 - DNA, 1584 bp, Artificial Sequence
  derived and/or modified sequence
atgtatgcactcttcttattggcatctctgctgggggccgcgcttgcaggaccagttttgggactgaaggagtgtacccgcgggtctgcagtgtggtgccagaacgtgaaaaccgcgagtgactgcggggccgtgaagcactgcctgcagacggtctggaacaagccaacggtgaagtcattgccctgcgacatctgtaaagacgtggtgactgccgcaggagatatgctaaaggataacgcaacggaagaggagatacttgtgtatctggaaaaaacctgcgattggctgcccaaacccaacatgagtgccagttgtaaggagatcgtggactcatacctgccggtaatcctggacatcataaagggcgaaatgtcacgtcctggcgaggtgtgtagcgctctgaacctgtgtgagtcgctgcagaagcatttggccgagcttaatcatcagaagcagctggaatctaacaagattcccgagctcgacatgacggaagtagtagcccccttcatggccaatataccactgctgctctacccacaggatggacctcgtagcaaaccacaaccgaaggataatggtgatgtttgtcaggactgcatccagatggtcaccgacattcagaccgccgtgcgcaccaattctacctttgtccaggctttggtggagcacgttaaagaggagtgcgatagactaggtcccgggatggccgacatttgcaagaactacatcagtcagtacagcgagatcgccatccagatgatgatgcacatgtcagctgaacagccaaaagagatctgcgctctcgtggggttctgcgatgaagttaaagagatgcccatgcaaaccctcgtgcccgccaaggttgcaagtaaaaacgtgatcccagctctcgaattagtggagccaatcaagaagcatgaggtgccagcgaagtccgatgtttactgtgaggtctgcgaattcttggttaaggaagttacaaagctcattgataacaataaaacggagaaggaaatacttgacgcatttgataaaatgtgtagcaagttacccaagtctctgagcgaggagtgtcaggaagtggtagatacctatggttcatctatcttgagtatcctcctcgaagaggtgtcccccgagcttgtttgcagtatgctgcacctctgctccggaacacgcttgccagccctgaccgtccacgttacacagcccaaagacggcgggttctgtgaagtctgtaagaaactagtcggatatctcgaccgtaacctcgaaaaaaacagtactaaacaggaaattctggcagcactagaaaaaggttgctcctttctccctgacccctatcaaaaacagtgtgaccaattcgtcgccgaatatgagcccgtgctcatagagatcctggtcgaggtgatggacccctcattcgtatgcctgaagataggggcctgtccatctgcccacaagcccctgctggggactgagaaatgcatttggggaccctcttactggtgccaaaacactgaaaccgctgctcagtgcaacgccgtcgaacattgcaaacgacatgtctggaactag

SEQ ID NO: 33436 - DNA, 1593 bp, Artificial Sequence
  derived and/or modified sequence
gacggagctatgtatgcattatttttgcttgcctctttgctgggtgctgcattagctggccccgttctaggtctcaaagagtgcacccgcgggtcggccgtatggtgccagaacgtaaaaacagcctcagactgcggggcagtcaagcattgcttacaaactgtgtggaacaaacccacagtcaagtcccttccttgcgatatttgtaaggatgtcgtcacagccgccggcgatatgctgaaggacaacgctaccgaggaggaaatcctcgtatatttggaaaaaacgtgcgattggctgccaaagcctaatatgagtgcaagttgtaaagagattgtggacagttatctgcctgttatactagatatcattaagggagagatgtctcgccccggtgaggtatgctcagcgctcaacctttgtgagtcgttacagaaacatctggccgagctaaatcaccaaaagcagctcgagtccaataagatcccagaactggacatgacggaggtagtggcaccttttatggctaatatcccactcctgctgtacccccaagacggtccccgtagcaagccccagcccaaggataacggagacgtgtgccaagattgcatacagatggtgacagacatccagaccgccgtaaggactaactccacattcgtgcaggccctggtcgaacacgtgaaggaggagtgcgaccgattaggccccggtatggctgacatctgcaaaaactatatcagccagtactccgagatcgcaattcagatgatgatgcacatgtcagctgagcagcctaaagagatctgcgccttggtcgggttctgcgacgaagtgaaggagatgcctatgcagaccctggtcccggccaaggtggccagtaaaaacgtgattcccgctttggaactggttgagcccatcaaaaagcacgaggtacctgctaagagcgatgtgtattgtgaagtttgcgagtttcttgtcaaggaagtcactaaactcattgacaataataaaaccgaaaaggaaatattagatgcctttgataagatgtgtagtaagcttccaaaatccctaagtgaggaatgccaagaagtggtggacacctatggatctagcatactgagcatcctgctggaggaggtgagccctgaactggtgtgttcgatgctgcatttatgctccggaacacggctacctgccctgactgttcacgtcacccagcccaaagatgggggcttttgtgaggtatgcaaaaaactggtgggttacctggatcggaatctcgagaagaatagtactaaacaggaaattctggcagcattagaaaaaggctgcagcttcttgcctgatccctatcagaagcagtgcgatcagtttgtggcagagtacgaacccgtgctcattgaaatcctggtcgaggtcatggacccatccttcgtgtgtctgaaaatcggcgcttgtccatcagctcataaaccactcttaggcactgaaaagtgtatctggggtccgagctattggtgtcaaaacactgagacggcagcccagtgtaacgccgtggagcactgtaaacgccatgtatggaattag

SEQ ID NO: 33437 - DNA, 1584 bp, Artificial Sequence
  derived and/or modified sequence
atgtatgccctcttcctgctggccagcctgctgggcgccgccctggccggccctgtgctgggcctgaaggagtgcacccggggcagcgctgtgtggtgccagaatgtgaagacagccagtgactgtggggctgtgaagcactgcctgcagacagtgtggaacaagcccaccgtgaagagcctgccctgtgacatctgcaaggatgtggtgacagctgctggggacatgctgaaggacaatgccacagaggaggagatcctggtgtacctggagaagacctgtgactggctgcccaagcccaacatgtctgccagctgcaaggagatcgtggacagctacctgcctgtgatcctggacatcatcaagggggagatgagcaggcctggagaggtgtgcagcgccctgaacctgtgtgagagcctgcagaagcacctggccgagctgaaccaccagaagcagctggagagcaacaagatccctgagctggacatgacagaggtggtggcccccttcatggccaacatccccctgctgctgtacccccaggacggccccaggagcaagccccagcccaaggacaatggagatgtgtgccaggactgcatccagatggtgacagacatccagacagctgtgaggaccaacagcacctttgtgcaggccctggtggagcacgtgaaggaggagtgtgaccggctgggccctggcatggctgacatctgcaagaactacatcagccagtacagcgagatcgccatccagatgatgatgcacatgtctgctgagcagcccaaggagatctgtgccctggtgggcttctgtgatgaggtgaaggagatgcccatgcagaccctggtgcctgccaaggtggccagcaagaatgtcatcccagccctggagctggtggagcccatcaagaagcatgaggtgcctgccaagagtgatgtgtactgtgaggtgtgtgagttcctggtgaaggaggtgaccaagctgattgacaacaacaagacagagaaggagatcctggatgcctttgacaagatgtgcagcaagctgcccaagagcctgtctgaggagtgccaggaggtggtggacacctacggcagcagcatcctgagcatcctgctggaggaggtgtccccagagctggtgtgcagcatgctgcacctgtgcagcggcacccggctgcctgccctgactgtgcacgtgacccagcccaaggatggcggcttctgtgaggtgtgcaagaagctggtgggctacctggacaggaacctggagaagaacagcaccaagcaggagatcctggccgccctggagaagggctgcagcttcctgcctgacccctaccagaagcagtgtgaccagtttgtggccgagtatgagcctgtgctgattgagatcctggtggaggtgatggaccccagctttgtgtgcctgaagatcggggcctgccccagcgcccacaagcccctgctgggcacagagaagtgcatctggggccccagctactggtgccagaacacagaaacagctgcccagtgcaatgctgtggagcactgcaagagacatgtgtggaactag

SEQ ID NO: 33438 - DNA, 1593 bp, Artificial Sequence
  derived and/or modified sequence
gatggagccatgtatgccctcttcctgctggccagcctgctgggcgccgccctggccggccctgtgctgggcctgaaggaatgtacccggggcagcgctgtgtggtgccagaatgtgaagacagccagtgactgtggggctgtgaagcactgcctgcagacagtgtggaacaagcccaccgtgaagagcctgccctgtgacatctgcaaggatgtggtgacagctgctggggacatgctgaaggacaatgccacagaggaggagatcctggtgtacctggagaagacctgtgactggctgcccaagcccaacatgtctgccagctgcaaggagatcgtggacagctacctgcccgtcatcctggacatcatcaagggggagatgagcaggcctggagaggtgtgcagcgccctgaacctgtgtgagagcctgcagaagcacctggccgagctgaaccaccagaagcagctggagagcaacaagatccctgagctggacatgacagaggtggtggcccccttcatggccaacatccccctgctgctgtacccccaggacggccccaggagcaagccccagcccaaggacaatggagatgtgtgccaggactgcatccagatggtgacagacatccagacagctgtgaggaccaacagcacctttgtgcaggccctggtggagcacgtgaaggaggagtgtgaccggctgggccctggcatggctgacatctgcaagaactacatcagccagtacagcgagatcgccatccagatgatgatgcacatgtctgctgagcagcccaaggagatctgtgccctggtgggcttctgtgatgaggtgaaggagatgcccatgcagaccctggtgcctgccaaggtggccagcaagaatgtcatcccagccctggagctggtggagcccatcaagaagcatgaggtgcctgccaagagtgatgtgtactgtgaggtgtgtgagttcctggtgaaggaggtgaccaagctgattgacaacaacaagacagagaaggagatcctggatgcctttgacaagatgtgcagcaagctgcccaagagcctgtctgaggagtgccaggaggtggtggacacctacggcagcagcatcctgagcatcctgctggaggaggtgtccccagagctggtgtgcagcatgctgcacctgtgcagcggcacccggctgcctgccctgactgtgcacgtgacccagcccaaggatggcggcttctgtgaggtgtgcaagaagctggtgggctacctggacaggaacctggagaagaacagcaccaagcaggagatcctggccgccctggagaagggctgcagcttcctgcctgacccctaccagaagcagtgtgaccagtttgtggccgagtatgagcctgtgctgattgagatcctggtggaggtgatggaccccagctttgtgtgcctgaagattggagcctgccccagcgcccacaagcccctgctgggcacagagaagtgcatctggggccccagctactggtgccagaacacagaaacagctgcccagtgcaatgctgtggagcactgcaagagacatgtgtggaactag

SEQ ID NO: 33439 - DNA, 1584 bp, Artificial Sequence
  derived and/or modified sequence
atgtacgccctgttcctgctggccagcctgctgggcgccgccctggccgggcctgtccttggcttaaaggagtgtacgcggggcagcgccgtgtggtgccagaatgtgaagacagcttctgactgtggagccgttaaacactgccttcaaaccgtgtggaataaacccactgtcaagtcactgccttgtgatatctgcaaggatgtggtgaccgctgctggggacatgctcaaagataacgctacggaagaggagattttggtgtacctagagaagacctgcgattggctgcctaagcctaatatgtctgcctcttgtaaggaaattgtcgacagttacctgccagtgatcctcgacatcataaagggagagatgtctaggcccggcgaagtctgcagcgcccttaatttgtgcgagagcctgcagaaacacctggctgaactgaatcaccagaagcaactggaaagtaacaaaatccctgagcttgatatgaccgaggtggtggccccatttatggccaatatacctctgcttttgtaccctcaagacgggccacgtagcaaaccacagccgaaggataatggtgatgtgtgccaggactgcatccaaatggtgacagacatccagaccgcagtgcgaaccaattcaacatttgtgcaggcccttgtggagcacgtaaaagaagaatgtgatcggctcggccccggaatggccgacatatgtaaaaattatatcagccagtacagcgaaattgccatccagatgatgatgcacatgtccgccgaacagccgaaggaaatctgtgctctggtgggcttctgcgacgaggtcaaagagatgcccatgcagacactggtgccggcaaaggttgcctccaagaatgttattcctgccctcgagctcgtcgagcccatcaagaagcatgaggtgcccgccaaatctgatgtctattgtgaggtttgtgagttcctcgtgaaggaggtgactaaactgattgataataataaaacagagaaggagattctagacgccttcgacaagatgtgctcaaagttgccaaaaagtctatccgaagaatgtcaggaggtggtggacacatatggtagctctatactgagcatcctgcttgaggaagtgtcgccggagttagtgtgcagtatgctccacctctgctctgggacacgccttccggcacttactgttcatgtaactcagcctaaagacggaggtttttgcgaggtctgcaagaaactggtaggttacctcgaccgcaatctggaaaagaactctaccaagcaggaaatccttgccgctctggagaagggatgctccttcttgcccgacccctaccaaaaacaatgcgaccagtttgtcgctgaatatgagccagtcctcatcgagattctggtggaagtgatggaccccagttttgtatgccttaaaattggagcatgcccctcagcgcataaacctctcctgggtacagagaagtgcatttggggtccgtcctactggtgccaaaacacagagacagccgctcagtgtaatgcagtggaacattgtaagaggcatgtgtggaactag

SEQ ID NO: 33440 - DNA, 1593 bp, Artificial Sequence
  derived and/or modified sequence
gacggcgccatgtacgccctgttcctgctggccagcctgctgggcgccgctttagctggacctgtactgggtcttaaggagtgcacccgtggtagtgccgtgtggtgtcagaatgtgaagactgcctccgactgcggggccgttaaacactgcctccagaccgtctggaataaacccactgtgaagagtttgccatgcgacatctgtaaagacgttgtgaccgccgcaggggacatgctgaaggacaacgcgacagaggaggaaattctagtatatctggagaagacctgtgactggctccccaagcctaatatgtctgctagctgcaaagaaatcgtggatagctatttgccggtgatcttggacatcatcaagggagagatgtcccggcctggggaggtgtgttcagccttaaatctctgtgagagtctccaaaagcatcttgcagagcttaaccaccaaaagcagttggagagcaacaaaattccggaactggatatgactgaggtggtcgccccgtttatggccaatattcccctgctgctctacccacaggatggaccaagatctaaaccacagcccaaggataacggggacgtgtgtcaagactgcattcaaatggtcaccgacattcagactgccgtccggacaaatagcaccttcgtccaagccctggtggagcacgttaaagaagaatgcgatcggctaggacccggcatggcagatatctgcaaaaactacatcagtcagtactctgagatcgccattcagatgatgatgcatatgtctgcagaacagccaaaggaaatttgcgctctggtcgggttttgcgacgaggtgaaagagatgccaatgcagaccctcgtgccagccaaagtcgcttcaaagaacgtaatcccagccctggagctggtcgagccaataaaaaagcacgaggttccagctaagagcgacgtttattgtgaggtgtgtgagttcctggttaaggaggtgacaaagctgattgacaataataagactgagaaagagatcctggacgccttcgataagatgtgctccaaattacccaaaagcctgtctgaagagtgccaggaagtggtggacacatacggttcaagcatactgagtattctgcttgaggaggtgtccccggaactcgtctgttctatgctccatctttgcagcggaaccagacttcccgctcttacagtgcacgttacccagcccaaagatggcggcttttgtgaagtgtgcaagaaactcgttggctacctggaccgcaatctcgagaaaaacagcacaaaacaagaaattctggcggctcttgagaaaggctgctcatttctgccagatccttaccagaagcaatgcgaccagttcgtagccgaatacgagccagtcttaatagagatcctcgtggaggtgatggacccaagctttgtgtgtctaaaaataggagcctgtcccagcgctcacaaaccattactggggaccgagaagtgtatctggggaccatcgtattggtgtcagaatacagagaccgccgctcagtgcaacgccgttgaacattgcaagagacacgtgtggaactag

SEQ ID NO: 33441 - DNA, 1584 bp, Artificial Sequence
  derived and/or modified sequence
atgtacgctctgttcctgctagcgagcttgctgggggcagcgctcgcaggacctgtgctggggcttaaagagtgcacacgcggaagcgccgtgtggtgtcaaaatgtcaagactgcctccgactgcggcgctgtgaagcactgccttcagaccgtctggaacaaaccaactgtgaagtccctgccatgcgatatctgtaaagatgtagtcacagcggctggcgatatgctaaaggataatgccacggaagaggaaattcttgtttatttggagaagacttgcgactggctgccgaaacccaatatgtcagcctcctgcaaagagattgtggattcctatttgccagtaatactcgatatcataaagggcgagatgtcccggccaggagaggtgtgctctgcactcaatttgtgcgagtccctgcaaaagcatttagccgagctgaatcatcagaagcagctggagagtaacaagataccggaactcgatatgaccgaagtggtcgccccatttatggctaatatcccactcctcctctacccacaggatggacccagaagcaagccccaacccaaagataatggagacgtctgtcaagattgcatacaaatggtgactgatattcagacggcagtgcgcacgaactctaccttcgtgcaagcacttgtcgaacacgtgaaggaagaatgtgacagactcggtcctggcatggcagacatttgcaagaattatattagtcagtacagcgagatcgcaatccagatgatgatgcacatgagcgcggagcagccgaaggaaatctgtgctctggtggggttctgcgacgaggtcaaggaaatgccaatgcaaacccttgtccctgctaaggtggcctctaagaatgtgatacctgctctagagcttgttgaacctatcaaaaagcacgaggtacctgccaaaagcgacgtgtactgcgaagtctgcgaattcttggtcaaagaggtgactaaattgatagataacaacaagaccgagaaggagattctggatgccttcgataaaatgtgtagtaaattgccgaaatccctttcagaggaatgtcaggaagtggtggacacctatggctccagcatattgagcatcctactcgaggaagttagcccagagctcgtttgctccatgctgcacctctgttctgggaccaggttacccgctcttaccgtgcacgtgacccagccaaaagatggtggcttctgcgaggtctgcaaaaagctggttggctatcttgaccgcaaccttgagaagaattcgacaaaacaggaaattctcgcagcattggagaaggggtgctcctttctgccagacccttaccagaaacaatgcgatcagtttgtggcggaatatgaacctgtgttaatcgagattctggtcgaggtcatggatcccagtttcgtgtgcctgaaaatcggcgcttgtccaagcgcacacaagccattgttgggcacagaaaagtgcatatggggaccatcatattggtgccagaacaccgagacagctgcccagtgtaacgctgttgagcactgcaaacggcacgtgtggaattag

SEQ ID NO: 33442 - DNA, 1593 bp, Artificial Sequence
  derived and/or modified sequence
gatggcgcaatgtacgcactgtttctcctggcctcgctgctgggcgctgctctagctggcccagtcctcggattaaaggagtgtacccgcggatcagctgtgtggtgccagaacgtgaagacagccagtgactgcggtgctgttaagcattgcctgcagaccgtatggaacaagcccaccgtgaagagtttgccctgcgacatctgtaaagacgtggtgacagcagcaggagatatgctgaaagacaacgccacggaggaggaaatactcgtctacttagagaagacttgcgattggcttcccaaacctaatatgagtgcatcctgcaaggagattgtggactcctatctccctgtgatccttgatatcataaaaggtgaaatgagtaggcccggtgaagtgtgttccgctctcaatctgtgtgagtcgcttcagaagcatttagcagagctgaatcaccaaaagcagctggagagtaacaagatcccagagctggacatgactgaagtggtggcaccttttatggcgaatatccctctgcttctatatcctcaggatggccctcgaagcaaaccacagccaaaagataatggggacgtttgccaggactgtatacagatggtcactgatattcagactgccgtacgaaccaattccactttcgtccaggcgcttgtggagcacgtgaaagaggagtgcgatcggctgggacctggcatggctgacatttgtaaaaattacatttctcaatatagcgaaattgccattcagatgatgatgcatatgtctgccgagcagcctaaggagatctgtgctctcgtggggttttgcgatgaagtgaaggagatgccgatgcaaaccctagtgccggcaaaggtggcttctaagaatgtgatacccgcattggagcttgtggaacccattaaaaaacacgaagtgccggctaaatcagacgtttactgtgaggtgtgcgaatttctggttaaagaagttaccaaactgatcgataacaacaaaaccgagaaagagatcttggatgcttttgataaaatgtgttctaaactgcctaagtctctgagcgaggagtgccaggaggtggtcgacacctatggcagcagcatcttgagcatcctcttggaggaagtttcacctgaactggtctgcagcatgctgcacttatgctccgggacaagattgccagctctcaccgttcacgtaacacaacccaaagatggcggattctgcgaagtctgcaaaaaactggtgggctatctcgacaggaacttggagaaaaacagtacaaaacaggagatcctcgcagcgttggagaaagggtgtagcttcttacctgatccctaccagaagcaatgcgatcaatttgtcgccgagtatgagcccgtgctgatcgagatccttgtggaagtcatggatccctcttttgtgtgtttgaaaataggcgcttgcccgagtgcacataagcctctactggggactgagaaatgcatctggggcccaagctactggtgtcagaatactgagactgcagcacaatgtaatgcagttgagcactgcaaacggcacgtctggaactag

SEQ ID NO: 33443 - DNA, 2828 bp, Artificial Sequence
  derived and/or modified sequence
ggggttagcgcctgcgctctggacggctttggggcagggcagatttatatctgcgggggatcagctgacgctccgcattgcagactgcggagtcagacggcgctatgtacgccctcttcctcctggccagcctcctgggcgcggctctagccggcccggtccttggactgaaagaatgcaccaggggctcggcagtgtggtgccagaatgtgaagacggcgtccgactgcggggcagtgaagcactgcctgcagaccgtttggaacaagccaacagtgaaatcccttccctgcgacatatgcaaagacgttgtcaccgcagctggtgatatgctgaaggacaatgccactgaggaggagatccttgtttacttggagaagacctgtgactggcttccgaaaccgaacatgtctgcttcatgcaaggagatagtggactcctacctccctgtcatcctggacatcattaaaggagaaatgagccgtcctggggaggtgtgctctgctctcaacctctgcgagtctctccagaagcacctagcagagctgaatcaccagaagcagctggagtccaataagatcccagagctggacatgactgaggtggtggcccccttcatggccaacatccctctcctcctctaccctcaggacggcccccgcagcaagccccagccaaaggataatggggacgtttgccaggactgcattcagatggtgactgacatccagactgctgtacggaccaactccacctttgtccaggccttggtggaacatgtcaaggaggagtgtgaccgcctgggccctggcatggccgacatatgcaagaactatatcagccagtattctgaaattgctatccagatgatgatgcacatgagtgctgaacaacccaaggagatctgtgcgctggttgggttctgtgatgaggtgaaagagatgcccatgcagactctggtccccgccaaagtggcctccaagaatgtcatccctgccctggaactggtggagcccattaagaagcacgaggtcccagcaaagtctgatgtttactgtgaggtgtgtgaattcctggtgaaggaggtgaccaagctgattgacaacaacaagactgagaaagaaatactcgacgcttttgacaaaatgtgctcgaagctgccgaagtccctgtcggaagagtgccaggaggtggtggacacgtacggcagctccatcctgtccatcctgctggaggaggtcagccctgagctggtgtgcagcatgctgcacctctgctctggcacgcggctgcctgcactgaccgttcacgtgactcagccaaaggacggtggcttctgcgaagtgtgcaagaagctggtgggttatttggatcgcaacctggagaaaaacagcaccaagcaggagatcctggctgctcttgagaaaggctgcagcttcctgccagacccttaccagaagcagtgtgatcagtttgtggcagagtacgagcccgtgctgatcgagatcctggtggaggtgatggatccttccttcgtgtgcttgaaaattggagcctgcccctcggcccataagcccttgttgggaactgagaagtgtatatggggcccaagctactggtgccagaacacagagacagcagcccagtgcaatgctgtcgagcattgcaaacgccatgtgtggaactaggaggaggaatattccatcttggcagaaaccacagcattggtttttttctacttgtgtgtctgggggaatgaacgcacagatctgtttgactttgttataaaaatagggctcccccacctcccccatttctgtgtcctttattgtagcattgctgtctgcaagggagcccctagcccctggcagacatagctgcttcagtgccccttttctctctgctagatggatgttgatgcactggaggtcttttagcctgcccttgcatggcgcctgctggaggaggagagagctctgctggcatgagccacagtttcttgactggaggccatcaaccctcttggttgaggccttgttctgagccctgacatgtgcttgggcactggtgggcctgggcttctgaggtggcctcctgccctgatcagggaccctccccgctttcctgggcctctcagttgaacaaagcagcaaaacaaaggcagttttatatgaaagattagaagcctggaataatcaggctttttaaatgatgtaattcccactgtaatagcatagggattttggaagcagctgctggtggcttgggacatcagtggggccaagggttctctgtccctggttcaactgtgatttggctttcccgtgtctttcctggtgatgccttgtttggggttctgtgggtttgggtgggaagagggccatctgcctgaatgtaacctgctagctctccgaaggccctgcgggcctggcttgtgtgagcgtgtggacagtggtggccgcgctgtgcctgctcgtgttgcctacatgtccctggctgttgaggcgctgcttcagcctgcacccctcccttgtctcatagatgctccttttgaccttttcaaataaatatggatggcgagctcctaggcctctggcttcctggtagagggcggcatgccgaagggtctgctgggtgtggattggatgctggggtgtgggggttggaagctgtctgtggcccacttgggcacccacgcttctgtccacttctggttgccaggagacagcaagcaaagccagcaggacatgaagttgctattaaatggacttcgtgatttttgttttgcactaaagtttctgtgatttaacaataaaattctgttagcc

SEQ ID NO: 33444 - DNA, 2319 bp, Artificial Sequence
  derived and/or modified sequence
gcattgcagactgcggagtcagacggcgctatgtacgccctcttcctcctggccagcctcctgggcgcggctctagccggcccggtccttggactgaaagaatgcaccaggggctcggcagtgtggtgccagaatgtgaagacggcgtccgactgcggggcagtgaagcactgcctgcagaccgtttggaacaagccaacagtgaaatcccttccctgcgacatatgcaaagacgttgtcaccgcagctggtgatatgctgaaggacaatgccactgaggaggagatccttgtttacttggagaagacctgtgactggcttccgaaaccgaacatgtctgcttcatgcaaggagatagtggactcctacctccctgtcatcctggacatcattaaaggagaaatgagccgtcctggggaggtgtgctctgctctcaacctctgcgagtctctccagaagcacctagcagagctgaatcaccagaagcagctggagtccaataagatcccagagctggacatgactgaggtggtggcccccttcatggccaacatccctctcctcctctaccctcaggacggcccccgcagcaagccccagccaaaggataatggggacgtttgccaggactgcattcagatggtgactgacatccagactgctgtacggaccaactccacctttgtccaggccttggtggaacatgtcaaggaggagtgtgaccgcctgggccctggcatggccgacatatgcaagaactatatcagccagtattctgaaattgctatccagatgatgatgcacatgagtgctgaacaacccaaggagatctgtgcgctggttgggttctgtgatgaggtgaaagagatgcccatgcagactctggtccccgccaaagtggcctccaagaatgtcatccctgccctggaactggtggagcccattaagaagcacgaggtcccagcaaagtctgatgtttactgtgaggtgtgtgaattcctggtgaaggaggtgaccaagctgattgacaacaacaagactgagaaagaaatactcgacgcttttgacaaaatgtgctcgaagctgccgaagtccctgtcggaagagtgccaggaggtggtggacacgtacggcagctccatcctgtccatcctgctggaggaggtcagccctgagctggtgtgcagcatgctgcacctctgctctggcacgcggctgcctgcactgaccgttcacgtgactcagccaaaggacggtggcttctgcgaagtgtgcaagaagctggtgggttatttggatcgcaacctggagaaaaacagcaccaagcaggagatcctggctgctcttgagaaaggctgcagcttcctgccagacccttaccagaagcagtgtgatcagtttgtggcagagtacgagcccgtgctgatcgagatcctggtggaggtgatggatccttccttcgtgtgcttgaaaattggagcctgcccctcggcccataagcccttgttgggaactgagaagtgtatatggggcccaagctactggtgccagaacacagagacagcagcccagtgcaatgctgtcgagcattgcaaacgccatgtgtggaactaggaggaggaatattccatcttggcagaaaccacagcattggtttttttctacttgtgtgtctgggggaatgaacgcacagatctgtttgactttgttataaaaatagggctcccccacctcccccatttctgtgtcctttattgtagcattgctgtctgcaagggagcccctagcccctggcagacatagctgcttcagtgccccttttctctctgctagatggatgttgatgcactggaggtcttttagcctgcccttgcatggcgcctgctggaggaggagagagctctgctggcatgagccacagtttcttgactggaggccatcaaccctcttggttgaggccttgttctgagccctgacatgtgcttgggcactggtgggcctgggcttctgaggtggcctcctgccctgatcagggaccctccccgctttcctgggcctctcagttgaacaaagcagcaaaacaaaggcagttttatatgaaagattagaagcctggaataatcaggctttttaaatgatgtaattcccactgtaatagcatagggattttggaagcagctgctggtggcttgggacatcagtggggccaagggttctctgtccctggttcaactgtgatttggctttcccgtgtctttcctggtgatgccttgtctcatagatgctccttttgaccttttcaaataaatatggatggcg

SEQ ID NO: 33445 - DNA, 1584 bp, Artificial Sequence
  derived and/or modified sequence
atgtacgccctgttcctgctggccagcctgctgggcgccgccctggccggccccgtgctgggcctgaaggagtgcaccagaggcagcgccgtgtggtgccagaacgtgaagaccgccagcgactgcggcgccgtgaagcactgcctgcagaccgtgtggaacaagcccaccgtgaagagcctgccctgcgacatctgcaaggacgtggtgaccgccgccggcgacatgctgaaggacaacgccaccgaggaggagatcctggtgtacctggagaagacctgcgactggctgcccaagcccaacatgagcgccagctgcaaggagatcgtggacagctacctgcccgtgatcctggacatcatcaagggcgagatgagcagacccggcgaggtgtgcagcgccctgaacctgtgcgagagcctgcagaagcacctggccgagctgaaccaccagaagcagctggagagcaacaagatccccgagctggacatgaccgaggtggtggcccccttcatggccaacatccccctgctgctgtacccccaggacggccccagaagcaagccccagcccaaggacaacggcgacgtgtgccaggactgcatccagatggtgaccgacatccagaccgccgtgagaaccaacagcaccttcgtgcaggccctggtggagcacgtgaaggaggagtgcgacagactgggccccggcatggccgacatctgcaagaactacatcagccagtacagcgagatcgccatccagatgatgatgcacatgagcgccgagcagcccaaggagatctgcgccctggtgggcttctgcgacgaggtgaaggagatgcccatgcagaccctggtgcccgccaaggtggccagcaagaacgtgatccccgccctggagctggtggagcccatcaagaagcacgaggtgcccgccaagagcgacgtgtactgcgaggtgtgcgagttcctggtgaaggaggtgaccaagctgatcgacaacaacaagaccgagaaggagatcctggacgccttcgacaagatgtgcagcaagctgcccaagagcctgagcgaggagtgccaggaggtggtggacacctacggcagcagcatcctgagcatcctgctggaggaggtgagccccgagctggtgtgcagcatgctgcacctgtgcagcggcaccagactgcccgccctgaccgtgcacgtgacccagcccaaggacggcggcttctgcgaggtgtgcaagaagctggtgggctacctggacagaaacctggagaagaacagcaccaagcaggagatcctggccgccctggagaagggctgcagcttcctgcccgacccctaccagaagcagtgcgaccagttcgtggccgagtacgagcccgtgctgatcgagatcctggtggaggtgatggaccccagcttcgtgtgcctgaagatcggcgcctgccccagcgcccacaagcccctgctgggcaccgagaagtgcatctggggccccagctactggtgccagaacaccgagaccgccgcccagtgcaacgccgtggagcactgcaagagacacgtgtggaactag

SEQ ID NO: 33446 - DNA, 1593 bp, Artificial Sequence
  derived and/or modified sequence
gacggcgccatgtacgccctgttcctgctggccagcctgctgggcgccgccctggccggccccgtgctgggcctgaaggagtgcaccagaggcagcgccgtgtggtgccagaacgtgaagaccgccagcgactgcggcgccgtgaagcactgcctgcagaccgtgtggaacaagcccaccgtgaagagcctgccctgcgacatctgcaaggacgtggtgaccgccgccggcgacatgctgaaggacaacgccaccgaggaggagatcctggtgtacctggagaagacctgcgactggctgcccaagcccaacatgagcgccagctgcaaggagatcgtggacagctacctgcccgtgatcctggacatcatcaagggcgagatgagcagacccggcgaggtgtgcagcgccctgaacctgtgcgagagcctgcagaagcacctggccgagctgaaccaccagaagcagctggagagcaacaagatccccgagctggacatgaccgaggtggtggcccccttcatggccaacatccccctgctgctgtacccccaggacggccccagaagcaagccccagcccaaggacaacggcgacgtgtgccaggactgcatccagatggtgaccgacatccagaccgccgtgagaaccaacagcaccttcgtgcaggccctggtggagcacgtgaaggaggagtgcgacagactgggccccggcatggccgacatctgcaagaactacatcagccagtacagcgagatcgccatccagatgatgatgcacatgagcgccgagcagcccaaggagatctgcgccctggtgggcttctgcgacgaggtgaaggagatgcccatgcagaccctggtgcccgccaaggtggccagcaagaacgtgatccccgccctggagctggtggagcccatcaagaagcacgaggtgcccgccaagagcgacgtgtactgcgaggtgtgcgagttcctggtgaaggaggtgaccaagctgatcgacaacaacaagaccgagaaggagatcctggacgccttcgacaagatgtgcagcaagctgcccaagagcctgagcgaggagtgccaggaggtggtggacacctacggcagcagcatcctgagcatcctgctggaggaggtgagccccgagctggtgtgcagcatgctgcacctgtgcagcggcaccagactgcccgccctgaccgtgcacgtgacccagcccaaggacggcggcttctgcgaggtgtgcaagaagctggtgggctacctggacagaaacctggagaagaacagcaccaagcaggagatcctggccgccctggagaagggctgcagcttcctgcccgacccctaccagaagcagtgcgaccagttcgtggccgagtacgagcccgtgctgatcgagatcctggtggaggtgatggaccccagcttcgtgtgcctgaagatcggcgcctgccccagcgcccacaagcccctgctgggcaccgagaagtgcatctggggccccagctactggtgccagaacaccgagaccgccgcccagtgcaacgccgtggagcactgcaagagacacgtgtggaactag

SEQ ID NO: 33447 - protein, 77 aa, Artificial Sequence
  derived and/or modified sequence
GEILCNLCTGLINTLENLLTTKGADKVKDYISSLCNKASGFIATLCTKVLDFGIDKLIQLIEDKVDANAICAKIHAC

SEQ ID NO: 33448 - protein, 240 aa, Artificial Sequence
  derived and/or modified sequence
MYALFLLASLLGAALAGPVLGLKECTRGSAVWCQNVKTASDCGAVKHCLQTVWNKPTVKSLPCDICKDVVTAAGDMLKDNATEEEILVYLEVSPELVCSMLHLCSGTRLPALTVHVTQPKDGGFCEVCKKLVGYLDRNLEKNSTKQEILAALEKGCSFLPDPYQKQCDQFVAEYEPVLIEILVEVMDPSFVCLKIGACPSAHKPLLGTEKCIWGPSYWCQNTETAAQCNAVEHCKRHVWN

SEQ ID NO: 33449 - protein, 526 aa, Artificial Sequence
  derived and/or modified sequence
MYALFLLASLLGAALAGPVLGLKECTRGSAVWCQNVKTASDCGAVKHCLQTVWNKPTVKSLPCDICKDVVTAAGDMLKDNATEEEILVYLEKTCDWLPKPNMSASCKEIVDSYLPVILDIIKGEMSRPGEVCSALNLCESLQKHLAELNHQKQLESNKIPELDMTEVVAPFMANIPLLLYPQDGPRSKPQPKDNGDVCQDCIQMVTDIQTAVRTNSTFVQALVEHVKEECDRLGPGMADICKNYISQYSEIAIQMMMHMLQQPKEICALVGFCDEVKEMPMQTLVPAKVASKNVIPALELVEPIKKHEVPAKSDVYCEVCEFLVKEVTKLIDNNKTEKEILDAFDKMCSKLPKSLSEECQEVVDTYGSSILSILLEEVSPELVCSMLHLCSGTRLPALTVHVTQPKDGGFCEVCKKLVGYLDRNLEKNSTKQEILAALEKGCSFLPDPYQKQCDQFVAEYEPVLIEILVEVMDPSFVCLKIGACPSAHKPLLGTEKCIWGPSYWCQNTETAAQCNAVEHCKRHVWN

SEQ ID NO: 33450 - protein, 450 aa, Artificial Sequence
  derived and/or modified sequence
MLKDNATEEEILVYLEKTCDWLPKPNMSASCKEIVDSYLPVILDIIKGEMSRPGEVCSALNLCESLQKHLAELNHQKQLESNKIPELDMTEVVAPFMANIPLLLYPQDGPRSKPQPKDNGDVCQDCIQMVTDIQTAVRTNSTFVQALVEHVKEECDRLGPGMADICKNYISQYSEIAIQMMMHMQQPKEICALVGFCDEVKEMPMQTLVPAKVASKNVIPALELVEPIKKHEVPAKSDVYCEVCEFLVKEVTKLIDNNKTEKEILDAFDKMCSKLPKSLSEECQEVVDTYGSSILSILLEEVSPELVCSMLHLCSGTRLPALTVHVTQPKDGGFCEVCKKLVGYLDRNLEKNSTKQEILAALEKGCSFLPDPYQKQCDQFVAEYEPVLIEILVEVMDPSFVCLKIGACPSAHKPLLGTEKCIWGPSYWCQNTETAAQCNAVEHCKRHVWN

SEQ ID NO: 33451 - DNA, 1581 bp, Artificial Sequence
  derived and/or modified sequence
atgtacgctctatttttgcttgcctctctgctaggtgctgcacttgcgggtcccgtgctggggctgaaggaatgtacccggggcagcgctgtttggtgccagaacgttaagaccgcctcagactgtggcgcagtcaagcattgccttcaaactgtatggaacaagccaaccgtcaaaagccttccttgtgatatatgtaaagacgttgtgactgccgctggggatatgttgaaggataatgctacagaggaggagatcctagtttacttagaaaaaacatgcgattggctgccaaagccaaacatgtccgcgtcttgcaaggagattgtggatagttacttaccagtgattctcgatattatcaagggtgaaatgagcagacctggtgaggtctgcagcgcacttaatctgtgcgagtcactccagaaacacttggctgaactgaaccatcagaagcagcttgagtcaaataaaattcctgagctggacatgactgaagtggtagcaccctttatggccaacatccctcttctgctgtatccccaggatggtcctaggagtaaaccccaaccgaaggacaatggggacgtgtgtcaagactgcatccaaatggtgacagacattcaaactgcagtgagaactaactctacattcgtccaagccctggttgagcatgtgaaggaggagtgcgacagacttgggcccgggatggcggacatctgtaagaactacatcagccagtacagtgagattgccatacagatgatgatgcacatgttacagcaacccaaggagatctgtgccctggtcggattctgcgatgaagttaaggagatgcccatgcaaacactggtgccggcaaaggtggcttccaagaacgtaatcccagcgctggagttggtggaacccatcaagaagcatgaagtgccagccaaatccgacgtgtactgtgaagtgtgcgagttccttgtcaaagaggttaccaagctcatagacaataataaaacagagaaagagattcttgacgccttcgacaagatgtgctcaaagctccctaaaagcctgagcgaggagtgccaggaagtcgttgacacgtacgggtccagcatcctgtccatcctgctggaagaagtgtctcctgagctcgtttgttctatgctgcacctctgttccggtacccggctcccagctttaaccgtgcatgttacccaacctaaagacggggggttttgtgaagtatgtaagaagctggtagggtatctggaccgcaatttagaaaaaaactcaaccaagcaggagatcctggccgccttagaaaaggggtgctcttttttgcctgatccttaccagaaacagtgtgatcagtttgtggccgaatatgagcctgtgttgattgagattttggtggaagtaatggatccatcgttcgtctgtctcaagatcggagcatgcccaagtgcccataaaccgctccttggaaccgaaaagtgtatctgggggccgagctattggtgtcagaacaccgaaactgccgctcagtgtaatgccgtggaacactgcaagagacacgtgtggaactag

SEQ ID NO: 33452 - DNA, 1353 bp, Artificial Sequence
  derived and/or modified sequence
atgctgaaagataatgccaccgaagaggaaatactggtgtatttggaaaagacctgtgattggcttcctaaacctaacatgagcgcaagctgtaaggagatcgtggactcctatttaccagtgatccttgatatcatcaaaggcgaaatgtctaggcccggcgaggtgtgttcggctctaaatttgtgcgagtccctgcagaaacacttggcagaactgaatcatcagaaacagctagagtccaataagataccagagttggatatgaccgaggtggtggcaccgtttatggccaacatccccctcttgctgtacccccaggacggcccacggagcaaacctcagccaaaagataatggcgacgtatgtcaggactgtattcagatggtgacggacatccaaacggcagtgcggaccaatagtactttcgttcaagccttagtcgagcacgtgaaggaggagtgcgatagactgggtcctgggatggcagacatttgtaagaactacatctcccaatattcagagattgccatacagatgatgatgcatatgcagcagcccaaggaaatttgtgccctggtggggttttgcgatgaggtcaaggagatgcctatgcaaacactggtgcccgccaaagttgcgagtaagaatgtgatacctgctcttgagttagtcgaaccaatcaaaaagcacgaggttcctgccaaatccgacgtctattgtgaggtctgcgagttcctcgtaaaagaggtaactaagctgattgataacaataaaacagaaaaagagattttagatgcattcgacaagatgtgctctaagctccctaagtctctctcagaagaatgccaagaagtagtcgacacatacggcagcagcatactcagcattcttttagaggaggtgagccccgagcttgtttgttctatgttacacctatgttccgggacacgactgcccgcactgacagtgcatgtaacacagcctaaggatggtgggttctgcgaggtgtgtaaaaagctcgtcgggtacctagacagaaatctggagaagaattccaccaaacaggagatcctcgctgctctcgagaaaggatgttcatttctgcctgacccttaccagaagcagtgtgatcagtttgttgccgaatatgagccggtcttaatcgagatcctggtggaagtgatggacccttcatttgtgtgcctcaagattggagcatgccctagtgcccataagcctttgctgggcacagagaagtgcatttggggccccagctactggtgtcagaacaccgagaccgccgcgcaatgcaacgctgtcgagcactgtaagcggcatgtctggaactag

SEQ ID NO: 33453 - DNA, 1581 bp, Artificial Sequence
  derived and/or modified sequence
atgtatgccctcttcctgctggccagcctgctgggcgccgccctggccggccctgtgctgggcctgaaggagtgcacccggggcagcgctgtgtggtgccagaatgtgaagacagccagtgactgtggggctgtgaagcactgcctgcagacagtgtggaacaagcccaccgtgaagagcctgccctgtgacatctgcaaggatgtggtgacagctgctggggacatgctgaaggacaatgccacagaggaggagatcctggtgtacctggagaagacctgtgactggctgcccaagcccaacatgtctgccagctgcaaggagatcgtggacagctacctgcctgtgatcctggacatcatcaagggggagatgagcaggcctggagaggtgtgcagcgccctgaacctgtgtgagagcctgcagaagcacctggccgagctgaaccaccagaagcagctggagagcaacaagatccctgagctggacatgacagaggtggtggcccccttcatggccaacatccccctgctgctgtacccccaggacggccccaggagcaagccccagcccaaggacaatggagatgtgtgccaggactgcatccagatggtgacagacatccagacagctgtgaggaccaacagcacctttgtgcaggccctggtggagcacgtgaaggaggagtgtgaccggctgggccctggcatggctgacatctgcaagaactacatcagccagtacagcgagatcgccatccagatgatgatgcacatgctgcagcagcccaaggagatctgtgccctggtgggcttctgtgatgaggtgaaggagatgcccatgcagaccctggtgcctgccaaggtggccagcaagaatgtcatcccagccctggagctggtggagcccatcaagaagcatgaggtgcctgccaagagtgatgtgtactgtgaggtgtgtgagttcctggtgaaggaggtgaccaagctgattgacaacaacaagacagagaaggagatcctggatgcctttgacaagatgtgcagcaagctgcccaagagcctgtctgaggagtgccaggaggtggtggacacctacggcagcagcatcctgagcatcctgctggaggaggtgtccccagagctggtgtgcagcatgctgcacctgtgcagcggcacccggctgcctgccctgactgtgcacgtgacccagcccaaggatggcggcttctgtgaggtgtgcaagaagctggtgggctacctggacaggaacctggagaagaacagcaccaagcaggagatcctggccgccctggagaagggctgcagcttcctgcctgacccctaccagaagcagtgtgaccagtttgtggccgagtatgagcctgtgctgattgagatcctggtggaggtgatggaccccagctttgtgtgcctgaagattggagcctgccccagcgcccacaagcccctgctgggcacagagaagtgcatctggggccccagctactggtgccagaacacagaaacagctgcccagtgcaatgctgtggagcactgcaagagacatgtgtggaactag

SEQ ID NO: 33454 - DNA, 1353 bp, Artificial Sequence
  derived and/or modified sequence
atgctgaaggacaatgccacagaggaggagatcctggtgtacctggagaagacctgtgactggctgcccaagcccaacatgtctgccagctgcaaggagatcgtggacagctacctgcccgtcatcctggacatcatcaagggggagatgagcaggcctggagaggtgtgcagcgccctgaacctgtgtgagagcctgcagaagcacctggccgagctgaaccaccagaagcagctggagagcaacaagatccctgagctggacatgacagaggtggtggcccccttcatggccaacatccccctgctgctgtacccccaggacggccccaggagcaagccccagcccaaggacaatggagatgtgtgccaggactgcatccagatggtgacagacatccagacagctgtgaggaccaacagcacctttgtgcaggccctggtggagcacgtgaaggaggagtgtgaccggctgggccctggcatggctgacatctgcaagaactacatcagccagtacagcgagatcgccatccagatgatgatgcacatgcagcagcccaaggagatctgtgccctggtgggcttctgtgatgaggtgaaggagatgcccatgcagaccctggtgcctgccaaggtggccagcaagaatgtcatcccagccctggagctggtggagcccatcaagaagcatgaggtgcctgccaagagtgatgtgtactgtgaggtgtgtgagttcctggtgaaggaggtgaccaagctgattgacaacaacaagacagagaaggagatcctggatgcctttgacaagatgtgcagcaagctgcccaagagcctgtctgaggagtgccaggaggtggtggacacctacggcagcagcatcctgagcatcctgctggaggaggtgtccccagagctggtgtgcagcatgctgcacctgtgcagcggcacccggctgcctgccctgactgtgcacgtgacccagcccaaggatggcggcttctgtgaggtgtgcaagaagctggtgggctacctggacaggaacctggagaagaacagcaccaagcaggagatcctggccgccctggagaagggctgcagcttcctgcctgacccctaccagaagcagtgtgaccagtttgtggccgagtatgagcctgtgctgattgagatcctggtggaggtgatggaccccagctttgtgtgcctgaagattggagcctgccccagcgcccacaagcccctgctgggcacagagaagtgcatctggggccccagctactggtgccagaacacagaaacagctgcccagtgcaatgctgtggagcactgcaagagacatgtgtggaactag

SEQ ID NO: 33455 - DNA, 1581 bp, Artificial Sequence
  derived and/or modified sequence
atgtacgccctgttcctgctggccagcctgctgggcgccgccctggccggaccagtgctcgggctgaaagagtgtaccaggggctctgcggtctggtgccaaaatgtaaagacagcaagcgattgtggagctgtgaaacattgcctgcagacggtctggaataaacctaccgtcaagtctttaccttgcgatatttgtaaggatgtggtgaccgctgccggcgacatgttaaaggataatgccaccgaagaggagatcctggtgtaccttgaaaaaacatgcgactggctgcctaaaccaaacatgagcgcctcctgcaaggaaattgtggatagctatctacccgtaatccttgacattatcaagggggaaatgtcccgcccgggcgaagtttgcagcgcgctgaacttgtgtgagtctctgcagaaacacctcgcggaactgaaccaccagaaacaactggaaagcaacaaaattcctgagctagatatgactgaggtggttgcacccttcatggcaaacattcctctgctactctacccccaagatggcccacgcagcaaaccacaacctaaggacaatggggatgtgtgtcaggattgtatacagatggttaccgacatccagaccgccgtgcgtactaactccactttcgtacaggcactcgttgagcacgttaaagaggagtgcgatcgccttggaccaggcatggcggacatctgtaagaattacatttcgcagtacagcgaaatcgccatccagatgatgatgcacatgctgcaacagcccaaagagatctgtgccttggtgggcttctgcgatgaggtcaaggagatgccgatgcagactcttgtgccagccaaggtggccagcaaaaacgtgattcccgcacttgagctggtggaacctatcaaaaaacacgaagtgcctgccaagagcgacgtctactgtgaggtctgtgaatttctggttaaggaggtgacaaaactcatcgacaataataagacagaaaaggagatactggacgcctttgataagatgtgcagcaaactccccaagagtctgagcgaagaatgccaggaagtcgtggatacgtacggctcctccatcctatcgatcctgctcgaagaggtctcccccgaacttgtctgttccatgttacatctttgcagcgggacacgcctgccagccctcactgttcacgttacacagcccaaggacggaggcttttgcgaggtgtgtaaaaagctggtgggatacttggacagaaatctggagaaaaactccaccaagcaggagattctcgcagcactcgagaaagggtgttcatttctcccggatccttaccaaaagcagtgcgaccaattcgtcgctgaatacgagccagtgctgattgagattctggtggaggtcatggatcccagtttcgtgtgcttaaaaatcggcgcatgcccttcagctcacaagcctctgctgggcaccgaaaagtgtatatggggcccgtcctactggtgccagaacactgagacagctgcacaatgtaacgccgtcgagcactgtaaacggcatgtttggaattag

SEQ ID NO: 33456 - DNA, 1353 bp, Artificial Sequence
  derived and/or modified sequence
atgctgaaggacaacgccaccgaggaggagatcctggtgtacctggagaagacctgtgattggctcccaaagcccaatatgagcgctagttgcaaggagattgtagatagttacctccctgtaatactagacatcatcaagggtgaaatgtccaggccaggggaagtatgctctgcgttgaatctctgtgaaagcctgcagaagcatttagctgaattgaatcaccagaagcagctagagagtaacaagattcctgagttagatatgacggaagtcgtcgccccattcatggcaaacattcctctgctcctctaccctcaagacggccccaggtccaaaccccagccaaaagacaacggcgatgtttgtcaggactgtatccagatggtcaccgacattcagacggccgtcaggactaattcaacttttgtgcaagctcttgtagaacatgtgaaggaagagtgcgaccgactcgggcctggaatggctgatatctgcaagaattatattagtcagtacagtgagattgctattcagatgatgatgcacatgcagcagcccaaggagatttgtgccctagtaggcttctgcgacgaggtaaaagagatgccaatgcagaccctagtaccagctaaagttgccagtaagaacgtcatccccgctttggagctcgtcgaacctattaaaaaacacgaagttccagccaaaagcgatgtttactgcgaggtctgcgaattcctcgtgaaggaagtgaccaaactgatagacaacaacaaaaccgagaaagagatcctggatgctttcgacaaaatgtgcagtaagcttccaaagtccctgtcagaagagtgtcaagaggtggttgacacttacggctcaagcattttaagcatcctgttagaagaggtaagtcccgagttggtttgttccatgctacacctctgctcaggcacacgcttacctgccctaacagttcacgtcacccagccaaaggatgggggattctgtgaagtgtgcaagaagctggtgggatacctggaccgcaacctggagaagaattccacaaagcaggaaatcctcgcagctttggagaagggctgttccttcctccctgacccttatcagaaacagtgcgatcagtttgtggctgagtatgagcccgtactgatcgaaatcctggtggaggtgatggatcccagttttgtgtgccttaaaatcggggcatgccccagcgctcacaagccacttctcggcactgagaagtgtatctgggggcccagttattggtgccagaatacagaaactgctgcccagtgtaatgccgtcgaacactgtaagcgacatgtctggaattag

SEQ ID NO: 33457 - DNA, 1581 bp, Artificial Sequence
  derived and/or modified sequence
atgtacgcactgttcctgttggcgtcgctgctcggggctgccctggcgggacccgtgttagggctcaaagagtgtactcgaggcagcgccgtatggtgtcagaatgtcaagaccgcttcagattgtggagcggtgaagcattgcctgcagactgtttggaataagcccaccgttaagagcctgccctgcgacatttgcaaagacgtggtcacagcggcaggagacatgctgaaggacaacgctaccgaggaggaaattttagtgtacctggaaaagacctgcgactggctgcccaaacctaatatgtcggctagctgcaaggagattgtggactcatacttgcccgtgatcctggacatcattaaaggggagatgagcaggcctggcgaggtctgctcagcccttaacctgtgcgaaagtctccaaaaacatctggcggaattgaatcaccagaaacagctcgaaagcaacaaaatacccgaactggacatgaccgaggtcgtggccccatttatggcaaacatcccactgctgctttatccacaggatggtccacgcagtaagccacagcccaaagataatggagacgtttgtcaggactgcatacagatggtcaccgacattcagaccgcagtccgtacgaactccactttcgtccaggctctcgttgagcacgttaaggaagagtgtgatcggctcgggcctgggatggccgatatctgcaaaaattacatttcgcagtactctgagattgccattcaaatgatgatgcatatgttacaacagcctaaagagatttgcgctctcgtaggtttctgtgacgaggtaaaagagatgccaatgcagaccctggttcctgctaaagtagcctccaaaaacgtgattcctgccttggaactggtcgagcctattaagaagcatgaagtgcccgcaaagtctgatgtttactgcgaggtctgcgagttcctggtgaaggaggtgaccaagcttatagacaataataaaaccgaaaaagaaatactggatgcattcgataagatgtgctcaaaattacctaaatcccttagcgaagagtgtcaggaggttgttgacacatacggatctagcatcctgtcgattctgctcgaggaggtatctcctgaactggtttgttcaatgttacacttatgttcaggcactaggctgcccgcactgacagtccacgtgacccagccaaaggatggagggttttgtgaggtgtgtaagaagctggtggggtatctcgataggaatcttgagaaaaactcaaccaaacaggaaattctggccgcacttgagaagggatgctcattcctgccagacccctaccagaagcaatgtgaccagttcgtcgcggagtatgagccagtgctgattgagatattagtggaggttatggatccatctttcgtttgcctcaagatcggcgcttgtccttctgcccataagcccctcttgggaactgaaaagtgcatctggggcccatcttattggtgtcagaacaccgagacggctgctcaatgtaatgccgtggaacactgcaaaagacacgtctggaactag

SEQ ID NO: 33458 - DNA, 1353 bp, Artificial Sequence
  derived and/or modified sequence
atgcttaaagacaatgccactgaggaagagattctggtctacctggagaaaacatgcgactggctgcctaaacccaatatgagtgcatcttgtaaggagattgttgatagctatctccccgtcatcctggacatcatcaagggcgaaatgtccagacccggtgaggtttgcagtgctttaaatctctgcgaaagcctgcagaaacacctggccgagctcaatcatcagaagcagctggaatctaacaagatcccagagcttgatatgaccgaagtggtcgcaccatttatggccaatattccactgctcctgtatccccaggatgggcctcgctctaagccccagcctaaagacaatggagacgtgtgtcaggactgtatccagatggtgaccgatattcagacggccgttagaacaaattccacattcgtgcaggccttggtggaacacgtcaaggaggagtgtgataggttaggcccaggcatggctgacatttgcaaaaactatataagtcagtatagcgagattgctatacaaatgatgatgcatatgcaacaaccaaaagaaatctgcgccctggttgggttctgtgatgaggtaaaggagatgccaatgcagactctggtgccagccaaggtggcaagcaagaacgtgattcccgctttggagctcgtggagccaatcaagaagcacgaagtccccgctaagtctgatgtgtactgcgaagtgtgtgagtttctggttaaagaagtaacgaaactgatagacaataacaaaacagagaaggaaatcctcgatgcatttgacaaaatgtgctccaagttacccaagtctttgtcagaggaatgtcaggaagtcgttgacacctatggctccagtatcctgagcattctgttggaggaagtcagcccggagttagtctgctctatgctccacctgtgtagcggaactagactgcctgctttaactgtccacgtgacacagccgaaggacggtggcttctgcgaagtctgtaagaagctagtggggtacctggaccggaacttggagaagaattccaccaaacaggagatcttggcagccctggaaaaaggttgcagcttcctgcccgatccttaccagaagcagtgcgaccagtttgtcgccgaatacgaacctgtcttgattgaaattctagtagaggtcatggatccatcttttgtgtgcctgaagattggggcttgtccaagcgcgcacaagcctcttttgggaacagaaaagtgcatctggggaccgagctattggtgtcagaacacagagactgccgcacaatgcaacgccgtcgaacactgcaaaaggcatgtgtggaactag

SEQ ID NO: 33459 - DNA, 2825 bp, Artificial Sequence
  derived and/or modified sequence
ggggttagcgcctgcgctctggacggctttggggcagggcagatttatatctgcgggggatcagctgacgctccgcattgcagactgcggagtcagacggcgctatgtacgccctcttcctcctggccagcctcctgggcgcggctctagccggcccggtccttggactgaaagaatgcaccaggggctcggcagtgtggtgccagaatgtgaagacggcgtccgactgcggggcagtgaagcactgcctgcagaccgtttggaacaagccaacagtgaaatcccttccctgcgacatatgcaaagacgttgtcaccgcagctggtgatatgctgaaggacaatgccactgaggaggagatccttgtttacttggagaagacctgtgactggcttccgaaaccgaacatgtctgcttcatgcaaggagatagtggactcctacctccctgtcatcctggacatcattaaaggagaaatgagccgtcctggggaggtgtgctctgctctcaacctctgcgagtctctccagaagcacctagcagagctgaatcaccagaagcagctggagtccaataagatcccagagctggacatgactgaggtggtggcccccttcatggccaacatccctctcctcctctaccctcaggacggcccccgcagcaagccccagccaaaggataatggggacgtttgccaggactgcattcagatggtgactgacatccagactgctgtacggaccaactccacctttgtccaggccttggtggaacatgtcaaggaggagtgtgaccgcctgggccctggcatggccgacatatgcaagaactatatcagccagtattctgaaattgctatccagatgatgatgcacatgcttcagcaacccaaggagatctgtgcgctggttgggttctgtgatgaggtgaaagagatgcccatgcagactctggtccccgccaaagtggcctccaagaatgtcatccctgccctggaactggtggagcccattaagaagcacgaggtcccagcaaagtctgatgtttactgtgaggtgtgtgaattcctggtgaaggaggtgaccaagctgattgacaacaacaagactgagaaagaaatactcgacgcttttgacaaaatgtgctcgaagctgccgaagtccctgtcggaagagtgccaggaggtggtggacacgtacggcagctccatcctgtccatcctgctggaggaggtcagccctgagctggtgtgcagcatgctgcacctctgctctggcacgcggctgcctgcactgaccgttcacgtgactcagccaaaggacggtggcttctgcgaagtgtgcaagaagctggtgggttatttggatcgcaacctggagaaaaacagcaccaagcaggagatcctggctgctcttgagaaaggctgcagcttcctgccagacccttaccagaagcagtgtgatcagtttgtggcagagtacgagcccgtgctgatcgagatcctggtggaggtgatggatccttccttcgtgtgcttgaaaattggagcctgcccctcggcccataagcccttgttgggaactgagaagtgtatatggggcccaagctactggtgccagaacacagagacagcagcccagtgcaatgctgtcgagcattgcaaacgccatgtgtggaactaggaggaggaatattccatcttggcagaaaccacagcattggtttttttctacttgtgtgtctgggggaatgaacgcacagatctgtttgactttgttataaaaatagggctcccccacctcccccatttctgtgtcctttattgtagcattgctgtctgcaagggagcccctagcccctggcagacatagctgcttcagtgccccttttctctctgctagatggatgttgatgcactggaggtcttttagcctgcccttgcatggcgcctgctggaggaggagagagctctgctggcatgagccacagtttcttgactggaggccatcaaccctcttggttgaggccttgttctgagccctgacatgtgcttgggcactggtgggcctgggcttctgaggtggcctcctgccctgatcagggaccctccccgctttcctgggcctctcagttgaacaaagcagcaaaacaaaggcagttttatatgaaagattagaagcctggaataatcaggctttttaaatgatgtaattcccactgtaatagcatagggattttggaagcagctgctggtggcttgggacatcagtggggccaagggttctctgtccctggttcaactgtgatttggctttcccgtgtctttcctggtgatgccttgtttggggttctgtgggtttgggtgggaagagggccatctgcctgaatgtaacctgctagctctccgaaggccctgcgggcctggcttgtgtgagcgtgtggacagtggtggccgcgctgtgcctgctcgtgttgcctacatgtccctggctgttgaggcgctgcttcagcctgcacccctcccttgtctcatagatgctccttttgaccttttcaaataaatatggatggcgagctcctaggcctctggcttcctggtagagggcggcatgccgaagggtctgctgggtgtggattggatgctggggtgtgggggttggaagctgtctgtggcccacttgggcacccacgcttctgtccacttctggttgccaggagacagcaagcaaagccagcaggacatgaagttgctattaaatggacttcgtgatttttgttttgcactaaagtttctgtgatttaacaataaaattctgttagcc

SEQ ID NO: 33460 - DNA, 1765 bp, Artificial Sequence
  derived and/or modified sequence
attgcagactgcggagtcagacggcgctatgtacgccctcttcctcctggccagcctcctgggcgcggctctagccggcccggtccttggactgaaaggcagtgaagcactgcctgcagaccgtttggaacaagccaacagtgaaatcccttccctgcgacatatgcaaagacgttgtcaccgcagctggtgatatgctgaaggacaatgccactgaggaggagatccttgtttacttggagaagacctgtgactggcttccgaaaccgaacatgtctgcttcatgcaaggagatagtggactcctacctccctgtcatcctggacatcattaaaggagaaatgagccgtcctggggaggtgtgctctgctctcaacctctgcgagtctctccagaagcacctagcagagctgaatcaccagaagcagctggagtccaataagatcccagagctggacatgactgaggtggtggcccccttcatggccaacatccctctcctcctctaccctcaggacggcccccgcagcaagccccagccaaaggataatggggacgtttgccaggactgcattcagatggtgactgacatccagactgctgtacggaccaactccacctttgtccaggccttggtggaacatgtcaaggaggagtgtgaccgcctgggccctggcatggccgacatatgcaagaactatatcagccagtattctgaaattgctatccagatgatgatgcacatgcagcaacccaaggagatctgtgcgctggttgggttctgtgatgaggtgaaagagatgcccatgcagactctggtccccgccaaagtggcctccaagaatgtcatccctgccctggaactggtggagcccattaagaagcacgaggtcccagcaaagtctgatgtttactgtgaggtgtgtgaattcctggtgaaggaggtgaccaagctgattgacaacaacaagactgagaaagaaatactcgacgcttttgacaaaatgtgctcgaagctgccgaagtccctgtcggaagagtgccaggaggtggtggacacgtacggcagctccatcctgtccatcctgctggaggaggtcagccctgagctggtgtgcagcatgctgcacctctgctctggcacgcggctgcctgcactgaccgttcacgtgactcagccaaaggacggtggcttctgcgaagtgtgcaagaagctggtgggttatttggatcgcaacctggagaaaaacagcaccaagcaggagatcctggctgctcttgagaaaggctgcagcttcctgccagacccttaccagaagcagtgtgatcagtttgtggcagagtacgagcccgtgctgatcgagatcctggtggaggtgatggatccttccttcgtgtgcttgaaaattggagcctgcccctcggcccataagcccttgttgggaactgagaagtgtatatggggcccaagctactggtgccagaacacagagacagcagcccagtgcaatgctgtcgagcattgcaaacgccatgtgtggaactaggaggaggaatattccatcttggcagaaaccacagcattggtttttttctacttgtgtgtctgggggaatgaacgcacagatctgtttgactttgttataaaaatagggctcccccacctcccccatttctgtgtcctttattgtagcattgctgtctgcaagggagcccctagcccctggcagacatagctgcttcagtgccccttttctctctgcta

SEQ ID NO: 33461 - DNA, 1581 bp, Artificial Sequence
  derived and/or modified sequence
atgtacgccctgttcctgctggccagcctgctgggcgccgccctggccggccccgtgctgggcctgaaggagtgcaccagaggcagcgccgtgtggtgccagaacgtgaagaccgccagcgactgcggcgccgtgaagcactgcctgcagaccgtgtggaacaagcccaccgtgaagagcctgccctgcgacatctgcaaggacgtggtgaccgccgccggcgacatgctgaaggacaacgccaccgaggaggagatcctggtgtacctggagaagacctgcgactggctgcccaagcccaacatgagcgccagctgcaaggagatcgtggacagctacctgcccgtgatcctggacatcatcaagggcgagatgagcagacccggcgaggtgtgcagcgccctgaacctgtgcgagagcctgcagaagcacctggccgagctgaaccaccagaagcagctggagagcaacaagatccccgagctggacatgaccgaggtggtggcccccttcatggccaacatccccctgctgctgtacccccaggacggccccagaagcaagccccagcccaaggacaacggcgacgtgtgccaggactgcatccagatggtgaccgacatccagaccgccgtgagaaccaacagcaccttcgtgcaggccctggtggagcacgtgaaggaggagtgcgacagactgggccccggcatggccgacatctgcaagaactacatcagccagtacagcgagatcgccatccagatgatgatgcacatgctgcagcagcccaaggagatctgcgccctggtgggcttctgcgacgaggtgaaggagatgcccatgcagaccctggtgcccgccaaggtggccagcaagaacgtgatccccgccctggagctggtggagcccatcaagaagcacgaggtgcccgccaagagcgacgtgtactgcgaggtgtgcgagttcctggtgaaggaggtgaccaagctgatcgacaacaacaagaccgagaaggagatcctggacgccttcgacaagatgtgcagcaagctgcccaagagcctgagcgaggagtgccaggaggtggtggacacctacggcagcagcatcctgagcatcctgctggaggaggtgagccccgagctggtgtgcagcatgctgcacctgtgcagcggcaccagactgcccgccctgaccgtgcacgtgacccagcccaaggacggcggcttctgcgaggtgtgcaagaagctggtgggctacctggacagaaacctggagaagaacagcaccaagcaggagatcctggccgccctggagaagggctgcagcttcctgcccgacccctaccagaagcagtgcgaccagttcgtggccgagtacgagcccgtgctgatcgagatcctggtggaggtgatggaccccagcttcgtgtgcctgaagatcggcgcctgccccagcgcccacaagcccctgctgggcaccgagaagtgcatctggggccccagctactggtgccagaacaccgagaccgccgcccagtgcaacgccgtggagcactgcaagagacacgtgtggaactag

SEQ ID NO: 33462 - DNA, 1353 bp, Artificial Sequence
  derived and/or modified sequence
atgctgaaggacaacgccaccgaggaggagatcctggtgtacctggagaagacctgcgactggctgcccaagcccaacatgagcgccagctgcaaggagatcgtggacagctacctgcccgtgatcctggacatcatcaagggcgagatgagcagacccggcgaggtgtgcagcgccctgaacctgtgcgagagcctgcagaagcacctggccgagctgaaccaccagaagcagctggagagcaacaagatccccgagctggacatgaccgaggtggtggcccccttcatggccaacatccccctgctgctgtacccccaggacggccccagaagcaagccccagcccaaggacaacggcgacgtgtgccaggactgcatccagatggtgaccgacatccagaccgccgtgagaaccaacagcaccttcgtgcaggccctggtggagcacgtgaaggaggagtgcgacagactgggccccggcatggccgacatctgcaagaactacatcagccagtacagcgagatcgccatccagatgatgatgcacatgcagcagcccaaggagatctgcgccctggtgggcttctgcgacgaggtgaaggagatgcccatgcagaccctggtgcccgccaaggtggccagcaagaacgtgatccccgccctggagctggtggagcccatcaagaagcacgaggtgcccgccaagagcgacgtgtactgcgaggtgtgcgagttcctggtgaaggaggtgaccaagctgatcgacaacaacaagaccgagaaggagatcctggacgccttcgacaagatgtgcagcaagctgcccaagagcctgagcgaggagtgccaggaggtggtggacacctacggcagcagcatcctgagcatcctgctggaggaggtgagccccgagctggtgtgcagcatgctgcacctgtgcagcggcaccagactgcccgccctgaccgtgcacgtgacccagcccaaggacggcggcttctgcgaggtgtgcaagaagctggtgggctacctggacagaaacctggagaagaacagcaccaagcaggagatcctggccgccctggagaagggctgcagcttcctgcccgacccctaccagaagcagtgcgaccagttcgtggccgagtacgagcccgtgctgatcgagatcctggtggaggtgatggaccccagcttcgtgtgcctgaagatcggcgcctgccccagcgcccacaagcccctgctgggcaccgagaagtgcatctggggccccagctactggtgccagaacaccgagaccgccgcccagtgcaacgccgtggagcactgcaagagacacgtgtggaactag

SEQ ID NO: 33463 - protein, 572 aa, Artificial Sequence
  derived and/or modified sequence
MGKKLDLSKLTDEEAQHVLEVVQRDFDLRRKEEERLEALKGKIKKESSKRELLSDTAHLNETHCARCLQPYQLLVNSKRQCLECGLFTCKSCGRVHPEEQGWICDPCHLARVVKIGSLEWYYEHVKARFKRFGSAKVIRSLHGRLQGGAGPELISEERSGDSDQTDEDGEPGSEAQAQAQPFGSKKKRLLSVHDFDFEGDSDDSTQPQGHSLHLSSVPEARDSPQSLTDESCSEKAAPHKAEGLEEADTGASGCHSHPEEQPTSISPSRHGALAELCPPGGSHRMALGTAAALGSNVIRNEQLPLQYLADVDTSDEESIRAHVMASHHSKRRGRASSESQGLGAGVRTEADVEEEALRRKLEELTSNVSDQETSSEEEEAKDEKAEPNRDKSVGPLPQADPEVGTAAHQTNRQEKSPQDPGDPVQYNRTTDEELSELEDRVAVTASEVQQAESEVSDIESRIAALRAAGLTVKPSGKPRRKSNLPIFLPRVAGKLGKRPEDPNADPSSEAKAMAVPYLLRRKFSNSLKSQGKDDDSFDRKSVYRGSLTQRNPNARKGMASHTFAKPVVAHQS

SEQ ID NO: 33464 - protein, 131 aa, Artificial Sequence
  derived and/or modified sequence
MGKKLDLSKLTDEEAQHVLEVVQRDFDLRRKEEERLEALKGKIKKESSKRELLSDTAHLNETHCARCLQPYQLLVNSKRQCLECGLFTCKSCGRVHPEEQGWICDPCHLARVVKIGSLEWYYEHVKARFKR

SEQ ID NO: 33465 - DNA, 1719 bp, Artificial Sequence
  derived and/or modified sequence
atgggaaaaaagctggatctgagcaagctcactgacgaggaggcccagcatgtgctggaggttgttcagcgcgatttcgacctgcgaaggaaggaggaggaacgattggaagcccttaaggggaagatcaagaaagaatcttcaaagagggagcttttatctgacacagcccacttaaatgaaacgcactgtgcaaggtgcctccagccctaccaactgcttgtgaattcaaagcgtcagtgccttgagtgcggcttgtttacatgtaagagttgtgggagggtccatccggaagaacaggggtggatatgtgacccttgccacctggcacgcgtagttaaaattgggtccctcgaatggtactatgagcatgttaaagcccggttcaagaggttcgggagcgcaaaggtgatcagatcattgcacggccggctgcagggtggcgccggtccagaactgatttcggaagaacgctcaggagattcggaccagacagacgaggatggggagcccggctccgaggcacaggcccaggcccagccttttggatcaaagaaaaaaagactgctgtctgtccacgactttgacttcgaaggcgattccgatgattccacgcagcctcaggggcacagcctccacctcagttccgtccccgaggcccgagattcacctcagtccctgaccgatgagtcttgctcggagaaggctgcccctcataaagcggaaggcctggaggaggcagacaccggggctagcgggtgtcactcccatcctgaggaacagccgaccagtatctctccctcaaggcacggtgctcttgcggaactgtgccccccaggcgggtcgcacaggatggctcttgggaccgctgccgccctcggatccaacgttattaggaatgagcagctccccctccagtatctggccgacgttgacacaagtgatgaggaatcaattcgagcacacgtgatggcttctcatcatagcaagcggcgcgggagagcctcctctgagtcacagggtttgggcgcaggagtgcgaacagaagcagatgtcgaagaggaggcacttcgacgcaagttagaagaactgacctcaaacgtttctgaccaggaaaccagcagtgaggaagaagaggctaaagacgagaaggccgaaccaaaccgcgacaagtctgttggccccctgcctcaggccgatcccgaggtgggtaccgccgcacaccagacgaaccgccaggaaaagtccccacaggatcctggagaccccgtgcagtacaatcgaacaaccgacgaagagttgtcggaactagaagatagagtcgccgttactgcctctgaggtgcaacaggccgagtctgaggtaagtgacatcgagagcagaatcgcagcattgcgggcggctgggctgactgttaagccatccggtaagcctcgacgcaagagcaacctgccgattttcctgccccgtgtggccggcaaactgggcaagaggccagaagacccgaacgcggaccccagttcggaggctaaagctatggctgtcccataccttcttcggaggaagttctctaattcactaaaaagccagggtaaggacgacgactcatttgatagaaaatcggtgtatcggggttccctcacccaacgaaaccccaacgcaagaaaaggcatggcctcacacaccttcgctaaacccgtagtggcccaccagtcttag

SEQ ID NO: 33466 - DNA, 1719 bp, Artificial Sequence
  derived and/or modified sequence
atgggcaagaagctggacctgagcaagctgacagatgaggaggcccagcacgtgctggaggtggtgcagagggactttgacctgcggaggaaggaggaggagcggctggaggccctgaagggcaagatcaagaaggagagcagcaagcgggagctgctgagtgacacagcccacctgaatgagacccactgtgcccgctgcctgcagccctaccagctgctggtgaacagcaagaggcagtgcctggagtgtggcctcttcacctgcaagagctgtggccgggtgcaccctgaggagcagggctggatctgtgacccctgccacctggcccgggtggtgaagattggcagcctggagtggtactatgagcacgtgaaggcccgcttcaagcgcttcggcagcgccaaggtgatccgcagcctgcacggccgcctgcagggcggggccggccctgagctgatcagcgaggagaggtctggggacagcgaccagacagatgaagatggagagcccggcagcgaggcccaggcccaggcccagcccttcggcagcaagaagaagaggctgctgtctgtgcatgactttgattttgaaggagacagtgatgacagcacccagccccagggccacagcctgcacctgagctctgtgcctgaggcccgggacagcccccagagcctgacagatgagagctgcagcgagaaggccgccccccacaaggccgagggcctggaggaggccgacacaggagccagcggctgccacagccaccctgaggagcagcccaccagcatcagccccagccgccacggggccctggccgagctgtgccccccaggcggcagccacaggatggccctgggcacagctgctgccctgggcagcaatgtcatcagaaatgagcagctgcccctgcagtacctggctgatgtggacaccagtgatgaggagagcatccgggcccacgtgatggccagccaccacagcaagagaagaggccgggccagcagcgagagccagggcctgggcgctggggtgaggacagaagcagatgtggaggaggaggccctgcggaggaagctggaggagctgaccagcaatgtgtctgaccaggagaccagcagcgaggaggaggaggccaaggatgagaaggccgagcccaacagagacaagtctgtgggccccctgccccaggccgaccctgaggtgggcacagctgcccaccagaccaaccggcaggagaagagcccccaggaccccggggaccctgtgcagtacaacagaaccacagatgaggagctgtctgagctggaggacagagtggccgtgacagccagcgaggtgcagcaggccgagagcgaggtgtctgacatcgagagcagaattgctgccctgcgggccgccggcctgactgtgaagcccagcggcaagcccaggaggaagagcaacctgcccatcttcctgccccgggtggccggcaagctgggcaagaggcctgaggaccccaatgctgaccccagcagcgaggccaaggccatggctgtgccctacctgctgcggaggaagttcagcaacagcctgaagagccagggcaaggatgatgacagctttgacaggaagtctgtgtaccggggcagcctgacccagaggaaccccaatgccaggaagggcatggccagccacacctttgccaagcctgtggtggcccaccagagctag

SEQ ID NO: 33467 - DNA, 2332 bp, Artificial Sequence
  derived and/or modified sequence
agttgcccgcctgccccggagagccaggcgctaaccagccgctctgcgccccgcgccctgcttgcccccattatccagccttgccccggcgccctgacctgacgccctggcctgacgccctgcttcgtcgcctcctttctctcccaggtgctggaccagggactgagcgtcccccggagagggtccggtgtgaccccgacaagaagcagaaatggggaagaaactggatctttccaagctcactgatgaagaggcccagcatgtcttggaagttgttcaacgagattttgacctccgaaggaaagaagaggaacggctagaggcgttgaagggcaagattaagaaggaaagctccaagagggagctgctttccgacactgcccatctgaacgagacccactgcgcccgctgcctgcagccctaccagctgcttgtgaatagcaaaaggcagtgcctggaatgtggcctcttcacctgcaaaagctgtggccgcgtccacccggaggagcagggctggatctgtgacccctgccatctggccagagtcgtgaagatcggctcactggagtggtactatgagcatgtgaaagcccgcttcaagaggttcggaagtgccaaggtcatccggtccctccacgggcggctgcagggtggagctgggcctgaactgatatctgaagagagaagtggagacagcgaccagacagatgaggatggagaacctggctcagaggcccaggcccaggcccagccctttggcagcaaaaaaaagcgcctcctctccgtccacgacttcgacttcgagggagactcagatgactccactcagcctcaaggtcactccctgcacctgtcctcagtccctgaggccagggacagcccacagtccctcacagatgagtcctgctcagagaaggcagcccctcacaaggctgagggcctggaggaggctgatactggggcctctgggtgccactcccatccggaagagcagccgaccagcatctcaccttccagacacggcgccctggctgagctctgcccgcctggaggctcccacaggatggccctggggactgctgctgcactcgggtcgaatgtcatcaggaatgagcagctgcccctgcagtacttggccgatgtggacacctctgatgaggaaagcatccgggctcacgtgatggcctcccaccattccaagcggagaggccgggcgtcttctgagagtcagggtctaggtgctggagtgcgcacggaggccgatgtagaggaggaggccctgaggaggaagctggaggagctgaccagcaacgtcagtgaccaggagacctcgtccgaggaggaggaagccaaggacgaaaaggcagagcccaacagggacaaatcagttgggcctctcccccaggcggacccggaggtgggcacggctgcccatcaaaccaacagacaggaaaaaagcccccaggaccctggggaccccgtccagtacaacaggaccacagatgaggagctgtcagagctggaggacagagtggcagtgacggcctcagaagtccagcaggcagagagcgaggtttcagacattgaatccaggattgcagccctgagggccgcagggctcacggtgaagccctcgggaaagccccggaggaagtcaaacctcccgatatttctccctcgagtggctgggaaacttggcaagagaccagaggacccaaatgcagacccttcaagtgaggccaaggcaatggctgtgccctatcttctgagaagaaagttcagtaattccctgaaaagtcaaggtaaagatgatgattcttttgatcggaaatcagtgtaccgaggctcgctgacacagagaaaccccaacgcgaggaaaggaatggccagccacaccttcgcgaaacctgtggtggcccaccagtcctaacgggacaggacagagagacagagcagccctgcactgttttccctccaccacagccatcctgtccctcattggctctgtgctttccactatacacagtcaccgtcccaatgagaaacaagaaggagcaccctccacatggactcccacctgcaagtggacagcgacattcagtcctgcactgctcacctgggtttactgatgactcctggctgccccaccatcctctctgatctgtgagaaacagctaagctgctgtgacttccctttaggacaatgttgtgtaaatctttgaaggacacaccgaagacctttatactgtgatcttttacccctttcactcttggctttcttatgttgctttcatgaatggaatggaaaaaagatgactcagttaaggcacca

SEQ ID NO: 33468 - DNA, 1719 bp, Artificial Sequence
  derived and/or modified sequence
atgggcaagaagctggacctgagcaagctgaccgacgaggaggcccagcacgtactggaagtcgtccagcgggactttgatctgcggaggaaagaagaagagcggctggaggcgctcaagggcaagattaagaaagaatcttctaagcgcgagcttctgagtgacaccgcccacctgaacgaaacgcattgcgccagatgccttcaaccttaccagcttttggtgaattcaaagagacagtgtctcgagtgcggcctgttcacctgtaagagttgcggacgggtgcatccagaagagcaggggtggatctgtgatccatgtcacttggcgagagtggtgaaaatcggcagcctggaatggtactatgagcatgtcaaggccagattcaaacgattcggctccgccaaagttatccggagcctccacggacggctgcaaggcggagccggcccggagctgattagcgaggaacgatccggagattcagatcagactgacgaggacggggagccgggctccgaagcacaggcacaggcacaaccctttggaagcaagaaaaaaaggctgctgagcgtccatgactttgactttgaaggggattcagatgattccacacagccgcaaggacactctttgcacctctcttcggtcccagaggccagagactcgccccagtcactgacagacgagtcctgcagtgaaaaagccgcaccacacaaagctgaggggttggaggaggcagatactggagcgtctggctgccacagccaccccgaggagcagccgacatccattagcccctcgaggcacggtgcgctggctgaactgtgtccaccaggcggctctcaccgaatggccctaggcaccgcagccgctctgggctctaacgttataagaaacgaacagctgccactgcaatacctggctgacgttgacacaagcgacgaagagtccattagagctcacgtgatggcaagtcaccattcaaaacgccgagggagagcctcatccgagtcgcaaggcctaggggccggggtgcgcacagaagcagatgtggaagaagaagctctcaggagaaagctggaggagctcacctcaaatgtcagtgatcaggaaacaagttcggaggaagaagaagctaaggatgaaaaggcggaacctaatagagacaagagtgtggggcccttaccccaggcggaccccgaggtaggcaccgctgcccatcagaccaaccgccaggaaaagtcaccccaggacccgggtgatcctgttcaatataatcgcactaccgatgaggagctgtctgagttagaagatcgtgtggcagtgacagctagcgaggttcaacaggccgagtctgaggtttctgacatcgaatcccgaattgcagctctgagagccgctgggctaacggtcaagcccagcggcaaacctcgacgaaaatcaaatttgcctatctttctgcccagggtggccggaaagctgggtaagagaccagaagatcccaatgccgatccaagtagcgaagcaaaggctatggcggtgccttacctgctccggaggaagttctctaattcactgaaatctcaaggcaaggatgatgattcctttgacaggaaaagtgtctaccgtggatcactcacgcagcgtaatccaaacgcgcggaaggggatggccagccacacctttgctaagccagtcgtggcccaccagtcctag

SEQ ID NO: 33469 - DNA, 1719 bp, Artificial Sequence
  derived and/or modified sequence
atgggaaagaagctggacttgtcaaaactgacggatgaagaggcccagcacgtgctggaagtcgtacaaagggattttgatttaagaagaaaggaggaggaaaggctggaagcccttaagggaaaaatcaaaaaggagagctccaagagggagctgctgagcgacacggcgcacctgaatgagacacattgcgcgagatgtctccaaccatatcagctcctggtcaattcaaaacgtcagtgcctggagtgcgggctgtttacctgtaaaagctgtggtcgggttcatccagaggagcagggctggatttgcgatccatgccatctggcgcgagtggtcaaaattggatcactggaatggtattatgagcatgtgaaagcacgctttaagagatttggcagcgccaaagtaatcaggtcacttcatgggagactgcagggcggagcagggcctgagttgatcagtgaagagagatccggcgactcagaccaaactgatgaggatggagaaccgggtagcgaagcacaggcccaagcccaaccatttgggtccaagaagaaaaggctactgagcgtacatgactttgacttcgaaggggacagtgacgactctacccaaccgcagggacacagtctgcatctgtctagtgttcctgaggccagagacagcccccagagcctgactgatgagagttgtagcgagaaggctgccccacataaggccgagggtctggaggaagccgataccggggctagtggctgtcactcccacccagaggagcagccgacaagcataagcccaagccgacatggggcattggccgagctgtgcccgcctgggggtagccaccgcatggctctgggcactgcggctgcgctcggaagtaacgttatccggaacgagcagctgcccctccagtaccttgccgacgtggatacttccgatgaggaatcaattcgcgctcacgtcatggccagtcatcacagtaagaggcggggtagagcatcctctgagagtcagggcttaggggctggtgtccgtaccgaggcagacgtcgaggaggaagcgcttagacgtaaattggaagagctcaccagcaatgtgagtgatcaggaaacgagctctgaggaggaagaggccaaagacgagaaagctgagcctaacagggacaagtctgtcggcccattaccccaggcagatccggaggttggtaccgccgctcatcaaactaatcgccaggagaagtccccacaagatcccggagatccagtgcaatacaacagaaccactgatgaggagttgtctgaactggaagatcgagtggccgtgactgcctcagaagtacagcaggcagagtccgaggtctcagatatcgagtcccggatcgcagcattgcgggcagccggactcacagtgaaaccgtcagggaagcccaggcgtaaatccaaccttcccatcttcttgccacgggtcgccggtaaattgggcaagagacccgaagatcccaacgcagacccttccagcgaggctaaggcgatggcggtgccatacctgctgaggagaaagttctctaacagtcttaagtctcagggaaaagacgatgactccttcgataggaaatcagtgtaccggggaagtctgactcagcggaaccctaacgctcggaaagggatggcctcccacacttttgcgaaaccagtggtggcacatcaatcctag

SEQ ID NO: 33470 - DNA, 1719 bp, Artificial Sequence
  derived and/or modified sequence
atgggcaagaagctggacctgagcaagctgaccgacgaggaggcccagcacgtgctggaggtggtgcagagagacttcgacctgagaagaaaggaggaggagagactggaggccctgaagggcaagatcaagaaggagagcagcaagagagagctgctgagcgacaccgcccacctgaacgagacccactgcgccagatgcctgcagccctaccagctgctggtgaacagcaagagacagtgcctggagtgcggcctgttcacctgcaagagctgcggcagagtgcaccccgaggagcagggctggatctgcgacccctgccacctggccagagtggtgaagatcggcagcctggagtggtactacgagcacgtgaaggccagattcaagagattcggcagcgccaaggtgatcagaagcctgcacggcagactgcagggcggcgccggccccgagctgatcagcgaggagagaagcggcgacagcgaccagaccgacgaggacggcgagcccggcagcgaggcccaggcccaggcccagcccttcggcagcaagaagaagagactgctgagcgtgcacgacttcgacttcgagggcgacagcgacgacagcacccagccccagggccacagcctgcacctgagcagcgtgcccgaggccagagacagcccccagagcctgaccgacgagagctgcagcgagaaggccgccccccacaaggccgagggcctggaggaggccgacaccggcgccagcggctgccacagccaccccgaggagcagcccaccagcatcagccccagcagacacggcgccctggccgagctgtgcccccccggcggcagccacagaatggccctgggcaccgccgccgccctgggcagcaacgtgatcagaaacgagcagctgcccctgcagtacctggccgacgtggacaccagcgacgaggagagcatcagagcccacgtgatggccagccaccacagcaagagaagaggcagagccagcagcgagagccagggcctgggcgccggcgtgagaaccgaggccgacgtggaggaggaggccctgagaagaaagctggaggagctgaccagcaacgtgagcgaccaggagaccagcagcgaggaggaggaggccaaggacgagaaggccgagcccaacagagacaagagcgtgggccccctgccccaggccgaccccgaggtgggcaccgccgcccaccagaccaacagacaggagaagagcccccaggaccccggcgaccccgtgcagtacaacagaaccaccgacgaggagctgagcgagctggaggacagagtggccgtgaccgccagcgaggtgcagcaggccgagagcgaggtgagcgacatcgagagcagaatcgccgccctgagagccgccggcctgaccgtgaagcccagcggcaagcccagaagaaagagcaacctgcccatcttcctgcccagagtggccggcaagctgggcaagagacccgaggaccccaacgccgaccccagcagcgaggccaaggccatggccgtgccctacctgctgagaagaaagttcagcaacagcctgaagagccagggcaaggacgacgacagcttcgacagaaagagcgtgtacagaggcagcctgacccagagaaaccccaacgccagaaagggcatggccagccacaccttcgccaagcccgtggtggcccaccagagctag

SEQ ID NO: 33471 - protein, 305 aa, Artificial Sequence
  derived and/or modified sequence
MRAHAQRGRGCTRRSAAVLMARHGLPLLPLLSLLVGAWLKLGNGQATSMVQLQGGRFLMGTNSPDSRDGDGPVREATVKPFAIDIFPVTNKDFRDFVREKKYRTEAEMFGWSFVFEDFVSDELRNKATQPMKPAGPGSGIRERLEHPVLHVSWNDARAYCAWRGKRLPTEEEWEFAARGGLKGQVYPWGNWFQPNRTNLWQGKFPKGDKAEDGFHGVSPVNAFPAQNNYGLYDLLGNVWEWTASPYQAAEQDMRVLRGASWIDTADGSANHRARVTTRMGNTPDSASDNLGFRCAADAGRPPGEL

SEQ ID NO: 33472 - DNA, 918 bp, Artificial Sequence
  derived and/or modified sequence
atgagagcccacgcccagagaggcagaggctgcaccagaagaagcgccgccgtgctgatggccagacacggcctgcccctgctgcccctgctgagcctgctggtgggcgcctggctgaagctgggcaacggccaggccaccagcatggtgcagctgcagggcggcagattcctgatgggcaccaacagccccgacagcagagacggcgacggccccgtgagagaggccaccgtgaagcccttcgccatcgacatcttccccgtgaccaacaaggacttcagagacttcgtgagagagaagaagtacagaaccgaggccgagatgttcggctggagcttcgtgttcgaggacttcgtgagcgacgagctgagaaacaaggccacccagcccatgaagcccgccggccccggcagcggcatcagagagagactggagcaccccgtgctgcacgtgagctggaacgacgccagagcctactgcgcctggagaggcaagagactgcccaccgaggaggagtgggagttcgccgccagaggcggcctgaagggccaggtgtacccctggggcaactggttccagcccaacagaaccaacctgtggcagggcaagttccccaagggcgacaaggccgaggacggcttccacggcgtgagccccgtgaacgccttccccgcccagaacaactacggcctgtacgacctgctgggcaacgtgtgggagtggaccgccagcccctaccaggccgccgagcaggacatgagagtgctgagaggcgccagctggatcgacaccgccgacggcagcgccaaccacagagccagagtgaccaccagaatgggcaacacccccgacagcgccagcgacaacctgggcttcagatgcgccgccgacgccggcagaccccccggcgagctgtag

SEQ ID NO: 33473 - DNA, 918 bp, Artificial Sequence
  derived and/or modified sequence
atgcgggcccatgcccagaggggtagggggtgcacaaggcggagcgccgccgtgttaatggccaggcacggcctgccactgcttcctcttctctcccttctcgtcggcgcatggttgaagctaggaaacggccaggcaacctctatggttcaactgcagggcggccgcttccttatgggcactaatagtccagactctcgcgacggggatggacctgttcgcgaggcaacagtgaaaccctttgccattgacattttcccagtgaccaacaaggactttagagacttcgtgcgtgaaaagaagtaccggaccgaagctgagatgtttggttggagctttgtctttgaggactttgttagtgacgaacttcgaaataaggcaacacaacccatgaagccggcaggcccgggctccgggatccgggagagactggaacatccagtgttacacgtgtcatggaacgatgcacgcgcttattgcgcatggagagggaagcggctgcctactgaagaggaatgggaattcgccgcccgcggaggcttaaagggacaggtgtacccctggggcaattggtttcagccaaatagaaccaacctctggcagggaaagttcccaaagggagacaaggctgaggacggcttccatggcgtctctcccgtgaacgcatttcccgcgcaaaacaattatggactgtacgaccttctggggaacgtttgggaatggaccgcgtccccctaccaggctgccgaacaggacatgcgggtcctcaggggagccagctggatcgataccgcagatggttctgcgaatcatcgggcaagggtgacaacaaggatgggaaacacgcctgactctgcctctgacaacctggggttcaggtgcgcagccgacgctggaagaccacctggcgagctgtag

SEQ ID NO: 33474 - DNA, 918 bp, Artificial Sequence
  derived and/or modified sequence
atgagggcccacgcccagaggggccggggctgcaccaggagatctgctgctgtgctgatggcccggcacggcctgcccctgctgcccctgctgagcctgctggtgggcgcctggctgaagctgggcaatggccaggccacctccatggtgcagctgcagggcggccgcttcctgatgggcaccaacagcccagacagcagagatggagatggccctgtgcgggaggccaccgtgaagccctttgccatcgacatcttccctgtgaccaacaaggacttccgggactttgtgcgggagaagaagtacagaacagaggccgagatgtttggctggagctttgtgtttgaggactttgtgtctgatgagctgaggaacaaggccacccagcccatgaagccagctggccctggcagcggcatccgggagcggctggagcaccctgtgctgcacgtgtcctggaatgatgcccgggcctactgtgcctggaggggcaagaggctgcccacagaggaggagtgggagtttgctgcccggggcggcctgaagggccaggtgtacccctggggcaactggttccagcccaacagaaccaacctgtggcagggcaagttccccaagggggacaaggcagaagatggcttccatggagtgtcccctgtgaatgccttccctgcccagaacaactacggcctgtatgacctgctgggcaatgtgtgggagtggacagccagcccctaccaggccgctgagcaggacatgagggtgctgcggggggcctcctggattgacacagcagatggcagcgccaaccaccgggcccgggtgaccaccaggatgggcaacaccccagattctgccagtgacaacctgggcttccgctgtgccgcagatgctggccggcccccaggagagctgtag

SEQ ID NO: 33475 - DNA, 918 bp, Artificial Sequence
  derived and/or modified sequence
atgcgggcccacgcccagcggggccggggctgcacccggcggagcgctgccgtgctcatggcgcgtcatggactgcctctgctccctcttttgtcactcctcgttggagcctggttgaaactgggcaacgggcaagctacatccatggtgcagttacagggaggcaggttcctgatgggcacaaacagccccgatagtcgagatggtgatgggcctgttcgcgaagctactgtcaagccttttgctattgacattttcccagttaccaataaggatttcagagacttcgtgagggagaagaagtacaggaccgaagctgagatgtttgggtggtcctttgtgttcgaagactttgtgtcggatgaattgcgcaataaagccacccaacctatgaagccagctggcccgggtagcggaatccgcgagaggttagaacatcctgtgttacacgtctcctggaatgacgctcgtgcatactgtgcctggagaggcaagagactccccaccgaggaggagtgggagttcgcagctcggggtggtctaaagggccaggtgtatccatgggggaattggtttcagcccaataggaccaatttgtggcagggcaaattccctaagggcgacaaggcggaagatggcttccacggcgtgtccccagttaatgcatttccagcccaaaacaattacggtctgtacgacctcctgggaaacgtttgggaatggaccgcgagcccttaccaggccgccgagcaggacatgagggtgctccgtggggcctcctggatagacactgcagacggcagtgcaaatcacagagcgagggtcaccacgcgaatggggaatacccctgattcagcatcagacaacttggggtttcgctgcgcggccgatgctggaaggccaccaggcgagttatag

SEQ ID NO: 33476 - DNA, 918 bp, Artificial Sequence
  derived and/or modified sequence
atgcgtgctcatgctcagcgcggtcgtggctgcacacgtcggagtgcagcagtgctaatggccagacatggattgcccttgctgcccctgctatcactgctcgtaggcgcttggttgaagctaggtaacggccaagcaactagtatggtccagctgcaagggggtagattcttgatgggcaccaactctcccgacagtcgcgacggtgacggcccagtccgggaagccaccgtgaagccatttgccatagatatatttcccgtgacaaacaaggatttccgggacttcgttagagaaaagaagtaccgcacagaggcagagatgttcgggtggagtttcgtgtttgaggacttcgtatcagacgaattacggaacaaggctacccagcccatgaaacctgctggaccaggctccggtattcgagagcgtctggagcatcctgtcctgcatgtgagctggaatgacgcccgtgcctactgtgcctggcggggaaagcgattacctaccgaagaggagtgggagtttgcagccaggggaggccttaaaggacaggtttatccctggggtaattggttccagcccaatcgaaccaacctctggcaggggaaatttccaaagggtgacaaggcagaggacggattccacggcgtgtcgcctgtgaatgcctttcccgctcaaaacaactacggtctctacgaccttctggggaacgtgtgggaatggacagcgagcccttaccaggccgctgagcaggacatgagggtgctgagaggggcatcttggattgatactgccgacggaagtgccaatcatcgggctcgcgttacgacccgcatggggaatactcccgacagtgctagtgataacttggggtttaggtgcgccgcagatgccggacggccacctggggagctctag

SEQ ID NO: 33477 - DNA, 1683 bp, Artificial Sequence
  derived and/or modified sequence
gcaatggtatgacgcacaaaagcaatcttaaggggaatgaaaactgtccaaaggttcagaaaagtagtgaaggggcctctggaacggccgggaccctcaacgtggttttccttaattccctgggcggtcctgaaggtggtgtggccagtcctccgcctcgctccgtcagtttccccctgctgaactattgggtgcggggcgggtggtggcgcagcctgcgcatgtgcataggggtcgactgccgctgcggtgcatgagggcgcatgcgcagcggggccgtgggtgtacgcggcgcagcgcggcagtcctgatggcccggcatgggttaccgctgctgcccctgctgtcgctcctggtcggcgcgtggctcaagctaggaaatggacaggctactagcatggtccaactgcagggtgggagattcctgatgggaacaaattctccagacagcagagatggtgacgggcctgtgcgggaggcgacagtgaaaccctttgccatcgacatatttcctgtcaccaacaaagatttcagggattttgtcagggagaaaaagtatcggacagaagctgagatgtttggatggagctttgtctttgaggactttgtctctgatgagctgagaaacaaagccacccagccaatgaagcctgcaggtcctggctctggcatccgagagagactggagcacccagtgttacacgtgagctggaatgacgcccgtgcctactgtgcttggcggggaaaacgactgcccacggaggaagagtgggagtttgccgcccgagggggcttgaagggtcaagtttacccatgggggaactggttccagccaaaccgcaccaacctgtggcagggaaagttccccaagggagacaaagctgaggatggcttccatggagtctccccagtgaatgctttccccgcccagaacaactacgggctctatgacctcctggggaacgtgtgggagtggacagcatcaccgtaccaggctgctgagcaggacatgcgcgtcctccggggggcatcctggatcgacacagctgatggctctgccaatcaccgggcccgggtcaccaccaggatgggcaacactccagattcagcctcagacaacctcggtttccgctgtgctgcagacgcaggccggccgccaggggagctgtaagcagccgggtggtgacaaggagaaaagccttctagggtcactgtcattccctggccatgttgcaaacagcgcaattccaagctcgagagcttcagcctcaggaaagaacttccccttccctgtctcccatccctctgtggcaggcgcctctcaccagggcaggagaggactcagcctcctgtgttttggagaaggggcccaatgtgtgttgacgatggctgggggccaggtgtttctgttagaggccaagtattattgacacaggattgcaaacacacaaacaattggaacagagcactctgaaaggccattttttaagcattttaaaatctattctctccccctttctccctggatgattcaggaagctgacattgtttcctcaaggcagaattttcctggttctgttttctcagccagttgctgtggaaggagaatgctttctttgtggcctcatctgtggtttcgtgtccctctgaaggaaactagtttccactgtgtaacaggcagac

SEQ ID NO: 33478 - protein, 236 aa, Artificial Sequence
  derived and/or modified sequence
MRAHAQRGRGCTRRSAAVLMARHGLPLLPLLSLLVGAWLKLGNGQATSMVQLQGGRFLMGTNSPDSRDGDGPVREATVKPFAIDIFPVTNKDFRDFVREKKYRTEAEMFGWSFVFEDFVSDELRNKATQPMKGKFPKGDKAEDGFHGVSPVNAFPAQNNYGLYDLLGNVWEWTASPYQAAEQDMRVLRGASWIDTADGSANHRARVTTRMGNTPDSASDNLGFRCAADAGRPPGEL

SEQ ID NO: 33479 - DNA, 711 bp, Artificial Sequence
  derived and/or modified sequence
atgagagcccacgcccagagaggcagaggctgcaccagaagaagcgccgccgtgctgatggccagacacggcctgcccctgctgcccctgctgagcctgctggtgggcgcctggctgaagctgggcaacggccaggccaccagcatggtgcagctgcagggcggcagattcctgatgggcaccaacagccccgacagcagagacggcgacggccccgtgagagaggccaccgtgaagcccttcgccatcgacatcttccccgtgaccaacaaggacttcagagacttcgtgagagagaagaagtacagaaccgaggccgagatgttcggctggagcttcgtgttcgaggacttcgtgagcgacgagctgagaaacaaggccacccagcccatgaagggcaagttccccaagggcgacaaggccgaggacggcttccacggcgtgagccccgtgaacgccttccccgcccagaacaactacggcctgtacgacctgctgggcaacgtgtgggagtggaccgccagcccctaccaggccgccgagcaggacatgagagtgctgagaggcgccagctggatcgacaccgccgacggcagcgccaaccacagagccagagtgaccaccagaatgggcaacacccccgacagcgccagcgacaacctgggcttcagatgcgccgccgacgccggcagaccccccggcgagctgtag

SEQ ID NO: 33480 - DNA, 711 bp, Artificial Sequence
  derived and/or modified sequence
atgagggcccatgcccaacgcggccggggatgtacaaggcgcagcgccgccgtgctaatggccagacacggtcttccgctgctgccacttctatctctcctggtgggcgcttggctcaagctcggcaatgggcaggccaccagtatggtacagctacagggcgggaggtttctgatggggacaaacagtcccgatagcagggacggggatggccccgtgcgggaagcaacggtaaagccatttgctatagacatctttcccgtgacaaacaaagacttccgtgacttcgtaagggagaaaaaataccgtaccgaggcggagatgttcggatggtcttttgtttttgaagatttcgtgtctgacgaattacgcaataaggccacacagcccatgaagggaaaattccctaagggcgacaaggccgaagacggattccacggtgtaagccctgtcaacgcttttccagcacaaaataactacggcctatacgacttgctaggaaatgtgtgggaatggacagcaagtccctatcaagccgctgaacaggatatgcgggtgttacggggagcctcgtggattgacaccgcggatggttcagcaaatcacagggcaagggttacaactcggatgggaaacactcctgacagcgcttctgataatctggggttcaggtgtgctgccgacgctggcaggcccccgggtgaattgtag

SEQ ID NO: 33481 - DNA, 711 bp, Artificial Sequence
  derived and/or modified sequence
atgagggcccacgcccagaggggccggggctgcaccaggagatctgctgctgtgctgatggcccggcacggcctgcccctgctgcccctgctgagcctgctggtgggcgcctggctgaagctgggcaatggccaggccacctccatggtgcagctgcagggcggccgcttcctgatgggcaccaacagcccagacagcagagatggagatggccctgtgcgggaggccaccgtgaagccctttgccatcgacatcttccctgtgaccaacaaggacttccgggactttgtgcgggagaagaagtacagaacagaggccgagatgtttggctggagctttgtgtttgaggactttgtgtctgatgagctgaggaacaaggccacccagcccatgaagggcaagttccccaagggggacaaggccgaggatggcttccacggcgtgtcccctgtgaatgccttccctgcccagaacaactacggcctgtatgacctgctgggcaatgtgtgggagtggacagccagcccctaccaggccgctgagcaggacatgagggtgctgcggggggcctcctggattgacacagcagatggcagcgccaaccaccgggcccgggtgaccaccaggatgggcaacaccccagacagcgccagtgacaacctgggcttccgctgtgccgcagatgctggccggcccccaggagagctgtag

SEQ ID NO: 33482 - DNA, 711 bp, Artificial Sequence
  derived and/or modified sequence
atgcgggcccacgcccagcggggccggggctgcacccggcggagcgctgcagtgcttatggcacggcatggactcccactcctgcccttgctgtcccttttggtgggcgcctggttgaagcttggaaacggacaggctaccagcatggtccaactccaggggggacgttttctgatggggaccaacagtcctgactctcgggacggtgacggcccagtccgggaggcaacggttaagccttttgcgatcgatatattcccagtgactaataaggacttcagggacttcgtacgggaaaagaagtaccggaccgaggcagaaatgtttgggtggtcttttgtgttcgaagatttcgtgtccgatgaacttaggaacaaggctactcagcccatgaaagggaaattcccgaagggggataaggccgaggatggctttcacggcgtgtctccggttaatgcttttccagcccaaaataattacggtctctacgacctgctgggtaatgtgtgggagtggacagcctccccctatcaggcggccgagcaggatatgcgggtcttgcgtggagcatcttggattgacaccgccgacggctcagcgaaccatagagcccgcgtcactactcgcatggggaatactcctgattccgcgtccgataacctgggattcagatgtgccgctgatgctggtcgtccccctggcgagctgtag

SEQ ID NO: 33483 - DNA, 711 bp, Artificial Sequence
  derived and/or modified sequence
atgagggcgcacgcccagaggggaaggggatgtacgcgtcgatctgccgctgtgctgatggcaagacatggtctcccgctcctgcctttgctttcacttctggtgggcgcttggctgaagctgggcaacgggcaggccaccagtatggtccagcttcagggcggtagattcctgatggggacaaattcacccgattccagggacggggacggtcctgtaagggaggccaccgtgaagcctttcgcaatcgacatctttcctgtaaccaataaggacttccgcgatttcgtgagagaaaaaaagtatcgcacagaagctgagatgttcggctggagtttcgtctttgaggactttgtctccgatgaactgcggaataaggccactcagcccatgaagggcaagtttcctaagggcgacaaggccgaggacggttttcatggcgtttctcccgtcaatgcctttcccgctcagaataactatggactttacgacctgctaggtaacgtgtgggagtggacagcaagtccttatcaagccgcagagcaggatatgagggtgttacggggtgctagctggattgacactgctgacggatctgctaaccaccgtgctagagtcaccaccaggatgggaaacacgcccgatagtgcatccgacaaccttggatttcgatgcgcagcagatgccggtcgccctccaggcgaattgtag

SEQ ID NO: 33484 - DNA, 1287 bp, Artificial Sequence
  derived and/or modified sequence
catgagggcgcatgcgcagcggggccgtgggtgtacgcggcgcagcgcggcagtcctgatggcccggcatgggttaccgctgctgcccctgctgtcgctcctggtcggcgcgtggctcaagctaggaaatggacaggctactagcatggtccaactgcagggtgggagattcctgatgggaacaaattctccagacagcagagatggtgacgggcctgtgcgggaggcgacagtgaaaccctttgccatcgacatatttcctgtcaccaacaaagatttcagggattttgtcagggagaaaaagtatcggacagaagctgagatgtttggatggagctttgtctttgaggactttgtctctgatgagctgagaaacaaagccacccagccaatgaagggaaagttccccaagggagacaaagctgaggatggcttccatggagtctccccagtgaatgctttccccgcccagaacaactacgggctctatgacctcctggggaacgtgtgggagtggacagcatcaccgtaccaggctgctgagcaggacatgcgcgtcctccggggggcatcctggatcgacacagctgatggctctgccaatcaccgggcccgggtcaccaccaggatgggcaacactccagattcagcctcagacaacctcggtttccgctgtgctgcagacgcaggccggccgccaggggagctgtaagcagccgggtggtgacaaggagaaaagccttctagggtcactgtcattccctggccatgttgcaaacagcgcaattccaagctcgagagcttcagcctcaggaaagaacttccccttccctgtctcccatccctctgtggcaggcgcctctcaccagggcaggagaggactcagcctcctgtgttttggagaaggggcccaatgtgtgttgacgatggctgggggccaggtgtttctgttagaggccaagtattattgacacaggattgcaaacacacaaacaattggaacagagcactctgaaaggccattttttaagcattttaaaatctattctctccccctttctccctggatgattcaggaagctgacattgtttcctcaaggcagaattttcctggttctgttttctcagccagttgctgtggaaggagaatgctttctttgtggcctcatctgtggtttcgtgtccctctgaaggaaactagtttccactgtgtaacaggcagacatgtaactatttaaagcacagttcagtcctaaaagggtctgggagaaccagatgatgtactag

SEQ ID NO: 33485 - protein, 398 aa, Artificial Sequence
  derived and/or modified sequence
MRKRTEPVALEHERCAAAGSSSSGSAAAALDADCRLKQNLRLTGPAAAEPRCAADAGMKRALGRRKGVWLRLRKILFCVLGLYIAIPFLIKLCPGIQAKLIFLNFVRVPYFIDLKKPQDQGLNHTCNYYLQPEEDVTIGVWHTVPAVWWKNAQGKDQMWYEDALASSHPIILYLHGNAGTRGGDHRVELYKVLSSLGYHVVTFDYRGWGDSVGTPSERGMTYDALHVFDWIKARSGDNPVYIWGHSLGTGVATNLVRRLCERETPPDALILESPFTNIREEAKSHPFSVIYRYFPGFDWFFLDPITSSGIKFANDENVKHISCPLLILHAEDDPVVPFQLGRKLYSIAAPARSFRDFKVQFVPFHSDLGYRHKYIYKSPELPRILREFLGKSEPEHQH

SEQ ID NO: 33486 - protein, 360 aa, Artificial Sequence
  derived and/or modified sequence
MRKRTEPVALEPRCAADAGMKRALGRRKGVWLRLRKILFCVLGLYIAIPFLIKLCPGIQAKLIFLNFVRVPYFIDLKKPQDQGLNHTCNYYLQPEEDVTIGVWHTVPAVWWKNAQGKDQMWYEDALASSHPIILYLHGNAGTRGGDHRVELYKVLSSLGYHVVTFDYRGWGDSVGTPSERGMTYDALHVFDWIKARSGDNPVYIWGHSLGTGVATNLVRRLCERETPPDALILESPFTNIREEAKSHPFSVIYRYFPGFDWFFLDPITSSGIKFANDENVKHISCPLLILHAEDDPVVPFQLGRKLYSIAAPARSFRDFKVQFVPFHSDLGYRHKYIYKSPELPRILREFLGKSEPEHQH

SEQ ID NO: 33487 - DNA, 1197 bp, Artificial Sequence
  derived and/or modified sequence
atgaggaaacgaacagagcccgtcgcactggaacatgagagatgcgccgcagcagggagttctagtagtggcagtgctgctgccgcactggacgccgattgccgcctgaaacagaatctgcgactcactggacccgccgctgccgagcccagatgcgctgcagatgcgggtatgaagcgcgccctcggacgtaggaaaggagtttggcttcgactacgcaaaattctgttttgtgtcctcggactgtatatcgcgatcccttttctgataaagctttgtccagggattcaggccaaactgatcttcctgaactttgtgcgtgtgccttattttattgatctgaagaaaccacaggaccaaggactgaatcatacctgcaactattacctccaacccgaagaggatgtgaccattggtgtttggcatacagtcccggctgtgtggtggaaaaatgcccaggggaaggatcagatgtggtacgaggatgcgctcgcatctagccaccccattatcctgtacctgcatggtaacgcaggcactcgcggcggcgaccatcgtgtggaattatacaaggtattaagctcactgggctatcacgtcgttacattcgactaccgtggatggggagacagcgtagggacacctagcgaacggggcatgacatatgatgccttacacgtgttcgattggatcaaggctagaagtggtgacaaccctgtgtatatttggggtcatagcctcggaacaggcgtggcaacaaatcttgtgcggcggctttgcgaaagggagacaccaccagacgctcttattctcgaatcccccttcaccaacatccgagaggaggcgaaaagccatccattctcagtgatttacaggtactttcctgggtttgactggttctttcttgaccccatcacttcgagtggtattaaatttgctaatgacgaaaacgttaaacacatcagctgcccactgttaattcttcacgccgaggacgatcctgtggtgcctttccagcttgggcgaaagctgtacagcatagccgccccagccagatccttccgagacttcaaggttcaattcgtgccctttcattctgatctcggctaccgccataaatatatctacaagagtcccgagcttcctcgcatcttaagggaatttctagggaaatcagagcccgagcaccaacactag

SEQ ID NO: 33488 - DNA, 1083 bp, Artificial Sequence
  derived and/or modified sequence
atgcgtaaacgcacagagccagtggccctcgagccccgttgcgcagcggacgccgggatgaagagagccctcggccgtcggaagggagtgtggttgagactaaggaaaatactgttttgcgtgctgggactatacatcgccatccctttcctgatcaaattgtgcccaggcattcaggccaaactcatcttcttgaatttcgttagagtcccttattttattgacttaaaaaaaccccaggatcaggggttaaaccacacctgcaactactatctgcagcccgaagaggacgtgactattggagtgtggcacactgtgcctgccgtttggtggaagaatgctcagggcaaggaccagatgtggtatgaggacgctctagcttcatcccaccctatcattctttacctccacggtaatgctggcacgcgcggcggagatcatcgcgttgagctttacaaggtgcttagcagcttgggatatcatgtggttactttcgactaccggggctggggcgacagcgttggaactcctagcgaacgcggtatgacctacgatgctctccatgtctttgactggatcaaggcgcgcagcggcgacaaccccgtgtacatttgggggcactcattgggaacgggagtcgccacaaacctggtaaggaggctttgtgaacgcgagacaccacctgacgcacttattctggaatctccattcactaacatacgggaagaagctaaatctcacccattctcagtgatttaccgttactttccagggttcgactggttttttctcgatcccattactagcagcggtatcaaatttgctaatgacgaaaacgtgaagcatatttcctgtcccttgcttattctgcacgcggaggacgacccggtggtgccgttccagctggggcgaaagctgtactccatagcggcgcctgccaggtcttttagagattttaaggtccagtttgtgccctttcactcagacttgggctatcgtcataaatacatctacaaaagccctgaactcccccgtatacttagggagttcttagggaagtctgaaccagagcatcaacactag

SEQ ID NO: 33489 - DNA, 1197 bp, Artificial Sequence
  derived and/or modified sequence
atgaggaagaggacagagcctgtggccctggagcacgagcgctgtgccgccgccggcagcagcagcagcggcagcgctgctgctgccctggatgctgactgccgcctgaagcagaacctgcggctgactggacctgctgctgctgagccccgctgtgccgcagatgctggcatgaagagggccctgggccgcaggaagggcgtgtggctgcggctgaggaagatcctcttctgtgtgctgggcctgtacatcgccatccccttcctgatcaagctgtgccccggcatccaggccaagctgatcttcctgaactttgtgcgggtgccctacttcatcgacctgaagaagccccaggaccagggcctgaaccacacctgcaactactacctgcagcctgaggaggatgtgaccatcggcgtgtggcacacagtgcctgctgtgtggtggaagaatgcccagggcaaggaccagatgtggtatgaagatgccctggccagcagccaccccatcatcctgtacctgcatggaaatgccggcacccggggcggggaccaccgggtggagctgtacaaggtgctgagcagcctgggctaccacgtggtgacctttgactaccggggctggggagacagcgtgggcacccccagcgagcggggcatgacctatgatgccctgcacgtgtttgactggatcaaggcccggagcggggacaaccctgtgtacatctggggccacagcctgggcactggagtggccaccaacctggtgcggcggctgtgtgagcgggagaccccaccagatgccctgatcctggagagccccttcaccaacatccgggaggaggccaagagccaccccttcagcgtcatctaccgctacttccctggctttgactggttcttcctggaccccatcaccagcagcggcatcaagtttgccaatgatgaaaatgtgaagcacatcagctgccccctgctgatcctgcacgcagaagatgatcctgtggtgcccttccagctgggcaggaagctgtacagcattgctgccccagcccgctccttccgggacttcaaggtgcagtttgtgcccttccacagcgacctgggctaccgccacaagtacatctacaagagccctgagctgccccgcatcctgcgggagttcctgggcaagtctgagcctgagcaccagcactag

SEQ ID NO: 33490 - DNA, 1083 bp, Artificial Sequence
  derived and/or modified sequence
atgaggaagaggacagagcctgtggccctggagccccgctgtgccgcagatgctggcatgaagagggccctgggccgcaggaagggcgtgtggctgcggctgaggaagatcctcttctgtgtgctgggcctgtacatcgccatccccttcctgatcaagctgtgccccggcatccaggccaagctgatcttcctgaactttgtgcgggtgccctacttcatcgacctgaagaagccccaggaccagggcctgaaccacacctgcaactactacctgcagcctgaggaggatgtgaccatcggcgtgtggcacacagtgcctgctgtgtggtggaagaatgcccagggcaaggaccagatgtggtatgaagatgccctggccagcagccaccccatcatcctgtacctgcatggaaatgccggcacccggggcggggaccaccgggtggagctgtacaaggtgctgagcagcctgggctaccacgtggtgacctttgactaccggggctggggagacagcgtgggcacccccagcgagcggggcatgacctatgatgccctgcacgtgtttgactggatcaaggcccggagcggggacaaccctgtgtacatctggggccacagcctgggcactggagtggccaccaacctggtgcggcggctgtgtgagcgggagaccccaccagatgccctgatcctggagagccccttcaccaacatccgggaggaggccaagagccaccccttcagcgtcatctaccgctacttccctggctttgactggttcttcctggaccccatcaccagcagcggcatcaagtttgccaatgatgaaaatgtgaagcacatcagctgccccctgctgatcctgcacgcagaagatgatcctgtggtgcccttccagctgggcaggaagctgtacagcattgctgccccagcccgctccttccgggacttcaaggtgcagtttgtgcccttccacagcgacctgggctaccgccacaagtacatctacaagagccctgagctgccccgcatcctgcgggagttcctgggcaagtctgagcctgagcaccagcactag

SEQ ID NO: 33491 - DNA, 1197 bp, Artificial Sequence
  derived and/or modified sequence
atgcggaagcggaccgagcccgtggccctggagcacgagcggtgcgctgccgctggatcttcctctagcggttccgcagcggccgccttagatgcagattgccgcctgaaacaaaacctgcgtctgaccggcccagctgctgctgagccacgatgtgccgccgatgctggcatgaagcgggctctcggcaggcgaaagggagtgtggttacgtttaaggaaaatactgttttgcgttttgggactgtatatcgccatcccctttctgataaaactgtgcccaggcattcaggcgaagctgatcttcctgaactttgtgcgcgttccttacttcatagacctgaaaaaaccccaggaccagggtcttaatcacacctgcaattactacctgcagcctgaggaagatgtcaccattggagtctggcatacggtccctgccgtttggtggaagaatgctcaaggcaaggatcagatgtggtatgaggacgcccttgccagcagtcaccctatcattctctacctccatgggaacgctggtacccggggcggggatcatagggtggaactctacaaggtgctaagttctttaggctatcacgtggttactttcgattaccgcggctggggtgattccgtgggcacaccctccgagagaggaatgacatatgatgccctccacgttttcgactggattaaggcgcgatctggagacaaccccgtgtacatctggggtcactccctcggaacaggcgtcgctactaacctggtaagacgtctgtgcgagagggagacgcccccagatgctctgatattggagagcccctttacgaatattagggaagaagctaaatcgcacccattctcagtgatctaccgctactttcccggtttcgattggttctttttagaccctatcacttcaagcgggattaaattcgccaacgatgagaatgtcaagcacattagctgccccctcctcattctacacgctgaggatgaccccgtggtgccttttcagttaggtcgcaagctttatagcatcgctgctcctgccaggtcgttcagggacttcaaggtccaatttgttccgtttcattctgatctgggctacagacataaatatatttacaaaagccctgagcttcctcgcatcctccgcgaatttctgggcaaaagcgaacctgaacatcagcattag

SEQ ID NO: 33492 - DNA, 1083 bp, Artificial Sequence
  derived and/or modified sequence
atgcggaagcggaccgagcccgtggccctggagccccggtgcgccgctgatgctggcatgaaaagagccctgggccgtcggaagggtgtgtggttgaggttgaggaagattctgttttgcgtgctgggcctttatattgctatcccctttctgatcaaactttgtccagggatacaggctaagctgatctttctcaacttcgtgagagtcccctactttatcgatctgaaaaagccacaagatcagggcttgaatcacacatgtaattactacttgcagcccgaagaggacgtgacaataggagtgtggcatacggtcccggccgtgtggtggaagaacgcccaagggaaggatcagatgtggtatgaggacgcgctagcttcctcacaccccattatcctgtatcttcatggcaatgcaggcacccggggtggtgaccatcgcgtggagctatataaggttctgagtagtctgggataccatgtagtaacttttgattacaggggctggggcgatagcgttggaaccccatcggagagggggatgacctacgatgcccttcatgtgtttgactggattaaagctcggtccggcgacaacccagtttacatatggggccatagcctgggtaccggcgtcgccaccaatctggtccgaaggctgtgcgaacgcgaaactcctcctgatgctttgatcttggagagcccgttcactaatatcagagaggaggcaaagtcccacccgttctccgtcatctaccgctacttccccggattcgattggttctttttagaccccataacatctagcgggatcaagttcgccaacgatgagaacgtgaaacatatcagctgcccactccttatcctgcatgctgaggacgatcctgttgtgccttttcagctggggcgcaagctctactccatagctgctccagctcgatcctttcgtgacttcaaggtccaattcgtgccctttcactccgacctagggtaccggcataagtatatatataagtccccagaactacccagaatcttgcgagagttcttaggcaaaagcgagccggagcatcagcattag

SEQ ID NO: 33493 - DNA, 1197 bp, Artificial Sequence
  derived and/or modified sequence
atgcgcaaaagaactgagcctgttgcgctggagcacgagcgatgcgctgctgctggcagcagtagtagcggctccgcagctgctgcgttagatgcagattgtcgattaaaacaaaatctgagactcactggaccagccgctgcagagccaaggtgtgccgctgatgccggaatgaagcgggctttagggcgtagaaagggggtgtggcttcgcctgcggaaaattcttttctgtgttcttggcctgtatatcgccattccattcttgataaagctgtgtccagggatccaagccaagcttatttttctgaactttgtccgggtgccatattttattgatcttaagaaacctcaggatcaaggtctgaatcacacctgtaattactacttgcagccagaagaggacgtaaccatcggtgtttggcacacagttcctgctgtctggtggaaaaacgcccagggtaaggaccaaatgtggtatgaggatgcccttgcgagtagtcatcctattatcctgtaccttcatggcaacgctggaacacgcggtggcgatcacagagtcgagttatacaaggttctgtccagtctgggctaccatgtcgtgacctttgattacagggggtggggagacagcgtgggcacaccgagcgagaggggcatgacatacgatgccctgcatgtgtttgactggattaaggctaggtcaggggacaaccctgtgtatatttgggggcattcactgggaactggcgtggccacgaatcttgttcggaggttatgcgaacgggagactcctccagatgccctgattttagagtcgccgttcacgaatattcgtgaggaggcgaagagccatccctttagcgtgatctaccggtatttccctggattcgactggttcttcctggatcctatcactagtagcggaattaaattcgccaatgacgaaaatgtcaaacatatttcctgccccttactaatcctccatgccgaggatgatcccgtggtccctttccagctgggcaggaagctgtatagtatagccgctccggctaggagtttcagggattttaaagtgcagttcgtaccctttcacagcgaccttggctataggcacaagtatatttacaagagtccagagctcccacggattcttagagagttcctgggtaagagtgagcccgaacaccagcactag

SEQ ID NO: 33494 - DNA, 1083 bp, Artificial Sequence
  derived and/or modified sequence
atgagaaaacgcaccgagcctgtggctcttgagccgaggtgtgcggctgatgccggtatgaaacgggcacttggcagaaggaagggggtatggctgcgcctgagaaagattttgttctgcgtgctggggctctatatcgctattcccttcttaatcaagctatgcccaggaatccaagctaagttaatttttctgaattttgtgagagtgccctatttcatcgatttgaaaaaaccccaagaccagggtctgaatcacacctgtaactactacctgcagcctgaggaggacgtgaccatcggcgtctggcacaccgtcccagccgtgtggtggaagaacgcccaaggcaaagatcagatgtggtacgaggacgctctggcttcaagccaccccatcatcttgtacctacacggcaatgctgggacccgcggaggcgaccatcgtgtggagctgtataaagtgctatcatctctggggtaccacgtggtgacgttcgattaccgcggttggggagattctgtgggcaccccctccgagcgcggaatgacgtatgacgcactgcacgtcttcgattggatcaaagcacggtccggggacaatcccgtctacatatggggacacagcctgggaaccggggtggcaactaaccttgtcagacgattgtgtgaaagggagactccacctgacgccctaatactggagtcaccctttacaaatattagagaggaagcaaaatctcaccccttcagcgtaatctatcgctactttcccggatttgattggtttttcttggaccctatcacctcgtccggtatcaagttcgcaaacgacgaaaatgttaagcacatctcatgccctctcctgatactgcacgcagaggatgaccccgtcgtccccttccagctgggcaggaagttgtactcaattgccgcaccggctcgatcttttagagattttaaagtgcagttcgtgccctttcattcagacttgggctacagacacaaatacatatataagtccccagagctccccagaatactcagggagtttttaggcaagagtgaaccggaacatcagcattag

SEQ ID NO: 33495 - DNA, 2117 bp, Artificial Sequence
  derived and/or modified sequence
atgctgggcgcgcgctccttggaactagagaggaggtggccggggcggggccgggggaggggggtagggcagagccggcgggagcccggcgctgattggccggcctggctggcgggcccccgccgctggttcgtagccggcgcagcggcctgggctgggatgtgaggagcggcgggttccgggctccgggctctgggtggcggcggctgtgagcggcggcactgcggcgcaggccagcgggcgccgtcggcggctggccctgtcggccgcgggatgaggaagcggaccgagcccgtcgccttggagcatgagcgctgcgccgccgcgggctcgtcctcctccggctcggccgccgcggcgctggacgccgactgccgcctgaagcagaacctacgcctgacgggcccggcggcggctgagccgcgctgcgcagccgacgcgggaatgaagcgggcgctgggcaggcgaaagggcgtgtggttgcgcctgaggaagatacttttctgtgttttggggttgtacattgccattccatttctcatcaaactatgtcctggaatacaggccaaactgattttcttgaatttcgtaagagttccctatttcattgatttgaaaaaaccacaggatcaaggtttgaatcacacgtgtaactactacctgcagccagaggaagacgtgaccattggagtctggcacaccgtccctgcagtctggtggaagaacgcccaaggcaaagaccagatgtggtatgaggatgccttggcttccagccaccctatcattctgtacctgcatgggaacgcaggtaccagaggaggcgaccaccgcgtggagctttacaaggtgctgagttcccttggttaccatgtggtcacctttgactacagaggttggggtgactcagtgggaacgccatctgagcggggcatgacctatgacgcactccacgtttttgactggatcaaagcaagaagtggtgacaaccccgtgtacatctggggccactctctgggcactggcgtggcgacaaatctggtgcggcgcctctgtgagcgagagacgcctccagatgcccttatattggaatctccattcactaatatccgcgaagaagctaagagccatccattttcagtgatatatcgatacttccctgggtttgactggttcttccttgatcctattacaagtagtggaattaaatttgcaaatgatgaaaacgtgaagcacatctcctgtcccctgctcatcctgcacgctgaggacgacccggtggtgcccttccagcttggcagaaagctctatagcatcgccgcaccagctcgaagcttccgagatttcaaagttcagtttgtgccctttcattcagaccttggctacaggcacaaatacatttacaagagccctgagctgccacggatactgagggaattcctggggaagtcggagcctgagcaccagcactgagcctggccgtgggaaggaagcatgaagacctctgccctcctcccgttttcctccagtcagcagcccggtatcctgaagccccggggggccggcacctgcaatgctcaggagcccagctcgcacctggagagcacctcagatcccaggcggggaggcccctgcaggcctgcagtgcccggaggcctgagcatggctgtgtggaaagcgtgggtggcaggcatgtggctctccttgccgcccctcaacctgagatcttgttgggagacttaatggcagcaggcagccatcactgcctgcttgatgctgcactgagctggacagggggagtccgggcaggggactcttggggctcgggaccatgctgagctttttggcaccacccacagagaacgtggggtccaggttctttctgcaccttcccagcacatgcagaatgactccagtggttccatcgtcccctcctgccctgtgtacctgcttgcctttctcagctgccccacctcccctgggctggcccactcacccacagtggaagtgcccgggatctgcacttcctcccctttcacctacctgtacacctaacctggccttagactgagctttatttaagaataaaatcgtggtggtggtccttttgtctctctgca

SEQ ID NO: 33496 - DNA, 1714 bp, Artificial Sequence
  derived and/or modified sequence
atgaggaagcggaccgagcccgtcgccttggagccgcgctgcgcagccgacgcgggaatgaagcgggcgctgggcaggcgaaagggcgtgtggttgcgcctgaggaagatacttttctgtgttttggggttgtacattgccattccatttctcatcaaactatgtcctggaatacaggccaaactgattttcttgaatttcgtaagagttccctatttcattgatttgaaaaaaccacaggatcaaggtttgaatcacacgtgtaactactacctgcagccagaggaagacgtgaccattggagtctggcacaccgtccctgcagtctggtggaagaacgcccaaggcaaagaccagatgtggtatgaggatgccttggcttccagccaccctatcattctgtacctgcatgggaacgcaggtaccagaggaggcgaccaccgcgtggagctttacaaggtgctgagttcccttggttaccatgtggtcacctttgactacagaggttggggtgactcagtgggaacgccatctgagcggggcatgacctatgacgcactccacgtttttgactggatcaaagcaagaagtggtgacaaccccgtgtacatctggggccactctctgggcactggcgtggcgacaaatctggtgcggcgcctctgtgagcgagagacgcctccagatgcccttatattggaatctccattcactaatatccgcgaagaagctaagagccatccattttcagtgatatatcgatacttccctgggtttgactggttcttccttgatcctattacaagtagtggaattaaatttgcaaatgatgaaaacgtgaagcacatctcctgtcccctgctcatcctgcacgctgaggacgacccggtggtgcccttccagcttggcagaaagctctatagcatcgccgcaccagctcgaagcttccgagatttcaaagttcagtttgtgccctttcattcagaccttggctacaggcacaaatacatttacaagagccctgagctgccacggatactgagggaattcctggggaagtcggagcctgagcaccagcactgagcctggccgtgggaaggaagcatgaagacctctgccctcctcccgttttcctccagtcagcagcccggtatcctgaagccccggggggccggcacctgcaatgctcaggagcccagctcgcacctggagagcacctcagatcccaggcggggaggcccctgcaggcctgcagtgcccggaggcctgagcatggctgtgtggaaagcgtgggtggcaggcatgtggctctccttgccgcccctcaacctgagatcttgttgggagacttaatggcagcaggcagccatcactgcctgcttgatgctgcactgagctggacagggggagtccgggcaggggactcttggggctcgggaccatgctgagctttttggcaccacccacagagaacgtggggtccaggttctttctgcaccttcccagcacatgcagaatgactccagtggttccatcgtcccctcctgccctgtgtacctgcttgcctttctcagctgccccacctcccctgggctggcccactcacccacagtggaagtgcccgggatctgcacttcctcccctttcacctacctgtacacctaacctggccttagactgagctttatttaagaataaaatcgtggtggtggtc

SEQ ID NO: 33497 - DNA, 1197 bp, Artificial Sequence
  derived and/or modified sequence
atgagaaagagaaccgagcccgtggccctggagcacgagagatgcgccgccgccggcagcagcagcagcggcagcgccgccgccgccctggacgccgactgcagactgaagcagaacctgagactgaccggccccgccgccgccgagcccagatgcgccgccgacgccggcatgaagagagccctgggcagaagaaagggcgtgtggctgagactgagaaagatcctgttctgcgtgctgggcctgtacatcgccatccccttcctgatcaagctgtgccccggcatccaggccaagctgatcttcctgaacttcgtgagagtgccctacttcatcgacctgaagaagccccaggaccagggcctgaaccacacctgcaactactacctgcagcccgaggaggacgtgaccatcggcgtgtggcacaccgtgcccgccgtgtggtggaagaacgcccagggcaaggaccagatgtggtacgaggacgccctggccagcagccaccccatcatcctgtacctgcacggcaacgccggcaccagaggcggcgaccacagagtggagctgtacaaggtgctgagcagcctgggctaccacgtggtgaccttcgactacagaggctggggcgacagcgtgggcacccccagcgagagaggcatgacctacgacgccctgcacgtgttcgactggatcaaggccagaagcggcgacaaccccgtgtacatctggggccacagcctgggcaccggcgtggccaccaacctggtgagaagactgtgcgagagagagaccccccccgacgccctgatcctggagagccccttcaccaacatcagagaggaggccaagagccaccccttcagcgtgatctacagatacttccccggcttcgactggttcttcctggaccccatcaccagcagcggcatcaagttcgccaacgacgagaacgtgaagcacatcagctgccccctgctgatcctgcacgccgaggacgaccccgtggtgcccttccagctgggcagaaagctgtacagcatcgccgcccccgccagaagcttcagagacttcaaggtgcagttcgtgcccttccacagcgacctgggctacagacacaagtacatctacaagagccccgagctgcccagaatcctgagagagttcctgggcaagagcgagcccgagcaccagcactag

SEQ ID NO: 33498 - DNA, 1083 bp, Artificial Sequence
  derived and/or modified sequence
atgagaaagagaaccgagcccgtggccctggagcccagatgcgccgccgacgccggcatgaagagagccctgggcagaagaaagggcgtgtggctgagactgagaaagatcctgttctgcgtgctgggcctgtacatcgccatccccttcctgatcaagctgtgccccggcatccaggccaagctgatcttcctgaacttcgtgagagtgccctacttcatcgacctgaagaagccccaggaccagggcctgaaccacacctgcaactactacctgcagcccgaggaggacgtgaccatcggcgtgtggcacaccgtgcccgccgtgtggtggaagaacgcccagggcaaggaccagatgtggtacgaggacgccctggccagcagccaccccatcatcctgtacctgcacggcaacgccggcaccagaggcggcgaccacagagtggagctgtacaaggtgctgagcagcctgggctaccacgtggtgaccttcgactacagaggctggggcgacagcgtgggcacccccagcgagagaggcatgacctacgacgccctgcacgtgttcgactggatcaaggccagaagcggcgacaaccccgtgtacatctggggccacagcctgggcaccggcgtggccaccaacctggtgagaagactgtgcgagagagagaccccccccgacgccctgatcctggagagccccttcaccaacatcagagaggaggccaagagccaccccttcagcgtgatctacagatacttccccggcttcgactggttcttcctggaccccatcaccagcagcggcatcaagttcgccaacgacgagaacgtgaagcacatcagctgccccctgctgatcctgcacgccgaggacgaccccgtggtgcccttccagctgggcagaaagctgtacagcatcgccgcccccgccagaagcttcagagacttcaaggtgcagttcgtgcccttccacagcgacctgggctacagacacaagtacatctacaagagccccgagctgcccagaatcctgagagagttcctgggcaagagcgagcccgagcaccagcactag

SEQ ID NO: 33499 - protein, 490 aa, Artificial Sequence
  derived and/or modified sequence
MADTRSVHETRFEAAVKVIQSLPKNGSFQPTNEMMLKFYSFYKQATEGPCKLSRPGFWDPIGRYKWDAWSSLGDMTKEEAMIAYVEEMKKIIETMPMTEKVEELLRVIGPFYEIVEDKKSGRSSDITSDLGNVLTSTPNAKTVNGKAESSDSGAESEEEEAQEEVKGAEQSDNDKKMMKKSADHKNLEVIVTNGYDKDGFVQDIQNDIHASSSLNGRSTEEVKPIDENLGQTGKSAVCIHQDINDDHVEDVTGIQHLTSDSDSEVYCDSMEQFGQEESLDSFTSNNGPFQYYLGGHSSQPMENSGFREDIQVPPGNGNIGNMQVVAVEGKGEVKHGGEDGRNNSGAPHREKRGGETDEFSNVRRGRGHRMQHLSEGTKGRQVGSGGDGERWGSDRGSRGSLNEQIALVLMRLQEDMQNVLQRLQKLETLTALQAKSSTSTLQTAPQPTSQRPSWWPFEMSPGVLTFAIIWPFIAQWLVYLYYQRRRRKLN

SEQ ID NO: 33500 - DNA, 3685 bp, Artificial Sequence
  derived and/or modified sequence
accggacaggccttgtccggcaataccaagtttcatgcaggctcttgggaaagctggtgctgctgctgcctgattcccgccgacagaccttgggaccggggccaacactggcagctggagatggcggacacgagatccgtgcacgagactaggtttgaggcggccgtgaaggtgatccagagtttgccgaagaatgggatgcttggagttcactgggtgatatgaccaaagaggaagccatgattgcatatgttgaagaaatgaaaaagattattgaaactatgccaatgactgagaaagttgaagaattgctgcgtgtcataggtccattttatgaaattgtcgaggacaaaaagagtggcaggagttctgatataacctcagatcttggtaatgttctcacttctactccaaacgccaaaaccgttaatggtaaagctgaaagcagtgacagtggagccgagtctgaggaagaagaggcccaagaagaagtgaaaggagcagaacaaagtgataatgataagaaaatgatgaagaagtcagcagaccataagaatttggaagtcattgtcactaatggctatgataaagatggctttgttcaggatatacagaatgacattcatgccagttcttccctgaatggcagaagcactgaagaagtaaagcccattgatgaaaacttggggcaaactggaaaatctgctgtttgcattcaccaagatataaatgatgatcatgttgaagatgttacaggaattcagcatttgacaagcgattcagacagtgaagtttactgtgattctatggaacaatttggacaagaagagtctttagacagctttacgtccaacaatggaccatttcagtattacttgggtggtcattccagtcaacccatggaaaattctggatttcgtgaagatattcaagtacctcctggaaatggcaacattgggaatatgcaggtggttgcagttgaaggaaaaggtgaagtcaagcatggaggagaagatggcaggaataacagcggagcaccacaccgggagaagcgaggcggagaaactgacgaattctctaatgttagaagaggaagaggacataggatgcaacacttgagcgaaggaaccaagggccggcaggtgggaagtggaggtgatggggagcgctggggctccgacagagggtcccgaggcagcctcaatgagcagatcgccctcgtgctgatgagactgcaggaggacatgcagaatgtccttcagagactgcagaaactggaaacgctgactgctttgcaggcaaaatcatcaacatcaacattgcagactgctcctcagcccacctcacagagaccatcttggtggcccttcgagatgtctcctggtgtgctaacgtttgccatcatatggccttttattgcacagtggttggtgtatttatactatcaaagaaggagaagaaaactgaactgaggaaaatggtgttttcctcaagaagactactggaactggatgacctcagaatgaactggattgtggtgttcacaagaaaatcttagtttgtgatgattacattgctttttgttgtccagtagtttagtttgtgtacatatatacacatatatattttgcactacacaaacgataacattttaaggactaatattgctgatacttgaataatcaatctctactaggttataagtagtatacacagatttaccctgcccttgaacttgaaggacattaaattattaatgatcatttggtaacatgtttacctgattatcttccatagagtaacataagctgcttttcaaaggtaccattgtgataatgagatcaaatttataagttattatttttaattttctaaattaaataaaagaaagaatgcaaaccaggagtgaatttcaaatgagatgtaatcgactttatatcttagtcacggagttgccatggcatgtagtagaaaaccacaggaagaatggtcatattcactttgtgggctgcccataatctttcttgggcattcacaactcttgagtttggtgttcaggcatcattattaaaaagtggagtcctatgtaccagactgagtttttacaaatgatttgcaggctagacataacccactgatggaaatggtgaagaatgagcttcatgtaggtttaaaagtgtattctgagcctgtagatgattaatcaggtttttattcaatcatataaatgtattcctttgtaatcatttttgtttaactgaggatatctagtgtctgcttcatagggtgctttgaaatataaaatgaaaacttatttatactgtttttacaacagtcaaaaaggaaacacacgaaaatcacttttctgcaactgatgaactatatagactggactcttaacctcttagtgcctcagtttttccttcggggtatactattttagatacacctacttcacaggagtactggagggatttgcaagctaacgggccaaatgcttccataggaataaggcatgcccagctaacagaaatttaagtccctcttccccacctctctcatctagaccaaaaagaagactacaatttagatccttggagacttttcctgtatgccttccaaaacttcctgctcacttagatgtaccttgtgctttgaagatttctttgatgcagtctttgtaacaaataatttttttttttaaatggagtttctctcttgttgcccaggctggagggcaatggcgtgatcttggctcactgcaacttccacctcctgggttcaagtgattctcctgcctcactcccaagtagctgggattacaggcatgcaccaccatgcctggctaattttgtatttttagtagagacggggtttctccatgttggtaaggctgatctcaaactcccaacctcaggtgatctgcctgcctcggcctcccaaagtgctgggattagaggcgtgagccactgcacctggcctgtagcaaataatttttaagcattctcaagatgtatgatgttgggtttaacatcatatgttcacagtgttttaaataagaaataatctgtctttagtatacagaatggttctttgtttgcctgaaaagtataagaatacaatttacttttcccaaactctttttccttatttttttctttcaaataactttaattatttaatcccatactgattaaaatatgtctgtctaaagggatctactactatttgcttttaaaaaagtgttccctatttatttaggaaaaagtgaagcaagcaactgaatttatatgtaaaaataacatttagacctgtggatcaaagattattttcaaaaatgagatatcaatttggtatcagtaaaaagtgtcttttctcttagtatataaataaataaaatgcaaattaagagtgtaagcagttgtgaatcattacaagcagtctgggataactaactcctagggataaccatttctatcctgttccaaagtcttattttatagtttgaaaagcactttgcacacagttcttgtatataaaagtaaagatgtaattataggatatagtgttcctgctttgtttaataagaacctcatttaaacttgacagctatggtatttttttaatgataacttcttttctgtttattgtaaaactaagttaaaaataaaaggttaatgagaaa

SEQ ID NO: 33501 - protein, 805 aa, Artificial Sequence
  derived and/or modified sequence
MWGRFLAPEASGRDSPGGARSFPAGPDYSSAWLPANESLWQATTVPSNHRNNHIRRHSIASDSGDTGIGTSCSDSVEDHSTSSGTLSFKPSQSLITLPTAHVMPSNSSASISKLRESLTPDGSKWSTSLMQTLGNHSRGEQDSSLDMKDFRPLRKWSSLSKLTAPDNCGQGGTVCREESRNGLEKIGKAKALTSQLRTIGPSCLHDSMEMLRLEDKEINKKRSSTLDCKYKFESCSKEDFRASSSTLRRQPVDMTYSALPESKPIMTSSEAFEPPKYLMLGQQAVGGVPIQPSVRTQMWLTEQLRTNPLEGRNTEDSYSLAPWQQQQIEDFRQGSETPMQVLTGSSRQSYSPGYQDFSKWESMLKIKEGLLRQKEIVIDRQKQQITHLHERIRDNELRAQHAMLGHYVNCEDSYVASLQPQYENTSLQTPFSEESVSHSQQGEFEQKLASTEKEVLQLNEFLKQRLSLFSEEKKKLEEKLKTRDRYISSLKKKCQKESEQNKEKQRRIETLEKYLADLPTLDDVQSQSLQLQILEEKNKNLQEALIDTEKKLEEIKKQCQDKETQLICQKKKEKELVTTVQSLQQKVERCLEDGIRLPMLDAKQLQNENDNLRQQNETASKIIDSQQDEIDRMILEIQSMQGKLSKEKLTTQKMMEELEKKERNVQRLTKALLENQRQTDETCSLLDQGQEPDQSRQQTVLSKRPLFDLTVIDQLFKEMSCCLFDLKALCSILNQRAQGKEPNLSLLLGIRSMNCSAEETENDHSTETLTKKLSDVCQLRRDIDELRTTISDRYAQDMGDNCITQ

SEQ ID NO: 33502 - DNA, 2418 bp, Artificial Sequence
  derived and/or modified sequence
atgtggggcagattcctggcccccgaggccagcggcagagacagccccggcggcgccagaagcttccccgccggccccgactacagcagcgcctggctgcccgccaacgagagcctgtggcaggccaccaccgtgcccagcaaccacagaaacaaccacatcagaagacacagcatcgccagcgacagcggcgacaccggcatcggcaccagctgcagcgacagcgtggaggaccacagcaccagcagcggcaccctgagcttcaagcccagccagagcctgatcaccctgcccaccgcccacgtgatgcccagcaacagcagcgccagcatcagcaagctgagagagagcctgacccccgacggcagcaagtggagcaccagcctgatgcagaccctgggcaaccacagcagaggcgagcaggacagcagcctggacatgaaggacttcagacccctgagaaagtggagcagcctgagcaagctgaccgcccccgacaactgcggccagggcggcaccgtgtgcagagaggagagcagaaacggcctggagaagatcggcaaggccaaggccctgaccagccagctgagaaccatcggccccagctgcctgcacgacagcatggagatgctgagactggaggacaaggagatcaacaagaagagaagcagcaccctggactgcaagtacaagttcgagagctgcagcaaggaggacttcagagccagcagcagcaccctgagaagacagcccgtggacatgacctacagcgccctgcccgagagcaagcccatcatgaccagcagcgaggccttcgagccccccaagtacctgatgctgggccagcaggccgtgggcggcgtgcccatccagcccagcgtgagaacccagatgtggctgaccgagcagctgagaaccaaccccctggagggcagaaacaccgaggacagctacagcctggccccctggcagcagcagcagatcgaggacttcagacagggcagcgagacccccatgcaggtgctgaccggcagcagcagacagagctacagccccggctaccaggacttcagcaagtgggagagcatgctgaagatcaaggagggcctgctgagacagaaggagatcgtgatcgacagacagaagcagcagatcacccacctgcacgagagaatcagagacaacgagctgagagcccagcacgccatgctgggccactacgtgaactgcgaggacagctacgtggccagcctgcagccccagtacgagaacaccagcctgcagacccccttcagcgaggagagcgtgagccacagccagcagggcgagttcgagcagaagctggccagcaccgagaaggaggtgctgcagctgaacgagttcctgaagcagagactgagcctgttcagcgaggagaagaagaagctggaggagaagctgaagaccagagacagatacatcagcagcctgaagaagaagtgccagaaggagagcgagcagaacaaggagaagcagagaagaatcgagaccctggagaagtacctggccgacctgcccaccctggacgacgtgcagagccagagcctgcagctgcagatcctggaggagaagaacaagaacctgcaggaggccctgatcgacaccgagaagaagctggaggagatcaagaagcagtgccaggacaaggagacccagctgatctgccagaagaagaaggagaaggagctggtgaccaccgtgcagagcctgcagcagaaggtggagagatgcctggaggacggcatcagactgcccatgctggacgccaagcagctgcagaacgagaacgacaacctgagacagcagaacgagaccgccagcaagatcatcgacagccagcaggacgagatcgacagaatgatcctggagatccagagcatgcagggcaagctgagcaaggagaagctgaccacccagaagatgatggaggagctggagaagaaggagagaaacgtgcagagactgaccaaggccctgctggagaaccagagacagaccgacgagacctgcagcctgctggaccagggccaggagcccgaccagagcagacagcagaccgtgctgagcaagagacccctgttcgacctgaccgtgatcgaccagctgttcaaggagatgagctgctgcctgttcgacctgaaggccctgtgcagcatcctgaaccagagagcccagggcaaggagcccaacctgagcctgctgctgggcatcagaagcatgaactgcagcgccgaggagaccgagaacgaccacagcaccgagaccctgaccaagaagctgagcgacgtgtgccagctgagaagagacatcgacgagctgagaaccaccatcagcgacagatacgcccaggacatgggcgacaactgcatcacccagtag

SEQ ID NO: 33503 - DNA, 2418 bp, Artificial Sequence
  derived and/or modified sequence
atgtgggggaggtttcttgcaccagaggcatccggaagggattccccaggcggggcacgaagcttccccgctgggcccgattattcaagcgcttggctgcctgccaatgaatcactgtggcaggcgaccaccgtccccagcaaccaccgcaacaatcatattcgtcgacactcaatagcttccgactccggtgacaccggaatcgggacctcttgctctgactcagtagaggatcactctactagtagtgggactctgagcttcaaaccaagccagagcctgatcacactgccaaccgcccacgtcatgccgtctaattctagcgcaagcatctccaagttgcgggagtctttgaccccggacggatctaagtggtctacctccctcatgcagacactgggcaaccattctaggggagagcaggactcctcattagacatgaaggactttagaccgctgcgcaaatggtccagtctgtctaaactgaccgcccccgataactgcggtcaggggggcactgtgtgcagggaagaatctcgaaacggacttgagaagattggcaaagcaaaggcgttgacctctcagctgcggaccatcggaccttcctgcctgcatgactctatggaaatgctgcgactagaggacaaggagataaacaaaaagcgatctagcactctcgattgtaaatacaagtttgaaagctgctctaaggaggactttagggctagcagctctaccctccgcaggcagcccgtagacatgacatacagtgcgttgccggagagcaaacctatcatgacctcgtcagaagcgtttgagccccctaaatatttaatgttgggacaacaagctgtcggaggtgtccccattcagccttctgtgcgcactcagatgtggctaactgagcagctcaggacgaaccccctcgaaggccggaatacagaggactcctattcattggctccttggcaacaacagcagatcgaagattttagacagggatccgagacgccaatgcaagtgctcaccggctcttctaggcaaagctacagcccaggctatcaggattttagtaagtgggaatcaatgctgaagattaaagagggcttgttgaggcagaaagagatcgttattgaccgacagaaacagcaaatcactcatcttcacgagcggatccgagacaacgaacttcgcgcacagcacgcaatgcttgggcattacgtgaactgcgaagatagctacgtcgcctctcttcagccacagtatgaaaatacctccctgcagactcccttttctgaggagtctgtctcacattcccagcagggtgagtttgagcagaaactagcgtccaccgaaaaggaagtactgcagctgaatgaatttctgaagcagcgtttgtctttattctccgaagagaagaaaaagctagaggaaaagctgaagaccagggaccgctacataagttccctgaagaagaagtgccaaaaggaatcggaacaaaataaagagaagcagcgcagaattgaaaccctcgaaaagtatctagctgacctaccaactctcgatgacgtgcagagccaatccctacagcttcagattctcgaggaaaagaataaaaatctccaggaggcattaattgacacagagaagaaattggaagaaatcaagaagcagtgccaggataaagaaacgcaactgatttgtcaaaagaaaaaagagaaggagctggtcaccaccgttcagagtcttcagcagaaagttgagaggtgcctggaagatgggatcaggcttccaatgctggacgctaagcagcttcagaatgagaacgataatcttcgacagcagaacgaaacagcatctaagattattgattcacagcaggatgagattgatcgaatgatactcgagattcagagcatgcaaggaaaactgtcaaaggagaaactgacgacgcagaaaatgatggaggaacttgaaaagaaagagcggaacgttcaacgcctgaccaaagccctgcttgagaaccagaggcagacagacgaaacatgttcactgctggaccagggtcaagagcctgatcagagcagacagcagaccgtgctttccaagcgcccactcttcgacctgacagtcattgaccagttatttaaagagatgtcctgttgcttattcgacctcaaagccctatgttcaatactgaaccagcgagcacaaggtaaggaacctaatctgtcccttcttctgggcatcaggagcatgaactgctccgctgaggagacagaaaatgatcacagtaccgagaccctcaccaagaaactcagtgatgtatgccagctgagacgggatattgatgagctgagaaccacaattagtgatagatatgcacaggatatgggtgacaattgcatcacacagtag

SEQ ID NO: 33504 - DNA, 7673 bp, Artificial Sequence
  derived and/or modified sequence
gggagggcgtgagggattacccaagggaggggcgagtatcgcaaaataggccaagtcgctgccctctactcaactcgcagggcgggaggatggagacagagggatgcggcgggagggcgggacagcccagtcgccgccaaggaggcgaagcggggtcggggtagctcacccgccccccgcagtccccgccccccgcagtccccgccccgcgcggcgccgcgcacgcctgaagtcattgcccgaggccccgccccctcgcggccccagccccggctctggctctgccggcggagggggcggagagaacccgcagctgcaacttcgcctggagcctttgagcctgggctcagccggggatctagcagccgtcaccgccgagtcgccgcttccccggcgcgggcctcagcccagccggcttggccatggcaggcgccggcagtgcggcgaatctggcccctgcgctccccgcccgtagctgagcagccgttaaccagccatcccgcctttcctcctgcccgtgtcgccgaggcccacgctccgcgcaagtttccgccgccgaagaagcaggaggacggacgtgaggagtcgggcgtccctggcccacccggccctctcgcccgcgatgtgggggcgcttcctggctccggaggccagcggccgggatagccccggcggagcccgcagcttccctgccggcccagattattcatcagcatggctacctgctaatgaatcattgtggcaggccacaactgttccatctaaccatcgaaataaccatatcaggagacacagtatagcttctgacagtggagacactggcattggaacttcctgttctgatagcgtggaagatcattcaacttcaagtggcacattatcttttaagcctagtcaatcattgattactcttcctactgcccatgtgatgccgtctaattccagcgcttcaatttccaaacttagggaatcattgacaccagatggctcaaaatggagtacaagcctcatgcaaacattgggaaaccacagtaggggggagcaggactcttccctagacatgaaggacttccggccacttcggaaatggtcatctttatccaaactcactgccccggataactgtggccagggtggcactgtatgcagagaagagtcaaggaatggtttggagaagatagggaaggctaaggctttaacatcacaactgaggacaattgggcctagctgtttacatgatagtatggagatgcttaggttagaggacaaggaaataaataaaaaacggtcatcaactctggactgcaagtataaatttgagagctgtagcaaggaggactttagagcctcttcctctactcttaggagacagcctgtagacatgacatatagtgccttacctgaaagcaagcccattatgacaagctcagaggcttttgaacctccaaaatatttaatgcttggtcaacaggcagtaggtggagttcccattcagccttccgtaaggactcagatgtggcttacagagcagctgcggacaaatcctttggaaggtagaaatacagaggattcttacagtttagctccttggcaacagcagcaaattgaagactttcgacaaggaagtgaaacaccaatgcaggttttgactggatcatctcgtcaaagttattcacctggctatcaggatttcagtaagtgggaatcaatgttgaaaataaaagaaggacttctaaggcagaaagaaattgtaatcgatcggcagaagcaacaaattacccacctgcatgagaggataagggataatgaattacgggctcaacatgccatgttaggacattatgtaaattgtgaggattcttatgtggctagtttgcagccacaatatgagaacacttcactccagacaccattttcagaggaatcagtttcccattcccaacaaggggaatttgagcaaaagcttgcatctactgagaaagaagttttacagcttaatgagtttctcaaacaaagactaagcctatttagtgaagagaagaagaaactagaggaaaaacttaaaactagagatcgatacatcagtagtctgaaaaagaaatgccagaaggaatctgaacaaaacaaagaaaagcagagaagaattgagaccttggaaaagtatctggctgatcttccaactctagatgatgtacagagtcagagtctacagctgcagattctggaagaaaaaaataagaatttacaagaggctttgatagatacagaaaaaaaacttgaagagatcaaaaagcagtgtcaagataaagagacacagttaatatgccagaaaaagaaagaaaaggagttagtaactaccgttcagagtttgcaacaaaaagtagaaagatgccttgaagatggaatccgccttcccatgttagatgcaaaacagcttcagaatgaaaatgataatctcagacaacaaaatgagactgctagtaagataatagacagccaacaagatgagattgacagaatgattttagaaattcagtctatgcaaggaaagctttctaaagagaaactgaccactcaaaagatgatggaagagctggaaaagaaagaaagaaatgtacagagattaacaaaagcattgcttgaaaaccaaagacaaacagatgagacatgctctttattggatcagggccaggaacctgaccaatctaggcagcagacagttctttccaaacggccactatttgatttgactgtgattgatcagctgttcaaggaaatgtcctgttgtttgtttgacttgaaagcattgtgtagtattcttaatcagcgtgctcagggcaaggagcctaatctttcattattactgggaataagatcaatgaactgttcagctgaagagactgagaatgaccacagcacagaaacactcactaaaaagctgtcagatgtgtgccagttacgaagagacattgatgaattaaggactacaatatcagaccgctatgctcaggacatgggagacaactgcattactcagtgatcaagtgttagtcccacagcaataatgacctgttgtttaaatgctgctgtgttatggagccataatggaaggttgcaagtgacatgacttgcacttagggattttttttctgtggatttgttttgttgaaggggagaagggaagtgaagagattttgaaggggcttatctaatcaggcaaaaagaaaaaaaatcaaattacctttggaaaatatgataaaatctacaaggaaaaaaatgtctatattctcaaactactgattgtaggaccaagctgtgaagagtacccttcacatgaaggagtaggattccttttaatcctatagctttgtgtgtttgtgtgtgcatgtatgtgtgttgttgtgtgtgtgtgcacgtgctttattcacaaatttataagggtttctagggtcagagcagagcttctgagaaaggcacacgctgtttattcttatatttctttcatatagaagcttgtgttgtactttgggattttcagtggctggctgaacaagagttcaaacagcaggcaagtgttgtcatggtagtacaggaggcaaaaccatttatattttgaacacttactgcactgataggatgtttgtggttgagctgattttagtactgtagataggtcagctgtttttccagagtgattgtggatttcccaagaggtgtgaaattttgacgtgatgctctttttccttagcattgtaatgtatgtgttacaagaaaggttaacataacttgaactaattttaacatgttccttactatttacaattttttatttatatgttttatatatatacatatataaatgtaaacaaagccatatataattaataaaggcattggatcattattataaaaggaagattaacaaagttaccctggaacaatagcttacttatccaaatctcaacatttacattttaacagttttgtatgtttcaaagttgaaactactgtaagagaaagccaatactatttatatctgaatcaacagtagcataaacattttttaattgagattgtattttaatcccttttgttaaagtacattaacaacagtttttcacaggatatgaacttggcgaaattagttcttaatctgaattacagggtattactatgaaatgcagttgattttgcagtagacgtacagtcatttaaacttccaaatgagtgttgtccatgtttctgttggtattttggaaggattatacattttattgccttcagcattgattatgttcttttgaatatacttagttttggcgaaagccttgtcctttgtaagttggtttgatcttgtgatgcaaccaagtctcatttaggtcaagactaaataagagatggaggggtagagggtgtgactcaagcaggataatattgatttgataaagagcatatcacatgcctgttttcttgccagataaagggcatagcacatgcctgttttcttatatactagaataaaggctctcctaggaaagatttttcttaaatatttaaaagtgaaaatgtgagacaaggccttcaaggagactacccaggaagatacacagtttaaaatgttggctatacagctctcaatagattattttatagttatagttgaataatcagttataatacactgtaaagaaatcagattttccttctgtttggtgtctgagtccttcctgctcttcttacttctgagaatctgggcactaagaaatcagtaagtacattgtagtgctcctgcatcccagagtccttaacctaaggagggtcttagtcactggtaagaacttggctttctaattatattcacttggtttttaacattagtagcttgacgataatcagggtatagtaaatttccaccaaaaatgtgatgcgaagaattctgccttggtcctttatggtaaaacagataataacgtctaaaatagatcagccacaagtgcagcaaatatttttacactctctttgaatagaatcccaaccaccctcccccatgattttagaaataaaggcttcctaaaataatagaacaaattggcaaacaatcactaattggaccagtaggttcttacttaaatatctctcctagatttttagtgtatgttttgggattttatgggtttatttatttttttttttttaagcagacgttacagtttgttttaatctactatagatacgtttttgttttttggcttagttggggataaaataatttatttgtaagttagctttctaaaacttagagaaagtaatttaattcacgtatcttaaaaataaaattccaaagttaaaaaatttctgacttagtaggaagttaacaaaactactgctgatgcatttcagtttccaaaatctgtaccctccccccataaaaaagggagttaagatgtgctagtttaagtagttagctgaattatagattgatcctcttaaaatctggagtttgtaaaggggcctacataaacagtagatagacttggagggattttgtgggggaattgaaactaatagtattctatctagtttgtcagtatttactttttgatttttatttttcagaaaattttcctttcccaggacaccctcttgtattagaatatcctcttctgtatcacattaaaaacagattttactgttagaccaaataagatgggcaaatagcaacactagagcatctcacccagtttgaactaggatgttcgtggaagttatgacaccaatatattcctgaaatgaaaattaacctaaattttaaagtgaatctatttgaaaatttacttagataatgaaacctcgttttaattgtgctttttgtgaatccaacacttgtttgcttagaaagtatcttatccagtattaatattttgttcttttgggttttaaagttgagcttattcagcctcaatcacattacagcaagcataaagtaacagttgactcaatgaaagacccaaattgcctgtacagataaaattcactgaatcaaaggcacaatagctatcttttcacttgagctcagaaaagtaaaatggcttaatttgaactattaattttcagtggcctctaattaaacaaaaacaaaaaaccacaaatactggctaggtaagatattcctgaggtcattttaaaagaagtgtggcacctaggattcaatatttaatgctaacagtattatattttagtgaaatttattttggtggtgacagtttattaaacctaattagacttctttcaatagcttgttgtagagacaatctcaagggctggaaagtgttgctaaaatgaatgtcatacatttctgatatactaaggagcttataaagtaattctttcatagtgcaagaattattaatttcttagaggatgtttttaaaggagctacttaattgggaaaatgttctttaaatatcagtaatagttcattaagtaacatagtagctaagaacatggactatattttcacagcatagttcagcttaggcacacctttagtttggattattggcattctcttacgtaggaattatatcattgtagatatgtaattatggtaataagcaattttcataaccatgctcactcagactatatcatttgaaactgccatgtttccatttttgacaattcatgttcacaaaacaacaggaacaatttcctatttggtataaagagcaaaatttccaactttgccccaaaatgccatgggtggcatattgccatatgattatatcatatatttaatcatgtatgggaaagattttggattttttttcttatttaaaaaagtgctaaatataagaatatagttttaaatcagcaagtctaataacactattgcagctgtacacagagagaaccttttgtgcctttttgcctgcagtaagcatttatttctattttacatgagttctaagaatgttgatgattattgcaccttgttcttctgtatataaacttgattaaggaatttttttttttaaagcaaggagccgttttttgttactaggtggataccttagtaaacatgaggggaattatcagatagatgtctttggagcccagccttccctgtgtagtgagctggaaactcctttagattgtattcattggtgtgtatgtatatgtacatatatgtataaatagttaaatacataaacataaaacttaacatcgcattgttgtgatgacaagaagtagtaaggtgctaggtggttacattaaaaagcacagcacagtgtataatcagtcactatgactggtggttttgtaagctgggttcagtttttgaaccacccagaatacctcatgtgtaaatacagtgttcatgacttaattgaaatacagttattgtttaaaaaaaaaaaaaaagaatgtgaagccactggttggcttatgccttctgatctatcattcttgcctctttttttgtaaaggggttttcttcttgttgttctgttttttaatagggtttacagctagaattttgaatgccaaagttctatttattaaattaagaaaaaagttttcaatgttaatggctagtatttttccactggactattgtttgttgatgttggaatttgtatttacagagaaataaattttttataaaaaga

SEQ ID NO: 33505 - DNA, 2418 bp, Artificial Sequence
  derived and/or modified sequence
atgtggggccgcttcctggcccctgaggccagcggccgggacagccctgggggcgcccgctccttccctgctggccctgactacagcagcgcctggctgcctgccaatgaaagcctgtggcaggccaccaccgtgcccagcaaccacaggaacaaccacatcagaagacacagcatcgccagtgacagcggggacaccggcatcggcaccagctgcagcgacagcgtggaggaccacagcaccagcagcggcaccctgtccttcaagcccagccagagcctcatcaccctgcccacagcccacgtgatgcccagcaacagcagcgccagcatcagcaagctgcgggagagcctgaccccagatggcagcaagtggagcaccagcctgatgcagaccctgggcaaccacagcagaggagagcaggacagcagcctggacatgaaggacttccggcccctgaggaagtggagcagcctgagcaagctgacagccccagacaactgtggccagggcggcaccgtgtgccgggaggagagcagaaatggcctggagaagattggcaaggccaaggccctgaccagccagctgcggaccatcggccccagctgcctgcatgacagcatggagatgctgcggctggaggacaaggagatcaacaagaagaggagcagcaccctggactgcaagtacaagtttgagagctgcagcaaggaggacttccgggccagcagcagcaccctgcggcggcagcctgtggacatgacctacagcgccctgcctgagagcaagcccatcatgaccagcagcgaggcctttgagccccccaagtacctgatgctgggccagcaggccgtgggcggcgtgcccatccagcccagcgtgaggacccagatgtggctgacagagcagctgcggaccaaccccctggagggcaggaacacagaagattcctacagcctggccccctggcagcagcagcagatcgaggacttccggcagggcagcgagacccccatgcaggtgctgaccggcagcagccggcagagctacagccctggctaccaggacttcagcaagtgggagagcatgctgaagatcaaggagggcctgctgcggcagaaggagatcgtcatcgaccggcagaagcagcagatcacccacctgcacgagcgcatccgggacaatgagctgcgggcccagcacgccatgctgggccactacgtgaactgtgaagattcctatgtggccagcctgcagccccagtatgagaacaccagcctgcagacccccttcagcgaggagagcgtgagccacagccagcagggcgagtttgagcagaagctggccagcacagagaaggaggtgctgcagctgaatgagttcctgaagcagaggctgagcctcttcagcgaggagaagaagaagctggaggagaagctgaagacccgggaccgctacatcagcagcctgaagaagaagtgccagaaggagagcgagcagaacaaggagaagcagaggcgcatcgagaccctggagaagtacctggccgacctgcccaccctggatgatgtgcagagccagagcctgcagctgcagatcctggaggagaagaacaagaacctgcaggaggccctgattgacacagagaagaagctggaggagatcaagaagcagtgccaggacaaggagacccagctgatctgccagaagaagaaggagaaggagctggtgaccaccgtgcagagcctgcagcagaaggtggagcgctgcctggaggatggcatccggctgcccatgctggatgccaagcagctgcagaatgaaaatgacaacctgcggcagcagaatgaaacagccagcaagatcatcgacagccagcaggatgaaattgacaggatgatcctggagatccagagcatgcagggcaagctgagcaaggagaagctgaccacccagaagatgatggaggagctggagaagaaggagagaaatgtgcagaggctgaccaaggccctgctggagaaccagaggcagacagatgagacctgcagcctgctggaccagggccaggagccagaccagagccggcagcagacagtgctgagcaagaggcccctgtttgacctgaccgtcatcgaccagctgttcaaggagatgagctgctgcctgtttgacctgaaggccctgtgcagcatcctgaaccagagggcccagggcaaggagcccaacctgagcctgctgctgggcatccgctccatgaactgcagcgctgaggagacagaaaatgaccacagcacagagaccctgaccaagaagctgagtgatgtgtgccagctgcggcgggacattgatgagctgcggaccaccatcagtgacagatatgcccaggacatgggagacaactgcatcacccagtag

SEQ ID NO: 33506 - DNA, 2418 bp, Artificial Sequence
  derived and/or modified sequence
atgtggggccggttcctggcccccgaggccagcggccgggacagccctggcggagctcgcagcttcccggctggacctgactacagttctgcttggctgccagcgaacgagagcttgtggcaggctacaaccgtcccgtcaaaccaccggaataatcacatcaggcgccactccatcgctagcgactctggggacactggcataggcacctcttgcagtgactcagtagaagaccactccaccagtagcgggacactctcatttaaaccaagtcagagtctgattactctgccaaccgcacatgtgatgcctagcaatagctcggcctccatctctaagctgcgggaatcactgaccccggatggttcaaagtggtccacgagtttaatgcagactctgggtaatcattcgcgcggcgaacaggacagttcactggacatgaaggatttcagacctttacggaaatggagtagcctgagtaagctgacagctccggataactgtggtcagggagggactgtttgtagggaggaaagcaggaacggactcgagaagattggtaaggcaaaagctttaacatctcagctccgcactatcggaccaagttgcctgcacgacagcatggaaatgctacgcttggaggacaaagagatcaataagaagagatctagtactctggattgcaagtataagtttgagagctgctcaaaggaggattttagggcaagctctagcaccctgcggcgccagccagtggatatgacttattctgcccttccagagtcaaagccaatcatgacttcttccgaagcattcgaacctcccaagtatctaatgttgggacaacaggctgttggcggcgtgccaattcagccttccgttagaactcaaatgtggttgacagagcagttgcgaacgaaccctctcgaagggcggaataccgaggacagttactccctggccccatggcaacaacaacagattgaggactttcgacaaggctctgagacgccaatgcaggtactgactggatcaagtaggcagtcgtacagccctgggtatcaagacttttcgaaatgggaaagcatgttgaaaatcaaggagggcctgctgaggcagaaggagatcgtaattgatagacagaagcagcagatcactcatcttcatgagagaatccgcgacaacgaattgagagctcaacacgcaatgctcggccattatgttaactgtgaagattcttatgttgcaagtctgcaacctcagtatgaaaatactagtctgcaaactccattttcggaggagtcggtctcccatagccaacagggggagttcgagcagaaactagccagcaccgaaaaagaagtgttgcagcttaacgagttccttaagcagagactctccctgttctcagaagaaaaaaagaaactggaagagaaactgaagacccgcgaccggtacattagcagtctcaagaaaaagtgccagaaagaaagcgaacaaaataaggaaaagcaacgccgcatcgagactctggaaaagtacctggcagaccttcctactctcgatgatgttcagtctcagagcctccagttgcaaatcttggaggagaaaaataagaacttgcaggaggctctcatagatacagaaaaaaaattagaagagatcaaaaaacagtgtcaggacaaagagacccagctgatttgccagaagaaaaaggaaaaggaactcgtcactacggtccagtccttgcagcagaaagtcgaacggtgcctggaagatggtattcggttgcccatgctcgacgctaaacagctgcagaatgaaaatgacaacctgcgacagcaaaatgagactgcaagcaaaattattgattcacagcaagacgaaatcgacaggatgatcctggaaatccaaagtatgcagggcaaactatcaaaagaaaaactgactacccagaagatgatggaagagctcgagaagaaggagcgcaatgtccaaaggttaaccaaagccctgctagagaatcagaggcaaacggatgaaacctgcagtttgcttgaccagggccaagaacctgatcaatcacgtcagcagacagtgttgtcaaagagaccgctttttgatcttaccgtgatcgaccagttatttaaagaaatgagctgttgcctgtttgatctaaaagccttgtgcagcattttgaatcagcgcgcccagggcaaggagccaaacctgagcctcctgctcgggattaggtctatgaactgcagcgccgaagagacggaaaacgaccactccaccgaaacactgactaagaagctctcagatgtttgtcagttaagacgcgatattgatgaacttcgtaccaccataagtgatcgctatgctcaggacatgggtgacaattgcattacccagtag

SEQ ID NO: 33507 - DNA, 2418 bp, Artificial Sequence
  derived and/or modified sequence
atgtgggggagatttttggctccggaggctagcgggagggatagcccagggggtgcgagaagtttcccagcaggacccgattatagctcagcatggctgcctgccaacgaatcattgtggcaggcaacaaccgtgccttccaaccaccgcaataaccatataagaagacactccattgcatctgattcgggcgacacagggatcggcacctcctgctccgattcagtggaggatcatagtacaagctctgggacactgtcattcaaacccagccaaagccttattacacttcctaccgcccacgtgatgccctccaactcctctgcctccattagcaagctcagagagtctctcactccggacgggagcaagtggagcacatcattaatgcagaccctcggaaatcacagtcgcggagaacaagactctagcctcgatatgaaggactttcgcccactgagaaagtggtcatccctcagcaagctgaccgccccagacaattgtgggcaaggcggaactgtttgccgcgaggagagtcgcaatggtctagagaagatcggaaaagccaaggctctgacgagtcagctccggaccatcggacctagttgtttacacgactccatggagatgctacggctggaagataaagagatcaacaagaagaggagctcgaccctggactgtaaatacaaattcgaatcctgtagtaaagaggattttagggcctcctcctccaccctccggcgacagcccgtggacatgacttattccgccctccccgagagtaagcccattatgacaagctcggaggccttcgagccccctaagtacttgatgctgggtcaacaagccgtcgggggtgtccccatccagccatctgtgagaactcagatgtggttgacggaacagctaagaacgaaccccctagagggcagaaacacggaggatagttattcacttgcaccctggcagcagcagcagatcgaggactttaggcaggggagcgagacaccaatgcaggtccttaccggaagttctcgacagtcctactctccaggctaccaggattttagtaagtgggagtcaatgctgaagattaaagagggactcctgcgccagaaggaaattgtcattgatcgccagaaacaacagattactcatcttcatgaacgcataagagacaatgaactgagagctcagcacgccatgctcggacattatgttaattgcgaggatagctacgtcgcttcactgcaaccccagtacgaaaacacaagtctgcagactcccttttcggaggagtcagtttctcacagtcagcaaggcgagttcgagcagaagctggcaagtacggaaaaggaagtcttgcagctaaacgagtttctgaagcaacgcctttctctgttttcagaggaaaaaaagaagctggaagagaagctgaaaacaagggacaggtacatcagcagcttaaaaaagaagtgtcagaaagaatccgaacagaacaaagagaagcagaggagaattgagacgctggaaaaatatctggcagatctcccaaccctggatgatgtccagagtcagagcctccagctgcagatactggaagagaagaataaaaacctccaggaagcattgatcgacacagagaaaaagttggaagaaatcaagaaacagtgccaggataaagaaacacagctgatctgccagaaaaagaaagagaaagagctggtgacaaccgtgcagtcactccagcagaaggtggaacgttgcctggaggatggcattcgcctgcctatgttagacgcaaaacagctgcagaatgagaacgacaaccttagacaacaaaacgagacagctagcaagatcattgactcgcagcaggatgagattgaccgcatgatcctggagatccagtcgatgcaggggaagttgtcaaaagaaaagctgaccacccagaaaatgatggaagaacttgagaagaaagagcgtaacgtccagcgcctcactaaagcactccttgagaatcagagacaaacagatgaaacgtgcagcctgctggaccagggtcaggaacccgaccaatcacgacaacagaccgtcttatcaaaacggcctctcttcgatctgacagtcattgatcaactgttcaaggagatgtcctgctgcctatttgacttgaaggcactgtgtagcattctgaaccagagggcacagggaaaggagcccaacttatccctgttactagggatccgctctatgaactgctcagctgaggagactgaaaacgaccacagtacagagacgttaacaaaaaagctgtcagatgtctgtcagttgaggcgggacatcgacgaacttagaacaaccatttccgaccgctatgctcaggatatgggcgacaattgtattacccagtag

SEQ ID NO: 33508 - protein, 194 aa, Artificial Sequence
  derived and/or modified sequence
MEHAFTPLEPLLSTGNLKYCLVILNQPLDNYFRHLWNKALLRACADGGANRLYDITEGERESFLPEFINGDFDSIRPEVREYYATKGCELISTPDQDHTDFTKCLKMLQKKIEEKDLKGKHRLHVDTGMEGDWCGLIPVGQPCMQVTTTGLKWNLTNDVLAFGTLVSTSNTYDGSGVVTVETDHPLLWTMAIKS

SEQ ID NO: 33509 - DNA, 585 bp, Artificial Sequence
  derived and/or modified sequence
atggagcacgccttcacccccctggagcccctgctgagcaccggcaacctgaagtactgcctggtgatcctgaaccagcccctggacaactacttcagacacctgtggaacaaggccctgctgagagcctgcgccgacggcggcgccaacagactgtacgacatcaccgagggcgagagagagagcttcctgcccgagttcatcaacggcgacttcgacagcatcagacccgaggtgagagagtactacgccaccaagggctgcgagctgatcagcacccccgaccaggaccacaccgacttcaccaagtgcctgaagatgctgcagaagaagatcgaggagaaggacctgaagggcaagcacagactgcacgtggacaccggcatggagggcgactggtgcggcctgatccccgtgggccagccctgcatgcaggtgaccaccaccggcctgaagtggaacctgaccaacgacgtgctggccttcggcaccctggtgagcaccagcaacacctacgacggcagcggcgtggtgaccgtggagaccgaccaccccctgctgtggaccatggccatcaagagctag

SEQ ID NO: 33510 - DNA, 585 bp, Artificial Sequence
  derived and/or modified sequence
atggagcacgcgttcacaccgctcgaacccctgctgtcaaccggcaacctcaaatattgtctcgtcattctcaatcagccgctggataattattttagacacctgtggaacaaggccctgttgagggcgtgcgctgatggaggagccaaccggctttacgatatcacggaaggagaacgtgagtcattcctcccagagtttataaacggcgactttgattccatcagacccgaagtccgagaatattacgcgaccaagggatgtgaacttatctctacaccagatcaggatcacactgatttcactaagtgtcttaagatgctgcagaagaaaatcgaagagaaggacctcaaaggaaaacacagattgcatgttgataccgggatggagggtgattggtgcgggctgattcccgtgggacagccctgcatgcaggtgaccacaaccggcctgaagtggaatttgaccaatgatgtgctggcattcggcacgctggtgagtactagtaatacatacgatggttccggggtggtgacagttgagactgaccatccactcctgtggacaatggccatcaaatcttag

SEQ ID NO: 33511 - DNA, 585 bp, Artificial Sequence
  derived and/or modified sequence
atggagcacgccttcacccccctggagcccctgctgagcacaggcaacctgaagtactgcctggtgatcctgaaccagcccctggacaactacttccgccacctgtggaacaaggccctgctgcgggcctgtgctgatggaggagccaaccggctgtatgacatcacagaaggagagcgggagagcttcctgcctgagttcatcaatggagactttgacagcatccggcctgaggtgcgggagtactatgccaccaagggctgtgagctgatcagcaccccagaccaggaccacacagacttcaccaagtgcctgaagatgctgcagaagaagattgaggagaaggacctgaagggcaagcaccggctgcacgtggacaccggcatggagggggactggtgtggcctcatccctgtgggccagccctgcatgcaggtgaccaccaccggcctgaagtggaacctgaccaatgatgtgctggccttcggcaccctggtgtccaccagcaacacctatgatggcagcggcgtggtgacagtggagacagaccaccccctgctgtggaccatggccatcaagagctag

SEQ ID NO: 33512 - DNA, 585 bp, Artificial Sequence
  derived and/or modified sequence
atggagcacgccttcacccccctggagcccctgctgagcaccggcaatctgaagtactgtctagtgatcttaaatcaacccttggacaactatttcagacacctttggaataaagccctgctccgggcctgcgccgacgggggggcaaacagactttatgatataactgaaggtgagcgtgaatcctttcttccagaattcattaacggtgacttcgactcaatccgtcccgaggtccgggagtattacgccacaaagggctgtgaactaatcagtactccagatcaggaccacactgatttcaccaaatgtcttaagatgttacaaaaaaaaatcgaggaaaaggacctgaaaggaaagcatagactgcacgttgacactggaatggaaggcgattggtgcggcttgattccagttggacagccctgtatgcaggtgaccaccactgggctgaagtggaatctgacaaacgacgtcctggctttcggtacattggttagcactagcaacacgtatgatggatccggcgtcgttaccgttgagactgaccatcctcttttatggacaatggcgatcaagtcctag

SEQ ID NO: 33513 - DNA, 585 bp, Artificial Sequence
  derived and/or modified sequence
atggagcacgcattcacccccctggagccgctgttgtctaccggaaacttgaagtattgtctggtaattctcaatcagccgctcgataactattttcgtcacctgtggaataaagcgctcttgcgggcttgcgccgacggaggcgctaacagactgtacgacattacagaaggggaacgagaaagctttttacctgaattcattaatggagatttcgattcgattcggcctgaagtccgggagtactacgcaactaagggttgcgagttgatctcaacccccgaccaagaccacacggattttactaaatgcctgaagatgctccagaaaaagatcgaggaaaaggatcttaagggcaagcaccgcctgcatgttgacaccggtatggagggagactggtgcggtctgatcccggtgggacagccttgtatgcaggtcacaacgacaggcctcaagtggaacctcaccaacgatgtgctcgcgtttggcaccctcgtgtccactagcaacacatatgatggatcaggagtggtaactgtggagaccgaccatccattactgtggaccatggctatcaagagttag

SEQ ID NO: 33514 - DNA, 2283 bp, Artificial Sequence
  derived and/or modified sequence
aaggctcctcagccgagcgccgagcggtcgatcgccgtagctcccgcagcctgcgatctccagtctgtggctcctaccagccattgtaggccaataatccgttatggagcatgcctttaccccgttggagcccctgctttccactgggaatttgaagtactgccttgtaattcttaatcagcctttggacaactattttcgtcatctttggaacaaagctcttttaagagcctgtgccgatggaggtgccaaccgcttatatgatatcaccgaaggagagagagaaagctttttgcctgaattcatcaatggagactttgattctattaggcctgaagtcagagaatactatgctactaagggatgtgagctcatttcaactcctgatcaagaccacactgactttactaagtgccttaaaatgctccaaaagaagatagaagaaaaagacttaaagggaaagcacaggttgcatgtagacactggaatggagggtgattggtgtggccttattcctgttggacagccttgtatgcaggttacaaccacaggcctcaagtggaacctcacaaatgatgtgcttgcttttggaacattggtcagtacttccaatacctacgacgggtctggtgttgtgactgtggaaactgaccacccactcctctggaccatggccatcaaaagctaacctgttgactggcatccataagtgtgcctctgccttatctcatttctcaacagttcattgctcaacaagaacgattcacctgggtttgcaagaatctaaacctctctaggggaagcccactgggtttaaagatgttagtgtttagataatacaggtaacattataaatgacagatctcaattttatagtagtgggaaagatacatgctaagaaagcaaataagctctattatattcggttggaacctaatgggaatcattccactatacaattcagtactgattattcttcttacattattaatcattccatttatcctagaaaattgtttttaatttgaatcagagaaaactgttgaggttcctcttggagtctagaacatccttaaatgtctaacaacaagggctacctctgagtaccttttagtattagttttctgtatatgatatatattatcttatactgaaaaaaaattcctttcagattggggtgttagaagtgcaccaggtcactctgaccttattactgtctttggtattgtcttaaataaatcaagaatcattgacctaattgttaaatttaaaaataggtagttagcaataggtggaaagagaaatgatgtgaaagataaatgatgattcgtggagccctactcacacattaacccccaaattcaaaagtaagaatgcaaaagtctagagggggtaacagtctgcatcatcatcacaacctaaatggagaaagctgtgcagaggaaacttaagcataaaaattgaattcgtttctgacataccttagactgaaaaactgttggttcatccagaagtgtattcatattaccagaaaatgagtttgtctatggggatacatgaacttcatatactaaggagcctaactccaaagcctgcgttctcatcccagtctgatattcacctaagtttccggacccttttccttagctgtaaaatggaagcggttggactgatggtgtctgaggttctttcccacactgaaattctaaatattgacacttagcagtcatagggctgataatacacacagttactgacttagcctaaacaacctggtgcatcgaaatgtattcacctttcttttgtaaagagaccatcttctatcttctttccacctttctctgttttatgaaaccaactgttgacatacaaaccatgattgaaggagaacctgtccaacatgttttatgtacacaaatccctatgttgctataagaaaagtgaaagtaactgttttcttcttggtgctatgacagtgtgagactcaggttgtctgtagagaatgaaaggagcagtggcccgcgtgattgtggcatttaaggagcagtggcccatgtgactgtggcattttcggcacttttcattactttctgcttgaccggaagttgaggcttagctatgtttccatcttcagtttctgaagactagttatatattccttactagaaatatattcataatatataaaagaaatatatctgtgattttaaaattttgctaccaaagaatgcatgttctgtgtgccctgaaaatgttaccagtgttaataaatggatacttatc

SEQ ID NO: 33515 - protein, 100 aa, Artificial Sequence
  derived and/or modified sequence
MATFPPATSAPQQPPGPEDEDSSLDESDLYSLAHSYLGPLIMPMPTSPLTPALVTGGGGRKGRTKREAAANTNRPSPGGHERKLVTKLQNSERKKRGARR

SEQ ID NO: 33516 - DNA, 303 bp, Artificial Sequence
  derived and/or modified sequence
atggctacattcccgcccgcaacatctgccccccaacagcctcctggaccggaagacgaagactcttctttggacgagagtgatctttattccctggctcactcttacctgggcccactgataatgcctatgcccacgagtcccctgacccctgctctagtcacaggaggcggaggacgtaaagggcggacgaagagagaagcagccgctaacactaacaggccatcccccggcggacacgagcggaagcttgtgacaaaactgcagaacagtgagcggaaaaaacggggggctcggcgatag

SEQ ID NO: 33517 - DNA, 912 bp, Artificial Sequence
  derived and/or modified sequence
ccagctgggtgagcctgggagggaggaggtgagttgggctggactcagggaccgactcttcccgtctcatgactgtgtttactgggctggattttgggaaggggccagattgcatcagacagggcctgatgggctggagccagactgtggtctgaggaggagacacagccttataagctgagggagtggagaggcccggggccaggaaagcagagacagacaaagcgttaggagaagaagagaggcagggaagacaagccaggcacgatggccaccttcccaccagcaaccagcgccccccagcagcccccaggcccggaggacgaggactccagcctggatgaatctgacctctatagcctggcccattcctacctcgggcctctcatcatgcctatgcccacttcacctctgactcctgccttggttacaggaggtggaggccggaaaggtcgcaccaagagagaagctgctgccaacaccaaccgccccagccctggcgggcacgagaggaaactggtgaccaagctgcagaattcagagaggaagaagcgaggggcacggcgctgagacagagctggagatgaggccagaccatggacactacacccagcaatagagacgggactgcggaggaaggaggacccaggacaggatccaggccggcttgccacaccccccacccctaggacttattcccgctgactgagtctctgaggggctaccaggaaagcgcctccaaccctagcaaaagtgcaagatggggagtgagaggctgggaatggaggggcagagccaggaagatcccccagaaaagaaagctacagaagaaactggggctcctccagggtggcagcaacaataaatagacacgcacggcagccacagcttgggtgtgtgttcatccttgtt

SEQ ID NO: 33518 - DNA, 303 bp, Artificial Sequence
  derived and/or modified sequence
atggccaccttccccccagccaccagcgccccccagcagcccccaggcccagaagatgaggacagcagcctggatgaaagtgacctgtacagcctggcccacagctacctgggccccctcatcatgcccatgcccaccagccccctgaccccagccctggtgactggaggcggcggcaggaaaggaagaaccaagcgggaggccgccgccaacaccaaccggcccagccctgggggccacgagaggaagctggtgaccaagctgcagaacagcgagaggaagaagagaggagcccggaggtag

SEQ ID NO: 33519 - DNA, 303 bp, Artificial Sequence
  derived and/or modified sequence
atggccaccttcccccccgccaccagcgccccccagcagccccccggccctgaggacgaagatagttcactggacgaatccgatctctactctctggcccattcctatctcggacccctgattatgcccatgcccacctcgcccttgactcctgccctcgtcaccggtggaggagggcgtaaaggaagaaccaagagggaggccgcggctaacactaatcgtccaagccccggaggccatgagagaaaattggtgacaaagcttcagaattctgaaaggaagaagcggggagcacggaggtag

SEQ ID NO: 33520 - DNA, 303 bp, Artificial Sequence
  derived and/or modified sequence
atggcgaccttcccgcctgccacctcggcccctcagcaaccaccagggcctgaagacgaggatagcagtttagatgagtcggatctgtactctctggcccactcctaccttggtccgctgattatgccgatgccgaccagcccgctcactcctgcccttgttactggcggaggtgggcgtaaaggcagaaccaaaagggaagccgctgcaaacactaatcggccatctccaggtggacacgagcgcaagctcgtcactaaacttcagaactctgagcggaagaaaaggggcgctaggcggtag

SEQ ID NO: 33521 - DNA, 303 bp, Artificial Sequence
  derived and/or modified sequence
atggccaccttcccccccgccaccagcgccccccagcagccccccggccccgaggacgaggacagcagcctggacgagagcgacctgtacagcctggcccacagctacctgggccccctgatcatgcccatgcccaccagccccctgacccccgccctggtgaccggcggcggcggcagaaagggcagaaccaagagagaggccgccgccaacaccaacagacccagccccggcggccacgagagaaagctggtgaccaagctgcagaacagcgagagaaagaagagaggcgccagaagatag

SEQ ID NO: 33522 - protein, 395 aa, Artificial Sequence
  derived and/or modified sequence
MDEEPERTKRWEGGYERTWEILKEDESGSLKATIEDILFKAKRKRVFEHHGQVRLGMMRHLYVVVDGSRTMEDQDLKPNRLTCTLKLLEYFVEEYFDQNPISQIGIIVTKSKRAEKLTELSGNPRKHITSLKEAVDMTCHGEPSLYNSLSMAMQTLKHMPGHTSREVLIIFSSLTTCDPSNIYDLIKTLKAAKIRVSVIGLSAEVRVCTVLARETGGTYHVILDESHYKELLTHHLSPPPASSSSECSLIRMGFPQHTIASLSDQDAKPSFSMAHLDGNTEPGLTLGGYFCPQCRAKYCELPVECKICGLTLVSAPHLARSYHHLFPLDAFQEIPLEEYNGERFCYGCQGELKDQHVYVCAVCQNVFCVDCDVFVHDSLHCCPGCIHKIPAPSGV

SEQ ID NO: 33523 - protein, 338 aa, Artificial Sequence
  derived and/or modified sequence
MRHLYVVVDGSRTMEDQDLKPNRLTCTLKLLEYFVEEYFDQNPISQIGIIVTKSKRAEKLTELSGNPRKHITSLKEAVDMTCHGEPSLYNSLSMAMQTLKHMPGHTSREVLIIFSSLTTCDPSNIYDLIKTLKAAKIRVSVIGLSAEVRVCTVLARETGGTYHVILDESHYKELLTHHLSPPPASSSSECSLIRMGFPQHTIASLSDQDAKPSFSMAHLDGNTEPGLTLGGYFCPQCRAKYCELPVECKICGLTLVSAPHLARSYHHLFPLDAFQEIPLEEYNGERFCYGCQGELKDQHVYVCAVCQNVFCVDCDVFVHDSLHCCPGCIHKIPAPSGV

SEQ ID NO: 33524 - DNA, 1188 bp, Artificial Sequence
  derived and/or modified sequence
atggacgaagagcctgagaggaccaagcgatgggaagggggatacgagaggacttgggaaattctaaaagaagacgagtcgggtagcttgaaagctactattgaagacatactgttcaaggccaagcgcaaaagggtgttcgagcaccatgggcaagtgagattgggaatgatgaggcatttatatgtggttgtggacgggagccggactatggaggatcaagacctcaaacctaatcggcttacctgcactttaaagctcctggagtatttcgttgaggagtattttgaccaaaaccctatcagtcagataggcatcatcgtaacaaaatccaagcgcgctgagaagctgacagagctttctggcaatcctagaaagcacatcacttctctgaaggaagcagttgatatgacctgccatggtgaaccgagtttgtacaactcgctgagtatggcaatgcagactcttaaacacatgcccggacatacatcaagagaggtcctgattatcttttccagccttactacctgcgacccaagcaatatttacgatctcatcaaaacgctgaaggctgctaaaatcagggtttcagttattggcctcagtgccgaggtccgggtatgcaccgtactggcccgcgagaccggcggaacctaccatgtgattcttgatgagtctcactataaggagttgctgactcatcatttgagccctccgccagcctcgagcagttctgaatgttcgctgattcggatgggatttccacaacacaccatagccagcctgagcgaccaggatgcaaagccttcctttagtatggcccatctggatggcaataccgagccaggcctcacactggggggctatttttgccctcagtgcagagccaagtactgtgagctccctgtagaatgcaagatttgcggactcactctggtttcagccccacatctggcaagatcctaccatcatctgttccctttggacgcttttcaggagattccgttggaagagtacaacggggaacggttttgttatggatgtcagggtgagctgaaggaccaacatgtgtacgtctgtgccgtgtgtcaaaatgtgttttgtgtggactgcgatgtgtttgtacatgacagcctgcactgttgcccaggctgcatccataagatcccggcaccatctggtgtgtag

SEQ ID NO: 33525 - DNA, 1188 bp, Artificial Sequence
  derived and/or modified sequence
atggatgaagagcctgaaagaaccaagaggtgggagggaggttacgaacggacttgggaaattctaaaagaggacgaatcaggctcgcttaaggctactattgaggatattctgttcaaagcgaaacgaaaaagagtattcgagcaccatggccaggtccgactgggcatgatgaggcacctctacgtggttgttgatggaagcaggactatggaggatcaagacctcaagcccaaccgcctcacttgtacattgaaactgctggagtacttcgtcgaggagtattttgatcagaatcctataagccaaatcggcatcatcgtaacaaaatcaaaacgggcagagaagctgaccgagctgtcgggcaatccccggaagcatatcacaagcctgaaggaggcagtggacatgacctgtcatggtgagccttcactgtataactccctttcaatggccatgcagactctgaagcatatgccaggccataccagcagggaggtcttgataatcttcagcagtttgacaacatgcgatccctcaaacatttacgacctcatcaaaaccttgaaggccgcaaagatccgagtcagtgttatcggactcagcgcagaggtgagagtgtgtaccgtgctcgcccgcgaaactggtggaacatatcacgtgattttggatgaatcgcattacaaggagctgctcacccaccacttatctcccccacctgcatcttcatcctctgaatgtagccttatccgcatgggtttcccgcagcatactatagcctcactgtccgatcaggacgctaagccgtccttcagtatggcccatttagacggcaacaccgagcctggcctgaccctaggaggatacttctgccctcagtgcagggccaaatactgtgaacttcctgttgaatgcaagatctgtggcctgactttagttagcgcccctcatctggcgaggagctaccatcatctgttccccctcgacgcattccaggaaattccgctggaagagtacaatggagaacgcttctgctacggctgtcaaggggagctgaaggatcagcatgtctacgtatgcgcagtctgccaaaacgtgttttgtgtggattgcgacgtctttgtccatgatagcctccactgctgtccaggttgtattcacaagatacctgccccctcaggcgtgtag

SEQ ID NO: 33526 - DNA, 1188 bp, Artificial Sequence
  derived and/or modified sequence
atggatgaggagcctgagaggaccaagcgctgggagggcggctatgaaagaacctgggagatcctgaaggaggatgaaagtggcagcctgaaggccaccatcgaggacatcctcttcaaggccaagaggaagagggtgtttgagcaccacggccaggtgcggctgggcatgatgaggcacctgtatgtggtggtggatggcagcaggaccatggaggaccaggacctgaagcccaaccggctgacctgcaccctgaagctgctggagtactttgtggaggagtactttgaccagaaccccatcagccagatcggcatcatcgtgaccaagagcaagagagctgagaagctgacagagctgagcggcaaccccaggaagcacatcaccagcctgaaggaggccgtggacatgacctgccacggggagcccagcctgtacaacagcctgtccatggccatgcagaccctgaagcacatgcctggccacaccagccgggaggtgctgatcatcttcagcagcctgaccacctgtgaccccagcaacatctatgacctgatcaagaccctgaaggccgccaagatccgggtgtctgtgattggcctgtctgctgaggtgcgggtgtgcaccgtgctggcccgggagactggaggcacctaccacgtgatcctggatgagagccactacaaggagctgctgacccaccacctgagccccccaccagccagcagcagcagcgagtgcagcctcatccgcatgggcttcccccagcacaccatcgccagcctgagtgaccaggatgccaagcccagcttctccatggcccacctggatggcaacacagagcccggcctgaccctgggcggctacttctgcccccagtgccgggccaagtactgtgagctgcctgtggagtgcaagatctgtggcctgaccctggtgtctgccccccacctggcccggagctaccaccacctgttccccctggatgccttccaggagatccccctggaggagtacaacggggagcgcttctgctacggctgccagggcgagctgaaggaccagcacgtgtatgtgtgtgctgtgtgccagaatgtgttctgtgtggactgtgatgtgtttgtgcatgacagcctgcactgctgccccggctgcatccacaagatcccagcccccagcggcgtgtag

SEQ ID NO: 33527 - DNA, 1188 bp, Artificial Sequence
  derived and/or modified sequence
atggacgaggagcccgagcggaccaagcggtgggagggcggctacgagagaacgtgggaaatactgaaggaggacgaaagtggaagcctcaaagccacgatcgaggacatcctctttaaagctaagagaaagcgagtgttcgagcaccacggccaggtccggctcggcatgatgcggcacttgtacgtcgtcgtggacggcagtcggacgatggaggatcaagacctgaagcctaaccgcttgacatgtacattgaaactgttagaatattttgtggaagagtactttgaccagaatccaatcagccagattgggattattgtgaccaagtccaagagagccgaaaagctgaccgaattgtcagggaatccccgcaagcacattactagcctaaaagaggccgtcgatatgacttgccacggggagccaagtctgtacaactcactgagtatggccatgcagaccctgaagcatatgcctgggcacacctcccgagaggtgctgataatcttttctagtttaaccacttgcgacccctccaacatttacgacctgattaaaaccttaaaggctgctaagatccgggtctccgtcatcggcttgagcgccgaggttcgcgtctgtaccgtactcgcccgtgaaactggcggcacctatcacgtcatcctcgatgagagccactacaaggaactgttaacccaccacctcagcccccctcctgctagttcaagttccgagtgtagtctcatcagaatgggattccctcagcatactatcgccagcctctccgaccaggacgccaagccctccttcagtatggcgcacctcgatgggaataccgaacctgggctcaccttgggcgggtatttctgtccacaatgcagggctaaatattgtgagttacctgtggagtgcaagatctgcggtctaaccttggtgagcgcgcctcacctggctcgcagctaccaccatctgtttcctctggacgccttccaggagattcccctggaagaatataatggggagcggttttgctatggatgccagggagaactaaaagatcaacacgtgtatgtttgcgctgtctgtcaaaatgttttctgtgtcgattgcgatgtatttgtacacgactcactccactgttgtccaggctgtattcataagatcccagctccctcaggggtgtag

SEQ ID NO: 33528 - DNA, 1188 bp, Artificial Sequence
  derived and/or modified sequence
atggacgaggagcccgagcggaccaagcggtgggagggcggctacgagcgcacatgggagattctgaaggaggacgaatcaggctcactgaaggctactattgaagacattctgtttaaagctaagcgtaagagagtattcgaacatcacggtcaggtccgtctgggaatgatgcgccatctctatgtggtcgtggatggtagtcggacaatggaggatcaagacttgaagccaaacagactgacatgcacattgaaattgctcgagtacttcgtggaggagtacttcgatcagaatcctatttctcagatcggaatcatcgtgacaaagtccaaaagggcggaaaaattaacggagctctcagggaatccgagaaagcacatcacttcattaaaagaggccgttgatatgacctgtcatggcgaaccgtctctttataactcactgagcatggccatgcagactctgaaacacatgcccgggcacacgagtagggaggtgttgattattttctctagccttacaacctgcgatcccagtaatatctacgatctgattaagaccttaaaggctgccaagatccgggtgagtgtcatcggcctctcagccgaggtgcgtgtgtgtacagtgttagcacgcgagaccggggggacctaccacgttatcttagacgagagccactacaaagagctcctaactcaccacttgtcaccaccacccgcaagcagttcttcagagtgctccctcatacgcatgggatttccccagcacacaatcgcctcactatcagatcaggatgctaagccctccttttcaatggcccatcttgacggcaacacggagcccgggcttactctggggggctatttttgcccccagtgccgggcaaagtattgcgaacttcccgtcgaatgcaagatatgcggcctgactctggtgtcagcgcctcacctggcccgaagttatcaccatttatttcccttagacgccttccaggaaatcccgttagaagagtacaatggggagaggttctgctatggatgccagggggagttaaaagaccagcacgtctacgtgtgcgctgtgtgccagaatgtcttctgcgtcgactgcgacgtgttcgtccacgacagcctgcactgctgtccgggctgtatacataaaatcccggccccctccggcgtttag

SEQ ID NO: 33529 - DNA, 1188 bp, Artificial Sequence
  derived and/or modified sequence
atggacgaagagcccgagcgcaccaagagatgggaagggggatacgagcggacttgggagatactcaaagaagacgagagcggaagcctcaaagctaccatcgaggacattctgttcaaggctaagcgaaagagagtgtttgaacatcacggccaggtcagacttgggatgatgagacatctgtacgtggtagtagatggttctagaaccatggaggaccaggatctgaaacccaatcgcttaacttgtactctcaagctcctagagtattttgtggaagaatactttgatcagaaccccataagccaaatcggaataatcgttacaaaatctaagagggcagaaaagttgactgaactaagcgggaatccacgcaagcatattacctccctgaaagaggctgtggacatgacttgccacggtgagcccagcctgtataattcactgtcaatggctatgcagactctcaaacatatgccagggcacactagccgagaagtcctgatcatattttcctccttgacaacctgcgacccctcgaatatatatgacttaatcaagacccttaaggccgctaaaatccgtgtttccgttatcgggctgagcgcagaggtgcgggtgtgtacagtgcttgctagagagactggcggtacctatcacgtgatcctcgatgagagtcactacaaagaactgctcacgcatcacctctccccaccccctgcctcgtcaagtagcgaatgctccctcattaggatgggcttccctcaacacacaatcgcgagtctgagcgatcaggacgcaaagccatccttcagcatggcacaccttgatggaaacacagaaccaggactgacactggggggttatttctgtccacagtgtagggccaaatactgcgagctgccggtggagtgcaaaatctgtggtctgactctcgtttcagccccacatctggccagaagctaccaccacctgttccccctcgacgcatttcaggaaatccccctggaagaatacaacggggaaagattctgttatggttgccaaggagaactgaaagaccaacatgtgtatgtatgtgctgtctgtcaaaatgtgttctgcgtggattgtgacgttttcgtgcatgatagtcttcattgctgccccggatgcattcataaaatccctgccccaagcggtgtgtag

SEQ ID NO: 33530 - DNA, 1188 bp, Artificial Sequence
  derived and/or modified sequence
atggacgaggagcccgagcgcaccaaacgatgggaaggcggatatgaacgaacatgggagattctgaaggaagacgagtctggcagcctcaaggctacaattgaggacattttgttcaaagcaaagcgaaagcgggttttcgaacaccacggccaagtccgtctcggcatgatgagacatttatacgtggtggtcgacgggtcacgcaccatggaggaccaagatttaaagccaaataggctgacttgcacactgaaactattggagtatttcgtcgaagaatatttcgaccagaatccgataagccagatcggcatcatagtaacaaagagcaagagagcagagaaattgaccgagctctcaggtaatcctagaaagcacatcaccagcctgaaagaagctgtcgatatgacatgccatggggaaccctcgttatacaattcactgagtatggccatgcagacactgaaacatatgcccggacatacttcccgagaggttcttattatctttagctctttgactacgtgtgatccgtcgaatatctacgacctgataaagacactcaaagccgcaaaaattagggtgtcagtgatagggctttcggccgaagtgagggtttgcaccgtgctcgcgagagagactggtggtacgtaccatgttatcctggacgagtcccactataaggaacttctcacacaccacctctcaccaccccctgccagcagctccagtgagtgcagcctgatacgtatgggctttccccaacacacaatcgcgtctttgagcgatcaggacgccaagccatctttctctatggcccacctcgatgggaacaccgagcccggtctgactctcggcggatacttttgcccacagtgccgagcaaaatattgtgaattgcctgtggagtgtaagatttgtgggttaacactggtgagtgcccctcacctcgcccgtagctatcaccacttgtttcctctggacgcttttcaggagatacccctggaggaatacaatggagagcggttctgctacgggtgccagggtgagctgaaggaccagcacgtgtacgtttgtgccgtctgccagaacgtgttctgcgtcgattgcgacgtgtttgtacacgactcgctgcattgttgccctggatgtatccacaagatccctgctccttcaggggtgtag

SEQ ID NO: 33531 - DNA, 1803 bp, Artificial Sequence
  derived and/or modified sequence
gtccgcgtgtggaagtctgtgaggcgcagaggtggggcaggccgtctgactagctaggcggctgggagcgttttcgtggcggggaacggaggttgaattgccctgcctgggctcatagggaaggaggatgtgaaggagcttgtgaaggcagaggaaggctggagtgcagtggcacaaccttggctcgctccagtgtctacctcccaggttcaagtgattctcctgcctcagcctcccgagtagctgggattacagattattgaataataaaatacagttttgaaaaaaatggatgaagaacctgaaagaactaagcgatgggaaggaggctatgaaagaacatgggagattcttaaagaagatgaatctggatcacttaaagctacaatagaagacattctattcaaggcaaagagaaaaagagtatttgagcaccatggacaagttcgacttggaatgatgcgccacctttatgtggtagtagatggatcaagaacaatggaagaccaagatttaaagcctaatagactgacgtgtactttaaagttgttggaatactttgtagaggaatattttgatcaaaatcctattagtcagattggaataattgtaactaagagtaaaagagctgaaaaattgactgaactttcaggaaacccaagaaaacatataacgtctttgaaggaagctgtggatatgacctgccatggagagccatctctttataattccctaagcatggctatgcagactctaaaacacatgcctggacatacaagtcgagaagtactaatcatctttagcagccttacaacttgcgatccatctaatatttatgatctaatcaagaccctaaaggcagctaaaattagagtatctgttattggattgtctgcagaagttcgcgtttgcactgtacttgctcgtgaaactggtggcacgtaccatgttattttagatgaaagccattacaaagagttgctcacacatcatcttagtcctcctcctgctagctcaagttctgaatgctcacttattcgtatgggatttcctcagcacaccattgcttctttatctgaccaggatgcaaaaccctctttcagcatggcgcatttggatggcaatactgagccagggcttacattaggaggctatttctgcccacagtgtcgggcaaagtactgtgagctacctgttgaatgtaaaatctgtggtcttactttggtgtctgctccccacttggcacggtcttaccatcatttgtttcctttggatgcttttcaagaaattcccctagaagaatataatggagaaagattttgttatggatgtcagggggaattgaaagaccaacatgtttatgtttgtgctgtgtgccaaaatgttttctgtgtggactgtgatgtttttgttcatgattctctacactgttgccctggctgtattcataagattccagctccttcaggtgtttgattccagcatgtagtatacattgtatgtgttaaaaagaaatttgcaactgtgaataaaaggacttctttagaagaagcttcatttaaaacatgaaaggataatctgacttaagaaactttttgctaagaaaaggtaatattttattaaattttaaatttgtgttgtcacagaaatacctgaaattcagtagtacttcattcaattaattttgttttctattattttgagttatactgttttcaaagtcattatgcagtatgtataaacttataagaattaaattgatgtgataattttatgtttttataattaaatatagaatcttta

SEQ ID NO: 33532 - DNA, 2952 bp, Artificial Sequence
  derived and/or modified sequence
ggtgagtccgcgtgtggaagtctgtgaggcgcagaggtggggcaggccgtctgactagctaggcggctgggagcgttttcgtggcggggaacggaggttgaattgccctgcctgggctcatagggaaggaggatgtgaaggagcttgtgaaggcagaggaagattattgaataataaaatacagttttgaaaaaaatggatgaagaacctgaaagaactaagcgatgggaaggaggctatgaaagaacatgggagattcttaaagaagatgaatctggatcacttaaagctacaatagaagacattctattcaaggcaaagagaaaaagagtatttgagcaccatggacaagttcgacttggaatgatgcgccacctttatgtggtagtagatggatcaagaacaatggaagaccaagatttaaagcctaatagactgacgtgtactttaaagttgttggaatactttgtagaggaatattttgatcaaaatcctattagtcagattggaataattgtaactaagagtaaaagagctgaaaaattgactgaactttcaggaaacccaagaaaacatataacgtctttgaaggaagctgtggatatgacctgccatggagagccatctctttataattccctaagcatggctatgcagactctaaaacacatgcctggacatacaagtcgagaagtactaatcatctttagcagccttacaacttgcgatccatctaatatttatgatctaatcaagaccctaaaggcagctaaaattagagtatctgttattggattgtctgcagaagttcgcgtttgcactgtacttgctcgtgaaactggtggcacgtaccatgttattttagatgaaagccattacaaagagttgctcacacatcatcttagtcctcctcctgctagctcaagttctgaatgctcacttattcgtatgggatttcctcagcacaccattgcttctttatctgaccaggatgcaaaaccctctttcagcatggcgcatttggatggcaatactgagccagggcttacattaggaggctatttctgcccacagtgtcgggcaaagtactgtgagctacctgttgaatgtaaaatctgtggtcttactttggtgtctgctccccacttggcacggtcttaccatcatttgtttcctttggatgcttttcaagaaattcccctagaagaatataatggagaaagattttgttatggatgtcagggggaattgaaagaccaacatgtttatgtttgtgctgtgtgccaaaatgttttctgtgtggactgtgatgtttttgttcatgattctctacactgttgccctggctgtattcataagattccagctccttcaggtgtttgattccagcatgtagtatacattgtatgtgttaaaaagaaatttgcaactgtgaataaaaggacttctttagaagaagcttcatttaaaacatgaaaggataatctgacttaagaaactttttgctaagaaaaggtaatattttattaaattttaaatttgtgttgtcacagaaatacctgaaattcagtagtacttcattcaattaattttgttttctattattttgagttatactgttttcaaagtcattatgcagtatgtataaacttataagaattaaattgatgtgataattttatgtttttataattaaatatagaatctttatgatttatgttaattcattaatttagtgtaagaagaaagttaagtctgaatgtaaattcagtgtaagatgaaaatttatcaatacttatgaaattaggctgggcgctgtggctcacacctgtaatcccaacactttgggaggctgaggtgggcagatcacttgaggtcaggagttcgagaccagcctggccaacatggtgaaaccccgtcactactaaaaatacaaaaaataattagccgggcatggtggttcacgcctggagtcccagctacttgggaggctgaggcaggagaatcgcttgaacccaggaggcggaggttgcagtgagccgagattgtgccactgcactccaccctagagtaagactccctctcaaaaaaaaaaaaagttatgaaattaatacatatgaaatgatgtactgctacatccaccagagaggtctttttaggtttaaccaaacatctggaatatgtttatcaagttagtacatctgaaattatttgtggctatgaccaacagaagtcactttacattaaacattcaaactcacaagactgccatggccatacttggtacccgcttactcagaaggatattaaacagaaacaacagcctgccagcacagcatcaagcagtcctcattagcagtggaagtccttgtagcagtccactagtacaatttgggtgcaaggagataagatcctccacaggcatcaaggaaccaatatctcttaacaattccataaacacagcttccaggtatccacaagggatgtgtcaatttcaagagtcactacactcaggaaagcctaaagcttgaagactccatttatttatagtgcatcccaatccagatacgtaacaattaacgagttatttttactataagcaaagttgcctaaaatcatagttgatactaaccatggttaacagagctctaaagtttgacagaaagtgagattcaaatcctttcactctcatatgctaaaccttttgccttactctgggtcatcagagaaatttaggtgagaatgtatgatgaagtctgtgttttagattcaatgcagatatatcattgtgggcagaactctttctggttatatccagttaagagtaaatcaggctttcagccgggcgcggtggctcacgcctgtaatcctagcactttgggaggccgaggcgggcagatcacgaggtcaggagatcgagaccatcctggctaacacggtgaaaccccgtct

SEQ ID NO: 33533 - DNA, 1188 bp, Artificial Sequence
  derived and/or modified sequence
atggacgaggagcccgagagaaccaagagatgggagggcggctacgagagaacctgggagatcctgaaggaggacgagagcggcagcctgaaggccaccatcgaggacatcctgttcaaggccaagagaaagagagtgttcgagcaccacggccaggtgagactgggcatgatgagacacctgtacgtggtggtggacggcagcagaaccatggaggaccaggacctgaagcccaacagactgacctgcaccctgaagctgctggagtacttcgtggaggagtacttcgaccagaaccccatcagccagatcggcatcatcgtgaccaagagcaagagagccgagaagctgaccgagctgagcggcaaccccagaaagcacatcaccagcctgaaggaggccgtggacatgacctgccacggcgagcccagcctgtacaacagcctgagcatggccatgcagaccctgaagcacatgcccggccacaccagcagagaggtgctgatcatcttcagcagcctgaccacctgcgaccccagcaacatctacgacctgatcaagaccctgaaggccgccaagatcagagtgagcgtgatcggcctgagcgccgaggtgagagtgtgcaccgtgctggccagagagaccggcggcacctaccacgtgatcctggacgagagccactacaaggagctgctgacccaccacctgagccccccccccgccagcagcagcagcgagtgcagcctgatcagaatgggcttcccccagcacaccatcgccagcctgagcgaccaggacgccaagcccagcttcagcatggcccacctggacggcaacaccgagcccggcctgaccctgggcggctacttctgcccccagtgcagagccaagtactgcgagctgcccgtggagtgcaagatctgcggcctgaccctggtgagcgccccccacctggccagaagctaccaccacctgttccccctggacgccttccaggagatccccctggaggagtacaacggcgagagattctgctacggctgccagggcgagctgaaggaccagcacgtgtacgtgtgcgccgtgtgccagaacgtgttctgcgtggactgcgacgtgttcgtgcacgacagcctgcactgctgccccggctgcatccacaagatccccgcccccagcggcgtgtag

SEQ ID NO: 33534 - DNA, 1188 bp, Artificial Sequence
  derived and/or modified sequence
atggatgaggagcctgaacgcacaaagcgttgggagggcgggtatgagcggacgtgggagattcttaaagaagatgagtcgggcagcctgaaggctacgattgaagatatcctatttaaagctaaacgcaagcgggtgttcgagcaccacgggcaggtccgccttggtatgatgagacacttgtatgtagtagtcgacggttctagaaccatggaagaccaggatcttaagcctaataggttaacctgcaccctcaagctcctggagtacttcgtggaggaatattttgatcaaaacccaataagccagatcggcataatcgtaacaaagtctaaaagggccgagaagttaaccgaactgtccgggaatccacgtaaacacatcacttccctcaaggaagccgtagatatgacctgtcacggagagccaagcctctataattcactgagtatggccatgcagacacttaagcatatgcccgggcatacaagccgggaggtcctcatcattttctcctcactcactacctgtgatccatccaacatttatgacctcattaaaactcttaaggcagctaagatacgcgtcagcgtaattgggctaagcgcagaggttcgcgtgtgcaccgtgttggcccgagagaccggaggcacatatcacgtcatcctggacgaatcccattacaaggaactcctaacacatcacctgtctcctcctccggcatcaagtagctctgagtgctctctgattcgcatggggtttccacagcataccattgcctccctgtcagatcaagacgccaaaccttccttcagtatggcccatctggatggtaacactgagccagggctcacattggggggttatttctgccctcaatgcagagctaagtactgtgaacttcccgtagagtgcaaaatctgtggtcttactcttgtgagcgccccgcacctggcccgaagctatcatcatttgttcccactcgacgcatttcaggagatccccctggaggaatacaatggcgagcggttttgctacggctgccaaggcgagctgaaagaccagcacgtatacgtttgcgccgtttgccagaatgtgttttgcgtggactgtgatgtatttgtgcatgattcccttcactgttgtcccggatgtattcataagatccccgcgccctctggggtgtag

SEQ ID NO: 33535 - DNA, 1803 bp, Artificial Sequence
  derived and/or modified sequence
gtccgcgtgtggaagtctgtgaggcgcagaggtggggcaggccgtctgactagctaggcggctgggagcgttttcgtggcggggaacggaggttgaattgccctgcctgggctcatagggaaggaggatgtgaaggagcttgtgaaggcagaggaaggctggagtgcagtggcacaaccttggctcgctccagtgtctacctcccaggttcaagtgattctcctgcctcagcctcccgagtagctgggattacagattattgaataataaaatacagttttgaaaaaaatggatgaagaacctgaaagaactaagcgatgggaaggaggctatgaaagaacatgggagattcttaaagaagatgaatctggatcacttaaagctacaatagaagacattctattcaaggcaaagagaaaaagagtatttgagcaccatggacaagttcgacttggaatgatgcgccacctttatgtggtagtagatggatcaagaacaatggaagaccaagatttaaagcctaatagactgacgtgtactttaaagttgttggaatactttgtagaggaatattttgatcaaaatcctattagtcagattggaataattgtaactaagagtaaaagagctgaaaaattgactgaactttcaggaaacccaagaaaacatataacgtctttgaaggaagctgtggatatgacctgccatggagagccatctctttataattccctaagcatggctatgcagactctaaaacacatgcctggacatacaagtcgagaagtactaatcatctttagcagccttacaacttgcgatccatctaatatttatgatttaatcaagaccctaaaggcagctaaaattagagtatctgttattggattgtctgcagaagttcgcgtttgcactgtacttgctcgtgaaactggtggcacgtaccatgttattttagatgaaagccattacaaagagttgctcacacatcatcttagtcctcctcctgctagctcaagttctgaatgctcacttattcgtatgggatttcctcagcacaccattgcttctttatctgaccaggatgcaaaaccctctttcagcatggcgcatttggatggcaatactgagccagggcttacattaggaggctatttctgcccacagtgtcgggcaaagtactgtgagctacctgttgaatgtaaaatctgtggtcttactttggtgtctgctccccacttggcacggtcttaccatcatttgtttcctttggatgcttttcaagaaattcccctagaagaatataatggagaaagattttgttatggatgtcagggggaattgaaagaccaacatgtttatgtttgtgctgtgtgccaaaatgttttctgtgtggactgtgatgtttttgttcatgattctctacactgttgccctggctgtattcataagattccagctccttcaggtgtttgattccagcatgtagtatacattgtatgtgttaaaaagaaatttgcaactgtgaataaaaggacttctttagaagaagcttcatttaaaacatgaaaggataatctgacttaagaaactttttgctaagaaaaggtaatattttattaaattttaaatttgtgttgtcacagaaatacctgaaattcagtagtacttcattcaattaattttgttttctattattttgagttatactgttttcaaagtcattatgcagtatgtataaacttataagaattaaattgatgtgataattttatgtttttataattaaatatagaatcttta

SEQ ID NO: 33536 - DNA, 1188 bp, Artificial Sequence
  derived and/or modified sequence
atggacgaggagcccgagcggaccaagcggtgggagggcggctacgagcgtacctgggagatactgaaagaggatgaatccggctcgctcaaagccactattgaagacatcttatttaaggccaagcggaaacgggtttttgaacaccacggccaggttcgccttggtatgatgcgtcacctgtacgtcgttgtggacggtagccgtacgatggaggatcaggatctgaagcctaaccgcttaacttgcaccctgaaactcctagagtacttcgtcgaagagtatttcgaccagaaccctattagccagatcggtattatcgtcacaaaaagtaaaagagcagaaaaactgaccgagttgtcgggcaacccccgcaaacacattaccagcctgaaggaggctgttgatatgacttgtcacggggagccaagcctatacaacagtctttccatggccatgcagacgctcaaacatatgccaggtcacactagtcgggaagtcctgatcatcttttctagccttacaacttgtgacccttcaaatatctacgacctgattaagactcttaaggcagccaagattcgcgtatccgtcatcggtttgtctgcggaggtaagagtatgcaccgtactcgcccgggaaactggcgggacgtatcatgtcatcttggatgagtcacattacaaggagctcttgacgcatcacctgtctcctccccccgcctctagcagctctgagtgtagtttaatccggatgggctttccgcagcacaccattgcctccttgagcgatcaggacgccaagccttccttcagcatggctcatctggacggtaataccgagcctgggctcactctgggtggctacttttgccctcagtgccgcgcaaagtattgcgagctgccagtggaatgtaagatttgtggcttgacacttgtgagtgcccctcatctggcgagaagctatcaccacctgtttcctcttgacgctttccaggagattccacttgaggagtataacggtgagcgtttctgctacggttgccagggagagctgaaagatcagcacgtgtacgtgtgcgcagtgtgtcagaatgtcttctgcgttgactgcgacgtctttgtacacgactccttgcactgttgtcctggttgtattcataagatccccgcaccatcaggcgtttag

SEQ ID NO: 33537 - DNA, 1188 bp, Artificial Sequence
  derived and/or modified sequence
atggatgaagagcccgagcggaccaagcgttgggagggagggtacgaaaggacttgggagattctaaaggaggacgagtccgggagtcttaaagccaccatcgaagacatcctttttaaagcgaaaagaaagagagtgttcgaacaccatggtcaggtcaggctgggcatgatgagacacttgtatgtggtcgtggacggctctcgcacgatggaagaccaggatctgaagcccaatcgcctcacttgcaccttgaaattgctcgaatatttcgtggaggagtattttgatcagaatccgatcagccagattggcatcatcgtgacaaagagcaagagggccgagaagttaacagagctgtcaggtaatcctaggaaacacattacctcattaaaggaagcagtggacatgacatgccatggcgagccctctctgtataacagcctgagtatggcaatgcagaccctgaaacatatgccaggccacacatcacgcgaagtcctgattatcttctcatctcttaccacatgcgatccttctaacatttacgacttaattaaaaccctcaaagccgctaagattcgcgtcagtgtgatcgggctttccgcagaggttcgcgtctgtactgtgcttgctagagagaccggtgggacgtaccatgtgatactcgacgagagccattacaaggaactgctgacccatcaccttagtcccccacctgcctcttcaagttcagagtgcagcctgattaggatgggctttccacagcacactatcgccagcctgtctgaccaggatgccaaaccaagcttctcaatggctcacctggacggaaacacagagccaggcctgactctgggaggctacttttgtccccagtgtagagccaagtactgtgagcttcctgtcgaatgcaagatttgtggcttgacattggtgtctgctccccatttagcaaggagctaccaccacctgtttcctctggatgcctttcaagaaattcccctcgaggagtataacggggagagattttgctacggctgccagggggagcttaaagaccaacatgtctatgtgtgcgctgtttgtcagaatgtgttctgtgtggactgtgacgtcttcgtgcacgattctctgcactgctgtcctggttgcatacacaagatcccggcaccttcaggcgtgtag

SEQ ID NO: 33538 - protein, 2839 aa, Artificial Sequence
  derived and/or modified sequence
MAAHRPVEWVQAVVSRFDEQLPIKTGQQNTHTKVSTEHNKECLINISKYKFSLVISGLTTILKNVNNMRIFGEAAEKNLYLSQLIILDTLEKCLAGQPKDTMRLDETMLVKQLLPEICHFLHTCREGNQHAAELRNSASGVLFSLSCNNFNAVFSRISTRLQELTVCSEDNVDVHDIELLQYINVDCAKLKRLLKETAFKFKALKKVAQLAVINSLEKAFWNWVENYPDEFTKLYQIPQTDMAECAEKLFDLVDGFAESTKRKAAVWPLQIILLILCPEIIQDISKDVVDENNMNKKLFLDSLRKALAGHGGSRQLTESAAIACVKLCKASTYINWEDNSVIFLLVQSMVVDLKNLLFNPSKPFSRGSQPADVDLMIDCLVSCFRISPHNNQHFKICLAQNSPSTFHYVLVNSLHRIITNSALDWWPKIDAVYCHSVELRNMFGETLHKAVQGCGAHPAIRMAPSLTFKEKVTSLKFKEKPTDLETRSYKYLLLSMVKLIHADPKLLLCNPRKQGPETQGSTAELITGLVQLVPQSHMPEIAQEAMEALLVLHQLDSIDLWNPDAPVETFWEISSQMLFYICKKLTSHQMLSSTEILKWLREILICRNKFLLKNKQADRSSCHFLLFYGVGCDIPSSGNTSQMSMDHEELLRTPGASLRKGKGNSSMDSAAGCSGTPPICRQAQTKLEVALYMFLWNPDTEAVLVAMSCFRHLCEEADIRCGVDEVSVHNLLPNYNTFMEFASVSNMMSTGRAALQKRVMALLRRIEHPTAGNTEAWEDTHAKWEQATKLILNYPKAKMEDGQAAESLHKTIVKRRMSHVSGGGSIDLSDTDSLQEWINMTGFLCALGGVCLQQRSNSGLATYSPPMGPVSERKGSMISVMSSEGNADTPVSKFMDRLLSLMVCNHEKVGLQIRTNVKDLVGLELSPALYPMLFNKLKNTISKFFDSQGQVLLTDTNTQFVEQTIAIMKNLLDNHTEGSSEHLGQASIETMMLNLVRYVRVLGNMVHAIQIKTKLCQLVEVMMARRDDLSFCQEMKFRNKMVEYLTDWVMGTSNQAADDDVKCLTRDLDQASMEAVVSLLAGLPLQPEEGDGVELMEAKSQLFLKYFTLFMNLLNDCSEVEDESAQTGGRKRGMSRRLASLRHCTVLAMSNLLNANVDSGLMHSIGLGYHKDLQTRATFMEVLTKILQQGTEFDTLAETVLADRFERLVELVTMMGDQGELPIAMALANVVPCSQWDELARVLVTLFDSRHLLYQLLWNMFSKEVELADSMQTLFRGNSLASKIMTFCFKVYGATYLQKLLDPLLRIVITSSDWQHVSFEVDPTRLEPSESLEENQRNLLQMTEKFFHAIISSSSEFPPQLRSVCHCLYQATCHSLLNKATVKEKKENKKSVVSQRFPQNSIGAVGSAMFLRFINPAIVSPYEAGILDKKPPPRIERGLKLMSKILQSIANHVLFTKEEHMRPFNDFVKSNFDAARRFFLDIASDCPTSDAVNHSLSFISDGNVLALHRLLWNNQEKIGQYLSSNRDHKAVGRRPFDKMATLLAYLGPPEHKPVADTHWSSLNLTSSKFEEFMTRHQVHEKEEFKALKTLSIFYQAGTSKAGNPIFYYVARRFKTGQINGDLLIYHVLLTLKPYYAKPYEIVVDLTHTGPSNRFKTDFLSKWFVVFPGFAYDNVSAVYIYNCNSWVREYTKYHERLLTGLKGSKRLVFIDCPGKLAEHIEHEQQKLPAATLALEEDLKVFHNALKLAHKDTKVSIKVGSTAVQVTSAERTKVLGQSVFLNDIYYASEIEEICLVDENQFTLTIANQGTPLTFMHQECEAIVQSIIHIRTRWELSQPDSIPQHTKIRPKDVPGTLLNIALLNLGSSDPSLRSAAYNLLCALTCTFNLKIEGQLLETSGLCIPANNTLFIVSISKTLAANEPHLTLEFLEECISGFSKSSIELKHLCLEYMTPWLSNLVRFCKHNDDAKRQRVTAILDKLITMTINEKQMYPSIQAKIWGSLGQITDLLDVVLDSFIKTSATGGLGSIKAEVMADTAVALASGNVKLVSSKVIGRMCKIIDKTCLSPTPTLEQHLMWDDIAILARYMLMLSFNNSLDVAAHLPYLFHVVTFLVATGPLSLRASTHGLVINIIHSLCTCSQLHFSEETKQVLRLSLTEFSLPKFYLLFGISKVKSAAVIAFRSSYRDRSFSPGSYERETFALTSLETVTEALLEIMEACMRDIPTCKWLDQWTELAQRFAFQYNPSLQPRALVVFGCISKRVSHGQIKQIIRILSKALESCLKGPDTYNSQVLIEATVIALTKLQPLLNKDSPLHKALFWVAVAVLQLDEVNLYSAGTALLEQNLHTLDSLRIFNDKSPEEVFMAIRNPLEWHCKQMDHFVGLNFNSNFNFALVGHLLKGYRHPSPAIVARTVRILHTLLTLVNKHRNCDKFEVNTQSVAYLAALLTVSEEVRSRCSLKHRKSLLLTDISMENVPMDTYPIHHGDPSYRTLKETQPWSSPKGSEGYLAATYPTVGQTSPRARKSMSLDMGQPSQANTKKLLGTRKSFDHLISDTKAPKRQEMESGITTPPKMRRVAETDYEMETQRISSSQQHPHLRKVSVSESNVLLDEEVLTDPKIQALLLTVLATLVKYTTDEFDQRILYEYLAEASVVFPKVFPVVHNLLDSKINTLLSLCQDPNLLNPIHGIVQSVVYHEESPPQYQTSYLQSFGFNGLWRFAGPFSKQTQIPDYAELIVKFLDALIDTYLPGIDEETSEESLLTPTSPYPPALQSQLSITANLNLSNSMTSLATSQHSPGIDKENVELSPTTGHCNSGRTRHGSASQVQKQRSAGSFKRNSIKKIV

SEQ ID NO: 33539 - DNA, 8520 bp, Artificial Sequence
  derived and/or modified sequence
atggccgcccacagacccgtggagtgggtgcaggccgtggtgagcagattcgacgagcagctgcccatcaagaccggccagcagaacacccacaccaaggtgagcaccgagcacaacaaggagtgcctgatcaacatcagcaagtacaagttcagcctggtgatcagcggcctgaccaccatcctgaagaacgtgaacaacatgagaatcttcggcgaggccgccgagaagaacctgtacctgagccagctgatcatcctggacaccctggagaagtgcctggccggccagcccaaggacaccatgagactggacgagaccatgctggtgaagcagctgctgcccgagatctgccacttcctgcacacctgcagagagggcaaccagcacgccgccgagctgagaaacagcgccagcggcgtgctgttcagcctgagctgcaacaacttcaacgccgtgttcagcagaatcagcaccagactgcaggagctgaccgtgtgcagcgaggacaacgtggacgtgcacgacatcgagctgctgcagtacatcaacgtggactgcgccaagctgaagagactgctgaaggagaccgccttcaagttcaaggccctgaagaaggtggcccagctggccgtgatcaacagcctggagaaggccttctggaactgggtggagaactaccccgacgagttcaccaagctgtaccagatcccccagaccgacatggccgagtgcgccgagaagctgttcgacctggtggacggcttcgccgagagcaccaagagaaaggccgccgtgtggcccctgcagatcatcctgctgatcctgtgccccgagatcatccaggacatcagcaaggacgtggtggacgagaacaacatgaacaagaagctgttcctggacagcctgagaaaggccctggccggccacggcggcagcagacagctgaccgagagcgccgccatcgcctgcgtgaagctgtgcaaggccagcacctacatcaactgggaggacaacagcgtgatcttcctgctggtgcagagcatggtggtggacctgaagaacctgctgttcaaccccagcaagcccttcagcagaggcagccagcccgccgacgtggacctgatgatcgactgcctggtgagctgcttcagaatcagcccccacaacaaccagcacttcaagatctgcctggcccagaacagccccagcaccttccactacgtgctggtgaacagcctgcacagaatcatcaccaacagcgccctggactggtggcccaagatcgacgccgtgtactgccacagcgtggagctgagaaacatgttcggcgagaccctgcacaaggccgtgcagggctgcggcgcccaccccgccatcagaatggcccccagcctgaccttcaaggagaaggtgaccagcctgaagttcaaggagaagcccaccgacctggagaccagaagctacaagtacctgctgctgagcatggtgaagctgatccacgccgaccccaagctgctgctgtgcaaccccagaaagcagggccccgagacccagggcagcaccgccgagctgatcaccggcctggtgcagctggtgccccagagccacatgcccgagatcgcccaggaggccatggaggccctgctggtgctgcaccagctggacagcatcgacctgtggaaccccgacgcccccgtggagaccttctgggagatcagcagccagatgctgttctacatctgcaagaagctgaccagccaccagatgctgagcagcaccgagatcctgaagtggctgagagagatcctgatctgcagaaacaagttcctgctgaagaacaagcaggccgacagaagcagctgccacttcctgctgttctacggcgtgggctgcgacatccccagcagcggcaacaccagccagatgagcatggaccacgaggagctgctgagaacccccggcgccagcctgagaaagggcaagggcaacagcagcatggacagcgccgccggctgcagcggcaccccccccatctgcagacaggcccagaccaagctggaggtggccctgtacatgttcctgtggaaccccgacaccgaggccgtgctggtggccatgagctgcttcagacacctgtgcgaggaggccgacatcagatgcggcgtggacgaggtgagcgtgcacaacctgctgcccaactacaacaccttcatggagttcgccagcgtgagcaacatgatgagcaccggcagagccgccctgcagaagagagtgatggccctgctgagaagaatcgagcaccccaccgccggcaacaccgaggcctgggaggacacccacgccaagtgggagcaggccaccaagctgatcctgaactaccccaaggccaagatggaggacggccaggccgccgagagcctgcacaagaccatcgtgaagagaagaatgagccacgtgagcggcggcggcagcatcgacctgagcgacaccgacagcctgcaggagtggatcaacatgaccggcttcctgtgcgccctgggcggcgtgtgcctgcagcagagaagcaacagcggcctggccacctacagcccccccatgggccccgtgagcgagagaaagggcagcatgatcagcgtgatgagcagcgagggcaacgccgacacccccgtgagcaagttcatggacagactgctgagcctgatggtgtgcaaccacgagaaggtgggcctgcagatcagaaccaacgtgaaggacctggtgggcctggagctgagccccgccctgtaccccatgctgttcaacaagctgaagaacaccatcagcaagttcttcgacagccagggccaggtgctgctgaccgacaccaacacccagttcgtggagcagaccatcgccatcatgaagaacctgctggacaaccacaccgagggcagcagcgagcacctgggccaggccagcatcgagaccatgatgctgaacctggtgagatacgtgagagtgctgggcaacatggtgcacgccatccagatcaagaccaagctgtgccagctggtggaggtgatgatggccagaagagacgacctgagcttctgccaggagatgaagttcagaaacaagatggtggagtacctgaccgactgggtgatgggcaccagcaaccaggccgccgacgacgacgtgaagtgcctgaccagagacctggaccaggccagcatggaggccgtggtgagcctgctggccggcctgcccctgcagcccgaggagggcgacggcgtggagctgatggaggccaagagccagctgttcctgaagtacttcaccctgttcatgaacctgctgaacgactgcagcgaggtggaggacgagagcgcccagaccggcggcagaaagagaggcatgagcagaagactggccagcctgagacactgcaccgtgctggccatgagcaacctgctgaacgccaacgtggacagcggcctgatgcacagcatcggcctgggctaccacaaggacctgcagaccagagccaccttcatggaggtgctgaccaagatcctgcagcagggcaccgagttcgacaccctggccgagaccgtgctggccgacagattcgagagactggtggagctggtgaccatgatgggcgaccagggcgagctgcccatcgccatggccctggccaacgtggtgccctgcagccagtgggacgagctggccagagtgctggtgaccctgttcgacagcagacacctgctgtaccagctgctgtggaacatgttcagcaaggaggtggagctggccgacagcatgcagaccctgttcagaggcaacagcctggccagcaagatcatgaccttctgcttcaaggtgtacggcgccacctacctgcagaagctgctggaccccctgctgagaatcgtgatcaccagcagcgactggcagcacgtgagcttcgaggtggaccccaccagactggagcccagcgagagcctggaggagaaccagagaaacctgctgcagatgaccgagaagttcttccacgccatcatcagcagcagcagcgagttccccccccagctgagaagcgtgtgccactgcctgtaccaggccacctgccacagcctgctgaacaaggccaccgtgaaggagaagaaggagaacaagaagagcgtggtgagccagagattcccccagaacagcatcggcgccgtgggcagcgccatgttcctgagattcatcaaccccgccatcgtgagcccctacgaggccggcatcctggacaagaagcccccccccagaatcgagagaggcctgaagctgatgagcaagatcctgcagagcatcgccaaccacgtgctgttcaccaaggaggagcacatgagacccttcaacgacttcgtgaagagcaacttcgacgccgccagaagattcttcctggacatcgccagcgactgccccaccagcgacgccgtgaaccacagcctgagcttcatcagcgacggcaacgtgctggccctgcacagactgctgtggaacaaccaggagaagatcggccagtacctgagcagcaacagagaccacaaggccgtgggcagaagacccttcgacaagatggccaccctgctggcctacctgggcccccccgagcacaagcccgtggccgacacccactggagcagcctgaacctgaccagcagcaagttcgaggagttcatgaccagacaccaggtgcacgagaaggaggagttcaaggccctgaagaccctgagcatcttctaccaggccggcaccagcaaggccggcaaccccatcttctactacgtggccagaagattcaagaccggccagatcaacggcgacctgctgatctaccacgtgctgctgaccctgaagccctactacgccaagccctacgagatcgtggtggacctgacccacaccggccccagcaacagattcaagaccgacttcctgagcaagtggttcgtggtgttccccggcttcgcctacgacaacgtgagcgccgtgtacatctacaactgcaacagctgggtgagagagtacaccaagtaccacgagagactgctgaccggcctgaagggcagcaagagactggtgttcatcgactgccccggcaagctggccgagcacatcgagcacgagcagcagaagctgcccgccgccaccctggccctggaggaggacctgaaggtgttccacaacgccctgaagctggcccacaaggacaccaaggtgagcatcaaggtgggcagcaccgccgtgcaggtgaccagcgccgagagaaccaaggtgctgggccagagcgtgttcctgaacgacatctactacgccagcgagatcgaggagatctgcctggtggacgagaaccagttcaccctgaccatcgccaaccagggcacccccctgaccttcatgcaccaggagtgcgaggccatcgtgcagagcatcatccacatcagaaccagatgggagctgagccagcccgacagcatcccccagcacaccaagatcagacccaaggacgtgcccggcaccctgctgaacatcgccctgctgaacctgggcagcagcgaccccagcctgagaagcgccgcctacaacctgctgtgcgccctgacctgcaccttcaacctgaagatcgagggccagctgctggagaccagcggcctgtgcatccccgccaacaacaccctgttcatcgtgagcatcagcaagaccctggccgccaacgagccccacctgaccctggagttcctggaggagtgcatcagcggcttcagcaagagcagcatcgagctgaagcacctgtgcctggagtacatgaccccctggctgagcaacctggtgagattctgcaagcacaacgacgacgccaagagacagagagtgaccgccatcctggacaagctgatcaccatgaccatcaacgagaagcagatgtaccccagcatccaggccaagatctggggcagcctgggccagatcaccgacctgctggacgtggtgctggacagcttcatcaagaccagcgccaccggcggcctgggcagcatcaaggccgaggtgatggccgacaccgccgtggccctggccagcggcaacgtgaagctggtgagcagcaaggtgatcggcagaatgtgcaagatcatcgacaagacctgcctgagccccacccccaccctggagcagcacctgatgtgggacgacatcgccatcctggccagatacatgctgatgctgagcttcaacaacagcctggacgtggccgcccacctgccctacctgttccacgtggtgaccttcctggtggccaccggccccctgagcctgagagccagcacccacggcctggtgatcaacatcatccacagcctgtgcacctgcagccagctgcacttcagcgaggagaccaagcaggtgctgagactgagcctgaccgagttcagcctgcccaagttctacctgctgttcggcatcagcaaggtgaagagcgccgccgtgatcgccttcagaagcagctacagagacagaagcttcagccccggcagctacgagagagagaccttcgccctgaccagcctggagaccgtgaccgaggccctgctggagatcatggaggcctgcatgagagacatccccacctgcaagtggctggaccagtggaccgagctggcccagagattcgccttccagtacaaccccagcctgcagcccagagccctggtggtgttcggctgcatcagcaagagagtgagccacggccagatcaagcagatcatcagaatcctgagcaaggccctggagagctgcctgaagggccccgacacctacaacagccaggtgctgatcgaggccaccgtgatcgccctgaccaagctgcagcccctgctgaacaaggacagccccctgcacaaggccctgttctgggtggccgtggccgtgctgcagctggacgaggtgaacctgtacagcgccggcaccgccctgctggagcagaacctgcacaccctggacagcctgagaatcttcaacgacaagagccccgaggaggtgttcatggccatcagaaaccccctggagtggcactgcaagcagatggaccacttcgtgggcctgaacttcaacagcaacttcaacttcgccctggtgggccacctgctgaagggctacagacaccccagccccgccatcgtggccagaaccgtgagaatcctgcacaccctgctgaccctggtgaacaagcacagaaactgcgacaagttcgaggtgaacacccagagcgtggcctacctggccgccctgctgaccgtgagcgaggaggtgagaagcagatgcagcctgaagcacagaaagagcctgctgctgaccgacatcagcatggagaacgtgcccatggacacctaccccatccaccacggcgaccccagctacagaaccctgaaggagacccagccctggagcagccccaagggcagcgagggctacctggccgccacctaccccaccgtgggccagaccagccccagagccagaaagagcatgagcctggacatgggccagcccagccaggccaacaccaagaagctgctgggcaccagaaagagcttcgaccacctgatcagcgacaccaaggcccccaagagacaggagatggagagcggcatcaccaccccccccaagatgagaagagtggccgagaccgactacgagatggagacccagagaatcagcagcagccagcagcacccccacctgagaaaggtgagcgtgagcgagagcaacgtgctgctggacgaggaggtgctgaccgaccccaagatccaggccctgctgctgaccgtgctggccaccctggtgaagtacaccaccgacgagttcgaccagagaatcctgtacgagtacctggccgaggccagcgtggtgttccccaaggtgttccccgtggtgcacaacctgctggacagcaagatcaacaccctgctgagcctgtgccaggaccccaacctgctgaaccccatccacggcatcgtgcagagcgtggtgtaccacgaggagagccccccccagtaccagaccagctacctgcagagcttcggcttcaacggcctgtggagattcgccggccccttcagcaagcagacccagatccccgactacgccgagctgatcgtgaagttcctggacgccctgatcgacacctacctgcccggcatcgacgaggagaccagcgaggagagcctgctgacccccaccagcccctacccccccgccctgcagagccagctgagcatcaccgccaacctgaacctgagcaacagcatgaccagcctggccaccagccagcacagccccggcatcgacaaggagaacgtggagctgagccccaccaccggccactgcaacagcggcagaaccagacacggcagcgccagccaggtgcagaagcagagaagcgccggcagcttcaagagaaacagcatcaagaagatcgtgtag

SEQ ID NO: 33540 - DNA, 8520 bp, Artificial Sequence
  derived and/or modified sequence
atggctgcccataggccggtcgaatgggttcaggctgtggtcagccggtttgacgagcagctacccattaagactggccagcagaacacacacactaaagtaagcaccgaacacaataaggagtgtctcattaacattagtaaatacaaattcagcttggttatctccggactgacgacgatcctgaagaacgtcaacaatatgcgaatctttggtgaagctgccgagaagaacctgtacctgtctcagctgatcatcctcgacactctggagaagtgtttagctggacagcccaaggacaccatgcggctggacgaaacaatgctggtcaaacaactactgcccgaaatctgtcattttttgcacacatgccgcgaagggaaccagcacgctgctgagttgaggaattccgcgagtggcgtgttattcagtctgagttgcaataactttaacgcggtgttttctcgcatctcaacccgcttgcaggagctgacagtgtgtagtgaagataacgtcgacgtgcatgacatcgagctgcttcagtacattaatgtggactgtgctaagcttaaaaggctcttgaaagagacagctttcaaattcaaagcgcttaagaaggtggctcagctggcagtaattaattctttagagaaggcattctggaactgggtggaaaattatcctgatgaattcaccaagttgtaccagataccacaaacagatatggcggaatgcgcagaaaagttgtttgatctggttgacggattcgcagagagtaccaagcgaaaagctgcggtttggccactccagattattctgttgattttgtgtccagagattatccaggatattagtaaagatgtggtggatgagaacaatatgaacaaaaagctgtttctggactctctccgcaaagctctggccggccacggaggatcgcgtcagctgaccgaatctgcagccatcgcctgtgtgaagctatgtaaagcctcaacctacattaactgggaagacaactctgttatttttctgctggtgcagagcatggtagtcgatttaaagaatttactctttaacccctcaaaacctttctcaaggggcagccagcccgccgacgtggacctgatgattgactgcctcgtcagctgtttcaggatctccccccacaacaatcaacattttaagatttgtctcgcccagaatagccccagcactttccactacgtgctcgtgaactctctccacagaattataactaatagcgccctggattggtggcccaagatcgatgccgtttactgtcactccgttgagcttagaaacatgttcggcgaaactctgcacaaagccgtccaggggtgtggcgcgcaccccgccatccggatggctcccagcctcactttcaaggagaaggttacaagcttgaaattcaaggagaagcctacagacttagagactaggtcttataaatatctgttgctgagcatggtcaagttgatacacgccgacccaaaacttcttttgtgcaatcctcgcaagcagggaccagaaacgcagggttccaccgctgaactcatcaccggactagtacaactggtcccccagagccacatgccggaaatcgcacaggaggctatggaggcgcttttagttctgcaccagctcgactctattgatctttggaatcctgacgcccccgttgaaacattctgggagatatccagtcaaatgctattctacatctgcaagaagctcaccagccatcagatgctgagctcaactgaaatccttaaatggttaagagaaatcctgatttgccgcaacaagtttctgctgaaaaacaaacaagccgacaggtcatcctgccatttcctgctattttacggcgtcggctgcgatatccccagctctgggaacacctcccagatgtcaatggaccatgaggagctgctgaggactcctggagctagcctgagaaaggggaagggtaatagttctatggactctgccgccggttgcagtggcacaccccccatatgcaggcaggcgcagactaagctggaagtggccctgtatatgttcctctggaatccagacacagaggccgtgctggtcgccatgagctgcttccgccacctctgtgaggaggccgacattcgttgcggagtggatgaagtctccgttcacaacctgcttcccaactataacacatttatggagtttgcaagcgtgtcaaacatgatgagcacagggagggctgccctgcagaaaagggtgatggccttgctgaggcgtattgaacatcccacagctggtaataccgaggcatgggaggacactcacgccaagtgggagcaggctaccaagctgatactgaactatccaaaggccaaaatggaagacggtcaggccgctgagagcctccataagactattgtcaagagaaggatgagccatgtttcaggaggaggaagcattgacctcagcgacaccgatagccttcaggagtggataaatatgacaggcttcttgtgtgcactgggtggcgtttgtttgcagcagaggagtaattccggcctcgccacctacagcccaccaatggggcctgtttcagaacgcaaagggagcatgatatcagtcatgagttccgagggtaatgctgacactccagtttccaagttcatggaccgcctgctgtcactcatggtatgcaatcatgagaaggtgggcttgcagatccgaacaaacgttaaagatctcgttgggctcgaactgtctcccgctctgtatcccatgctgtttaacaaactgaaaaacacaatatcaaaatttttcgattcccagggccaggtattgttaactgatacaaacactcagtttgtggaacaaactatcgccattatgaagaatctcttggataatcacactgaggggagctccgaacatttggggcaggcgtcaattgagaccatgatgctgaacctagtgcggtacgtgagagtattgggaaatatggtccatgcgatccagattaagacaaagctttgccagctcgttgaagtcatgatggctcgccgcgacgatctctctttctgccaggaaatgaaattcaggaataagatggtggagtatctcactgactgggttatgggcacaagtaaccaagcggccgatgatgatgtgaagtgtttaacgagagacctggatcaggcctccatggaggctgtcgtaagcctgcttgccggcctacccttgcagccagaggagggagacggcgtcgagttgatggaagcaaagtcccagctgttcctgaagtacttcaccctttttatgaacttgctcaacgactgctctgaggttgaggatgaatctgcgcagactggtggaagaaagagggggatgagtcggaggcttgcgagtctgcggcattgtactgtcctggccatgtccaacctgctgaacgccaacgtggacagtgggctcatgcactctatcggactcggctaccataaggacctgcagacccgggccacttttatggaggttctcaccaaaatactgcagcagggcactgaattcgacactctggccgaaacagtgctggcagatcggtttgaaagactcgtggaactagtgacaatgatgggcgatcagggagagttgccgatcgctatggcactggccaatgtcgtgccttgcagtcaatgggatgagttagcccgggtactagtgacactgttcgacagccggcacctgctttatcagctcttgtggaacatgttcagtaaagaggtggaactagcagacagcatgcagactctttttcgcggaaattctctggcctcaaaaattatgacgttctgcttcaaagtttacggagccacttatctgcaaaagttgctagatccattgttgcgcatcgtgatcacctcaagcgactggcagcacgtgtcttttgaagtggacccaacacggctggagccttccgagagtttagaggaaaaccagcggaatctgttacagatgactgaaaagttcttccacgcgatcatcagcagttcttccgaatttcccccacaactgcggagcgtttgtcactgcttgtatcaggccacatgtcacagcttgctgaacaaggcgaccgttaaggaaaagaaggaaaataaaaaaagtgttgtctcccaaaggtttccacaaaattctataggagctgtgggttcagccatgtttctgagatttattaaccctgcaattgtgagcccctacgaggccggcatactggacaaaaagccccctcccaggatagaacgcggcctgaaattgatgagtaaaattctgcaatcaattgctaaccacgtgttgttcaccaaggaggaacacatgagaccatttaatgactttgtgaaatcaaacttcgatgccgccaggcgtttctttctggacatcgcatccgactgtccaacttccgacgccgtgaaccacagtctcagcttcatatccgacggcaacgtcctcgcccttcacaggctcctgtggaacaaccaggagaaaattggacagtatttgtctagtaatcgcgatcacaaggcggtggggaggaggccttttgacaagatggcgacattgctggcttatctgggccctccagagcacaaaccggtcgctgacacgcactggtctagcctgaatctgaccagtagtaaatttgaggaattcatgaccaggcatcaagtgcatgagaaggaggaattcaaagccctgaagacactttcgatcttctaccaagctggtacctctaaggctggaaatcccattttctattatgtggccagaaggttcaaaacaggccagatcaacggggatcttcttatctatcatgtcttgctgacactgaagccgtactacgccaagccgtatgagattgtagtggacctgacccataccggacccagcaatcgattcaaaacggacttcctttcaaagtggtttgtggtcttccctggatttgcatacgataacgttagtgctgtgtacatttacaattgtaactcctgggtgagggaatatacgaaataccacgagagactgctgacgggccttaaaggtagcaaaaggcttgttttcatagactgccccggaaaacttgcagaacacatcgaacatgagcagcagaaattgccagcggccacacttgctcttgaggaagatcttaaggtgtttcacaacgctctgaagttagcgcataaagataccaaggtttctatcaaggtgggctctaccgcagttcaggtgacttctgccgaaaggacaaaagtgctgggccagtctgtgtttctcaatgatatttactatgcgagcgaaattgaagaaatatgcctcgtcgacgaaaaccagtttacacttactatagctaaccagggaacacctttaactttcatgcaccaggagtgcgaggcaattgttcagtctatcatccacattcgcacaagatgggagctcagccagccagactcaatccctcagcacacaaagattcgaccaaaggatgtcccaggcaccttactgaatattgccctgttgaatctgggcagttctgatccgagtcttaggagcgccgcctacaacctgttatgcgcactgacctgtacctttaatttgaaaatagagggacagttgctggagacctctgggttatgtatcccggccaataacacactattcattgtgtcaatcagcaaaaccctagcagcaaacgagccccacctcacactcgagttcctggaggagtgtatttctggcttctccaaatcctccatcgaactgaagcatctttgcctcgagtacatgaccccatggctgtcgaacttggtacggttctgtaagcacaatgacgacgcaaagcggcagagggtgacagctatccttgacaagctgattaccatgactatcaatgagaaacaaatgtacccctccatacaggctaagatatgggggagtctgggacaaataacagaccttttggacgtcgtgctggattctttcattaagacttcagccaccggagggctcggttctattaaagctgaggtgatggctgacaccgctgtggctcttgcatccggcaacgttaagctggtttcctctaaggttatcggaagaatgtgcaagattatcgacaagacctgcctgtcacctaccccaactctcgagcaacacctgatgtgggatgacatagccatcctggcacggtacatgctcatgctgtctttcaacaactccctcgacgtggcagcccacttaccatacctcttccacgtggtgacgtttctcgtcgctacaggacccctgagtttgcgggcctctacgcacgggctggtgatcaatatcatacactctctttgcacgtgttctcagctgcatttctcagaggaaacaaaacaggtcttgcgtctgtcccttactgaattttcactgccgaagttctacctgctgttcggaattagcaaagtgaaatctgctgcagttatagctttccgctcgtcatatcgggaccgctctttcagcccagggtcctatgagcgtgaaacattcgcgctgaccagtctggagacggtcaccgaggccttgcttgaaataatggaggcttgcatgcgggatatccctacttgcaaatggctggaccagtggacagaactggcgcagagattcgctttccagtataatccttcccttcaacctcgggcattagtcgtttttggatgcatcagcaaaagggtcagtcacggacagatcaagcaaattatcaggatactgtcaaaagcgctggagtcctgtctgaaaggtcctgacacttacaatagtcaggtcctgatcgaggccaccgttatagcccttacaaagctccagcctctgcttaacaaggattcaccactccataaggccctgttttgggttgctgtggcggttctgcagttggatgaagttaacctgtactcggcagggacagcgctcctcgaacaaaacctccataccctagattcattaagaatttttaacgacaaatctccggaagaggtattcatggcaattagaaacccgctcgagtggcattgcaagcaaatggaccacttcgtcggtctcaactttaatagcaactttaacttcgctctggtggggcatttgctgaaggggtacaggcaccccagtcccgccatcgtggccagaaccgtgcgcatactgcacaccctactgaccctggtcaacaagcacaggaattgcgacaaattcgaggtgaatacacagtctgtcgcctacctggcggcgctgctaaccgtaagtgaagaagtgaggtctcgttgcagccttaaacacaggaaatctttgctgctaaccgatattagtatggagaatgtccctatggacacctaccccatccatcacggcgacccgtcatatcgtaccctcaaggagacccaaccttggagcagccctaaagggagcgaaggttatctggcagctacttatccaaccgtaggtcagacaagtcccagggccaggaaatcgatgtctctggacatgggtcaaccatcccaggctaataccaaaaaactgctgggaaccaggaaatcatttgaccatttaattagcgacacaaaggcaccaaagagacaagagatggaatccggtataacaacacctccaaaaatgaggagagtggctgagacagactatgagatggaaactcagcggatttctagctcccaacagcacccgcacttgcggaaggtgtcagtgtccgagtcaaatgtgctactggatgaggaggtgttaactgatccaaagatccaagcactgttactcactgttttagccactcttgtcaaatacaccactgatgaatttgaccagcgcattctttatgagtacttggccgaggcttccgtcgtgttcccaaaggtgttccccgtggtacacaacctgttggattccaagatcaataccctgctgagcctgtgtcaggatccaaatcttctgaatccaatccacggcattgtgcagtcagtcgtataccatgaggaaagcccccctcaataccagacctcctacctgcaaagcttcgggtttaacggactatggagatttgccggccccttttccaagcagacccagattcccgactatgcagaactcattgttaagttcctcgatgcgttaatcgatacttatctgccagggatcgacgaagagacgtctgaagagagcctgttgactcccacgtcaccatatcctccagctctgcagtctcaactgtccataacagccaacctaaacctgagcaattccatgacatccctagctaccagtcagcactcaccaggcatcgataaagaaaacgtcgagctgtcaccaacgacaggacattgcaactctggtcggacaaggcatgggagcgcatctcaggttcagaaacagagatccgcgggttcttttaaacgaaacagcataaaaaagattgtctag

SEQ ID NO: 33541 - DNA, 8520 bp, Artificial Sequence
  derived and/or modified sequence
atggccgcccacaggcctgtggagtgggtgcaggccgtggtgtccagatttgatgagcagctgcccatcaagacaggccagcagaacacccacaccaaggtgtccacagagcacaacaaggaatgtctcatcaacatcagcaagtacaagttcagcctggtgatcagcggcctgaccaccatcctgaagaatgtgaacaacatgaggatctttggagaggccgctgagaagaacctgtacctgagccagctgatcatcctggacaccctggagaagtgcctggccggccagcccaaggacaccatgaggctggatgagaccatgctggtgaagcagctgctgcctgagatctgccacttcctgcacacctgccgggagggcaaccagcacgccgctgagctgagaaattctgccagcggcgtgctcttcagcctgagctgcaacaacttcaatgctgtgttcagccgcatcagcacccggctgcaggagctgactgtgtgcagtgaagataatgtggatgtgcatgacatcgagctgctgcagtacatcaacgtggactgtgccaagctgaagaggctgctgaaggagacagccttcaagttcaaggccctgaagaaggtggcccagctggccgtcatcaacagcctggagaaggccttctggaactgggtggagaactacccagatgagttcaccaagctgtaccagatcccccagacagacatggccgagtgtgccgagaagctgtttgacctggtggatggctttgctgagagcaccaagaggaaggctgctgtgtggcccctgcagatcatcctgctgatcctgtgcccagagatcatccaggacatcagcaaggatgtggtggatgagaacaacatgaacaagaagctgttcctggacagcctgaggaaggccctggccggccacggcggcagccggcagctgacagaatctgctgccatcgcctgtgtgaagctgtgcaaggccagcacctacatcaactgggaggacaacagcgtcatcttcctgctggtgcagagcatggtggtggacctgaagaacctgctcttcaaccccagcaagcccttcagccggggcagccagcctgcagatgtggacctgatgattgactgcctggtgtcctgcttccgcatcagcccccacaacaaccagcacttcaagatctgcctggcccagaacagccccagcaccttccactacgtgctggtgaacagcctgcaccgcatcatcaccaacagcgccctggactggtggcccaagattgatgctgtgtactgccacagcgtggagctgaggaacatgtttggagagaccctgcacaaggctgtgcagggctgtggggcccacccagccatccgcatggcccccagcctgaccttcaaggagaaggtgaccagcctgaagttcaaggagaagcccacagacctggagaccaggagctacaagtacctgctgctgtccatggtgaagctgattcatgctgaccccaagctgctgctgtgcaaccccaggaagcagggccctgagacccagggcagcacagctgagctgatcaccggcctggtgcagctggtgccccagagccacatgcctgagatcgcccaggaggccatggaggccctgctggtgctgcaccagctggacagcattgacctgtggaacccagatgcccctgtggagaccttctgggagatcagcagccagatgctgttctacatctgcaagaagctgaccagccaccagatgctgagcagcacagagatcctgaagtggctgcgggagatcctgatctgcaggaacaagttcctgctgaagaacaagcaggccgacaggagcagctgccacttcctgctcttctacggcgtgggctgtgacatccccagcagcggcaacaccagccagatgtccatggaccacgaggagctgctgcggacccctggggccagcctgaggaagggcaagggcaacagctccatggattctgctgctggctgcagcggcaccccacccatctgccggcaggcccagaccaagctggaggtggccctgtacatgttcctgtggaacccagacacagaggccgtgctggtggccatgagctgcttccgccacctgtgtgaggaggccgacatccgctgtggggtggatgaggtgtctgtgcacaacctgctgcccaactacaacaccttcatggagtttgcctctgtgagcaacatgatgagcacaggccgggccgccctgcagaagagggtgatggccctgctgcggcgcatcgagcaccccacagctggcaacacagaggcctgggaggacacccacgccaagtgggagcaggccaccaagctgatcctgaactaccccaaggccaagatggaggatggccaggccgctgagagcctgcacaagaccatcgtgaagaggaggatgagccacgtgtctgggggcggcagcattgacctgagtgacacagacagcctgcaggagtggatcaacatgacaggcttcctgtgtgccctgggcggcgtgtgcctgcagcagaggagcaacagcggcctggccacctacagcccccccatgggccctgtgtctgagaggaagggctccatgatctctgtgatgagcagcgagggcaatgctgacacccctgtgtccaagttcatggaccggctgctgagcctgatggtgtgcaaccacgagaaggtgggcctgcagatccgcaccaacgtgaaggacctggtgggcctggagctgagccctgccctgtaccccatgctgttcaacaagctgaagaacaccatcagcaagttctttgacagccagggccaggtgctgctgacagacaccaacacccagtttgtggagcagaccatcgccatcatgaagaacctgctggacaaccacacagagggcagcagcgagcacctgggccaggccagcattgagaccatgatgctgaacctggtgcgctacgtgcgggtgctgggcaacatggtgcacgccatccagatcaagaccaagctgtgccagctggtggaggtgatgatggccaggagagatgacctgtccttctgccaggagatgaagttcaggaacaagatggtggagtacctgacagactgggtgatgggcaccagcaaccaggccgcagatgatgatgtgaagtgcctgacccgggacctggaccaggcctccatggaggccgtggtgtccctgctggccggcctgcccctgcagcctgaggagggagatggagtggagctgatggaggccaagagccagctgttcctgaagtacttcaccctcttcatgaacctgctgaatgactgcagcgaggtggaggatgagagcgcccagacaggaggcaggaagaggggcatgagccggcggctggccagcctgcggcactgcaccgtgctggccatgagcaacctgctgaatgccaacgtggacagcggcctgatgcacagcatcggcctgggctaccacaaggacctgcagacccgggccaccttcatggaggtgctgaccaagatcctgcagcagggcacagaatttgacaccctggccgagaccgtgctggccgacagatttgagcggctggtggagctggtgaccatgatgggagaccagggcgagctgcccatcgccatggccctggccaacgtggtgccctgcagccagtgggatgagctggcccgggtgctggtgaccctgtttgacagccgccacctgctgtaccagctgctgtggaacatgttcagcaaggaggtggagctggccgacagcatgcagaccctcttccggggcaacagcctggccagcaagatcatgaccttctgcttcaaggtgtatggagccacctacctgcagaagctgctggaccccctgctgagaattgtcatcaccagcagtgactggcagcacgtgtcctttgaggtggaccccacccggctggagcccagcgagagcctggaggagaaccagaggaacctgctgcagatgacagagaagttcttccacgccatcatcagcagcagcagcgagttccccccccagctgcggtctgtgtgccactgcctgtaccaggccacctgccacagcctgctgaacaaggccaccgtgaaggagaagaaggagaacaagaagtctgtggtgtcccagcgcttcccccagaacagcatcggggctgtgggcagcgccatgttcctgcgcttcatcaacccagccatcgtgagcccctatgaggccggcatcctggacaagaagcccccaccaagaattgagcggggcctgaagctgatgagcaagatcctgcagagcatcgccaaccacgtgctcttcaccaaggaggagcacatgaggcccttcaatgactttgtgaagagcaactttgatgctgcccggcgcttcttcctggacatcgccagtgactgccccaccagtgatgctgtgaaccacagcctgtccttcatcagtgatggaaatgtgctggccctgcaccggctgctgtggaacaaccaggagaagattggccagtacctgagcagcaacagagaccacaaggctgtgggcagaagaccatttgacaagatggccaccctgctggcctacctgggccccccagagcacaagcctgtggccgacacccactggagcagcctgaacctgaccagcagcaagtttgaggagttcatgaccaggcaccaggtgcatgagaaggaggagttcaaggccctgaagaccctgagcatcttctaccaggccggcaccagcaaggccggcaaccccatcttctactacgtggcccggcgcttcaagacaggccagatcaatggagacctgctgatctaccacgtgctgctgaccctgaagccctactatgccaagccctatgaaattgtggtggacctgacccacacaggccccagcaaccgcttcaagacagacttcctgagcaagtggtttgtggtgtttcctggctttgcctatgacaacgtgtctgctgtgtacatctacaactgcaacagctgggtgcgggagtacaccaagtaccacgagcggctgctgaccggcctgaagggcagcaagaggctggtgttcatcgactgccctgggaagctggccgagcacattgaacatgagcagcagaagctgcctgctgccaccctggccctggaggaggacctgaaggtgttccacaatgccctgaagctggcccacaaggacaccaaggtgtccatcaaggtgggcagcacagctgtgcaggtgaccagcgctgagaggaccaaggtgctgggccagagcgtcttcctgaatgacatctactatgccagcgagattgaggagatctgcctggtggatgagaaccagttcaccctgaccatcgccaaccagggcacccccctgaccttcatgcaccaggagtgtgaggccatcgtgcagagcatcatccacatccgcacccgctgggagctgagccagcctgacagcatcccccagcacaccaagatccggcccaaggatgtgcccggcaccctgctgaacatcgccctgctgaacctgggcagcagtgaccccagcctgcggtctgctgcctacaacctgctgtgtgccctgacctgcaccttcaacctgaagattgagggccagctgctggagaccagcggcctgtgcatcccagccaacaacaccctcttcatcgtgtccatcagcaagaccctggccgccaatgagccccacctgaccctggagttcctggaggagtgcatcagcggcttcagcaagagcagcattgagctgaagcacctgtgcctggagtacatgaccccctggctgagcaacctggtgcgcttctgcaagcacaatgatgatgccaagaggcagagggtgacagccatcctggacaagctgatcaccatgaccatcaatgagaagcagatgtaccccagcatccaggccaagatctggggcagcctgggccagatcacagacctgctggatgtggtgctggacagcttcatcaagaccagcgccaccggcggcctgggcagcatcaaggccgaggtgatggctgacacagctgtggccctggccagcggaaatgtgaagctggtgagcagcaaggtgattggaaggatgtgcaagatcatcgacaagacctgcctgagccccacccccaccctggagcagcacctgatgtgggatgacatcgccatcctggcccgctacatgctgatgctgtccttcaacaacagcctggatgtggccgcccacctgccctacctgttccacgtggtgaccttcctggtggccaccggccccctgagcctgcgggccagcacccacggcctggtgatcaacatcatccacagcctgtgcacctgcagccagctgcacttcagcgaggagaccaagcaggtgctgcggctgagcctgacagagttcagcctgcccaagttctacctgctgtttggcatcagcaaggtgaagtctgctgctgtgattgccttccgcagcagctacagagacaggagcttcagccctggcagctatgaaagagagacctttgccctgaccagcctggagaccgtgacagaggccctgctggagatcatggaggcctgcatgagggacatccccacctgcaagtggctggaccagtggacagagctggcccagagatttgccttccagtacaaccccagcctgcagccccgggccctggtggtgtttggctgcatcagcaagagggtgagccacggccagatcaagcagatcatccgcatcctgagcaaggccctggagagctgcctgaagggccctgacacctacaacagccaggtgctgattgaggccaccgtcatcgccctgaccaagctgcagcccctgctgaacaaggacagccccctgcacaaggccctcttctgggtggccgtggccgtgctgcagctggatgaggtgaacctgtacagcgctggaacagccctgctggagcagaacctgcacaccctggacagcctgcgcatcttcaatgacaagagccctgaggaggtgttcatggccatccggaaccccctggagtggcactgcaagcagatggaccactttgtgggcctgaacttcaacagcaacttcaactttgccctggtgggccacctgctgaagggctaccgccaccccagccctgccatcgtggccaggacagtgcgcatcctgcacaccctgctgaccctggtgaacaagcacaggaactgtgacaagtttgaggtgaacacccagagcgtggcctacctggccgccctgctgactgtgtctgaggaggtgcgcagccgctgcagcctgaagcacaggaagagcctgctgctgacagacatctccatggagaatgtgcccatggacacctaccccatccaccacggggaccccagctaccgcaccctgaaggagacccagccctggagcagccccaagggcagcgagggctacctggccgccacctaccccaccgtgggccagaccagcccccgggccaggaagtccatgagcctggacatgggccagcccagccaggccaacaccaagaagctgctgggcaccaggaagagctttgaccacctgatcagtgacaccaaggcccccaagaggcaggagatggagagcggcatcaccaccccacccaagatgagaagagtggccgagacagattatgagatggagacccagaggatcagcagcagccagcagcacccccacctgaggaaggtgtctgtgtctgagagcaatgtgctgctggatgaggaggtgctgacagaccccaagatccaggccctgctgctgactgtgctggccaccctggtgaagtacaccacagatgaatttgaccagaggatcctgtatgagtacctggccgaggcctctgtggtgttccccaaggtgtttcctgtggtgcacaacctgctggacagcaagatcaacaccctgctgagcctgtgccaggaccccaacctgctgaaccccatccacggcatcgtgcagagcgtggtgtaccacgaggagagccccccccagtaccagaccagctacctgcagagctttggcttcaacggcctgtggaggtttgctggccccttcagcaagcagacccagatcccagactatgcagagctgattgtgaagttcctggatgccctgattgacacctacctgcccggcattgatgaggagaccagcgaggagagcctgctgacccccaccagcccctaccccccagccctgcagagccagctgagcatcacagccaacctgaacctgagcaacagcatgaccagcctggccaccagccagcacagccctggcatcgacaaggaaaatgtggagctgagccccaccaccggccactgcaacagcggccgcaccaggcatggcagcgccagccaggtgcagaagcagaggtctgctggcagcttcaagaggaacagcatcaagaagatcgtgtag

SEQ ID NO: 33542 - DNA, 8520 bp, Artificial Sequence
  derived and/or modified sequence
atggccgcccaccggcccgtggagtgggtgcaggccgtggtgagcaggttcgacgaacagttacccatcaaaacaggtcagcagaacacacataccaaagtgtcaacagagcacaacaaggaatgcctgatcaatatctccaagtacaagttctctctggtgatcagtggcctcactacgatactgaagaacgtgaataacatgagaatctttggggaggccgccgagaaaaacctgtatctttctcagctcatcatacttgatacactcgagaagtgccttgcagggcagccgaaagacacaatgcggctggacgagactatgctcgtgaagcagctgctgcccgagatctgccactttctgcacacttgtagagaggggaaccagcatgcagccgagctgaggaactcagccagtggagttctattttccctgagttgcaataactttaatgctgtgttttctcggatcagcactagattgcaggaattgaccgtgtgcagcgaggacaacgtggatgtccatgacattgaactcctccagtatatcaacgtggactgcgctaaactaaagcggctgctgaaggaaacagcgtttaaattcaaggccctcaaaaaagtcgcccagctggctgtcatcaactccctggagaaggccttctggaattgggtagagaactacccagatgaattcacaaagctctaccaaattccccagaccgacatggctgaatgcgctgaaaaactcttcgatctggtcgacggattcgcggagtcgaccaaaagaaaggctgctgtctggccattgcaaataatcctgttgatattatgtcccgaaattatacaggacatctctaaggacgttgttgacgagaataatatgaataagaagttatttctcgattccctgagaaaagctcttgccggtcatggcggctctcgccagttgaccgaatctgctgccatagcctgcgtaaagctgtgcaaggcgtctacgtacattaactgggaagataactctgtcatttttttattggtccagagtatggtagttgatctgaaaaacctgttattcaatccctctaagcccttctctagagggtcacagcccgcggacgtggacctgatgatcgattgtctggtgagttgctttcggatctctcctcacaacaatcagcattttaaaatctgtctggcgcaaaattctccgtccactttccactatgttctggtgaatagcctgcataggataatcacaaacagcgcactggattggtggccgaagattgatgccgtgtactgtcatagcgttgagctaaggaacatgttcggcgaaacgctccataaagccgtgcaaggctgcggcgcccatccagcaattcgaatggcaccatccttgacgttcaaagagaaggtcacgagtcttaagtttaaggaaaagcctacggatttggaaacaagaagttataaatacctccttctgtctatggtgaagttgatccacgccgaccctaagctcctgctgtgcaatccgaggaaacagggaccggagacccagggtagcaccgcagaactcattaccggactagtccagttagttcctcagtcccacatgccagaaatcgctcaggaggctatggaagcgctgctggttcttcaccagctcgatagtatagacctgtggaatccagacgcccccgtggaaaccttctgggaaatttcatctcaaatgctgttctacatctgtaaaaaacttacaagtcatcagatgctgtcatctacagaaatcctgaaatggctgcgcgaaatcctgatctgtagaaacaagttcttgcttaagaataaacaggcagatagatcctcttgccactttctccttttttacggggttggatgtgacatcccaagcagtggaaacacatctcagatgtccatggatcatgaagaactactgaggactcccggcgcaagcctacggaagggcaagggcaattcctccatggattctgccgctggctgttctggcacccctcctatctgccggcaagcccagaccaagttagaagtggcgctgtacatgttcctttggaaccccgatactgaggctgtgctcgtggctatgagctgttttcgccacttatgcgaagaggcagacattcggtgcggagtcgacgaggtctctgtccataatctgcttccgaactataatacgtttatggaattcgcctcagtgagcaatatgatgagcaccgggagggccgcactccagaaacgcgtgatggcactgctgcggcgcattgagcaccccaccgccggaaataccgaggcatgggaggacacccatgctaaatgggagcaggctaccaagctgatcctgaactatccaaaagcaaaaatggaagatggacaggcagccgagagcctgcataaaaccatcgttaagagacgcatgtcccacgtatccggcggcggaagtatcgacctttctgatacagacagcctgcaagaatggattaatatgaccgggtttctgtgcgccctcggaggagtatgtctacagcagaggtcaaactctgggctcgctacttactcccctccaatgggtcccgtctctgagaggaagggcagcatgatatcagtgatgagctctgaaggcaatgctgacacccctgtgagcaaatttatggatagactccttagcctgatggtgtgtaaccacgaaaaggtcggcctccagatccgaaccaacgtgaaggacttggtcggactagagctttctccagccctttaccctatgctgtttaacaaacttaagaacactatcagtaaattttttgattcccagggacaggtcctgttaacggatactaacacacagttcgtggaacagacaatagctatcatgaagaacctgctggacaatcacactgaaggcagctcggagcatctaggtcaggcctccatcgagacaatgatgctcaacctggtacggtacgtgagggtcttaggcaatatggtccacgcaattcagatcaaaaccaagctctgccagctggtagaagtgatgatggcgaggagagatgatctgagcttctgtcaggagatgaaattcagaaacaagatggtggaatacctgaccgactgggtgatgggcacatcaaaccaggctgccgatgacgatgtgaagtgtctgacacgggatctggaccaggctagtatggaagctgtggtgtctctcctcgccggtttgccccttcagcctgaggaaggagacggggtagagctcatggaagccaaatcacagctcttcctgaagtacttcaccctctttatgaatcttctcaacgattgctctgaggtggaggacgaatctgcgcaaaccggcggaaggaaacgtgggatgtccaggagactcgcgtcacttaggcactgcaccgtgctagcaatgtccaaccttctgaacgcaaatgtggattcaggcctaatgcacagtattggcctggggtaccacaaagatctccagactcgggccaccttcatggaggtgttaacgaaaattctccagcaggggaccgagttcgacactctcgcagagacagttctggcggatcggttcgaaagacttgtggagctcgtgactatgatgggagaccagggggaattgcccatagctatggctctggctaacgtagtgccatgttcacaatgggacgaactggcccgcgtcctcgtaaccctgttcgacagccgtcatttgctataccaattgctgtggaatatgtttagcaaggaggtcgagctggcagattccatgcagacactctttcgtggaaacagcctagcatccaagatcatgacattttgtttcaaggtgtacggtgccacgtatctgcaaaaactgctggaccctctgttgcgaatcgtgataacctcatccgattggcaacatgtgtctttcgaggtcgatcctactcggctagaacctagcgagagtctagaagagaatcagcgtaacctgctacaaatgactgaaaaattcttccatgccattataagctctagttcggaatttcctccccagttacgttcagtgtgtcactgcctgtaccaggccacatgtcatagcctcctgaacaaagctacagtgaaggaaaaaaaggaaaacaagaaaagcgtggtctctcagcgttttccccagaactcaatcggggctgtgggaagcgcgatgttcctgagattcataaaccccgcgatcgtgtcaccatacgaagcaggcatccttgacaagaagcctccgccccgtatcgaacgcgggctgaaactgatgtccaaaatcctccagtcgattgccaaccatgtgctttttacgaaggaggagcacatgagaccctttaatgattttgttaaaagcaacttcgatgcggctaggcgattttttctcgacatcgcgtccgattgtccgacatctgacgcagtgaaccatagcttgtcatttatttccgacggtaatgtcctggcgctgcataggttactttggaataatcaggagaaaatcgggcagtacttatcctcgaaccgggatcacaaggctgtcggtcgccgtccgtttgataaaatggctacccttctggcttatttaggccctccggaacacaagccggtggctgacactcattggtcaagcctgaatctcacctcgtccaagttcgaggagtttatgaccaggcatcaggtccacgaaaaagaggaattcaaagcactcaagaccctgagcattttctatcaggccggcacgagcaaagcggggaaccccatcttttactacgttgccagaagattcaaaactgggcagattaatggcgatctattgatttatcatgtgctactgactctgaagccttactacgccaagccttacgaaatagttgtggatttgacccacactggcccctctaatcggtttaagacagacttcctgtccaagtggttcgtagtgtttccaggctttgcatatgataatgtctccgccgtctatatctataattgcaatagctgggttcgggagtatacgaagtaccatgagcgcctcttgaccggcctgaagggatcaaaacgcctggtgttcattgactgccccggcaaacttgccgaacatattgagcatgaacagcaaaaactacccgccgcgacactggctctggaagaggatctgaaagtctttcataacgctctgaaattggcgcataaagacacaaaggtaagcatcaaagtgggaagtacggctgtccaggtcacatcagcagagcggactaaggtgctgggtcagagcgtcttccttaacgatatctactacgcctccgagatcgaggagatttgccttgtggatgagaatcagtttactttgaccatcgcgaaccaggggacgcccctgaccttcatgcaccaggagtgtgaggccatcgtgcagtcaatcatccatatccgcacaaggtgggaacttagtcagcccgactccatccctcagcatactaagatccggccgaaagacgtgcctggtactctcctcaatattgccctcttgaatctggggtcctctgatcctagcttgcggtccgccgcgtataatctgttgtgcgccctgacttgcacttttaacttaaaaatcgagggccaactgctggagacatccggattgtgtatacctgcgaataataccctgtttattgtgagtatttctaaaaccctggcagcaaacgaaccccatctgactctggagtttctggaggagtgcatctcagggttctccaagagtagtatcgagctgaagcacttatgtcttgaatacatgacgccctggctgtccaatttggtgcgcttttgcaaacacaacgatgatgctaagcgacaaagggtgaccgccattctggataaattaataacgatgaccatcaatgagaaacagatgtatcctagcatacaggccaagatatggggttcgctcggacaaattacagacctgttggacgtggtgctggatagttttataaaaacgagcgcaaccggcggccttgggtccatcaaggccgaggtcatggctgacactgccgtggctctagccagcggcaacgtaaagctcgtgtcgagcaaggtcatcggccgtatgtgtaagattatcgataagacatgcctctccccaactccaacgcttgaacagcacttgatgtgggacgatatcgctatcttggctcgttacatgctgatgctgtccttcaacaattctcttgacgttgctgcccacctgccatacttattccatgtagtgacttttctcgtagccacagggccattgtcactgagagcatctacccacggcctcgtgataaacatcattcattctctgtgcacctgctcgcagctgcactttagcgaggaaaccaaacaggttctgcggttgtctctcactgaattttcgctacccaaattctatttactcttcggcattagcaaggtaaagtccgccgcggtgatcgccttccgcagttcctacagagatcgctccttttcccccggaagttatgagagagagacatttgccctcacatccctggagacagtgacggaagccttgcttgagataatggaagcatgtatgagagatatccccacgtgcaaatggctcgaccaatggactgaacttgcccagcggttcgcttttcagtacaacccaagcctgcagcccagggctctggtagtgttcggctgcatatccaagcgcgttagtcatggacagataaagcaaatcattagaattctcagcaaagctttagagtcgtgcctcaagggacccgacacctataacagtcaggttctgatcgaggccacagtgatagcactgactaagttacagcccctgttaaacaaggatagccccctgcacaaggccctcttttgggtggccgtggctgtgctgcaactcgacgaggtgaatctctatagcgcaggcacagccttgttggaacaaaacctgcacaccctcgattccttaaggatttttaacgataaaagcccagaagaggtctttatggcaatacgcaaccctcttgagtggcactgtaagcagatggaccacttcgtggggttaaactttaattctaactttaatttcgcactagtcgggcaccttttaaagggctatcggcatccaagccctgcgatcgtagccaggactgttcgcattctgcatacactgttgaccctagtaaacaagcaccgcaattgcgacaaatttgaggtgaacacacagtctgtggcctatctcgcagccctcctcactgtgtctgaggaggtgagaagccgctgctcactgaaacacagaaaatcccttctcctgacagatatttctatggagaatgtcccaatggacacttatccgatacatcatggggatcctagctacagaaccctgaaggagacccagccttggagctcgcctaagggatccgaagggtacctggctgccacctatccaaccgtgggccagaccagtccacgcgcccgaaaatcaatgtcactcgatatgggccagccgagtcaggccaacacgaaaaagttactcggaactcggaaatcttttgaccacctgatatccgataccaaggccccaaaacgtcaggagatggagtcaggcatcaccacccctccaaagatgaggcgggtagcagaaacagactatgagatggaaacacaacgcatcagcagtagtcagcaacacccacacttgcgtaaagtgtcagtgtcggaatctaacgtcttgctagacgaagaggtactgaccgaccctaagattcaggcactgctcttaacagtgctcgcaactctggtgaaatacaccactgatgagttcgatcagcggatactgtacgagtatctggccgaggcgtctgtggttttccccaaggtctttcctgtggttcataatctcttggattccaaaatcaacaccttgctgtcactgtgccaagatcctaacctgctgaatcccattcatgggattgtgcagtctgtggtgtatcatgaggaatctcccccgcagtaccaaacctcgtatctccagagttttggctttaatgggttgtggcgctttgctggtccctttagcaaacagacacagatcccagattatgctgaactcatcgtgaagttccttgatgccctcattgatacttatctcccaggtatcgacgaggaaacctccgaagagtcgctgctcacaccgactagtccatatccacctgccctccagagccagctctctatcactgccaacctgaatctatcaaattctatgacaagcctggcaacctctcaacacagtcctggaatagacaaggagaatgtagaactttctccaaccacaggccactgcaacagcggaaggacacgtcacggatctgcttcgcaggtccagaaacagagaagtgccgggagctttaagagaaattctatcaagaagattgtatag

SEQ ID NO: 33543 - DNA, 12425 bp, Artificial Sequence
  derived and/or modified sequence
aatctctagctcgctcgcgctccctctccccgggccgtggaaaggatcccacttccggtggggtgtcatggcggcgtctcggactgtgatggctgtggggagacggcgctagtggggagagcgaccaagaggccccctcccctccccgggtccccttcccctatccccctccccccagcctccttgccaacgccccctttccctctccccctcccgctcggcgctgaccccccatccccacccccgtgggaacactgggagcctgcactccacagaccctctccttgcctcttccctcacctcagcctccgctccccgccctcttcccggcccagggcgccggcccacccttccctccgccgccccccggccgcggggaggacatggccgcgcacaggccggtggaatgggtccaggccgtggtcagccgcttcgacgagcagcttccaataaaaacaggacagcagaacacacataccaaagtcagtactgagcacaacaaggaatgtctaatcaatatttccaaatacaagttttctttggttataagcggcctcactactattttaaagaatgttaacaatatgagaatatttggagaagctgctgaaaaaaatttatatctctctcagttgattatattggatacactggaaaaatgtcttgctgggcaaccaaaggacacaatgagattagatgaaacgatgctggtcaaacagttgctgccagaaatctgccattttcttcacacctgtcgtgaaggaaaccagcatgcagctgaacttcggaattctgcctctggggttttattttctctcagctgcaacaacttcaatgcagtctttagtcgcatttctaccaggttacaggaattaactgtttgttcagaagacaatgttgatgttcatgatatagaattgttacagtatatcaatgtggattgtgcaaaattaaaacgactcctgaaggaaacagcatttaaatttaaagccctaaagaaggttgcgcagttagcagttataaatagcctggaaaaggcattttggaactgggtagaaaattatccagatgaatttacaaaactgtaccagatcccacagactgatatggctgaatgtgcagaaaagctatttgacttggtggatggttttgctgaaagcaccaaacgtaaagcagcagtttggccactacaaatcattctccttatcttgtgtccagaaataatccaggatatatccaaagacgtggttgatgaaaacaacatgaataagaagttatttctggacagtctacgaaaagctcttgctggccatggaggaagtaggcagctgacagaaagtgctgcaattgcctgtgtcaaactgtgtaaagcaagtacttacatcaattgggaagataactctgtcattttcctacttgttcagtccatggtggttgatcttaagaacctgctttttaatccaagtaagccattctcaagaggcagtcagcctgcagatgtggatctaatgattgactgccttgtttcttgctttcgtataagccctcacaacaaccaacactttaagatctgcctggctcagaattcaccttctacatttcactatgtgctggtaaattcactccatcgaatcatcaccaattccgcattggattggtggcctaagattgatgctgtgtattgtcactcggttgaacttcgaaatatgtttggtgaaacacttcataaagcagtgcaaggttgtggagcacacccagcaatacgaatggcaccgagtcttacatttaaagaaaaagtaacaagccttaaatttaaagaaaaacctacagacctggagacaagaagctataagtatcttctcttgtccatggtgaaactaattcatgcagatccaaagctcttgctttgtaatccaagaaaacaggggcccgaaacccaaggcagtacagcagaattaattacagggctcgtccaactggtccctcagtcacacatgccagagattgctcaggaagcaatggaggctctgctggttcttcatcagttagatagcattgatttgtggaatcctgatgctcctgtagaaacattttgggagattagctcacaaatgcttttttacatctgcaagaaattaactagtcatcaaatgcttagtagcacagaaattctcaagtggttgcgggaaatattgatctgcaggaataaatttcttcttaaaaataagcaggcagatagaagttcctgtcactttctccttttttacggggtaggatgtgatattccttctagtggaaataccagtcaaatgtccatggatcatgaagaattactacgtactcctggagcctctctccggaagggaaaagggaactcctctatggatagtgcagcaggatgcagcggaacccccccgatttgccgacaagcccagaccaaactagaagtggccctgtacatgtttctgtggaaccctgacactgaagctgttctggttgccatgtcctgtttccgccacctctgtgaggaagcagatatccggtgtggggtggatgaagtgtcagtgcataacctcttgcccaactataacacattcatggagtttgcctctgtcagcaatatgatgtcaacaggaagagcagcacttcagaaaagagtgatggcactgctgaggcgcattgagcatcccactgcaggaaacactgaggcttgggaagatacacatgcaaaatgggaacaagcaacaaagctaatccttaactatccaaaagccaaaatggaagatggccaggctgctgaaagccttcacaagaccattgttaagaggcgaatgtcccatgtgagtggaggaggatccatagatttgtctgacacagactccctacaggaatggatcaacatgactggcttcctttgtgcccttgggggagtgtgcctccagcagagaagcaattctggcctggcaacctatagcccacccatgggtccagtcagtgaacgtaagggttctatgatttcagtgatgtcttcagagggaaacgcagatacacctgtcagcaaatttatggatcggctgttgtccttaatggtgtgtaaccatgagaaagtgggacttcaaatacggaccaatgttaaggatctggtgggtctagaattgagtcctgctctgtatccaatgctatttaacaaattgaagaataccatcagcaagttttttgactcccaaggacaggttttattgactgataccaatactcaatttgtagaacaaaccatagctataatgaagaacttgctagataatcatactgaaggcagctctgaacatctagggcaagctagcattgaaacaatgatgttaaatctggtcaggtatgttcgtgtgcttgggaatatggtccatgcaattcaaataaaaacgaaactgtgtcaattagttgaagtaatgatggcaaggagagatgacctctcattttgccaagagatgaaatttaggaataagatggtagaatacctgacagactgggttatgggaacatcaaaccaagcagcagatgatgatgtaaaatgtcttacaagagatttggaccaggcaagcatggaagcagtagtttcacttctagctggtctccctctgcagcctgaagaaggagatggtgtggaattgatggaagccaaatcacagttatttcttaaatacttcacattatttatgaaccttttgaatgactgcagtgaagttgaagatgaaagtgcgcaaacaggtggcaggaaacgtggcatgtctcggaggctggcatcactgaggcactgtacggtccttgcaatgtcaaacttactcaatgccaacgtagacagtggtctcatgcactccataggcttaggttaccacaaggatctccagacaagagctacatttatggaagttctgacaaaaatccttcaacaaggcacagaatttgacacacttgcagaaacagtattggctgatcggtttgagagattggtggaactggtcacaatgatgggtgatcaaggagaactccctatagcgatggctctggccaatgtggttccttgttctcagtgggatgaactagctcgagttctggttactctgtttgattctcggcatttactctaccaactgctctggaacatgttttctaaagaagtagaattggcagactccatgcagactctcttccgaggcaacagcttggccagtaaaataatgacattctgtttcaaggtatatggtgctacctatctacaaaaactcctggatcctttattacgaattgtgatcacatcctctgattggcaacatgttagctttgaagtggatcctaccaggttagaaccatcagagagccttgaggaaaaccagcggaacctccttcagatgactgaaaagttcttccatgccatcatcagttcctcctcagaattcccccctcaacttcgaagtgtgtgccactgtttataccaggcaacttgccactccctactgaataaagctacagtaaaagaaaaaaaggaaaacaaaaaatcagtggttagccagcgtttccctcagaacagcatcggtgcagtaggaagtgccatgttcctcagatttatcaatcctgccattgtctcaccgtatgaagcagggattttagataaaaagccaccacctagaatcgaaaggggcttgaagttaatgtcaaagatacttcagagtattgccaatcatgttctcttcacaaaagaagaacatatgcggcctttcaatgattttgtgaaaagcaactttgatgcagcacgcaggtttttccttgatatagcatctgattgtcctacaagtgatgcagtaaatcatagtctttccttcataagtgacggcaatgtgcttgctttacatcgtctactctggaacaatcaggagaaaattgggcagtatctttccagcaacagggatcataaagctgttggaagacgaccttttgataagatggcaacacttcttgcatacctgggtcctccagagcacaaacctgtggcagatacacactggtccagccttaaccttaccagttcaaagtttgaggaatttatgactaggcatcaggtacatgaaaaagaagaattcaaggctttgaaaacgttaagtattttctaccaagctgggacttccaaagctgggaatcctattttttattatgttgcacggaggttcaaaactggtcaaatcaatggtgatttgctgatataccatgtcttactgactttaaagccatattatgcaaagccatatgaaattgtagtggaccttacccataccgggcctagcaatcgctttaaaacagactttctctctaagtggtttgttgtttttcctggctttgcttacgacaacgtctccgcagtctatatctataactgtaactcctgggtcagggagtacaccaagtatcatgagcggctgctgactggcctcaaaggtagcaaaaggcttgttttcatagactgtcctgggaaactggctgagcacatagagcatgaacaacagaaactacctgctgccaccttggctttagaagaggacctgaaggtattccacaatgctctcaagctagctcacaaagacaccaaagtttctattaaagttggttctactgctgtccaagtaacttcagcagagcgaacaaaagtcctagggcaatcagtctttctaaatgacatttattatgcttcggaaattgaagaaatctgcctagtagatgagaaccagttcaccttaaccattgcaaaccagggcacgccgctcaccttcatgcaccaggagtgtgaagccattgtccagtctatcattcatatccggacccgctgggaactgtcacagcccgactctatcccccaacacaccaagattcggccaaaagatgtccctgggacactgctcaatatcgcattacttaatttaggcagttctgacccgagtttacggtcagctgcctataatcttctgtgtgccttaacttgtacctttaatttaaaaatcgagggccagttactagagacatcaggtttatgtatccctgccaacaacaccctctttattgtctctattagtaagacactggcagccaatgagccacacctcacgttagaatttttggaagagtgtatttctggatttagcaaatctagtattgaattgaaacacctttgtttggaatacatgactccatggctgtcaaatctagttcgtttttgcaagcataatgatgatgccaaacgacaaagagttactgctattcttgacaagctgataacaatgaccatcaatgaaaaacagatgtacccatctattcaagcaaaaatatggggaagccttgggcagattacagatctgcttgatgttgtactagacagtttcatcaaaaccagtgcaacaggtggcttgggatcaataaaagctgaggtgatggcagatactgctgtagctttggcttctggaaatgtgaaattggtttcaagcaaggttattggaaggatgtgcaaaataattgacaagacatgcttatctccaactcctactttagaacaacatcttatgtgggatgatattgctattttagcacgctacatgctgatgctgtccttcaacaattcccttgatgtggcagctcatcttccctacctcttccacgttgttactttcttagtagccacaggtccgctctcccttagagcttccacacatggactggtcattaatatcattcactctctgtgtacttgttcacagcttcattttagtgaagagaccaagcaagttttgagactcagtctgacagagttctcattacccaaattttacttgctgtttggcattagcaaagtcaagtcagctgctgtcattgccttccgttccagttaccgggacaggtcattctctcctggctcctatgagagagagacttttgctttgacatccttggaaacagtcacagaagctttgttggagatcatggaggcatgcatgagagatattccaacgtgcaagtggctggaccagtggacagaactagctcaaagatttgcattccaatataatccatccctgcaaccaagagctcttgttgtctttgggtgtattagcaaacgagtgtctcatgggcagataaagcagataatccgtattcttagcaaggcacttgagagttgcttaaaaggacctgacacttacaacagtcaagttctgatagaagctacagtaatagcactaaccaaattacagccacttcttaataaggactcgcctctgcacaaagccctcttttgggtagctgtggctgtgctgcagcttgatgaggtcaacttgtattcagcaggtaccgcacttcttgaacaaaacctgcatactttagatagtctccgtatattcaatgacaagagtccagaggaagtatttatggcaatccggaatcctctggagtggcactgcaagcaaatggatcattttgttggactcaatttcaactctaactttaactttgcattggttggacaccttttaaaagggtacaggcatccttcacctgctattgttgcaagaacagtcagaattttacatacactactaactctggttaacaaacacagaaattgtgacaaatttgaagtgaatacacagagcgtggcctacttagcagctttacttacagtgtctgaagaagttcgaagtcgctgcagcctaaaacatagaaagtcacttcttcttactgatatttcaatggaaaatgttcctatggatacatatcccattcatcatggtgacccttcctataggacactaaaggagactcagccatggtcctctcccaaaggttctgaaggataccttgcagccacctatccaactgtcggccagaccagtccccgagccaggaaatccatgagcctggacatggggcaaccttctcaggccaacactaagaagttgcttggaacaaggaaaagttttgatcacttgatatcagacacaaaggctcctaaaaggcaagaaatggaatcagggatcacaacaccccccaaaatgaggagagtagcagaaactgattatgaaatggaaactcagaggatttcctcatcacaacagcacccacatttacgtaaagtttcagtgtctgaatcaaatgttctcttggatgaagaagtacttactgatccgaagatccaggcgctgcttcttactgttctagctacactggtaaaatataccacagatgagtttgatcaacgaattctttatgaatacttagcagaggccagtgttgtgtttcccaaagtctttcctgttgtgcataatttgttggactctaagatcaacaccctgttatcattgtgccaagatccaaatttgttaaatccaatccatggaattgtgcagagtgtggtgtaccatgaagaatccccaccacaataccaaacatcttacctgcaaagttttggttttaatggcttgtggcggtttgcaggaccgttttcaaagcaaacacaaattccagactatgctgagcttattgttaagtttcttgatgccttgattgacacgtacctgcctggaattgatgaagaaaccagtgaagaatccctcctgactcccacatctccttaccctcctgcactgcagagccagcttagtatcactgccaaccttaacctttctaattccatgacctcacttgcaacttcccagcattccccaggaatcgacaaggagaacgttgaactctcccctaccactggccactgtaacagtggacgaactcgccacggatccgcaagccaagtgcagaagcaaagaagcgctggcagtttcaaacgtaatagcattaagaagatcgtgtgaagcttgcttgctttcttttttaaaatcaacttaacatgggctcttcactagtgaccccttccctgtccttgccctttccccccatgttgtaatgctgcacttcctgttttataatgaacccatccggtttgccatgttgccagatgatcaactcttcgaagccttgcctaaatttaatgctgccttttctttaactttttttcttctacttttggcgtgtatctggtatatgtaagtgttcagaacaactgcaaagaaagtgggaggtcaggaaacttttaactgagaaatctcaattgtaagagaggatgaattcttgaatactgctactactggccagtgatgaaagccatttgcacagagctctgccttctgtggttttcccttcttcatcctacagagtaaagtgttagtcctatttatacatttttcaagatacaagtttatgagagaaatagtattataaccccagtatgtttaatcttttagctgtggactttttttttaaccgtacaaaactgaaagaaccatagaggtcaagcctcagtgacttgacaccataaagccacagacaaggtacttgggggggagggcagggaaatttcatattttatagtggattcttaagaaatactaacacttgagtattagcaataattacaggaaaataagtgcgaccacatatatcttaacattactgaattaaaactatggcttctaagtccttatccaaactcagtcatccaaactagtttatttttttctccagttgattatcttttaatttttaattttgctaaaggtggtttttttgtgttttgttttttgtaaaccaaaactatactaagtatagtaattatatatatatatatattttttcccctccccctcttctttcctaactaattctgagcagggtaatcagtgaacaaagtgttgaaaattgttcccagaaggtaattttcatagatgtttgcattagctccatagcaaaatggaatggtacgtgacatttagggtagctgatatttttattttgttaaataatttccaagaatagagtatggtgtatattataaatttctttgataagatgtattttgaatgtcttttaatcttcctcctcctctccaaaaaaatcagaaacctctttaagaaaacatgtaggttatatatgctagaattgcatttaatcactgtgaaaagactggtcagcctgcattagtatgacagtaggggggctgttagaattgctgctatactggtggtatggattatcatggcattggaattttcatagtaatgcagatccaatttctttgtggtacctgcagtttacaaaataatttgacttcagtgagcatattggtatctggatgttccaatttagaactaaaccatatttattacaaaaagatattaatccctctactcccaggttccctttatatgttaagatataatggctttgaggggggaaaaaataaacctaggggagaggggagtttcctgtagtgctgtttcattagaggatttcagtaaattaaattccacagctaattcaataaataatggtacatttaagtgttctgattttaataatatatttcacatttatccacacagtaacaatgtaatatgttaatgtaaataaaattggttttgatactcagaaataacaagaatttaattttttaaatttgtttacagtcctgggaaaagtaagaattatttgccaaaataagaggaaagaaaaccttagtattattaatgagtttaccatagaattgttggaaatactgaagacaggtgcaatttactaaacttttgtttttaaactattgtagaggctgcattagaagaaaatgtttataatgacagagcaactatgactatataaaaaagctgaaattagaactgtgtttagaaatagatcagtaacccagtgccaaggatgccaagctgccaccatggtcttggctctcccacaacccagtgtttctggggtaagtttcacagtttctaggccctggaatagcaggcagtgtaagcctttgataactttagttcgatgtttttcttgtttttgtttgttggtttggtgcatatgatagtgggtgttatgctattttgctcttcccatcaaaataaagaaacttccagaggtttactgttaaaaatactgatatttccataaacgggtttaccaagggtgtagtatttcataccgcctgaaatgatcagcattggcacaaatcaaaattcagccgcctttgaaatgcaaaaatacctttgactagtaagtacatcctaggagtttgaaaacttaactaaggtttaaaatttaccttgtttaaagaacttctgacttttgaggaaaatctagctttccaagtaactaaaatgtacatgagataaacctctcaccactatgtgtcccttgagaaatgcaacacttttttagtcttcatacttgtaatctataaaagaaattctgaagtttagaccaagttgcccatttctgcgtaattgacataagttctgttaaaaatattataagtaattcgtttcggtttgtagatgtttcccctgacttgttaaagaggaaaccaggaactcagtcatgtttttgtcctggataatctacctgttatgccagtactcccatccgaggggcatgcccttagttgcccagatggagatgcagttcagtagatttggggcaaagtggctacagctctgtcttccattcactcaacacctgttcatgactgagccaggtgcccaggacacatcctaaacagtcagcttctatcctgtgtcctagttggggagacagagtgccagccagcaaccctcccaggtttgtaggttttaggggttttcagttttgtttgggttttttgttttttgtttttgtttctacatccttccccgactcccaggcataatgaggcatgtcttactcaatgttatgcaatggatttaggcaaaaattcattcttagtgtcagccacacaattttttttaatgcagtatattcacctgtaaatagtttgtgtaaaatttgacaaaaaaagtatatttactatactgtaaatatatgtgatgatatattgtattattttgcttttttgtaaagcagttagttgctgcacatggataacaacaaaaatttgattattctcgtgttagtattgttaacttctttttgcgactgcgttacatcatttaaagaaaatgctgtgtattgtaaacttaaattgtatatgataacttactgtcctttccatccgggcctaaactttggcagttcctttgtctacaaccttgttaatactgtaaacagttgtacgccagcaggaaaaatactgcccaacagacaaaatcgatcattgtaggggaaaatcatagaaatccatttcagatctttattgttcctcaccccattttcctccttgtgtatgtacttcccccacccccctttttttaagtaaaatgtaaattcaatctgctctaaga

SEQ ID NO: 33544 - DNA, 8519 bp, Artificial Sequence
  derived and/or modified sequence
atggctgcccatcgccctgttgagtgggtgcaggccgtggtgagccgatttgacgaacagctgccaatcaaaactgggcagcagaacacccacacaaaagtgtccacagaacacaataaagagtgtctcatcaacatctcaaagtacaaattcagtctggtgatttctggactgaccaccattctgaagaacgtgaataatatgcgtatcttcggagaggccgcagagaaaaacttgtatttatcccagctgattatcctcgatacccttgaaaagtgtttagcaggacagccgaaggacactatgcggctggatgagacaatgttggtgaaacagcttctcccagaaatctgtcacttcctgcatacctgtcgcgagggcaaccagcacgcagctgaactgcgcaattctgcaagcggtgtactgttcagtttgtcctgcaataattttaacgcggttttctctcggataagcacccgccttcaagaactcacagtatgttctgaagacaacgtggatgtgcacgacatcgaactgctgcaatacatcaacgtggattgtgccaaactgaagagactcctaaaggaaacagcattcaaattcaaggccctaaagaaggtggcacagctggccgtgattaattctctggaaaaggccttctggaactgggtggaaaattacccagatgagtttacaaaactgtatcagattccgcagacagacatggctgaatgcgctgagaagctcttcgacctggtggatggcttcgctgaaagcactaagcggaaagcagctgtatggccactgcaaattattctgcttattctctgtccagagatcatccaggacataagcaaggacgttgtggatgaaaacaacatgaacaagaaactgttcctggactccctacgcaaagcactggctggtcacggcggaagcagacagctcacagaaagcgctgcaatcgcatgtgtgaagctctgcaaagcgtctacatacatcaactgggaggacaactcggtgatttttttgctcgtccagtcaatggtggtggacctcaagaatctgttgttcaatccatcgaaacctttttctagggggtcgcaacctgcggatgtggatctgatgatcgattgtctcgtcagctgctttcggattagcccccataataatcagcactttaaaatctgtctggcccagaactccccctccacctttcattatgtgctagtgaattctctgcaccggattataacaaatagcgcactggattggtggccaaagatcgacgcagtctactgtcacagtgtggaattgcggaatatgtttggagaaactttgcataaggctgtgcagggttgtggagcacacccagcaatccgtatggccccatcactgaccttcaaagagaaggtgacctcactgaagtttaaggagaagcccacagatttggagactaggtcttacaagtacttgctgctgtcaatggtgaagctcattcatgctgatcctaaactgctgctgtgtaatccaagaaagcaagggccagaaacccaaggctcaaccgcagaactgatcacagggctcgtgcagctagttcctcaatctcatatgccggagatcgcccaggaggcaatggaagccctgcttgtgctgcaccagctggacagtattgacctgtggaaccccgacgcccctgtggaaaccttctgggagatcagctcacagatgttgttctatatctgcaagaagctgacctcccatcagatgttatcatccactgagattctgaaatggttgagagaaatattgatttgccgtaacaaattccttctgaaaaataagcaagctgatcgctctagctgccacttccttctgttttacggagtgggatgtgacatcccgtcttctggaaatacttctcagatgtccatggatcacgaggaactgctgcggactccaggcgcttcactgcggaaaggcaaaggtaactcgagcatggattccgcggctggatgctccggcactcctccaatttgccggcaggctcagacaaagttggaagtggcactgtatatgttcctttggaaccctgataccgaggctgtcttagttgcgatgtcttgctttcgccacctgtgtgaggaggccgatatcagatgcggagttgatgaggtttccgtgcataacctgctgcctaactacaatacctttatggagttcgcaagtgtgtctaacatgatgagcaccgggagggccgctctgcaaaaaagggtgatggcccttcttcggcgtattgagcatccaacagcgggtaatacggaggcttgggaagatactcatgccaaatgggaacaggcgacgaagcttatcctgaactatccaaaggccaaaatggaagacgggcaggccgcagagagcctccacaagacgatagttaaaaggcgcatgtcccacgtcagcggcggaggctcaattgacctgagtgacacggatagccttcaggaatggatcaacatgaccggcttcctatgtgctttgggcggagtctgtcttcagcaacgaagtaattctggcctggccacctattcgcctccaatgggtccagtttccgagcgaaagggtagcatgatctcagtgatgtcctcagaaggaaacgctgatacccccgtgagcaaattcatggaccgccttctctcactgatggtttgcaatcatgagaaagttggcttgcaaatcaggacaaatgtgaaggatctggtcggcctggagctgtcgcccgcactgtatcctatgctatttaacaaattaaaaaacacaatctcaaagttctttgactcccaggggcaggtgttgcttactgacactaatacacaattcgtcgagcagaccatcgcgattatgaaaaacctcctcgataatcacaccgagggttcctccgagcatctgggacaggcctctattgaaactatgatgctcaatctcgtgcgatacgtccgagtgctggggaacatggttcatgctatccaaataaagactaaactttgtcagctggtggaagtgatgatggctcgccgagacgacttgagcttctgtcaggagatgaaattccggaataagatggtggagtatctcacagactgggtgatgggaaccagcaatcaggcggcagacgatgacgtgaaatgtctaacaagagacctggaccaggcttccatggaggcagtggtgtcgctgctcgctgggttgccgctccagcccgaagagggtgatggagtggagttaatggaggctaaatcacaactgttcctcaaatatttcacgctctttatgaacctgctcaacgactgcagcgaggtggaggatgagtcagcacaaacagggggtaggaaacgcggtatgtcaagacgactggctagtctccgccattgtactgtgcttgccatgagcaacttactcaatgcaaacgtggactctgggctcatgcatagtatcgggctgggatatcataaagatctgcagactcgtgcaacgttcatggaagtactgaccaaaatcctccagcagggaactgaatttgatacacttgctgaaacggtgctcgcagatcgctttgagcgcctggtcgagttggtgactatgatgggggaccagggcgaactgcctatcgctatggcccttgccaacgtggtgccctgctctcagtgggacgagttagcccgagtgctggtgaccttatttgacagtcgtcacttgctgtaccagcttctgtggaacatgttctccaaagaggtggaactcgccgattcaatgcagacattgtttcgagggaattcactggctagcaaaatcatgacgttctgttttaaggtgtatggggctacctatttgcagaaactgttggatcctttactgcggattgtcattaccagctcggattggcagcacgtgtcatttgaagtcgatccaacaaggctggaaccatccgagtctctggaggagaaccaacgtaatctgttacagatgactgagaagtttttccacgctattatttcctcttcctcggaattccctccccagctgcgatcggtgtgccactgtctgtatcaggcaacctgccattcccttttaaacaaagcaacggtaaaggagaaaaaggagaataaaaagagcgtggtttcacagagatttccccagaatagcattggcgctgtcgggtctgcaatgtttctaagattcattaatcccgcaattgtgtcaccatatgaggctggtatactcgacaagaagccgccaccgaggatcgagagagggctgaagttaatgagtaaaattttgcagagtattgccaaccacgttctgttcaccaaagaggagcacatgcggccattcaacgactttgtgaagagtaatttcgacgccgcacgcagattttttctggacatcgctagcgactgccccacctctgacgcagtgaaccattctctgagtttcatttcagacggtaacgtgcttgcacttcataggctcctgtggaataatcaggagaagatagggcaatatcttagctcgaaccgcgatcataaggcagtgggtcggcgtccgtttgacaagatggcaacactgcttgcttacctcggtcctccagagcacaagcctgtggccgacacccattggtcttccctcaatctcacatcaagtaaatttgaagagttcatgacaagacatcaggtacacgagaaggaggagtttaaggcactcaagactctcagcatcttttaccaggcaggaacatcaaaggcaggaaatcccatcttttattacgtggcaagaaggttcaagactgggcagatcaatggggacctgcttatctatcatgtgctcctgaccctgaagccttattatgctaaaccgtacgagattgtcgtggacttgacccatacaggcccttccaaccgcttcaaaacagactttctgagtaagtggttcgtggtgtttcccggtttcgcttacgacaatgtttcagcggtgtacatctacaattgtaatagctgggtgcgcgagtataccaagtatcatgagagactgctaacaggcctgaaagggtcgaaacggcttgtctttattgattgccccggaaagttagctgaacatattgaacacgagcagcagaagcttcctgcagctacgctcgcactggaggaggacctaaaggtgtttcacaacgcacttaagcttgcccacaaggacacgaaagttagtatcaaagtcggatctaccgctgtgcaggtgactagcgctgagcggactaaggtgctgggacaatcagtgttcctgaatgatatttattatgcgtcagaaatcgaagaaatctgtctggtggatgagaaccaatttactctcacaattgccaaccaaggcacgcccctaacattcatgcaccaggaatgtgaagcaatcgtgcaaagtataatacacatcaggacccggtgggaattgagccagccagactccattccccaacataccaagattcggccaaaggatgtgccgggaacgctgttgaatatagccctattgaatctaggaagttcagatccttctttgaggagcgccgcttataacctgctgtgcgcacttacctgcacttttaatctgaaaatcgaaggccaattactcgagacctcggggctctgcattccagctaacaacaccctgtttattgtatcgatcagtaaaacactggctgccaatgaaccccatctgaccctggagtttctggaagaatgcatatccggtttctcaaaaagcagcatcgagctaaagcacctgtgtcttgagtacatgactccgtggctctcgaatctagtacgcttctgcaagcataacgacgacgctaaacgtcaacgggtgacggccatcctggataagctgatcactatgaccataaatgaaaagcaaatgtatccttccatccaggccaaaatctggggcagcctcgggcagataaccgatctgctcgacgtggttcttgattccttcattaaaacaagtgccaccggcggactgggttcaatcaaggccgaggtgatggccgacacagccgttgcgctggcaagcggaaatgtgaaactagtttcctccaaggtcattggaaggatgtgcaagatcattgacaaaacatgcttatcccctaccccaaccctggagcagcatctgatgtgggacgatattgccattttagccaggtacatgctcatgctcagcttcaataacagcttggatgttgctgcacatttgccctatctgttccatgtggttactttcctcgtagccacagggccactgagcctgagagcttcaactcatggccttgtgatcaacatcatacacagcctatgtacctgctcccagctgcatttttccgaggagactaagcaggtcttaaggttaagcctgactgagttctctctgccaaagttttacctattattcgggatctctaaggtcaagagtgcggctgtgatagcttttcgctccagctaccgggatcggtccttctctccgggatcttacgaacgggagacattcgccttaacttctctagagacagtcaccgaagcactgcttgaaatcatggaagcttgtatgcgggacatccctacgtgcaagtggctcgatcagtggacagaactcgctcagcggttcgcttttcagtacaacccctcattgcagcccagggcccttgtggttttcggctgcatcagcaagagagttagccacgggcagattaaacagattattcgcatcctgtccaaagcactcgaatcatgtctgaagggccctgatacctacaattcacaagtgctcatcgaagcaaccgtgatcgcacttactaaacttcagccgctgcttaacaaggattctccgctgcacaaagctttgttctgggtagctgtcgcagtcctgcaacttgatgaggtgaatctttattcagcaggaaccgccctgctggaacagaacctgcacaccctggattcactgagaatattcaatgacaaatctcccgaggaagtttttatggccattcggaacccactggaatggcattgcaagcagatggaccactttgtggggctcaactttaattccaactttaattttgctcttgtgggccatcttctaaaaggttacaggcatcccagccccgctattgttgcccgtacggtgagaatcctccacacccttctgactctcgtgaataaacacaggaactgcgacaaatttgaggttaatacccaaagcgtagcctatctggccgctcttctgactgttagtgaggaggtaaggagcagatgttcattaaaacaccgaaagtccctgctgctcaccgacatcagcatggaaaacgtgcctatggacacgtatcccatccaccacggcgacccatcgtatcgcacattaaaggagactcagccctggtcttctcccaagggctccgagggctacttagctgcaacctacccaaccgtgggtcagacttccccccgtgctaggaagtccatgtcgctagacatgggccaacccagtcaggctaataccaagaaactcctgggcactagaaagagctttgaccatctgatctctgacactaaagctccaaagaggcaagagatggagagcggcataacaaccccccctaaaatgagacgggtggccgagacagattatgagatggaaacccagaggatttccagctcacagcagcacccacacctacggaaggtgtccgtgtctgagtcaaacgtcctactcgatgaagaagttttgacagatcccaagattcaggctctcctcctgacagtactcgccaccctggtcaagtacaccacagacgagttcgatcagcgcatcctatacgagtaccttgcagaggcctctgttgtgtttcctaaggtgttccctgtggtccacaatctccttgattcgaaaattaacaccctgctgtccctgtgtcaagaccctaatctgctgaatccaatccacggaatcgtgcagtccgtggtctaccatgaagaaagcccaccccaatatcagacaagctatttgcagtcctttggattcaacggtctttggagatttgctggcccttttagtaagcagactcagattcccgactacgcagaactcatagtgaaatttctggacgcactgatcgatacgtaccttcccggaattgacgaagagacctctgaggagagcctgctgactcctacatctccttaccctcctgcgctgcagagtcaactgagcatcactgccaacctaaacctttctaatagcatgacaagcctggccacttcgcagcacagccctggcatcgacaaagaaaacgtggagctctcccccacaaccgggcattgcaatagcggacgcacacggcatggttcagcttcacaggtacagaagcagagatctgctggctcttttaagaggaacagcatcaaaaagatcgtgta

SEQ ID NO: 33545 - protein, 61 aa, Artificial Sequence
  derived and/or modified sequence
MSEMSGATTSLATVALDPPSDRTSHPQDVIEDLSQNSITGEHSQLLDDGHKKARNAYLNNS

SEQ ID NO: 33546 - protein, 1091 aa, Artificial Sequence
  derived and/or modified sequence
MSEMSGATTSLATVALDPPSDRTSHPQDVIEDLSQNSITGEHSQLLDDGHKKARNAYLNNSNYEEGDEYFDKNLALFEEEMDTRPKVSSLLNRMANYTNLTQGAKEHEEAENITEGKKKPTKTPQMGTFMGVYLPCLQNIFGVILFLRLTWVVGTAGVLQAFAIVLICCCCTMLTAISMSAIATNGVVPAGGSYFMISRALGPEFGGAVGLCFYLGTTFAAAMYILGAIEIFLVYIVPRAAIFHSDDALKESAAMLNNMRVYGTAFLVLMVLVVFIGVRYVNKFASLFLACVIVSILAIYAGAIKSSFAPPHFPVCMLGNRTLSSRHIDVCSKTKEINNMTVPSKLWGFFCNSSQFFNATCDEYFVHNNVTSIQGIPGLASGIITENLWSNYLPKGEIIEKPSAKSSDVLGSLNHEYVLVDITTSFTLLVGIFFPSVTGIMAGSNRSGDLKDAQKSIPIGTILAILTTSFVYLSNVVLFGACIEGVVLRDKFGDAVKGNLVVGTLSWPSPWVIVIGSFFSTCGAGLQSLTGAPRLLQAIAKDNIIPFLRVFGHSKANGEPTWALLLTAAIAELGILIASLDLVAPILSMFFLMCYLFVNLACALQTLLRTPNWRPRFRYYHWALSFMGMSICLALMFISSWYYAIVAMVIAGMIYKYIEYQGAEKEWGDGIRGLSLSAARFALLRLEEGPPHTKNWRPQLLVLLKLDEDLHVKHPRLLTFASQLKAGKGLTIVGSVIVGNFLENYGEALAAEQTIKHLMEAEKVKGFCQLVVAAKLREGISHLIQSCGLGGMKHNTVVMGWPNGWRQSEDARAWKTFIGTVRVTTAAHLALLVAKNISFFPSNVEQFSEGNIDVWWIVHDGGMLMLLPFLLKQHKVWRKCSIRIFTVAQLEDNSIQMKKDLATFLYHLRIEAEVEVVEMHDSDISAYTYERTLMMEQRSQMLRHMRLSKTERDREAQLVKDRNSMLRLTSIGSDEDEETETYQEKVHMTWTKDKYMASRGQKAKSMEGFQDLLNMRPDQSNVRRMHTAVKLNEVIVNKSHEAKLVLLNMPGPPRNPEGDENYMEFLEVLTEGLERVLLVRGGGSEVITIYS

SEQ ID NO: 33547 - protein, 1141 aa, Artificial Sequence
  derived and/or modified sequence
MASVRFMVTPTKIDDIPGLSDTSPDLSSRSSSRVRFSSRESVPETSRSEPMSEMSGATTSLATVALDPPSDRTSHPQDVIEDLSQNSITGEHSQLLDDGHKKARNAYLNNSNYEEGDEYFDKNLALFEEEMDTRPKVSSLLNRMANYTNLTQGAKEHEEAENITEGKKKPTKTPQMGTFMGVYLPCLQNIFGVILFLRLTWVVGTAGVLQAFAIVLICCCCTMLTAISMSAIATNGVVPAGGSYFMISRALGPEFGGAVGLCFYLGTTFAAAMYILGAIEIFLVYIVPRAAIFHSDDALKESAAMLNNMRVYGTAFLVLMVLVVFIGVRYVNKFASLFLACVIVSILAIYAGAIKSSFAPPHFPVCMLGNRTLSSRHIDVCSKTKEINNMTVPSKLWGFFCNSSQFFNATCDEYFVHNNVTSIQGIPGLASGIITENLWSNYLPKGEIIEKPSAKSSDVLGSLNHEYVLVDITTSFTLLVGIFFPSVTGIMAGSNRSGDLKDAQKSIPIGTILAILTTSFVYLSNVVLFGACIEGVVLRDKFGDAVKGNLVVGTLSWPSPWVIVIGSFFSTCGAGLQSLTGAPRLLQAIAKDNIIPFLRVFGHSKANGEPTWALLLTAAIAELGILIASLDLVAPILSMFFLMCYLFVNLACALQTLLRTPNWRPRFRYYHWALSFMGMSICLALMFISSWYYAIVAMVIAGMIYKYIEYQGAEKEWGDGIRGLSLSAARFALLRLEEGPPHTKNWRPQLLVLLKLDEDLHVKHPRLLTFASQLKAGKGLTIVGSVIVGNFLENYGEALAAEQTIKHLMEAEKVKGFCQLVVAAKLREGISHLIQSCGLGGMKHNTVVMGWPNGWRQSEDARAWKTFIGTVRVTTAAHLALLVAKNISFFPSNVEQFSEGNIDVWWIVHDGGMLMLLPFLLKQHKVWRKCSIRIFTVAQLEDNSIQMKKDLATFLYHLRIEAEVEVVEMHDSDISAYTYERTLMMEQRSQMLRHMRLSKTERDREAQLVKDRNSMLRLTSIGSDEDEETETYQEKVHMTWTKDKYMASRGQKAKSMEGFQDLLNMRPDQSNVRRMHTAVKLNEVIVNKSHEAKLVLLNMPGPPRNPEGDENYMEFLEVLTEGLERVLLVRGGGSEVITIYS

SEQ ID NO: 33548 - protein, 152 aa, Artificial Sequence
  derived and/or modified sequence
MASVRFMVTPTKIDDIPGLSDTSPDLSSRSSSRVRFSSRESVPETSRSEPMSEMSGATTSLATVALDPPSDRTSHPQDVIEDLSQNSITGEHSQLLDDGHKKARNAYLNNSNYEEGDEYFDKNLALFEEEMDTRPKVSSLLNRMANYTNLTQ

SEQ ID NO: 33549 - protein, 1135 aa, Artificial Sequence
  derived and/or modified sequence
MHPPETTTKMASVRFMVTPTKIDDIPGLSDTSPDLSSRSSSRVRFSSRESVPETSRSEPMSEMSGATTSLATVALDPPSDRTSHPQDVIEDDGHKKARNAYLNNSNYEEGDEYFDKNLALFEEEMDTRPKVSSLLNRMANYTNLTQGAKEHEEAENITEGKKKPTKTPQMGTFMGVYLPCLQNIFGVILFLRLTWVVGTAGVLQAFAIVLICCCCTMLTAISMSAIATNGVVPAGGSYFMISRALGPEFGGAVGLCFYLGTTFAAAMYILGAIEIFLVYIVPRAAIFHSDDALKESAAMLNNMRVYGTAFLVLMVLVVFIGVRYVNKFASLFLACVIVSILAIYAGAIKSSFAPPHFPVCMLGNRTLSSRHIDVCSKTKEINNMTVPSKLWGFFCNSSQFFNATCDEYFVHNNVTSIQGIPGLASGIITENLWSNYLPKGEIIEKPSAKSSDVLGSLNHEYVLVDITTSFTLLVGIFFPSVTGIMAGSNRSGDLKDAQKSIPIGTILAILTTSFVYLSNVVLFGACIEGVVLRDKFGDAVKGNLVVGTLSWPSPWVIVIGSFFSTCGAGLQSLTGAPRLLQAIAKDNIIPFLRVFGHSKANGEPTWALLLTAAIAELGILIASLDLVAPILSMFFLMCYLFVNLACALQTLLRTPNWRPRFRYYHWALSFMGMSICLALMFISSWYYAIVAMVIAGMIYKYIEYQGAEKEWGDGIRGLSLSAARFALLRLEEGPPHTKNWRPQLLVLLKLDEDLHVKHPRLLTFASQLKAGKGLTIVGSVIVGNFLENYGEALAAEQTIKHLMEAEKVKGFCQLVVAAKLREGISHLIQSCGLGGMKHNTVVMGWPNGWRQSEDARAWKTFIGTVRVTTAAHLALLVAKNISFFPSNVEQFSEGNIDVWWIVHDGGMLMLLPFLLKQHKVWRKCSIRIFTVAQLEDNSIQMKKDLATFLYHLRIEAEVEVVEMHDSDISAYTYERTLMMEQRSQMLRHMRLSKTERDREAQLVKDRNSMLRLTSIGSDEDEETETYQEKVHMTWTKDKYMASRGQKAKSMEGFQDLLNMRPDQSNVRRMHTAVKLNEVIVNKSHEAKLVLLNMPGPPRNPEGDENYMEFLEVLTEGLERVLLVRGGGSEVITIYS

SEQ ID NO: 33550 - DNA, 3408 bp, Artificial Sequence
  derived and/or modified sequence
atgcatcccccagaaaccacaaccaaaatggcgtcagttcgcttcatggttacaccaactaaaattgatgacattcccgggctctcagacacaagccctgacctgtcctctcgcagttcttcccgggttagatttagttcccgtgagtcagtccctgagacaagtcggtcagaacccatgagtgaaatgagcggcgctaccacgtcacttgccacggttgcactcgatcccccttcagataggacgtcacacccccaagacgttatcgaggacgacggtcataaaaaggcgagaaatgcatatctgaataattcaaactatgaggaaggcgacgaatatttcgacaaaaatctggcgttattcgaggaagaaatggatactcggcctaaagtctctagcctgctgaaccgtatggcaaattacaccaatttaacacaaggagctaaagagcacgaggaagctgaaaacatcacagaaggcaagaaaaagccaacgaagacaccccagatggggactttcatgggcgtttatctcccctgtcttcaaaatattttcggggtgatccttttcctcaggctaacctgggtggtgggtacggccggggtcctgcaagcctttgctatcgttctcatatgctgttgctgcaccatgttaacggcaattagcatgtcagcaatagccaccaatggggtggttcccgctggtggctcatattttatgattagcagagcgttgggtcctgagtttggaggcgctgtcggactttgcttctatttgggtaccaccttcgccgcagcgatgtacatcctcggagccatcgagatctttcttgtgtacatagtgccgcgcgctgccatcttccattccgacgatgcgctcaaggagagtgctgcgatgctcaataacatgcgggtctacggaactgcttttcttgtgctcatggttttagtggtcttcattggcgttagatacgtgaataagtttgcatcactcttcctggcttgtgtcatcgtctccatattggccatctatgccggagcaattaagagcagctttgcccccccccactttcctgtatgcatgctggggaaccggaccctgagctccagacacattgacgtgtgcagcaagacgaaggagattaacaacatgacagtgccttctaaattatgggggttcttctgtaatagttcacaattttttaacgcaacctgtgacgaatactttgtacacaataatgtaacctcaattcagggtatcccaggcctcgcttcaggaataattacagaaaacctctggagtaattacctgcctaagggtgagatcatcgaaaaaccttcagcaaagagcagtgatgtcttgggttccctgaaccacgagtatgttcttgtcgacatcacaacttcttttacactgcttgtggggatattcttccctagcgtgaccgggatcatggccgggagcaacaggagtggtgacctgaaagacgcccagaagagcattccaattggtaccattttggccatactgacaacaagttttgtttacttgagcaacgttgtgttatttggggcctgcatcgagggtgtggtgctcagggataagttcggcgacgccgtcaaaggcaacctggtggttggaaccctttcatggccctccccatgggtcatcgtaatcggcagctttttctctacatgtggtgcaggtctgcagtcattaaccggcgcacccagacttttacaggccattgccaaggacaacatcattccatttcttagggtgttcgggcactctaaggcaaacggagaaccaacctgggccctgctgctcacagcagctatcgctgagctggggatcctcatcgcaagcctggacctcgtcgctcctatcctttctatgtttttcctaatgtgctacctcttcgtcaaccttgcctgcgctctgcagaccctacttaggacccccaactggcgaccaagattcaggtactatcactgggctctgagcttcatgggtatgtccatatgtctagctctgatgttcatttcatcctggtactatgccatcgtcgccatggtgattgctggaatgatttacaaatacatcgagtatcagggagccgagaaggaatggggggacggaatccgcggattgtccctgtcagcagcccgctttgccctgctcaggctggaggaagggcctccgcacacaaagaattggagaccacagctgctcgtgctgcttaagttagatgaggacctccatgtgaagcacccgcgcctgcttacgttcgcttcccagctgaaagctgggaaggggttaacgattgttggctctgtgatagtcggtaatttcttggagaactacggcgaggctctggctgcagagcaaactattaagcacttgatggaggcagaaaaggtcaaaggcttttgtcagctcgtggtggcagcaaagctccgtgaggggatcagccacttaatacagagctgtggtttagggggtatgaaacacaatacagtggttatgggctggccaaatggttggcggcaatctgaggatgcacgcgcctggaagacatttattggaactgtacgggtcactacagccgcccacttagctttgctcgttgccaagaacatttcattcttcccctcgaacgtcgagcagttttcggaggggaacatcgacgtgtggtggatcgttcatgacggcggcatgctcatgttacttccttttttacttaaacagcataaagtctggcggaaatgtagcatccgtatcttcactgtggcacaattggaagacaactcaatccagatgaaaaaagatctggcgacatttctgtaccatctgcgtatagaggctgaagtcgaggtggtggagatgcatgattccgatatttccgcttatacatacgagagaactttgatgatggagcagagatcacagatgcttagacacatgcgcctgagtaagacggaaagggaccgagaagcccagcttgtgaaggatcgaaattcaatgctgcgactcacgtccatcggatctgatgaggatgaggagaccgagacttatcaggaaaaggtacacatgacctggacaaaagacaaatacatggccagccggggccaaaaggccaaatcaatggaaggcttccaagacctgctgaacatgagaccagatcagtcaaatgtgcgcagaatgcacacagcggttaaactgaatgaggtgatcgtgaacaaaagccatgaagcaaagcttgtgctgctgaacatgcccgggcctcctaggaacccggagggcgacgagaattacatggagtttttggaagtcctgaccgagggactggagagagtgctgctggtacgcggaggtgggagtgaggtcatcacaatctatagctag

SEQ ID NO: 33551 - DNA, 3408 bp, Artificial Sequence
  derived and/or modified sequence
atgcaccccccagagaccaccaccaagatggcctctgtgcgcttcatggtgacccccaccaagattgatgacatccctggcctgagtgacaccagcccagacctgagcagccgcagcagcagccgggtgcgcttcagcagccgggagagcgtgcctgagaccagccgctctgagcccatgtctgagatgtctggggccaccaccagcctggccaccgtggccctggaccccccaagtgacaggaccagccacccccaggatgtgattgaagatgatggccacaagaaggccagaaatgcctacctgaacaacagcaactatgaggagggagatgagtactttgacaagaacctggccctgtttgaggaggagatggacacccggcccaaggtgagcagcctgctgaacaggatggccaactacaccaacctgacccagggcgccaaggagcacgaggaggccgagaacatcacagagggcaagaagaagcccaccaagaccccccagatgggcaccttcatgggcgtgtacctgccctgcctgcagaacatctttggagtcatcctcttcctgcggctgacctgggtggtgggcacagctggggtgctgcaggcctttgccatcgtgctgatctgctgctgctgcaccatgctgacagccatctccatgtctgccatcgccaccaatggagtggtgcctgctgggggcagctacttcatgatcagccgggccctgggccctgagtttggaggagctgtgggcctgtgcttctacctgggcaccacctttgctgctgccatgtacatcctgggcgccatcgagatcttcctggtgtacatcgtgccccgggccgccatcttccacagtgatgatgccctgaaggagagcgctgccatgctgaacaacatgagggtgtatggaacagccttcctggtgctgatggtgctggtggtgttcatcggcgtgcgctacgtgaacaagtttgccagcctcttcctggcctgtgtgattgtgtccatcctggccatctatgctggggccatcaagagcagctttgccccaccccacttccctgtgtgcatgctgggcaacagaaccctgagcagccgccacattgatgtgtgcagcaagaccaaggagatcaacaacatgacagtgcccagcaagctgtggggcttcttctgcaacagcagccagttcttcaatgccacctgtgatgagtactttgtgcacaacaacgtgaccagcatccagggcatccctggcctggccagcggcatcatcacagagaacctgtggagcaactacctgcccaagggggagatcatcgagaagcccagcgccaagagcagtgatgtgctgggcagcctgaaccatgaatatgtgctggtggacatcaccaccagcttcaccctgctggtgggcatcttcttccccagcgtgacaggcatcatggccggcagcaacagaagtggggacctgaaggatgcccagaagagcatccccatcggcaccatcctggccatcctgaccaccagctttgtgtacctgagcaatgtggtgctgtttggagcctgcattgaaggagtggtgctgcgggacaagtttggagatgctgtgaagggcaacctggtggtgggcaccctgtcctggcccagcccctgggtgattgtgattggcagcttcttcagcacctgtggggccggcctgcagagcctgaccggggccccccggctgctgcaggccatcgccaaggacaacatcatccccttcctgcgggtgtttggccacagcaaggccaatggagagcccacctgggccctgctgctgacagctgccatcgccgagctgggcatcctgattgccagcctggacctggtggcccccatcctgtccatgttcttcctgatgtgctacctgtttgtgaacctggcctgtgccctgcagaccctgctgcggacccccaactggaggccccgcttccgctactaccactgggccctgtccttcatgggcatgagcatctgcctggccctgatgttcatcagctcctggtactatgccatcgtggccatggtgattgctggcatgatctacaagtacatcgagtaccagggcgctgagaaggagtggggagatggcatccggggcctgagcctgtctgctgccaggtttgccctgctgcggctggaggagggccccccccacaccaagaactggaggccccagctgctggtgctgctgaagctggatgaggacctgcacgtgaagcacccccggctgctgacctttgccagccagctgaaggccggcaagggcctgaccatcgtgggctctgtgattgtgggcaacttcctggagaactatggagaggccctggccgctgagcagaccatcaagcacctgatggaggccgagaaggtgaagggcttctgccagctggtggtggccgccaagctgcgggagggcatcagccacctgatccagagctgtggcctgggcggcatgaagcacaacacagtggtgatgggctggcccaacggctggaggcagagtgaagatgcccgggcctggaagaccttcatcggcaccgtgcgggtgaccacagctgcccacctggccctgctggtggccaagaacatctccttcttccccagcaatgtggagcagttcagcgagggcaacattgatgtgtggtggatcgtgcatgatggcggcatgctgatgctgctgcccttcctgctgaagcagcacaaggtgtggaggaaatgttccatccgcatcttcaccgtggcccagctggaggacaacagcatccagatgaagaaggacctggccaccttcctgtaccacctgcgcatcgaggccgaggtggaggtggtggagatgcatgacagcgacatcagcgcctacacctatgaaagaaccctgatgatggagcagaggagccagatgctgcggcacatgaggctgagcaagacagagcgggaccgggaggcccagctggtgaaggacaggaacagcatgctgcggctgaccagcattggaagtgatgaagatgaggagacagagacctaccaggagaaggtgcacatgacctggaccaaggacaagtacatggccagccggggccagaaggccaagtccatggagggcttccaggacctgctgaacatgaggccagaccagagcaatgtgcggaggatgcacacagctgtgaagctgaatgaggtgattgtgaacaagagccatgaggccaagctggtgctgctgaacatgcctggcccccccaggaacccagaaggagatgagaactacatggagttcctggaggtgctgacagagggcctggagcgggtgctgctggtgcggggcggcggcagcgaggtgatcaccatctacagctag

SEQ ID NO: 33552 - DNA, 3408 bp, Artificial Sequence
  derived and/or modified sequence
atgcacccccccgagaccaccaccaagatggccagcgtgcggttcatggtgacacctacgaaaattgacgacatcccgggtttgagcgacacatccccagatctgagcagccgctcatcatctcgggtgcgcttctcttcgcgggagtcagtgcccgagacatccaggtcggagcccatgtctgagatgagtggcgcaactacctccttagcaaccgttgctttagaccccccaagcgaccgcacaagccacccacaagatgtgatcgaagacgatggacataagaaagctcgcaatgcctacctgaacaactctaattacgaagaaggcgacgagtactttgataagaatttggccctgtttgaggaggaaatggacacacggcctaaagttagcagcctgttgaaccgtatggctaactacactaatctgacccagggagcaaaggagcatgaagaagccgagaacatcactgaaggcaagaagaagccgacgaaaacaccacaaatggggacttttatgggcgtgtacttgccctgccttcagaatatctttggagttatcttgtttcttaggctaacctgggtcgttgggactgccggcgtgctgcaggccttcgccattgttctcatctgctgttgttgcacaatgctaactgcaatttccatgtctgccattgctactaatggagtagtgccagctggaggatcgtatttcatgatctcccgtgctcttggaccagaatttggtggggccgtgggattgtgcttttatctgggaaccacctttgcagcggctatgtacatcctcggcgcaatcgagattttccttgtttacatagttccccgcgcggctattttccactctgacgacgccttgaaggagtccgcagctatgctgaacaacatgcgggtctatgggactgccttcctagtactgatggtgctggtcgtatttatcggcgtgcggtatgtgaataagtttgcatcgttgtttctggcttgtgtaattgtgtcaattctcgcaatctatgcgggagccataaagtcatcattcgctcccccccattttccagtgtgcatgttgggtaataggacgcttagctccagacacatcgatgtgtgcagtaagacaaaggaaatcaataatatgacggtgccatcgaagctctggggattcttttgcaatagctcccaattcttcaacgccacatgtgatgaatactttgtccacaataatgtcacttctatccagggtattcccgggctggcgtctggaattattacagagaatttatggagtaactacttgccaaagggagaaatcatcgagaaaccgtctgctaaatctagtgacgtcctcggctcacttaatcatgaatatgttctagtcgacatcaccacctcgttcactcttttggtgggtatcttcttcccgtcagtcaccggtattatggctgggagcaacagaagcggagacctgaaggatgcccagaagagcatacccatagggacgatattagccattttaaccaccagtttcgtttatctctctaacgtggtgttgttcggcgcttgcattgaaggcgtggtcctacgggacaaattcggagatgctgttaaaggaaatctcgtggtcggaacactttcatggccatccccttgggtcatcgtgattggtagctttttcagcacgtgcggcgcgggtctgcagagtctcaccggtgcaccaaggcttctacaagccattgccaaggataacattattcccttcctgcgcgtgttcggacactctaaagctaatggggagcccacatgggccctcctgcttacagctgccattgccgaactcggcatccttattgccagtctcgatttggtggctccaatactcagcatgtttttcctgatgtgttaccttttcgtaaatctcgcttgcgctctccagactctcctgaggactcccaattggcgacccaggttccggtattaccattgggccctgagctttatgggtatgagcatttgtctggccttaatgtttataagctcgtggtactacgcaatcgtcgccatggttattgccggtatgatttataagtatatcgaataccaaggggccgagaaagagtggggcgacgggatcaggggtcttagtctgagcgccgccagattcgcactcctgaggctcgaagagggacctccccacaccaagaactggcgcccccagctgctggtcctgctcaagctggacgaggacttgcacgtgaagcacccacgcttacttaccttcgccagtcagctgaaagctgggaaaggtctcacaatcgtcgggtcagtgattgtcggtaatttcctggagaattacggtgaagcactcgccgccgagcagaccattaagcaccttatggaagctgaaaaggtgaaagggttctgccaactggtggtggctgccaagctgcgagagggtatctcacacttaatccagtcttgtggactcggaggcatgaagcacaatactgtagtgatgggctggcctaacggatggcgccaatctgaggatgctagagcttggaagactttcataggaacagtgagagttaccactgcggctcacctggcactgctggtcgccaagaatatctcttttttccctagcaacgtggagcagttctcagagggcaatatcgacgtctggtggattgtgcacgacggagggatgttaatgttgctccccttcctgctgaagcaacataaggtttggcgaaagtgcagcatcaggatctttaccgtggcgcaactcgaggataacagcatccaaatgaaaaaagacctggctacattcttataccatctccgcatcgaggctgaagtcgaagtggtcgagatgcacgactccgatatcagtgcttatacatatgaacgtaccctgatgatggaacagcgatcgcagatgcttaggcacatgagattaagtaaaacggaacgggatagggaagcccagctcgtcaaggaccgtaatagcatgcttagactaacatctatcgggtcagacgaggatgaggagacagaaacatatcaggagaaagttcacatgacctggactaaggacaagtatatggcaagccgaggccagaaggctaagtccatggagggttttcaggacctgcttaacatgagacccgaccaaagcaatgtgagacgcatgcacaccgccgtgaagctgaacgaggtgatcgttaacaagagccatgaggctaagctggtgctcctgaatatgcccgggcctcccagaaaccccgaaggcgacgaaaactacatggaattcctagaggtattgaccgagggcctggaaagggttctgctggtgagaggcggcggctcagaggtaatcacgatctactcatag

SEQ ID NO: 33553 - DNA, 3408 bp, Artificial Sequence
  derived and/or modified sequence
atgcacccccctgagacaaccaccaagatggccagcgtacgctttatggtgacacctaccaaaatagacgatattccaggcctgtccgatacaagcccagacctcagttcaagaagcagctcgagagtgcgatttagctcacgtgagtctgtgcctgagaccagtcgaagcgaacctatgtcagaaatgtcaggcgcaaccacttcgttggcaaccgtggccctggaccccccttccgatagaacgtcccaccctcaggatgtgatcgaggacgacgggcataaaaaagccagaaacgcttatctcaacaacagtaactatgaggaaggagatgaatacttcgacaagaaccttgccctgttcgaggaagagatggacacaaggccaaaagtgagcagcctcttgaacagaatggctaactatacaaacctcactcagggagcaaaggagcacgaagaagctgagaacataaccgaggggaaaaaaaagcctacgaagacaccccagatgggcacatttatgggggtgtacctcccatgcctccagaacatcttcggcgtgatcctgtttctgagattgacatgggtggtgggaacggccggagtgttacaggcttttgccattgtcctgatctgttgctgttgcacaatgttaacggccatttcaatgagtgctattgccacgaacggggtagttccagctggcggaagctacttcatgatctctcgcgctttaggcccagagtttgggggagcggtgggcctctgcttttacctcggaacgacatttgcagcagccatgtatattctgggagcgatcgagatatttcttgtgtacatagtgcccagagccgcaatctttcactctgacgatgccctgaaggaatccgccgcaatgctgaataatatgcgcgtctatgggacagccttcctggtgctcatggtcctcgtggtattcattggtgtgagatatgtaaataagttcgctagccttttccttgcgtgtgtaatagtgagtattttagctatctacgccggagccattaagagctctttcgctcctccgcacttcccagtgtgtatgcttggcaacaggactctgagctctcgccatatcgatgtgtgctccaagactaaagagatcaacaacatgacggttccgagcaagctgtggggctttttctgtaactcaagccagttcttcaacgccacctgcgatgagtattttgtgcacaataatgtgacttccattcaagggatccctggacttgcgagcggcatcattacagaaaatttatggagcaattacctgcctaaaggtgagataatcgagaagccatcagctaaaagctctgatgtgctgggctccctgaatcacgagtatgtgctggtggacattacaacatcttttacgctgctggtgggaatattttttccaagcgtgactggcataatggcaggaagtaaccggtccggcgacctgaaggacgcccagaaatctattcctattggtaccatcctggccatcctgactacatctttcgtgtatctgagcaatgtggtgctgttcggggcttgcatagagggtgtcgtgctcagggataagttcggcgatgccgtaaaaggaaatctggtggtaggcactttgagctggccatctccctgggtgattgtcataggctctttcttctccacatgcggagctggacttcagtccctcacgggggctcctcggcttcttcaggccatcgccaaggataatataattccttttttgagggtttttgggcactctaaggctaatggcgaacctacttgggctttgctgttgactgccgcaatcgccgagttagggattctcatagccagcctggatctcgttgcccctatactttctatgttctttctaatgtgctacttgttcgtaaatctcgcctgtgctctccagactctgttacgcactcccaactggcgccctagattcagatattaccactgggccctcagctttatgggcatgtcaatctgtcttgctctcatgtttatctcctcctggtattacgcgatcgttgccatggttatagctgggatgatatacaagtatattgagtatcaaggcgctgagaaggaatggggtgatggaataagaggactctccttatcagctgcacgcttcgctctcctcaggcttgaggaggggcctccgcacactaagaattggaggcctcagttgctggtgctgctcaaactggacgaagacctccatgtgaaacatccgaggctgcttaccttcgcttcccagcttaaggcagggaaggggcttacaattgttggatcagtgatcgtagggaactttctggaaaattatggcgaggccctcgcggcagagcagacaattaaacacctgatggaagccgagaaagtgaaaggattctgccagctggtggtggccgctaagctgagggagggcatatctcatctaatccagagctgtggcctgggcggtatgaagcataacactgtggtaatgggctggcccaacggctggaggcagagcgaagacgccagggcgtggaaaacctttattggcacggtcagagtcacaaccgcagctcatttagccctgctagtcgcaaagaatatctccttttttcccagcaatgttgagcagttctctgaaggcaatattgacgtctggtggattgtgcatgatgggggaatgttgatgcttttaccttttttgctgaaacagcataaggtgtggcgaaaatgcagtataagaatatttactgtcgcacaactagaagacaacagcatccaaatgaagaaagacctggcgacgtttctctaccacctgcgtatcgaggccgaagtcgaggtagtcgaaatgcacgacagtgatatcagcgcatatacctatgagagaactcttatgatggagcaaagaagccagatgttgcgccatatgaggttgtccaaaaccgagcgggatagagaagcccagcttgtaaaggacagaaattccatgctgcgcctgaccagcatcgggagtgacgaggacgaagaaacggagacttatcaggaaaaagtgcacatgacatggaccaaagataagtacatggctagcagaggacagaaggctaagtcgatggaaggcttccaggatctgctcaacatgcggccagaccaatctaatgtcaggcgaatgcacacagccgttaaactcaatgaagtaatcgtgaacaagtcccatgaggccaagctggtgctgctcaatatgcctggtcccccaagaaatcccgaaggtgacgagaactacatggaattcctcgaagtgctcacggaggggctggaaagagttttgctcgtgcgcggtggagggagcgaagtgataactatctactcctag

SEQ ID NO: 33554 - DNA, 4194 bp, Artificial Sequence
  derived and/or modified sequence
tgagtagaagtattcttagttggggctttttgtgtggtgtgaatcaaggttattgaaatgtgttatttttcaagttatcttttgtattgcagtcaaaagtagctagcgtaagaggaagattttgcgaggttccccccactttttttgttcttaaaaagaacaaaatgcatcctccagaaaccaccaccaagatggcttcagttcggttcatggtgacaccgacaaagatcgatgacattccaggtttgtcagacaccagtccggacctcagctctcgatctagttcccgagtaagatttagctcccgggaaagcgtgcctgaaacaagccggagtgagcctatgagtgagatgtctggggccaccacttcgctggcaactgttgcactggatccacccagtgaccggacttctcacccccaggatgtcatcgaggacgacggacataagaaagctcgaaatgcttatctcaataattccaattatgaagaaggagatgaatattttgataaaaatttggcactctttgaggaagaaatggacaccagaccgaaggtgtcttccctcctcaaccgcatggccaattacactaatctgactcaaggagcaaaggaacatgaagaggcagaaaacatcactgaagggaaaaagaagcccaccaagaccccccaaatgggtaccttcatgggtgtctacctcccatgtctacaaaatatttttggagtgatcctttttttacgccttacatgggtggtgggcacagctggagttcttcaggcttttgcaattgtccttatctgctgctgctgtacaatgttgactgctatctccatgagtgccattgccactaatggagtggtgccagctgggggctcatactttatgatttcccgggcactgggcccagagtttggtggggctgttggcctctgcttttatcttggtaccacatttgcagcagccatgtacatccttggtgccattgaaatctttctggtctatatcgtcccccgagctgccatctttcacagtgatgacgcactcaaggaatcagcagccatgctaaataacatgcgtgtctacggcacagctttcttggtccttatggtattagtggtatttatcggcgtacgctatgtgaacaagtttgcctcacttttcctggcctgtgtcattgtgtccatcttggccatctatgctggagccatcaagtcttcttttgctcctccacacttcccggtctgcatgctgggtaaccgcaccctttcatcaagacacattgacgtttgctctaagaccaaggaaattaacaacatgacagtcccatcaaagttatggggattcttctgtaactcgagtcaatttttcaatgccacctgtgatgaatactttgttcacaataacgtcacttcaatccagggcattcctggattggctagtggtataattacagagaatctttggagtaattacctacccaagggagagatcatcgaaaagccttcagccaaatcttctgatgtcttaggcagcttaaaccatgaatatgttcttgttgacatcaccacctccttcacgcttctggtgggaatcttctttccctctgttacaggtatcatggctggatcaaacagatctggagatctgaaagatgctcagaagtctattccgattggtactatccttgccatcctgaccacctcctttgtttatttaagcaatgttgtcctttttggtgcatgtattgaaggggttgttctcagagacaagttcggtgatgctgtgaaaggtaatttggtggtaggcaccttatcttggccatccccatgggtgattgttattggctccttcttttcaacatgtggggctggacttcagagcctcacaggtgcaccgaggctgctacaagctattgccaaggataacatcataccgtttctgagggtttttggccacagcaaagccaatggggaacctacctgggctttacttctaactgctgccattgcagagcttggaatactcattgcctccctggatcttgtggccccaattctttccatgttttttctcatgtgttacctctttgtaaacttggcatgtgccttgcaaacattacttcgaacacccaactggagaccccgattccgctactaccattgggccctttctttcatgggaatgagtatctgtctggctctgatgttcatttcttcctggtattatgccattgtagccatggtaatagctggtatgatctacaagtacattgaataccaaggagctgagaaagaatggggtgatggtatccgtgggctgtccctcagtgcagcccggtttgctttgcttcgattggaggaaggacctccacacactaaaaactggaggcctcagttgcttgtattactgaaactagatgaagacttacatgtcaagcatcctcgcctcctcacctttgcctcacagctcaaagcaggaaaaggtctcactattgtgggctctgtcatcgtggggaacttcctagagaactacggtgaagctttagctgctgagcagaccataaagcacctaatggaggcagagaaggtaaaaggattctgccagctggtggtggccgccaagctgagagagggcatttcccacctcatccagtcatgtggccttgggggcatgaagcacaacacggtggtgatgggctggcctaatggctggcgtcaaagcgaagatgcccgcgcttggaagacttttattggcacagttcgagtgacaactgctgcccatcttgcactgctggtggctaaaaacatctccttctttcccagcaatgtggagcaattttctgagggcaacattgatgtgtggtggattgtgcatgatggggggatgcttatgctactaccattcctactgaaacagcacaaggtgtggcgaaagtgcagcatacggatcttcacagtagcccaattagaagacaacagtatccaaatgaagaaggacctagccaccttcctatatcacttacgcattgaggcggaggtagaagtggtggagatgcatgacagtgatatatcagcatatacttacgagcgcactttgatgatggaacaaaggtcccagatgctccggcacatgcggctatccaaaacagagcgagacagagaggcacaattggtgaaagaccgaaactcaatgctacgattgaccagcattggctctgatgaggacgaagagacagaaacctatcaggagaaggtgcacatgacttggacaaaagacaagtacatggcatcccggggacaaaaagcgaagtcaatggaaggattccaggacctgcttaacatgcgtccggaccagtccaatgtgaggcggatgcatacagcagtgaaactcaacgaggttatagttaacaagtcccatgaagcaaagctggttttattgaatatgccagggccaccccgaaaccctgagggtgatgaaaactacatggagttcctagaggtgcttaccgagggactagagcgagtcctacttgtccggggtggtggcagtgaagtgatcaccatttattcataacctactctgaatgaccgtgcttgacctgttttcttaaaaggcctacgtcctccatggaagtgccagctcattactaccactcccactcaactagaagcctgtgttctgtacacatcatactgaactcttgatgagctgagcctcaagtacctgtgtaaaagagctcccatctgatctgcagtcattacagaaaaagcaaatattccctcaacatcagaacaatgctcaagtctttcaagccacgtctgagcagtcaaaggcaaattagaattaacaagctgagccaataaatgaattggtaaaagggatgctagaaattcaactgaagaaaaaaagcaagtcaagtacgtattcagcattaaagatgaatctcagaagtcatggttcaatgttgacactgtgaggataacaactagagacagcttcatcttactaaagaatttatggtcaagtatatttggacctattatcctcggcaagccaagatgcaaacattttttagctatatttctttagtatacccactgctgtaattttatattaggatactaacttgaaacatggctgcagcctctacttcttcaaaaacatccccccaaaataccagatttaaatatccaaa

SEQ ID NO: 33555 - DNA, 3408 bp, Artificial Sequence
  derived and/or modified sequence
atgcacccccccgagaccaccaccaagatggccagcgtgagattcatggtgacccccaccaagatcgacgacatccccggcctgagcgacaccagccccgacctgagcagcagaagcagcagcagagtgagattcagcagcagagagagcgtgcccgagaccagcagaagcgagcccatgagcgagatgagcggcgccaccaccagcctggccaccgtggccctggacccccccagcgacagaaccagccacccccaggacgtgatcgaggacgacggccacaagaaggccagaaacgcctacctgaacaacagcaactacgaggagggcgacgagtacttcgacaagaacctggccctgttcgaggaggagatggacaccagacccaaggtgagcagcctgctgaacagaatggccaactacaccaacctgacccagggcgccaaggagcacgaggaggccgagaacatcaccgagggcaagaagaagcccaccaagaccccccagatgggcaccttcatgggcgtgtacctgccctgcctgcagaacatcttcggcgtgatcctgttcctgagactgacctgggtggtgggcaccgccggcgtgctgcaggccttcgccatcgtgctgatctgctgctgctgcaccatgctgaccgccatcagcatgagcgccatcgccaccaacggcgtggtgcccgccggcggcagctacttcatgatcagcagagccctgggccccgagttcggcggcgccgtgggcctgtgcttctacctgggcaccaccttcgccgccgccatgtacatcctgggcgccatcgagatcttcctggtgtacatcgtgcccagagccgccatcttccacagcgacgacgccctgaaggagagcgccgccatgctgaacaacatgagagtgtacggcaccgccttcctggtgctgatggtgctggtggtgttcatcggcgtgagatacgtgaacaagttcgccagcctgttcctggcctgcgtgatcgtgagcatcctggccatctacgccggcgccatcaagagcagcttcgcccccccccacttccccgtgtgcatgctgggcaacagaaccctgagcagcagacacatcgacgtgtgcagcaagaccaaggagatcaacaacatgaccgtgcccagcaagctgtggggcttcttctgcaacagcagccagttcttcaacgccacctgcgacgagtacttcgtgcacaacaacgtgaccagcatccagggcatccccggcctggccagcggcatcatcaccgagaacctgtggagcaactacctgcccaagggcgagatcatcgagaagcccagcgccaagagcagcgacgtgctgggcagcctgaaccacgagtacgtgctggtggacatcaccaccagcttcaccctgctggtgggcatcttcttccccagcgtgaccggcatcatggccggcagcaacagaagcggcgacctgaaggacgcccagaagagcatccccatcggcaccatcctggccatcctgaccaccagcttcgtgtacctgagcaacgtggtgctgttcggcgcctgcatcgagggcgtggtgctgagagacaagttcggcgacgccgtgaagggcaacctggtggtgggcaccctgagctggcccagcccctgggtgatcgtgatcggcagcttcttcagcacctgcggcgccggcctgcagagcctgaccggcgcccccagactgctgcaggccatcgccaaggacaacatcatccccttcctgagagtgttcggccacagcaaggccaacggcgagcccacctgggccctgctgctgaccgccgccatcgccgagctgggcatcctgatcgccagcctggacctggtggcccccatcctgagcatgttcttcctgatgtgctacctgttcgtgaacctggcctgcgccctgcagaccctgctgagaacccccaactggagacccagattcagatactaccactgggccctgagcttcatgggcatgagcatctgcctggccctgatgttcatcagcagctggtactacgccatcgtggccatggtgatcgccggcatgatctacaagtacatcgagtaccagggcgccgagaaggagtggggcgacggcatcagaggcctgagcctgagcgccgccagattcgccctgctgagactggaggagggccccccccacaccaagaactggagaccccagctgctggtgctgctgaagctggacgaggacctgcacgtgaagcaccccagactgctgaccttcgccagccagctgaaggccggcaagggcctgaccatcgtgggcagcgtgatcgtgggcaacttcctggagaactacggcgaggccctggccgccgagcagaccatcaagcacctgatggaggccgagaaggtgaagggcttctgccagctggtggtggccgccaagctgagagagggcatcagccacctgatccagagctgcggcctgggcggcatgaagcacaacaccgtggtgatgggctggcccaacggctggagacagagcgaggacgccagagcctggaagaccttcatcggcaccgtgagagtgaccaccgccgcccacctggccctgctggtggccaagaacatcagcttcttccccagcaacgtggagcagttcagcgagggcaacatcgacgtgtggtggatcgtgcacgacggcggcatgctgatgctgctgcccttcctgctgaagcagcacaaggtgtggagaaagtgcagcatcagaatcttcaccgtggcccagctggaggacaacagcatccagatgaagaaggacctggccaccttcctgtaccacctgagaatcgaggccgaggtggaggtggtggagatgcacgacagcgacatcagcgcctacacctacgagagaaccctgatgatggagcagagaagccagatgctgagacacatgagactgagcaagaccgagagagacagagaggcccagctggtgaaggacagaaacagcatgctgagactgaccagcatcggcagcgacgaggacgaggagaccgagacctaccaggagaaggtgcacatgacctggaccaaggacaagtacatggccagcagaggccagaaggccaagagcatggagggcttccaggacctgctgaacatgagacccgaccagagcaacgtgagaagaatgcacaccgccgtgaagctgaacgaggtgatcgtgaacaagagccacgaggccaagctggtgctgctgaacatgcccggcccccccagaaaccccgagggcgacgagaactacatggagttcctggaggtgctgaccgagggcctggagagagtgctgctggtgagaggcggcggcagcgaggtgatcaccatctacagctag

SEQ ID NO: 33556 - protein, 393 aa, Artificial Sequence
  derived and/or modified sequence
MAAVGAGGSTAAPGPGAVSAGALEPGTASAAHRRLKYISLAVLVVQNASLILSIRYARTLPGDRFFATTAVVMAEVLKGLTCLLLLFAQKRGNVKHLVLFLHEAVLVQYVDTLKLAVPSLIYTLQNNLQYVAISNLPAATFQVTYQLKILTTALFSVLMLNRSLSRLQWASLLLLFTGVAIVQAQQAGGGGPRPLDQNPGAGLAAVVASCLSSGFAGVYFEKILKGSSGSVWLRNLQLGLFGTALGLVGLWWAEGTAVATRGFFFGYTPAVWGVVLNQAFGGLLVAVVVKYADNILKGFATSLSIVLSTVASIRLFGFHVDPLFALGAGLVIGAVYLYSLPRGAAKAIASASASASGPCVHQQPPGQPPPPQLSSHRGDLITEPFLPKSVLVK

SEQ ID NO: 33557 - protein, 176 aa, Artificial Sequence
  derived and/or modified sequence
MAEVLKGLTCLLLLFAQKRGNVKHLVLFLHEAVLVQYVDTLKLAVPSLIYTLQNNLQYVAISNLPAATFQVTYQLKILTTALFSVLMLNRSLSRLQWASLLLLFTGVAIVQAQQAGGGGPRPLDQNPGAGLAAVVASCLSSGFAGVYFEKILKGSSGSVWLRNLQLGLFGTALGLV

SEQ ID NO: 33558 - DNA, 1182 bp, Artificial Sequence
  derived and/or modified sequence
atggcagccgtgggcgccggtggctccaccgcagcacccggtccaggcgcagtaagcgcaggagccctggaacctggaaccgcgtcagcggctcaccgtagattgaagtatatctccctcgccgtgctggtcgtccagaacgcctcgttaatattatccatccgatacgcacgcaccctgcccggagacaggttcttcgccacaacagccgtggtgatggctgaagtacttaaggggctcacgtgcttgcttttgctcttcgcccagaagaggggcaacgtcaaacatttagttctctttcttcacgaggcagtccttgttcagtatgtggatacattgaagctggccgttccttctcttatctacaccttgcaaaataatcttcaatatgtggcaatttccaacctgcccgctgcaacgtttcaggtgacctatcaattgaagattctgacaacggcactgttttcagtcctcatgctgaatcgctccttgagtcgtcttcaatgggcttccctacttttgctttttacaggagtcgcgatcgtccaagcccaacaggctgggggcggcgggccacggcccctggaccaaaaccctggagccggactcgctgccgtcgtcgccagctgccttagcagcggctttgccggcgtgtacttcgaaaaaattctgaaaggctcttccggatcagtctggctgcggaacctgcaactcggactgtttggaaccgcgctaggattggtgggattgtggtgggccgaaggaacagccgttgccacgcggggattcttcttcggctatacaccagcagtctggggcgtggtcctgaaccaggccttcggtggacttctggtggcagtcgtagtcaagtacgccgacaacattcttaaaggcttcgccacttccctatctatagtactgagcacagtcgcctccattcggttgttcgggtttcatgttgaccccctgtttgcattaggcgccggcctcgtgataggcgcagtatacctttactccctgcctcggggtgctgccaaggctatcgcgtcagcttcagctagcgctagcggcccctgtgttcatcaacaacccccaggtcagccaccgcccccgcagctgtcctcccacaggggggacctgatcactgaaccattcctccctaagagtgtgctggtaaagtag

SEQ ID NO: 33559 - DNA, 531 bp, Artificial Sequence
  derived and/or modified sequence
atggcggaggtgctcaaggggctgacctgcctgcttctgctgttcgcccagaaaagagggaacgtgaaacatctcgttctctttctgcatgaagccgtgttggtgcagtatgttgacacacttaagctggcagtcccgtcactgatctacacattacagaacaatttgcagtatgtggcaatttccaatctacccgcagccacctttcaggttacataccagctgaaaattcttacaaccgcactgttctccgttctgatgctcaatcggagcctctccagactgcagtgggctagtcttcttttgctgtttactggggtagctatcgtccaggcccaacaagccggaggtgggggccctcggcccctggatcaaaaccctggggccggtctggcagcagtggttgcctcctgcttgtcgagcggcttcgccggcgtttacttcgagaagatactgaaagggtcttccggttcagtgtggctgcggaatctgcagctaggcctatttgggaccgcacttggcctcgtgtag

SEQ ID NO: 33560 - DNA, 1182 bp, Artificial Sequence
  derived and/or modified sequence
atggctgctgtgggcgctgggggcagcacagctgcccctggccctggagctgtgtctgctggggccctggagcctggaacagccagcgctgcccaccggcggctgaagtacatcagcctggccgtgctggtggtgcagaatgccagcctcatcctgagcatccgctatgcccggaccctgcccggggaccgcttctttgccaccacagctgtggtgatggccgaggtgctgaagggcctgacctgcctgctgctgctgtttgcccagaagagaggaaatgtgaagcacctggtgctcttcctgcacgaggccgtgctggtgcagtatgtggacaccctgaagctggccgtgcccagcctcatctacaccctgcagaacaacctgcagtatgtggccatcagcaacctgcctgctgccaccttccaggtgacctaccagctgaagatcctgaccacagccctcttctctgtgctgatgctgaacagaagcctgagccggctgcagtgggccagcctgctgctgctcttcaccggggtggccatcgtgcaggcccagcaggccggcggcggcggcccccggcccctggaccagaaccctggagctggcctggccgctgtggtggccagctgcctgagcagcggctttgctggggtgtactttgagaagatcctgaagggcagcagcggctctgtgtggctgaggaacctgcagctgggcctgtttggaacagccctgggcctggtgggcctgtggtgggccgagggcacagctgtggccacccggggcttcttcttcggctacaccccagctgtgtggggcgtggtgctgaaccaggccttcggcggcctgctggtggccgtggtggtgaagtatgctgacaacatcctgaagggctttgccaccagcctgagcatcgtgctgagcacagtggccagcatccggctgtttggcttccacgtggaccccctgtttgccctgggcgccggcctggtgattggagctgtgtacctgtacagcctgcccaggggggccgccaaggccatcgccagcgccagcgccagcgccagcggcccctgtgtgcaccagcagcccccaggccagcccccaccaccccagctgagcagccacagaggagacctgatcacagagcccttcctgcccaagtctgtgctggtgaagtag

SEQ ID NO: 33561 - DNA, 531 bp, Artificial Sequence
  derived and/or modified sequence
atggccgaggtgctgaagggcctgacctgcctgctgctgctgtttgcccagaagagaggaaatgtgaagcacctggtgctcttcctgcacgaggccgtgctggtgcagtatgtggacaccctgaagctggccgtgcccagcctcatctacaccctgcagaacaacctgcagtatgtggccatcagcaacctgcctgctgccaccttccaggtgacctaccagctgaagatcctgaccacagccctcttctctgtgctgatgctgaacagaagcctgagccggctgcagtgggccagcctgctgctgctcttcaccggggtggccatcgtgcaggcccagcaggccggcggcggcggcccccggcccctggaccagaaccctggagctggcctggccgctgtggtggccagctgcctgagcagcggctttgctggggtgtactttgagaagatcctgaagggcagcagcggctctgtgtggctgaggaacctgcagctgggcctgtttggaacagccctgggcctggtgtag

SEQ ID NO: 33562 - DNA, 1182 bp, Artificial Sequence
  derived and/or modified sequence
atggccgccgtgggcgccggcggcagcaccgccgcccccggccccggggccgtgagcgcaggggcacttgagcccggcacagcatccgccgctcatagacgactgaagtacatctcactggccgttctggtggttcagaacgcctctctcatactatccattcgctatgctaggacgctgcccggagatcggttctttgccacaaccgctgttgttatggcagaagtccttaagggccttacgtgtctgctactgctattcgcccagaaaaggggcaacgtcaagcacctggtgctctttctgcatgaggccgttttggttcaatacgtggacacgctaaagctggctgtgccctctctaatttacactctccagaacaacctgcagtatgtcgcgatctccaatctccctgcagccaccttccaggtgacataccagctaaagatactgactacagcactattcagcgtactcatgttgaatcggtctctctctcgactgcaatgggcttcactgctgctcctgtttacgggcgtcgcaatagtccaggcacaacaggctggaggggggggtcctaggcctctagaccagaatcctggggctggcctcgccgcagtggtggcctcttgcctgtccagtggcttcgccggagtctactttgaaaagattttgaagggaagctccggaagcgtctggctgcggaatctgcagctcggattattcgggactgcccttggtctggtgggcttgtggtgggctgaaggaaccgctgtggcaacgaggggtttcttcttcggatacaccccggctgtttggggtgtagtgcttaatcaggcttttggcggcttgctggttgcagtagtggttaaatatgcagacaacattctgaagggcttcgcaacatccttgtccatagtgttatccactgtcgcctccatccgcctctttggattccacgtcgaccccttgtttgcactcggtgctggcctggttatcggagctgtctacctttatagtctaccgcggggggctgcaaaagctatcgccagcgcaagcgcaagtgctagtggaccttgcgtgcaccagcagccacccggtcagcctccaccaccgcagctaagtagccacagaggggacctgataactgaaccatttttgccaaaatcggtactggtgaagtag

SEQ ID NO: 33563 - DNA, 531 bp, Artificial Sequence
  derived and/or modified sequence
atggccgaggtgctgaagggcctgacctgcctgctgctgctgttcgctcagaagcggggaaatgtgaagcacctcgtcctctttctgcatgaggcagtcctagtacagtacgtggacacgttgaagctggccgtgccatcgttgatctatacattgcagaacaacttgcagtatgtggctatttcaaatctgccagcagccacgtttcaggttacatatcagctcaaaatcttgacaactgccttgttctccgtcctgatgctaaaccgctctctgtctagactgcagtgggccagcctattactccttttcacaggagtggccattgtacaagcccagcaggccgggggcggcggtcccagacccctagaccaaaatccaggcgcaggactggctgccgtcgttgcaagctgtctgtcaagcggcttcgccggcgtatactttgagaagatattgaagggctcctctggaagcgtgtggctccgcaacttgcagctcggtctttttggaactgccctaggtttagtctag

SEQ ID NO: 33564 - DNA, 1182 bp, Artificial Sequence
  derived and/or modified sequence
atggcagctgtgggagctggtggatccaccgcagctcccggacctggtgccgtgtctgcaggagctctggagcctggcacagcatctgccgcacacaggcgcttgaagtacatctctcttgctgttttggtggtgcagaacgcttcactcatcttgtctatccggtacgcaagaacactgcccggagatagattctttgctactactgccgtggtcatggccgaggtattgaaaggccttacatgtctcctgctcctgttcgcccagaagaggggcaacgtcaagcacttagtgctatttctgcatgaagccgtactggtgcagtatgtcgataccctaaagctggcagttccttcactcatctacacgttacaaaataaccttcagtacgtggctatatccaacctaccagctgccacgttccaggtgacctatcagcttaagatcctgaccaccgcactgttctcggtgctgatgctgaatcggtctctctctcgcctacagtgggcatccctactcctactgttcacaggtgtggccatagttcaggctcaacaagcagggggaggcggtcctcgccctctagaccaaaatccgggagcaggtctagctgcagtcgtggcctcctgcctttcttccggatttgcgggtgtctatttcgaaaagattctaaaaggttccagtggcagcgtctggcttagaaacttacagctcggcctattcggcaccgccctgggcttagttgggctgtggtgggccgagggaaccgctgtagccaccagaggctttttcttcggttacaccccggcagtgtggggggtggtgttgaatcaggccttcggcggactcttggtggctgtggtcgtcaaatacgctgacaacatcctgaaaggattcgctaccagcctgtcaattgtgttgtcaaccgtggcttctatccggcttttcggatttcatgtggacccgctttttgccttgggcgcaggtctggtcatcggggctgtttacctgtatagcctgcccagaggggctgcaaaggctatcgcgtcagcatccgcctcagcgtctggtccctgtgtccatcaacagcccccaggtcagccacctcctccccagctctcttcacataggggagacctcatcactgaaccgttcctgcccaagagcgttcttgtaaaatag

SEQ ID NO: 33565 - DNA, 531 bp, Artificial Sequence
  derived and/or modified sequence
atggcagaggtgctgaagggcctaacatgcctcttgttgctattcgcccagaagagggggaacgtgaaacatctggtcctttttctccatgaggctgtgctggtgcagtacgtggataccttgaagcttgccgttcccagcctgatctacactctccagaataatcttcagtacgtggccatttctaatctccctgcagccacttttcaggtaacctatcagctgaaaatactgacaacagccttgttttccgttctcatgcttaataggtctctcagccgactgcagtgggcgagtctgcttctgctcttcactggagtggctattgtacaggctcagcaggcaggtggtggaggtccacgacccctggaccaaaatccaggcgcaggactggcggcagtggtggcaagttgtctgtcaagcggcttcgcaggcgtgtatttcgagaaaattctgaagggtagcagcggatccgtgtggctcaggaatctgcagctggggcttttcgggaccgcccttgggcttgtgtag

SEQ ID NO: 33566 - DNA, 2619 bp, Artificial Sequence
  derived and/or modified sequence
atcgggggatgatctggaaagcgcgatcagtgaagcggacgaacggcaggataaggcgggtctagtgacaggaatgggccgatgaagctctgtagggatggtgggtaggccgatcgggccgtgtccccggcctcccgatccgacggaatttggaaatcccggggctattcatacattgagcttttaggagcggaggagaaaagccaccaccctgacgatcccggctctcgctccaccttcactcaggtggcccggcagcggaagtgacgaacgcggaagtggtttttctgttgccgaggggacgggccgggcagatgccaacatggcagcggttggggctggtggttccaccgcggcgcccgggccaggggcggtttccgcgggtgcattggagccggggaccgccagtgcggctcacaggcgcctgaagtacatatccctagctgtgctggtggtccagaatgcctccctcatcctcagcatccgctacgcccgcacgttgccaggggaccgcttctttgccaccactgctgtggtcatggcggaagtgctcaaaggtctcacctgcctgctgctgctcttcgcacagaagaggggtaacgtgaagcacctggttctcttcctccatgaggctgtcctggtgcagtatgtggacacgctcaagctcgcagtgccctctctcatctacaccttgcagaataacctccagtatgttgccatctctaacctaccagctgccactttccaggtgacataccagctgaagatcctgaccacagcgctgttctccgtgctcatgctgaatcgcagcctttcccggctgcagtgggcctccctgctgctcctcttcactggcgtcgccattgtccaggcacagcaagccggtgggggaggcccacggccactggatcagaaccctggggcaggcctggcagccgtcgtggcctcctgtctctcctccggcttcgcaggtgtctactttgagaagatcctcaaaggcagctcaggctccgtgtggctgcgcaacctgcaactgggcctcttcggcacagcactgggcctggtggggctctggtgggctgagggtaccgccgtggccacccgtggtttcttttttgggtacacacctgctgtctggggcgtggtgctcaaccaggccttcggcgggctactggtggctgtggttgtcaagtacgctgacaatatcctcaagggctttgccacctccctgtccattgtgctgtccactgttgcctccattcgcctctttggcttccacgtggacccattatttgcccttggcgctggactcgtcattggtgctgtctacctctacagccttccccgaggtgcagccaaagccatagcctctgcctctgcctccgcctccgggccctgcgttcaccagcagcctcccgggcagccaccaccaccgcagctgtcttcccaccgtggagacctcatcacggagccctttctgccaaagtcagtgctggtgaagtgagggctggcagcaatggggggacacaagggagggggactggggtggagggtgttgggcatctgcaggacccaagtcgccaccctccggggcctggctcctctgggtttgggagatggtcttttctcccaggtcactgagacttctggaggggtgtgggactagagctgggtgtcacgtgaacccttcctggtagggtgacccccttcccctggagggggttttagagctgccgcctctgctccctctaacctctttggaggcagggttgggggtattgtcattcaaggccttttttttgtctgctccctccccgaccctgtgccctcttctggaggtttctcgtctgggagagtccctcccagcagtccctccacctccataaggacacactggacaaaactcccgcagctcttcaggaatgaccgatgcctacctgtggggttcagttgcccatagtttgaggccttctctcctcccttaccaccgctctggatcatgttactagttccgtcttttgtgtggccttgggccagcttccttgataccttgaagatgggcttcttgtgagtccccagggagaaagggacaagagctaagatttttgcatcagcccttctggcagaaggtgtggtaggggccatttgttttttttagtggacttgggatttgtggtgtaatcatatcattaatgatccagggtgtgggaaaaatggaggtccttgaagtggctgaatctcattgtatttaagacactgtcagttgccagatgtaggcttatttttggagatgtctaggagaggaaaaagctaccaatcatactcttgatatccgtctggctgtgtgaggcacccctacctcatgggggtgtcttgggattgatgaactgtggaacctgcctcctgcgctccccaaagcttattaaccccttaactgtatcggggcggggtgtgtgtgtgcatggaagatgcctgggctgtctttgctatatgtaaatagagccattggatctttatttttgattaatttgttctgattttttggtttgttttttaaggaactgtaatgaacaaatgtcaggatatccaatgccaaataaagatgttgtatttatttag

SEQ ID NO: 33567 - DNA, 877 bp, Artificial Sequence
  derived and/or modified sequence
cgcgatcagtgaagcggacgaacggcaggataaggcgggtctagtgacaggaatgggccgatgaagctctgtagggatggtgggtaggccgatcgggccgtgtccccggcctcccgatccgacggaatttggaaatcccggggctattcatacattgagcttttaggagcggaggagaaaagccaccaccctgacgatcccggctctcgctccaccttcactcagctcacaggcgcctgaagtacatatccctagctgtgctggtggtccagaatgcctccctcatcctcagcatccgctacgcccgcacgttgccaggggaccgcttctttgccaccactgctgtggtcatggcggaagtgctcaaaggtctcacctgcctgctgctgctcttcgcacagaagaggggtaacgtgaagcacctggttctcttcctccatgaggctgtcctggtgcagtatgtggacacgctcaagctcgcagtgccctctctcatctacaccttgcagaataacctccagtatgttgccatctctaacctaccagctgccactttccaggtgacataccagctgaagatcctgaccacagcgctgttctccgtgctcatgctgaatcgcagcctttcccggctgcagtgggcctccctgctgctcctcttcactggcgtcgccattgtccaggcacagcaagccggtgggggaggcccacggccactggatcagaaccctggggcaggcctggcagccgtcgtggcctcctgtctctcctccggcttcgcaggtgtctactttgagaagatcctcaaaggcagctcaggctccgtgtggctgcgcaacctgcaactgggcctcttcggcacagcactgggcctggt

SEQ ID NO: 33568 - DNA, 1182 bp, Artificial Sequence
  derived and/or modified sequence
atggccgccgtgggcgccggcggcagcaccgccgcccccggccccggcgccgtgagcgccggcgccctggagcccggcaccgccagcgccgcccacagaagactgaagtacatcagcctggccgtgctggtggtgcagaacgccagcctgatcctgagcatcagatacgccagaaccctgcccggcgacagattcttcgccaccaccgccgtggtgatggccgaggtgctgaagggcctgacctgcctgctgctgctgttcgcccagaagagaggcaacgtgaagcacctggtgctgttcctgcacgaggccgtgctggtgcagtacgtggacaccctgaagctggccgtgcccagcctgatctacaccctgcagaacaacctgcagtacgtggccatcagcaacctgcccgccgccaccttccaggtgacctaccagctgaagatcctgaccaccgccctgttcagcgtgctgatgctgaacagaagcctgagcagactgcagtgggccagcctgctgctgctgttcaccggcgtggccatcgtgcaggcccagcaggccggcggcggcggccccagacccctggaccagaaccccggcgccggcctggccgccgtggtggccagctgcctgagcagcggcttcgccggcgtgtacttcgagaagatcctgaagggcagcagcggcagcgtgtggctgagaaacctgcagctgggcctgttcggcaccgccctgggcctggtgggcctgtggtgggccgagggcaccgccgtggccaccagaggcttcttcttcggctacacccccgccgtgtggggcgtggtgctgaaccaggccttcggcggcctgctggtggccgtggtggtgaagtacgccgacaacatcctgaagggcttcgccaccagcctgagcatcgtgctgagcaccgtggccagcatcagactgttcggcttccacgtggaccccctgttcgccctgggcgccggcctggtgatcggcgccgtgtacctgtacagcctgcccagaggcgccgccaaggccatcgccagcgccagcgccagcgccagcggcccctgcgtgcaccagcagccccccggccagcccccccccccccagctgagcagccacagaggcgacctgatcaccgagcccttcctgcccaagagcgtgctggtgaagtag

SEQ ID NO: 33569 - DNA, 531 bp, Artificial Sequence
  derived and/or modified sequence
atggccgaggtgctgaagggcctgacctgcctgctgctgctgttcgcccagaagagaggcaacgtgaagcacctggtgctgttcctgcacgaggccgtgctggtgcagtacgtggacaccctgaagctggccgtgcccagcctgatctacaccctgcagaacaacctgcagtacgtggccatcagcaacctgcccgccgccaccttccaggtgacctaccagctgaagatcctgaccaccgccctgttcagcgtgctgatgctgaacagaagcctgagcagactgcagtgggccagcctgctgctgctgttcaccggcgtggccatcgtgcaggcccagcaggccggcggcggcggccccagacccctggaccagaaccccggcgccggcctggccgccgtggtggccagctgcctgagcagcggcttcgccggcgtgtacttcgagaagatcctgaagggcagcagcggcagcgtgtggctgagaaacctgcagctgggcctgttcggcaccgccctgggcctggtgtag

SEQ ID NO: 33570 - protein, 35 aa, Artificial Sequence
  derived and/or modified sequence
SKKLICYCRIRGCKRRERVFGTCRNLFLTFVFCCS

SEQ ID NO: 33571 - DNA, 285 bp, Artificial Sequence
  derived and/or modified sequence
atgcgcactctagctattttggcggcaatcctgcttgtggcactacaagctcaagccgagccactgcaggcacgagccgacgaagtcgcggctgctcccgaacagatagcggctgacatccctgaggtggtggtgagtctggcctgggacgagagcctggcccctaagcatcccggttctcgtaagaacatggcatgctactgtcgcattccagcatgtatagctggtgagaggaggtatgggacttgtatctatcaaggaaggctttgggccttttgttgctag

SEQ ID NO: 33572 - DNA, 285 bp, Artificial Sequence
  derived and/or modified sequence
atgcggacgttggctatactagccgcaattctgctggttgctttgcaagcacaagccgaaccgctccaggccagggccgatgaggttgccgctgccccagagcagattgccgcagacatcccagaggtcgttgtgtctctggcctgggatgaatcactcgccccaaaacatcccggaagccggaaaaacatggcctgctattgccggattcctgcttgcattgcaggcgagagacgatatggcacttgtatttatcaaggtcgcttgtgggcattttgttgctag

SEQ ID NO: 33573 - DNA, 285 bp, Artificial Sequence
  derived and/or modified sequence
atgcgcaccctcgccatcctcgccgccattctcctcgtggccttacaggcccaagcggagcccttacaggcacgtgcagatgaagtggccgcagctcctgaacagatcgccgcagacattcccgaggtcgtggtctcactggcatgggatgaaagtcttgcaccaaaacacccgggctctagaaaaaacatggcgtgctactgcagaattcctgcctgtattgccggcgaacgacggtacgggacgtgtatataccaaggcaggctgtgggcgttctgttgttag

SEQ ID NO: 33574 - DNA, 285 bp, Artificial Sequence
  derived and/or modified sequence
atgagaaccctcgccattctagccgctatccttttggtggcccttcaggctcaggcggagcccctacaggccagggccgacgaagtcgcagctgcaccagagcagatcgcagctgacattcctgaagtggtagtatcccttgcgtgggacgaatcacttgcccctaaacacccaggtagtagaaagaacatggcttgttattgcagaatccccgcttgcatagccggagaaaggagatatggcacctgtatataccaaggaagactctgggccttttgttgttag

SEQ ID NO: 33575 - DNA, 285 bp, Artificial Sequence
  derived and/or modified sequence
atgagaaccctggccatcctggccgccatcctgctggtggccctgcaggcccaggccgagcccctgcaggccagagccgacgaggtggccgccgcccccgagcagatcgccgccgacatccccgaggtggtggtgagcctggcctgggacgagagcctggcccccaagcaccccggcagcagaaagaacatggcctgctactgcagaatccccgcctgcatcgccggcgagagaagatacggcacctgcatctaccagggcagactgtgggccttctgctgctag

SEQ ID NO: 33576 - DNA, 285 bp, Artificial Sequence
  derived and/or modified sequence
atgcggacgttagcaattctggctgcaatcttgctggtagcactgcaggcccaagcagagccattacaggcccgagccgatgaggttgccgctgcaccagaacagatcgctgcggatatccctgaggtggtggttagtctggcctgggacgaatcactggcaccaaagcaccccggatcccgaaaaaatatggcctgctactgtcgaattcctgcatgcatcgctggcgaaaggcgttatggcacatgcatctaccagggcagactatgggccttttgctgttag

SEQ ID NO: 33577 - DNA, 285 bp, Artificial Sequence
  derived and/or modified sequence
atgcgcaccctcgcaattctagccgccattcttttggtggctttgcaggctcaggccgagcccctccaggcccgggccgacgaggtcgccgctgcccctgagcagattgctgccgacattcccgaggtggtggtgtctttagcttgggacgaaagcctcgcaccaaagcaccctggttctcggaagaacatggcctgttattgcaggatccccgcttgtattgcaggagaacggagatacggtacttgtatctaccagggaaggctgtgggccttctgttgctag

SEQ ID NO: 33578 - DNA, 285 bp, Artificial Sequence
  derived and/or modified sequence
atgaggaccctggccatcctggccgccatcctgctggtggccctgcaggcccaggccgagcccctgcaggcccgggcagatgaggtggccgccgcccctgagcagattgctgctgacatccctgaggtggtggtgtccctggcctgggatgagagcctggcccccaagcaccctggcagcaggaagaacatggcctgctactgccgcatcccagcctgcatcgccggggagcggcgctatggcacctgcatctaccagggccgcctgtgggccttctgctgctag

SEQ ID NO: 33579 - DNA, 285 bp, Artificial Sequence
  derived and/or modified sequence
atgcggaccctggccatcctggccgccatcctgctggtggccctgcaggcgcaagccgagccgttacaagccagagcagatgaggtggcggcagcccctgagcagattgctgccgatatccctgaagtagttgtatcgctggcctgggatgaaagtttggcgccaaagcatcctggatccagaaaaaatatggcatgctactgccgtattcctgcctgcatcgccggtgagcggaggtacgggacttgtatctaccaggggcgactctgggcattttgctgttag

SEQ ID NO: 33580 - DNA, 285 bp, Artificial Sequence
  derived and/or modified sequence
atgcggaccctggccatcctggccgccatcctgctggtggccctgcaggcgcaggccgagcctttacaagccagggccgacgaggtggccgcagcccccgaacagattgcggcagatatacctgaggtagtggtttcccttgcttgggatgagtctctggcccctaagcaccctggcagtcgtaagaacatggcgtgctattgccggataccagcctgtatcgcgggagagcggcgatacggcacatgcatctatcagggaaggctttgggcgttctgctgttag

SEQ ID NO: 33581 - DNA, 285 bp, Artificial Sequence
  derived and/or modified sequence
atgcggactctagccatcttggcagcaatactcctcgtggcattacaagcacaggccgaacccctacaggcccgtgcggatgaggtggcagctgcccctgaacagatcgcagcagatattcccgaagtcgtcgtatccctggcatgggatgaaagtttggctccaaagcatccaggttctcgcaaaaatatggcatgctattgtcgcatcccggcctgtattgcgggtgaaaggcgatacggcacatgcatttatcaaggcaggctatgggccttttgctgttag

SEQ ID NO: 33582 - DNA, 285 bp, Artificial Sequence
  derived and/or modified sequence
atgagaacactcgccatcttggctgccatcttactcgtggcactgcaagcacaggctgagccactgcaggcacgcgccgatgaagtagctgcggcacccgagcagatcgcggctgatatccccgaagttgtggtgagtctggcatgggacgagagtcttgcgccaaaacacccggggtctcgcaagaatatggcgtgctattgcaggataccagcatgtatcgccggtgaacgccgctatggcacctgcatctatcaaggaagattgtgggccttctgctgctag

SEQ ID NO: 33583 - DNA, 285 bp, Artificial Sequence
  derived and/or modified sequence
atgcggaccctggccatcctggccgccatcctgctggtggccctgcaggctcaggccgagccgctgcaggcgcgcgctgatgaggtggccgccgctcccgaacaaatagctgcagatatccctgaggtagtggtctccctagcttgggacgagagcctggcacctaagcatccaggttctcgaaagaacatggcgtgttattgtaggattcccgcctgcattgccggcgaaaggagatacggcacatgcatctaccagggcaggctgtgggccttctgctgttag

SEQ ID NO: 33584 - DNA, 285 bp, Artificial Sequence
  derived and/or modified sequence
atgcggaccctggccatcctggccgccatcctgctggtggccctgcaggcgcaggccgaaccactgcaggccagggctgacgaagtggccgctgcgcctgagcagatcgctgctgatattcccgaagtggttgttagtctcgcatgggacgaatcgttggcccccaagcaccctggcagcaggaagaatatggcgtgctactgcaggataccagcatgcattgcgggagagagaaggtacggcacctgtatatatcagggccgcctctgggcattttgctgctag

SEQ ID NO: 33585 - DNA, 285 bp, Artificial Sequence
  derived and/or modified sequence
atgaggacactggcaatacttgccgcaatcctgttggtggccctccaggcacaggccgaaccgcttcaggccagggccgatgaagttgcagctgctccagaacagattgcggctgatattccggaagttgtcgtctccctggcgtgggacgagtcactggcccctaagcacccaggaagcagaaagaacatggcttgttactgtagaattccggcatgtatcgccggagaacgtcgttacgggacttgcatttaccaaggtagattgtgggctttttgctgctag

SEQ ID NO: 33586 - DNA, 285 bp, Artificial Sequence
  derived and/or modified sequence
atgcggactctggccattctcgcagccatcttgctggtggctctgcaggcacaggccgaacctcttcaggcacgggctgatgaagtggcagctgcaccagagcagatagctgcggacatccccgaggtggttgtgtcactggcctgggacgagtcacttgctccaaagcatcccggaagtaggaagaacatggcctgctactgtcgaatccctgcatgcattgccggtgagaggagatatggaacttgcatttatcaggggagactctgggccttctgctgttag

SEQ ID NO: 33587 - DNA, 406 bp, Artificial Sequence
  derived and/or modified sequence
atgaggaccctcgccatccttgctgccattctcctggtggccctgcaggcccaggctgagccactccaggcaagagctgatgaggttgctgcagccccggagcagattgcagcggacatcccagaagtggttgtttcccttgcatgggacgaaagcttggctccaaagcatccaggctcaaggaaaaacatggcctgctattgcagaataccagcgtgcattgcaggagaacgtcgctatggaacctgcatctaccagggaagactctgggcattctgctgctgagcttgcagaaaaagaaaaatgagctcaaaatttgctttgagagctacagggaattgctattactcctgtaccttctgctcaatttcctttcctcatcccaaataaatgccttgttacaaga

SEQ ID NO: 33588 - RNA, 285 nt, Artificial Sequence
  derived and/or modified sequence
augcgcacccucgccauccucgccgccauucuccucguggccuuacaggcccaagcggagcccuuacaggcacgugcagaugaaguggccgcagcuccugaacagaucgccgcagacauucccgaggucguggucucacuggcaugggaugaaagucuugcaccaaaacacccgggcucuagaaaaaacauggcgugcuacugcagaauuccugccuguauugccggcgaacgacgguacgggacguguauauaccaaggcaggcugugggcguucuguuguuag

SEQ ID NO: 33589 - RNA, 285 nt, Artificial Sequence
  derived and/or modified sequence
augagaacccucgccauucuagccgcuauccuuuugguggcccuucaggcucaggcggagccccuacaggccagggccgacgaagucgcagcugcaccagagcagaucgcagcugacauuccugaagugguaguaucccuugcgugggacgaaucacuugccccuaaacacccagguaguagaaagaacauggcuuguuauugcagaauccccgcuugcauagccggagaaaggagauauggcaccuguauauaccaaggaagacucugggccuuuuguuguuag

SEQ ID NO: 33590 - protein, 136 aa, Artificial Sequence
  derived and/or modified sequence
MSNVPHKSSLPEGIRPGTVLRIRGLVPPNASRFHVNLLCGEEQGSDAALHFNPRLDTSEVVFNSKEQGSWGREERGPGVPFQRGQPFEVLIIASDDGFKAVVGDAQYHHFRHRLPLARVRLVEVGGDVQLDSVRIF

SEQ ID NO: 33591 - DNA, 411 bp, Artificial Sequence
  derived and/or modified sequence
atgtcaaacgtcccacacaagtcctccctacctgagggaattaggcccggaactgtcctccgcatcaggggcctcgttccaccaaacgcatcccgatttcacgtcaatctattgtgtggtgaagagcagggatccgatgcagccttacactttaatcccaggctggataccagcgaggtggtctttaattctaaagagcagggctcttgggggcgagaggaacgagggcctggagtgcccttccagcgaggtcagccttttgaggtcctaatcatcgcctcagatgacggcttcaaagccgtggtgggcgatgctcagtatcaccattttcgacatcgcctaccgttggcccgagtccgactggtggaggtgggcggtgacgttcaactcgacagcgtccgcattttctag

SEQ ID NO: 33592 - DNA, 411 bp, Artificial Sequence
  derived and/or modified sequence
atgtccaacgtcccacataagtccagcttaccagaaggcattaggcctggaacggtacttcgcatcagagggttggtgcctcctaatgccagtcgtttccatgtgaatctgctgtgtggagaggaacagggatcagacgcagcgctgcacttcaatccacgtctggatacctctgaggttgtgtttaatagtaaggaacagggatcatggggacgcgaggagaggggccctggtgttccattccagcgcgggcagccgttcgaggtcctcatcattgcatctgacgacggatttaaagctgtagtcggagatgcccaataccaccacttcaggcacagattacctctcgcaagagtgaggctggtggaagtcggcggagacgtccagctcgatagcgtacgaatcttctag

SEQ ID NO: 33593 - DNA, 411 bp, Artificial Sequence
  derived and/or modified sequence
atgagcaatgtcccacacaaaagctctttgcctgaaggcataagaccaggaaccgtccttaggattagaggtctcgtgccgcctaatgcatcccgattccatgtgaacctgctgtgtggcgaagagcaagggagtgacgccgccctgcacttcaatccccgcctcgacacctctgaagttgtttttaattctaaagaacagggatcatggggccgagaggagcgcggccctggagtaccgttccagcgaggacagccttttgaagtcttgattatcgcttcggacgatggtttcaaggccgttgtgggagatgctcagtatcaccacttcagacacaggttacccttagctcgagtgaggctggtagaagtcggcggcgacgtacaattggattcggtccggatcttttag

SEQ ID NO: 33594 - DNA, 411 bp, Artificial Sequence
  derived and/or modified sequence
atgagcaacgtgccccacaagagcagcctgcccgagggcatcagacccggcaccgtgctgagaatcagaggcctggtgccccccaacgccagcagattccacgtgaacctgctgtgcggcgaggagcagggcagcgacgccgccctgcacttcaaccccagactggacaccagcgaggtggtgttcaacagcaaggagcagggcagctggggcagagaggagagaggccccggcgtgcccttccagagaggccagcccttcgaggtgctgatcatcgccagcgacgacggcttcaaggccgtggtgggcgacgcccagtaccaccacttcagacacagactgcccctggccagagtgagactggtggaggtgggcggcgacgtgcagctggacagcgtgagaatcttctag

SEQ ID NO: 33595 - DNA, 494 bp, Artificial Sequence
  derived and/or modified sequence
acggctgcccaacccggtcccagccatgtccaacgtcccccacaagtcctcactgcccgagggcatccgccctggcacggtgctgagaattcgcggcttggttcctcccaatgccagcaggttccatgtaaacctgctgtgcggggaggagcagggctccgatgccgccctgcatttcaacccccggctggacacgtcggaggtggtcttcaacagcaaggagcaaggctcctggggccgcgaggagcgcgggccgggcgttcctttccagcgcgggcagcccttcgaggtgctcatcatcgcgtcagacgacggcttcaaggccgtggttggggacgcccagtaccaccacttccgccaccgcctgccgctggcgcgcgtgcgcctggtggaggtgggcggggacgtgcagctggactccgtgaggatcttctgagcagaagcccaggcgggcccggggccttggctggcaaataaagcgttagcccgcagcg

SEQ ID NO: 33596 - DNA, 411 bp, Artificial Sequence
  derived and/or modified sequence
atgagcaatgttccccataaaagctcactgccagagggaatcaggcccggaactgtattgcgcatccgaggccttgtcccacccaatgcatcacgctttcacgtaaacctcctgtgcggtgaggagcaggggtccgatgctgcactgcactttaatcccaggttggataccagcgaagtcgtattcaattccaaggagcagggcagctgggggcgcgaagagcggggccccggcgtgcccttccagcgtggacagccattcgaggtactcatcattgcatccgacgacggatttaaggccgtagtaggggacgcccagtaccatcactttaggcatcggctgcccctcgcacgagtgagactggttgaggttggtggtgatgtccagctcgactctgtgagaattttctag

SEQ ID NO: 33597 - DNA, 411 bp, Artificial Sequence
  derived and/or modified sequence
atgagcaatgtgccccacaagagcagcctgcctgagggcatccggcccggcaccgtgctgcgcatccggggcctggtgcccccaaatgccagccgcttccacgtgaacctgctgtgtggggaggagcagggcagtgatgctgccctgcacttcaacccccggctggacaccagcgaggtggtgttcaacagcaaggagcagggctcctggggccgggaggagcggggccctggggtgcccttccagaggggccagccctttgaggtgctgatcatcgccagtgatgatggcttcaaggctgtggtgggagatgcccagtaccaccacttccgccaccggctgcccctggcccgggtgcggctggtggaggtgggcggagatgtgcagctggacagcgtgcgcatcttctag

SEQ ID NO: 33598 - DNA, 411 bp, Artificial Sequence
  derived and/or modified sequence
atgagcaacgtgccccacaagagcagcctgcccgagggcatccggcccgggacagttctgcgtatccgtggcctggtgccacccaatgcatctagatttcacgtgaatctcctttgcggcgaggaacagggcagtgacgccgcccttcacttcaatccgcgccttgacacgagcgaagtcgtgtttaatagtaaggaacaagggtcatggggccgcgaagaacgcggacctggagtaccttttcaacggggccaaccattcgaagtgctaattattgcaagcgatgacggctttaaagccgtagttggcgacgcacagtaccaccattttagacaccggctacctttggcccgcgttagattggtcgaagtcggaggtgatgtccagttggacagtgtgcgcattttctag

SEQ ID NO: 33599 - DNA, 411 bp, Artificial Sequence
  derived and/or modified sequence
atgtctaatgtgcctcacaaaagctccctgcccgaaggaatccgtccagggaccgtactcaggatccggggcctggtccctcccaacgcgagtcggtttcatgttaatttgctctgtggagaggagcagggctctgatgcagccctacattttaatccccggcttgacacaagcgaagtggttttcaatagcaaagagcagggaagctgggggcgggaggaaagaggccccggcgtgccctttcagagaggccaacccttcgaggtgcttatcatcgcttctgatgacgggttcaaagccgttgtgggcgacgctcaataccatcacttcaggcacagactgccacttgcccgggtgaggctggtcgaagtgggaggggatgttcagctggacagcgtcaggattttctag

SEQ ID NO: 33600 - DNA, 494 bp, Artificial Sequence
  derived and/or modified sequence
acggctgcccaacccggtcccagccatgtccaacgtcccccacaagtcctcactgcccgagggcatccgccctggcacggtgctgagaattcgcggcttggttcctcccaatgccagcaggttccatgtaaacctgctgtgcggggaggagcagggctccgatgccgcgctgcatttcaacccccggctggacacgtcggaggtggtcttcaacagcaaggagcaaggctcctggggccgcgaggagcgcgggccgggcgttcctttccagcgcgggcagcccttcgaggtgctcatcatcgcgtcagacgacggcttcaaggccgtggttggggacgcccagtaccaccacttccgccaccgcctgccgctggcgcgcgtgcgcctggtggaggtgggcggggacgtgcagctggactccgtgaggatcttctgagcagaagcccaggcgggcccggggccttggctggcaaataaagcgttagcccgcagcg

SEQ ID NO: 33601 - DNA, 411 bp, Artificial Sequence
  derived and/or modified sequence
atgagcaacgtgccccacaagagcagcctgcccgagggcatccggcccggtaccgtcctgcgaatacgcggactggtgcctcccaatgcaagccggttccacgtgaacctgctgtgtggcgaggagcaagggtcggacgctgccctccactttaatccccgcctggacacaagcgaggtcgtgtttaactccaaagagcagggatcctgggggcgagaggaacgtggtccgggtgtcccattccagcgcggccagccttttgaagtgctcatcatcgcaagcgacgatggcttcaaggctgtggtaggggatgcacagtatcatcattttcgccacaggctgcctctcgcgcgcgtccgcctcgtggaggtcgggggggacgtccagttggactccgtacggatattttag

SEQ ID NO: 33602 - DNA, 411 bp, Artificial Sequence
  derived and/or modified sequence
atgtcaaatgtcccacataagagtagtttaccagagggcattcgccctggtactgtgctcaggattaggggccttgtccctcctaacgcatcacggtttcatgtgaaccttctgtgcggtgaggagcaaggttcagacgctgcactgcacttcaatccacgcctcgatacgtccgaggtggtgtttaatagtaaggagcagggaagttggggcagagaagagcgcggaccaggagtgccctttcagagggggcaaccattcgaggtgctgattattgcaagcgatgatggcttcaaagcagtcgtcggcgatgcacagtatcatcacttccgtcacaggctgcctctggctcgtgtgaggttagtggaggtcggcggagatgtgcagctggactcagtccggattttctag

SEQ ID NO: 33603 - RNA, 411 nt, Artificial Sequence
  derived and/or modified sequence
auguccaacgucccacauaaguccagcuuaccagaaggcauuaggccuggaacgguacuucgcaucagaggguuggugccuccuaaugccagucguuuccaugugaaucugcuguguggagaggaacagggaucagacgcagcgcugcacuucaauccacgucuggauaccucugagguuguguuuaauaguaaggaacagggaucauggggacgcgaggagaggggcccugguguuccauuccagcgcgggcagccguucgagguccucaucauugcaucugacgacggauuuaaagcuguagucggagaugcccaauaccaccacuucaggcacagauuaccucucgcaagagugaggcugguggaagucggcggagacguccagcucgauagcguacgaaucuucuag

SEQ ID NO: 33604 - RNA, 411 nt, Artificial Sequence
  derived and/or modified sequence
augagcaaugucccacacaaaagcucuuugccugaaggcauaagaccaggaaccguccuuaggauuagaggucucgugccgccuaaugcaucccgauuccaugugaaccugcuguguggcgaagagcaagggagugacgccgcccugcacuucaauccccgccucgacaccucugaaguuguuuuuaauucuaaagaacagggaucauggggccgagaggagcgcggcccuggaguaccguuccagcgaggacagccuuuugaagucuugauuaucgcuucggacgaugguuucaaggccguugugggagaugcucaguaucaccacuucagacacagguuacccuuagcucgagugaggcugguagaagucggcggcgacguacaauuggauucgguccggaucuuuuag

SEQ ID NO: 33605 - DNA, 786 bp, Artificial Sequence
  derived and/or modified sequence
atgggtgatgaacggacagctgtgtcccttgtcacagcgcttcccggtcgtccatctagctgtgtttcagttacagacggcccgaaattcgaggtgaagctgaagaaaaacgccaacggattgggcttttctttcgttcagatggagaaggagagctgtagtcacctaaaatcagatcttgttcggataaaacggttattccccggacagccagcggaggagaatggcgccattgccgccggtgatattatcctagctgtgaatgggagaagcactgagggcctgatttttcaggaggtcctccacctgctgagaggggcccctcaggaagtgaccctgttgctgtgcagacccccgcccggggcactgccagaactggagcaggagtggcagactcctgaactcagcgcagataaagagtttacacgggctacttgcacggattcgtgtacatctcccatccttgaccaggaggatagctggagagatagtgccagcccggatgcgggagaggggctagggttgcgccctgagtcgtctcaaaaggccattagagaggcccagtgggggcagaaccgggaacgaccatgggccagcagcctgacccactctccagagtcccaccctcacctatgcaaactgcatcaagaaagagacgagtcaactctcgccactagcctggagaaggatgtacgtcagaattgctatagcgtgtgtgacataatgcggcttgggcggtattcatttagctctcccttgactcggctctctactgacatcttctag

SEQ ID NO: 33606 - DNA, 786 bp, Artificial Sequence
  derived and/or modified sequence
atgggagatgagaggacagctgtgtccctggtgacagccctgcccggccggcccagcagctgtgtgtctgtgacagatggccccaagtttgaggtgaagctgaagaagaatgccaacggcctgggcttctcctttgtgcagatggagaaggagagctgcagccacctgaagagtgacctggtgcgcatcaagaggctcttccctggccagcctgctgaggagaatggagccatcgccgccggggacatcatcctggccgtgaatggccgcagcacagagggcctcatcttccaggaggtgctgcacctgctgcggggggccccccaggaggtgaccctgctgctgtgccggcccccacctggggccctgcctgagctggagcaggagtggcagaccccagagctgtctgctgacaaggagttcacccgggccacctgcacagacagctgcaccagccccatcctggaccaggaggacagctggagggacagcgccagcccagatgctggggagggcctgggcctgcggcctgagagcagccagaaggccatccgggaggcccagtggggccagaaccgggagcggccctgggccagcagcctgacccacagccctgagagccacccccacctgtgcaagctgcaccaggagagagatgagagcaccctggccaccagcctggagaaggatgtgcggcagaactgctacagcgtgtgtgacatcatgaggctgggccgctacagcttcagcagccccctgacccggctgagcacagacatcttctag

SEQ ID NO: 33607 - DNA, 786 bp, Artificial Sequence
  derived and/or modified sequence
atgggcgacgagcggaccgccgtgagcctggtgaccgccctgcccggacgaccaagctcctgcgtgagtgtgacagacggaccaaagttcgaggtgaagctgaagaagaacgccaacggcctcggatttagctttgttcagatggaaaaagaatcttgctcccacctgaagtctgatttagttcgaattaagagactgttccctgggcagcctgccgaagagaatggagccattgccgcaggcgacatcattctggccgtcaacgggcgtagtaccgaaggattaatcttccaagaagtgttacacctcttgcggggcgcgccgcaggaagtgaccctgttactgtgccggcctccccctggggcactccccgaattggagcaggagtggcagactcccgagttgagcgcagacaaggagtttacaagagcgacttgcactgatagctgcacatcccctatccttgaccaagaggacagctggcgagatagtgccagtcccgatgcgggtgagggcttgggtcttcggcctgaatcttcccagaaggccattagagaggcacagtggggccaaaaccgagagaggccctgggctagctccctgacacactcaccagaatcacaccctcacctgtgcaagctccatcaagagagagatgaatcaaccttagctacctccctggaaaaagacgtccgtcagaattgttattcagtatgcgacatcatgagactgggacggtactctttctcttcacctcttactcggctttccactgacatcttttag

SEQ ID NO: 33608 - DNA, 786 bp, Artificial Sequence
  derived and/or modified sequence
atgggagatgagcgaactgctgtctctctggttacagccctaccaggcaggcccagctcgtgtgtcagcgtgactgatgggcctaagttcgaggtaaagctcaaaaagaatgcaaacggacttgggttttctttcgtgcagatggaaaaagaaagctgctctcacttgaaaagtgacctggtgcggattaaacgcctatttccaggacagcctgccgaagagaacggcgcaatcgctgctggagacataattcttgccgtaaatggcagatcgacagaaggactgatctttcaggaggtgttgcacctcctgaggggtgcgcctcaggaagtcactctgctgctgtgccgacctcctcctggcgctctccctgaactcgagcaggagtggcaaacacctgagctcagtgctgacaaagaatttactcgcgcaacatgcaccgacagctgtaccagccccattctggatcaagaggactcctggcgtgacagcgcatccccggatgcaggagaggggttggggctccgaccagagtcctcccagaaggcaatcagggaggctcagtgggggcaaaaccgagagaggccatgggcttccagtctgactcatagtcctgaatcgcacccgcatctttgcaaactgcaccaggagcgggatgagtcaacactggctaccagcctggagaaagatgtgcggcagaattgttattctgtgtgtgacattatgcgcttaggcagatacagcttttcctcccctcttacccggctgagcacagatattttctag

SEQ ID NO: 33609 - DNA, 786 bp, Artificial Sequence
  derived and/or modified sequence
atgggcgacgagagaaccgccgtgagcctggtgaccgccctgcccggcagacccagcagctgcgtgagcgtgaccgacggccccaagttcgaggtgaagctgaagaagaacgccaacggcctgggcttcagcttcgtgcagatggagaaggagagctgcagccacctgaagagcgacctggtgagaatcaagagactgttccccggccagcccgccgaggagaacggcgccatcgccgccggcgacatcatcctggccgtgaacggcagaagcaccgagggcctgatcttccaggaggtgctgcacctgctgagaggcgccccccaggaggtgaccctgctgctgtgcagacccccccccggcgccctgcccgagctggagcaggagtggcagacccccgagctgagcgccgacaaggagttcaccagagccacctgcaccgacagctgcaccagccccatcctggaccaggaggacagctggagagacagcgccagccccgacgccggcgagggcctgggcctgagacccgagagcagccagaaggccatcagagaggcccagtggggccagaacagagagagaccctgggccagcagcctgacccacagccccgagagccacccccacctgtgcaagctgcaccaggagagagacgagagcaccctggccaccagcctggagaaggacgtgagacagaactgctacagcgtgtgcgacatcatgagactgggcagatacagcttcagcagccccctgaccagactgagcaccgacatcttctag

SEQ ID NO: 33610 - protein, 1193 aa, Artificial Sequence
  derived and/or modified sequence
MERHQPRLHHPAQGSAAGTPYPSSASLRGCRESKMPRRKGPQHPPPPSGPEEPGEKRPKFHLNIRTLTDDMLDKFASIRIPGSKKERPPLPNLKTAFASSDCSAAPLEMMENFPKPLSENELLELFEKMMEDMNLNEDKKAPLREKDFSIKKEMVMQYINTASKTGSLKRSRQISPQEFIHELKMGSADERLVTCLESLRVSLTSNPVSWVESFGHEGLGLLLDILEKLISGKIQEKVVKKNQHKVIQCLKALMNTQYGLERIMSEERSLSLLAKAVDPRHPNMMTDVVKLLSAVCIVGEESILEEVLEALTSAGEEKKIDRFFCIVEGLRHNSVQLQVACMQLINALVTSPDDLDFRLHIRNEFMRCGLKEILPNLKCIKNDGLDIQLKVFDEHKEEDLFELSHRLEDIRAELDEAYDVYNMVWSTVKETRAEGYFISILQHLLLIRNDYFIRQQYFKLIDECVSQIVLHRDGMDPDFTYRKRLDLDLTQFVDICIDQAKLEEFEEKASELYKKFEKEFTDHQETQAELQKKEAKINELQAELQAFKSQFGALPADCNIPLPPSKEGGTGHSALPPPPPLPSGGGVPPPPPPPPPPPLPGMRMPFSGPVPPPPPLGFLGGQNSPPLPILPFGLKPKKEFKPEISMRRLNWLKIRPHEMTENCFWIKVNENKYENVDLLCKLENTFCCQQKERREEEDIEEKKSIKKKIKELKFLDSKIAQNLSIFLSSFRVPYEEIRMMILEVDETRLAESMIQNLIKHLPDQEQLNSLSQFKSEYSNLCEPEQFVVVMSNVKRLRPRLSAILFKLQFEEQVNNIKPDIMAVSTACEEIKKSKSFSKLLELVLLMGNYMNAGSRNAQTFGFNLSSLCKLKDTKSADQKTTLLHFLVEICEEKYPDILNFVDDLEPLDKASKVSVETLEKNLRQMGRQLQQLEKELETFPPPEDLHDKFVTKMSRFVISAKEQYETLSKLHENMEKLYQSIIGYYAIDVKKVSVEDFLTDLNNFRTTFMQAIKENIKKREAEEKEKRVRIAKELAERERLERQQKKKRLLEMKTEGDETGVMDNLLEALQSGAAFRDRRKRTPMPKDVRQSLSPMSQRPVLKVCNHENQKVQLTEGSRSHYNINCNSTRTPVAKELNYNLDTHTSTGRIKAAEKKEACNVESNRKKETELLGSFSKNESVPEVEALLARLRAL

SEQ ID NO: 33611 - protein, 1193 aa, Artificial Sequence
  derived and/or modified sequence
MERHQPRLHHPAQGSAAGTPYPSSASLRGCRESKMPRRKGPQHPPPPSGPEEPGEKRPKFHLNIRTLTDDMLDKFASIRIPGSKKERPPLPNLKTAFASSDCSAAPLEMMENFPKPLSENELLELFEKMMEDMNLNEDKKAPLREKDFSIKKEMVMQYINTASKTGSLKRSRQISPQEFIHELKMGSADERLVTCLESLRVSLTSNPVSWVESFGHEGLGLLLDILEKLISGKIQEKVVKKNQHKVIQCLKALMNTQYGLERIMSEERSLSLLAKAVDPRHPNMMTDVVKLLSAVCIVGEESILEEVLEALTSAGEEKKIDRFFCIVEGLRHNSVQLQVACMQLINALVTSPDDLDFRLHIRNEFMRCGLKEILPNLKCIKNDGLDIQLKVFDEHKEEDLFELSHRLEDIRAELDEAYDVYNMVWSTVKETRAEGYFISILQHLLLIRNDYFIRQQYFKLIDECVSQIVLHRDGMDPDFTYRKRLDLDLTQFVDICIDQAKLEEFEEKASELYKKFEKEFTDHQETQAELQKKEAKINELQAELQAFKSQFGALPADCNIPLPPSKEGGTGHSALPPPPPLPSGGGVPPPPPPPPPPPLPGMRMPFSGPVPPPPPLGFLGGQNSPPLPILPFGLKPKKEFKPEISMRRLNWLKIRPHEMTENCFWIKVNENKYENVDLLCKLENTFCCQQKERREEEDIEEKKSIKKKIKELKFLDSKIAQNLSIFLSSFRVPYEEIRMMILEVDETRLAESMIQNLIKHLPDQEQLNSLSQFKSEYSNLCEPEQFVVVMSNVKRLRPRLSAILFKLQFEEQVNNIKPDIMAVSTACEEIKKSKSFSKLLELVLLMGNYMNAGSRNAQTFGFNLSSLCKLKDTKSADQKTTLLHFLVEICEEKYPDILNFVDDLEPLDKASKVSVETLEKNLRQMGRQLQQLEKELETFPPPEDLHDKFVTKMSIFVISAKEQYETLSKLHENMEKLYQSIIGYYAIDVKKVSVEDFLTDLNNFRTTFMQAIKENIKKREAEEKEKRVRIAKELAERERLERQQKKKRLLEMKTEGDETGVMDNLLEALQSGAAFRDRRKRTPMPKDVRQSLSPMSQRPVLKVCNHENQKVQLTEGSRSHYNINCNSTRTPVAKELNYNLDTHTSTGRIKAAEKKEACNVESNRKKETELLGSFSKNESVPEVEALLARLRAL

SEQ ID NO: 33612 - DNA, 3582 bp, Artificial Sequence
  derived and/or modified sequence
atggagagacaccagcccagactgcaccaccccgcccagggcagcgccgccggcaccccctaccccagcagcgccagcctgagaggctgcagagagagcaagatgcccagaagaaagggcccccagcacccccccccccccagcggccccgaggagcccggcgagaagagacccaagttccacctgaacatcagaaccctgaccgacgacatgctggacaagttcgccagcatcagaatccccggcagcaagaaggagagaccccccctgcccaacctgaagaccgccttcgccagcagcgactgcagcgccgcccccctggagatgatggagaacttccccaagcccctgagcgagaacgagctgctggagctgttcgagaagatgatggaggacatgaacctgaacgaggacaagaaggcccccctgagagagaaggacttcagcatcaagaaggagatggtgatgcagtacatcaacaccgccagcaagaccggcagcctgaagagaagcagacagatcagcccccaggagttcatccacgagctgaagatgggcagcgccgacgagagactggtgacctgcctggagagcctgagagtgagcctgaccagcaaccccgtgagctgggtggagagcttcggccacgagggcctgggcctgctgctggacatcctggagaagctgatcagcggcaagatccaggagaaggtggtgaagaagaaccagcacaaggtgatccagtgcctgaaggccctgatgaacacccagtacggcctggagagaatcatgagcgaggagagaagcctgagcctgctggccaaggccgtggaccccagacaccccaacatgatgaccgacgtggtgaagctgctgagcgccgtgtgcatcgtgggcgaggagagcatcctggaggaggtgctggaggccctgaccagcgccggcgaggagaagaagatcgacagattcttctgcatcgtggagggcctgagacacaacagcgtgcagctgcaggtggcctgcatgcagctgatcaacgccctggtgaccagccccgacgacctggacttcagactgcacatcagaaacgagttcatgagatgcggcctgaaggagatcctgcccaacctgaagtgcatcaagaacgacggcctggacatccagctgaaggtgttcgacgagcacaaggaggaggacctgttcgagctgagccacagactggaggacatcagagccgagctggacgaggcctacgacgtgtacaacatggtgtggagcaccgtgaaggagaccagagccgagggctacttcatcagcatcctgcagcacctgctgctgatcagaaacgactacttcatcagacagcagtacttcaagctgatcgacgagtgcgtgagccagatcgtgctgcacagagacggcatggaccccgacttcacctacagaaagagactggacctggacctgacccagttcgtggacatctgcatcgaccaggccaagctggaggagttcgaggagaaggccagcgagctgtacaagaagttcgagaaggagttcaccgaccaccaggagacccaggccgagctgcagaagaaggaggccaagatcaacgagctgcaggccgagctgcaggccttcaagagccagttcggcgccctgcccgccgactgcaacatccccctgccccccagcaaggagggcggcaccggccacagcgccctgcccccccccccccccctgcccagcggcggcggcgtgcccccccccccccccccccccccccccccccccctgcccggcatgagaatgcccttcagcggccccgtgcccccccccccccccctgggcttcctgggcggccagaacagcccccccctgcccatcctgcccttcggcctgaagcccaagaaggagttcaagcccgagatcagcatgagaagactgaactggctgaagatcagaccccacgagatgaccgagaactgcttctggatcaaggtgaacgagaacaagtacgagaacgtggacctgctgtgcaagctggagaacaccttctgctgccagcagaaggagagaagagaggaggaggacatcgaggagaagaagagcatcaagaagaagatcaaggagctgaagttcctggacagcaagatcgcccagaacctgagcatcttcctgagcagcttcagagtgccctacgaggagatcagaatgatgatcctggaggtggacgagaccagactggccgagagcatgatccagaacctgatcaagcacctgcccgaccaggagcagctgaacagcctgagccagttcaagagcgagtacagcaacctgtgcgagcccgagcagttcgtggtggtgatgagcaacgtgaagagactgagacccagactgagcgccatcctgttcaagctgcagttcgaggagcaggtgaacaacatcaagcccgacatcatggccgtgagcaccgcctgcgaggagatcaagaagagcaagagcttcagcaagctgctggagctggtgctgctgatgggcaactacatgaacgccggcagcagaaacgcccagaccttcggcttcaacctgagcagcctgtgcaagctgaaggacaccaagagcgccgaccagaagaccaccctgctgcacttcctggtggagatctgcgaggagaagtaccccgacatcctgaacttcgtggacgacctggagcccctggacaaggccagcaaggtgagcgtggagaccctggagaagaacctgagacagatgggcagacagctgcagcagctggagaaggagctggagaccttccccccccccgaggacctgcacgacaagttcgtgaccaagatgagcagattcgtgatcagcgccaaggagcagtacgagaccctgagcaagctgcacgagaacatggagaagctgtaccagagcatcatcggctactacgccatcgacgtgaagaaggtgagcgtggaggacttcctgaccgacctgaacaacttcagaaccaccttcatgcaggccatcaaggagaacatcaagaagagagaggccgaggagaaggagaagagagtgagaatcgccaaggagctggccgagagagagagactggagagacagcagaagaagaagagactgctggagatgaagaccgagggcgacgagaccggcgtgatggacaacctgctggaggccctgcagagcggcgccgccttcagagacagaagaaagagaacccccatgcccaaggacgtgagacagagcctgagccccatgagccagagacccgtgctgaaggtgtgcaaccacgagaaccagaaggtgcagctgaccgagggcagcagaagccactacaacatcaactgcaacagcaccagaacccccgtggccaaggagctgaactacaacctggacacccacaccagcaccggcagaatcaaggccgccgagaagaaggaggcctgcaacgtggagagcaacagaaagaaggagaccgagctgctgggcagcttcagcaagaacgagagcgtgcccgaggtggaggccctgctggccagactgagagccctgtag

SEQ ID NO: 33613 - DNA, 3582 bp, Artificial Sequence
  derived and/or modified sequence
atggagagacaccagcccagactgcaccaccccgcccagggcagcgccgccggcaccccctaccccagcagcgccagcctgagaggctgcagagagagcaagatgcccagaagaaagggcccccagcacccccccccccccagcggccccgaggagcccggcgagaagagacccaagttccacctgaacatcagaaccctgaccgacgacatgctggacaagttcgccagcatcagaatccccggcagcaagaaggagagaccccccctgcccaacctgaagaccgccttcgccagcagcgactgcagcgccgcccccctggagatgatggagaacttccccaagcccctgagcgagaacgagctgctggagctgttcgagaagatgatggaggacatgaacctgaacgaggacaagaaggcccccctgagagagaaggacttcagcatcaagaaggagatggtgatgcagtacatcaacaccgccagcaagaccggcagcctgaagagaagcagacagatcagcccccaggagttcatccacgagctgaagatgggcagcgccgacgagagactggtgacctgcctggagagcctgagagtgagcctgaccagcaaccccgtgagctgggtggagagcttcggccacgagggcctgggcctgctgctggacatcctggagaagctgatcagcggcaagatccaggagaaggtggtgaagaagaaccagcacaaggtgatccagtgcctgaaggccctgatgaacacccagtacggcctggagagaatcatgagcgaggagagaagcctgagcctgctggccaaggccgtggaccccagacaccccaacatgatgaccgacgtggtgaagctgctgagcgccgtgtgcatcgtgggcgaggagagcatcctggaggaggtgctggaggccctgaccagcgccggcgaggagaagaagatcgacagattcttctgcatcgtggagggcctgagacacaacagcgtgcagctgcaggtggcctgcatgcagctgatcaacgccctggtgaccagccccgacgacctggacttcagactgcacatcagaaacgagttcatgagatgcggcctgaaggagatcctgcccaacctgaagtgcatcaagaacgacggcctggacatccagctgaaggtgttcgacgagcacaaggaggaggacctgttcgagctgagccacagactggaggacatcagagccgagctggacgaggcctacgacgtgtacaacatggtgtggagcaccgtgaaggagaccagagccgagggctacttcatcagcatcctgcagcacctgctgctgatcagaaacgactacttcatcagacagcagtacttcaagctgatcgacgagtgcgtgagccagatcgtgctgcacagagacggcatggaccccgacttcacctacagaaagagactggacctggacctgacccagttcgtggacatctgcatcgaccaggccaagctggaggagttcgaggagaaggccagcgagctgtacaagaagttcgagaaggagttcaccgaccaccaggagacccaggccgagctgcagaagaaggaggccaagatcaacgagctgcaggccgagctgcaggccttcaagagccagttcggcgccctgcccgccgactgcaacatccccctgccccccagcaaggagggcggcaccggccacagcgccctgcccccccccccccccctgcccagcggcggcggcgtgcccccccccccccccccccccccccccccccccctgcccggcatgagaatgcccttcagcggccccgtgcccccccccccccccctgggcttcctgggcggccagaacagcccccccctgcccatcctgcccttcggcctgaagcccaagaaggagttcaagcccgagatcagcatgagaagactgaactggctgaagatcagaccccacgagatgaccgagaactgcttctggatcaaggtgaacgagaacaagtacgagaacgtggacctgctgtgcaagctggagaacaccttctgctgccagcagaaggagagaagagaggaggaggacatcgaggagaagaagagcatcaagaagaagatcaaggagctgaagttcctggacagcaagatcgcccagaacctgagcatcttcctgagcagcttcagagtgccctacgaggagatcagaatgatgatcctggaggtggacgagaccagactggccgagagcatgatccagaacctgatcaagcacctgcccgaccaggagcagctgaacagcctgagccagttcaagagcgagtacagcaacctgtgcgagcccgagcagttcgtggtggtgatgagcaacgtgaagagactgagacccagactgagcgccatcctgttcaagctgcagttcgaggagcaggtgaacaacatcaagcccgacatcatggccgtgagcaccgcctgcgaggagatcaagaagagcaagagcttcagcaagctgctggagctggtgctgctgatgggcaactacatgaacgccggcagcagaaacgcccagaccttcggcttcaacctgagcagcctgtgcaagctgaaggacaccaagagcgccgaccagaagaccaccctgctgcacttcctggtggagatctgcgaggagaagtaccccgacatcctgaacttcgtggacgacctggagcccctggacaaggccagcaaggtgagcgtggagaccctggagaagaacctgagacagatgggcagacagctgcagcagctggagaaggagctggagaccttccccccccccgaggacctgcacgacaagttcgtgaccaagatgagcatcttcgtgatcagcgccaaggagcagtacgagaccctgagcaagctgcacgagaacatggagaagctgtaccagagcatcatcggctactacgccatcgacgtgaagaaggtgagcgtggaggacttcctgaccgacctgaacaacttcagaaccaccttcatgcaggccatcaaggagaacatcaagaagagagaggccgaggagaaggagaagagagtgagaatcgccaaggagctggccgagagagagagactggagagacagcagaagaagaagagactgctggagatgaagaccgagggcgacgagaccggcgtgatggacaacctgctggaggccctgcagagcggcgccgccttcagagacagaagaaagagaacccccatgcccaaggacgtgagacagagcctgagccccatgagccagagacccgtgctgaaggtgtgcaaccacgagaaccagaaggtgcagctgaccgagggcagcagaagccactacaacatcaactgcaacagcaccagaacccccgtggccaaggagctgaactacaacctggacacccacaccagcaccggcagaatcaaggccgccgagaagaaggaggcctgcaacgtggagagcaacagaaagaaggagaccgagctgctgggcagcttcagcaagaacgagagcgtgcccgaggtggaggccctgctggccagactgagagccctgtag

SEQ ID NO: 33614 - DNA, 3582 bp, Artificial Sequence
  derived and/or modified sequence
atggagcggcatcagccaagactgcaccacccggcccagggatccgcggccggtacaccatatcccagcagcgccagtctacgtggctgcagggaatctaagatgccacggcgcaaagggccgcagcacccaccccccccaagtgggcccgaggagcctggggagaaaaggcccaaattccacttgaatatcaggaccctgaccgacgacatgctggataaattcgcgtcaattaggatccctggttcaaagaaagagaggccacctcttcccaacctaaaaactgctttcgccagctcggactgttccgccgccccactggaaatgatggagaactttcctaagccactaagtgaaaacgaactgctagagctgtttgagaagatgatggaggatatgaatctgaacgaagacaaaaaggcacctctgagggaaaaagacttcagcatcaaaaaggagatggtgatgcagtacattaacacagcatccaagaccgggagcctgaaaagaagccgacagatcagcccccaggagtttatccacgaactgaagatgggaagtgcagacgagcgcctcgttacgtgcctggagagcctgagagtctccttgacgagtaatccagttagctgggtcgaatcatttggccatgaggggctgggccttctgctggatatactggaaaaactcatctcaggaaagatacaggagaaagtggtgaagaaaaaccagcataaagtgattcagtgccttaaagcactaatgaatacccaatatgggctagaaagaatcatgagtgaggaacggagtctgtccttgcttgccaaagccgtggatcctagacacccaaatatgatgacagatgtggtgaagcttcttagtgccgtctgtattgtcggagaggaatctatacttgaggaagtactggaggccttgacatccgccggtgaagaaaagaaaatcgacaggttcttctgtatcgtggagggtctgaggcataactcggtgcagctccaggtggcttgtatgcagctgataaatgccctggttacaagtcccgacgacctagatttcagactccacattaggaacgagtttatgcggtgcggattaaaggagattctacccaaccttaagtgtataaagaatgatgggctagacatacagttgaaggttttcgacgagcataaagaagaggacttatttgagctgagccaccggctggaggatatccgggccgagctggacgaggcctacgatgtctataacatggtttggagcaccgtcaaagagacccgtgcagagggttactttatttccatcttgcagcatctgctgctgataagaaacgactacttcatcagacagcagtatttcaagctgattgatgaatgcgtgtcccagatagttctgcaccgtgacggaatggatccagattttacgtaccggaaaagacttgacctggatctcacgcagtttgtggacatttgtattgaccaggccaaactggaagagttcgaggagaaggctagcgagctctataaaaaattcgagaaggagttcaccgaccatcaggagacccaagccgagcttcaaaagaaagaagctaaaataaatgagctacaagcagagctgcaagcattcaagtcgcaatttggagcactgccagccgactgcaatattcctctgcccccttctaaagagggcggcactggacacagcgccctgccacctccgccccccctccctagtggagggggcgtgcctcccccccctccccccccaccccccccgcccctgcccggcatgagaatgccctttagtggcccagtgccaccgccccctccactaggtttcctgggggggcaaaactctccacctctgcctatcctgcccttcggattgaaacctaagaaggaatttaagccagagatcagtatgagaagactgaactggctgaaaatccgaccccatgaaatgaccgaaaactgtttttggatcaaggttaatgagaataaatatgagaatgtcgatcttttgtgtaaactcgaaaacacattctgctgtcagcagaaagagcggagggaggaggaagacatcgaggagaaaaagtccatcaagaagaagatcaaagaactgaaatttttagattccaaaatcgctcaaaacctgagtatcttcctgagcagttttagagtcccctatgaggaaatcagaatgatgatcctggaagtggatgaaacgcggctggctgaaagtatgatacagaatttaattaagcaccttcctgaccaggagcagctcaatagtttatcccagttcaaaagcgagtacagcaatctgtgtgagcccgagcaatttgtcgtggtgatgagtaatgtaaagagactgcgccctcggttaagtgccatcctcttcaaacttcagttcgaggagcaggtgaacaatatcaagcccgatataatggccgtgagtactgcctgcgaggagattaagaaatccaaatcattttcgaaactgttagaacttgtgctgctgatggggaactacatgaatgccgggagcagaaacgcccaaaccttcgggttcaatttatcctccctgtgtaaattaaaagatacgaagagcgccgatcagaaaaccacactcttacatttcctcgtagaaatctgcgaggaaaagtatcctgatatattgaacttcgttgatgacttagagcccctggataaagcctccaaagtgagtgtggagacgctggaaaagaacttaagacagatgggacggcagctgcagcaactcgagaaagagctggagaccttccctcctccggaggatctccacgacaagtttgtgacgaaaatgtccagatttgttatttctgcaaaagagcaatacgaaaccttgtctaaactgcacgagaacatggaaaaactgtatcagagcataatcggttactatgcaatcgacgtgaagaaggtgtccgttgaggactttctgaccgatttgaacaatttccggacgacattcatgcaggccataaaggagaatattaaaaagagagaggccgaagagaaggagaagcgcgtgaggatcgctaaggaattagccgaaagagagcggctggaacggcagcaaaagaagaagaggctactcgagatgaaaacggagggagatgagactggagtaatggataaccttctcgaagcccttcagtccggagccgcctttcgagaccgccgtaaaaggacgccaatgcccaaggatgtccgacagtcattgagccccatgagtcagcggcctgtgctgaaagtttgcaatcacgaaaaccaaaaggtacaactgactgagggcagtagatcacattataacatcaattgcaacagtacacgaacgcccgtggccaaggaactcaattacaatctggatacccacacatctacgggccgcattaaagcagccgaaaagaaagaggcttgtaatgtggaatcaaatcgcaaaaaggaaacggaactcctaggaagttttagtaaaaacgagtccgtgccggaggtagaggcccttctcgccaggcttcgcgctctctag

SEQ ID NO: 33615 - DNA, 3582 bp, Artificial Sequence
  derived and/or modified sequence
atggagagacatcagcctcgtctgcaccaccccgcccaaggatccgctgccggaaccccatatccctcaagcgcctcacttcggggctgtagagagtcaaaaatgccccgtcggaaagggccgcaacatcctccaccaccctctgggccagaagagccaggagaaaaacgccctaaattccatttaaacatccgcaccttgactgacgacatgctcgacaagttcgcctcaattagaatccctggatcgaagaaggagaggcccccattgccaaatctaaagactgcatttgccagttccgactgttctgccgcacctctggagatgatggagaactttccaaaacctctgagtgagaacgagcttctcgaacttttcgaaaagatgatggaggacatgaatctgaacgaggataaaaaggcccctctccgagagaaagacttcagcatcaagaaagagatggtaatgcaatacattaacacggcctctaaaactgggtccctcaagcggtccaggcagatctctccccaggagttcatccacgagcttaagatgggcagtgcagatgaaaggttagtgacctgtctggagtccctgagggtgagcctcacctccaacccggtcagttgggtagagtcattcggacatgaaggcctcggactgctattagacatcttggagaagctgatatccggaaaaatccaggagaaggtcgtaaaaaaaaaccagcataaggtcatccagtgcctgaaggccctgatgaacactcaatatggactggagcgaatcatgtccgaagagcggagcctgagcttattagccaaagcagtggatccccgccacccgaacatgatgacagacgtggtgaaactcctgtctgctgtgtgcatagtgggcgaggagtcaattctggaagaggtacttgaggccctgacgtccgccggggaggaaaagaaaatcgaccggtttttctgcatcgtcgaagggttgcgccataattctgtgcagttgcaggtggcctgtatgcaactcattaatgccctggtgacatccccagacgatctggactttcgcctacacattagaaacgaatttatgcggtgtggtctgaaagaaattctccccaatctgaaatgcatcaagaacgatggtctggacattcagctgaaggtcttcgacgagcacaaagaagaggatctcttcgagctgagccaccgcctcgaggatatcagagctgaacttgatgaggcctacgatgtgtataatatggtgtggagcacagtcaaggaaacgagagcagaggggtactttatttccattttgcagcacttgttgctgataaggaatgactatttcatcagacagcagtactttaagctgattgatgagtgcgtcagccagatagtgctgcatagagatggaatggatcccgattttacgtaccgcaagagattggatctcgacttaactcagtttgtggacatctgcattgatcaagccaagcttgaggagtttgaagagaaggcctcagaactgtataaaaagtttgagaaagagttcacggaccatcaggaaacccaggctgaactgcaaaagaaagaagctaagatcaatgaattacaggctgaactacaggcgtttaagtcgcagttcggggctctgccagcggactgtaacatccccctcccaccctctaaggagggagggaccggtcatagcgctctgccccccccacctcccctcccttcaggagggggagtgccccctcccccaccaccacctcccccgccccctcttcctggcatgcgaatgcccttctcaggaccagtccctccaccgccccccctcggcttcctgggaggccaaaatagccctcccttgcctattttgccatttggactcaagccaaaaaaggagtttaaacctgagatatcaatgagacggctcaactggctgaaaattcgtccccatgaaatgaccgagaactgcttctggattaaagtaaatgaaaataaatacgagaacgtggatctgttgtgtaaattagaaaataccttctgttgtcagcagaaggagcgcagagaggaagaggatatcgaggagaaaaaatccattaaaaagaagattaaagagctcaagttcctggacagtaaaatcgctcagaatctgagcattttcttaagcagctttagagtgccatacgaggagatccggatgatgatactggaggtggatgaaaccagactagccgaatctatgatacagaatttgattaagcatctgcctgaccaggaacaattgaattccctgagccagtttaagtctgagtactcaaatctgtgcgagcctgaacagttcgttgtggttatgtccaatgttaagcgtcttcgaccccggctgtccgctattctgttcaagctgcagttcgaagagcaggtcaacaatattaagcctgacatcatggccgtttccacggcatgcgaagagatcaaaaaatccaaatctttctctaaactgttagagttagtcctgctgatgggcaactacatgaatgctgggtcaaggaatgctcagacatttggttttaacttatctagcctgtgcaagctgaaggacacaaagtctgctgatcagaagaccaccctgctacactttctagttgagatctgtgaagaaaaatacccagatattctgaatttcgtagatgacctggaaccgctggataaggcctccaaggtcagcgtcgagacccttgaaaaaaacctgcggcagatgggtagacagctccagcaactcgagaaagaacttgaaacctttcccccccctgaagatctgcatgataagttcgtcactaaaatgtctattttcgtgatctcagctaaggagcagtatgagactctctccaagttgcatgagaacatggagaagttgtatcagtctatcataggatactatgccattgacgtcaaaaaggtttctgtggaggattttctcactgatttgaataactttcggacaaccttcatgcaggcaatcaaagaaaacatcaagaaaagagaagccgaggagaaagaaaaacgggttcgcattgccaaagaactggccgaacgcgaacgtctggagagacagcagaagaagaaaagactcctggagatgaaaaccgagggcgacgagactggggtgatggataaccttctggaggctttgcaatcaggagccgcttttcgagatcgaagaaagcggacccccatgcccaaagacgttcggcaatccttgtccccaatgtcccagcgcccggtcctgaaagtgtgcaaccatgaaaatcaaaaggtacagttgaccgaaggctcgcgaagccactacaacattaactgcaactctactcgcactccagtcgcaaaggagctgaactataatctggatacccatacttctacaggtcgaattaaggcggccgagaagaaagaggcatgcaacgtagaatcaaatcggaaaaaagagaccgagctactgggaagttttagtaagaatgaaagtgttccagaagtcgaggctttgttagctcggctccgcgccttatag

SEQ ID NO: 33616 - DNA, 4675 bp, Artificial Sequence
  derived and/or modified sequence
cgggagtaaaacctgttgtcgatccctcagcttccagcttgcggcttgctgagtggccaccttctttccggtccccggagctgcggggaaagatggaacggcaccagccgcggctgcaccacccggcccaaggctcagccgctgggactccctacccttcctcagcctctctccgcggctgccgggaaagcaagatgccgcgcaggaagggcccccaacaccctccgccgcccagtggccccgaggagcctggggagaagcgccccaagtttcatttaaatattaggacactgacggatgatatgctggacaaatttgccagcataagaattccagggagcaagaaagagagacctccacttcccaacctgaagactgcatttgcaagcagtgattgctcagcagcacctttagagatgatggagaactttccaaagccactgtcagagaatgaactcttagaactttttgaaaaaatgatggaagatatgaatttaaatgaagataaaaaggcaccattgcgggaaaaggacttcagtatcaaaaaagaaatggtgatgcagtacattaatactgcttctaagacaggaagtcttaagagaagccgacagatctcacctcaggaattcattcatgagctgaaaatggggtctgcagatgagagacttgtcacatgcctggagtctctccgagtgtctttgaccagcaatcctgtgagttgggtggaaagctttggacatgaagggcttggattattattagacattttggaaaaactgattagtggaaaaatccaagaaaaagttgtaaagaaaaatcaacataaagtcatacagtgtctaaaagccctgatgaatacgcagtatggcttggaaagaattatgagtgaggagaggagcctttccttattggccaaagccgtggatcccagacaccccaatatgatgacagatgtggttaaacttctctctgcggtatgcattgtaggggaagaaagcatccttgaagaagttttagaagctttaacttcagctggtgaagaaaaaaaaattgacagatttttttgtattgtggaaggcctccggcacaattcagttcaactgcaagtagcttgtatgcagctcatcaatgccctggttacatctcctgatgatttggatttcaggcttcacatcagaaatgaatttatgcgttgtggattgaaagagatattgccaaatttaaaatgcattaagaatgatggcctggatatccaacttaaagtctttgatgagcataaagaagaagatttgtttgagttatcccatcgccttgaagatattagagctgaacttgatgaagcatatgatgtttacaacatggtgtggagcacagttaaagaaactagagcagagggatattttatttctattcttcagcatcttttgctgattcgaaatgattattttataaggcaacaatacttcaaattaattgatgagtgtgtatcccagattgtattgcatagagatggaatggatccagacttcacatatcgaaaaagactagatttagatttaacccagtttgtagacatttgcatagatcaagcaaaactagaagagtttgaagagaaagcatcagaactttacaagaaatttgaaaaagagtttaccgaccaccaagaaactcaggctgaattgcagaaaaaagaggcaaagattaatgagcttcaagcagagctacaagcttttaagtctcagtttggtgccttgccagctgattgtaatattcctttgcctccctctaaagaaggtggaactggccactcagcacttcctcctccgcctccactgccttctggtggaggggtgccgcctccacctcctcccccaccacctcctccacttccaggaatgcggatgccattcagtggtcctgtgcctccaccacctcccctgggattccttggaggacaaaattctcctcctctaccaatcctgccatttgggttgaaaccaaagaaagaatttaaacctgaaatcagcatgagaagattgaattggttaaagatcagacctcatgaaatgactgaaaactgtttctggataaaagtaaatgaaaataagtatgaaaacgtggatttgctttgtaaacttgagaatacattttgttgccaacaaaaagagagaagagaagaggaagatattgaagagaagaaatcgattaagaaaaaaattaaagaacttaagtttttagattctaaaattgcccagaacctttcaatcttcctgagctcttttcgggtgccatatgaggaaatcagaatgatgatattggaagtagatgaaacacggttggcagagtctatgattcagaacttaataaagcatcttcctgatcaagagcaattaaattcattgtctcagttcaagagtgaatatagcaacttatgtgaacctgagcagtttgtggttgtgatgagcaatgtgaagagactacggccacggctcagtgctattctctttaagcttcagtttgaagagcaggtgaacaacatcaaacctgacatcatggctgtcagtactgcctgcgaagagataaagaagagcaaaagctttagcaagttgctggaacttgtattgctaatgggaaactacatgaatgctggctcccggaatgctcaaaccttcggatttaaccttagctctctctgtaaactaaaggacacaaaatcagcagatcagaaaacaacgctacttcatttcctggtagaaatatgtgaagagaagtaccctgatatactgaattttgtggatgatttggaacctttagacaaagctagtaaagtctctgtagaaacgctggaaaagaatttgaggcagatgggaaggcagcttcaacagcttgagaaggaattggaaacctttccccctcctgaggacttgcatgacaagtttgtgacaaagatgtccagatttgttatcagtgcaaaagaacaatatgagacactttcgaagttacacgaaaacatggaaaagttataccagagtataataggatactatgccattgatgtgaagaaggtgtctgtggaagactttcttactgacctgaataacttcagaaccacattcatgcaagcaataaaggagaatatcaaaaaaagagaagcagaggaaaaagaaaaacgtgtcagaatagctaaagaattagcagagcgagaaagactcgaacgccaacaaaagaaaaagcgtttattagaaatgaagactgagggtgatgagacaggagtgatggataatctgctggaggccttgcagtccggggctgccttccgcgacagaagaaaaaggacaccgatgccaaaagatgttcggcagagtctcagtccaatgtctcagaggcctgttctgaaagtttgtaaccatgaaaatcagaaagtgcagttgacagaagggtcacgttcacactacaatatcaattgcaactcaacaaggactccagtcgccaaggagcttaattataatctagacactcatacgtctactgggaggatcaaggcagctgagaagaaggaagcgtgtaatgtagaaagcaacagaaaaaaggaaacggaacttcttggctctttttctaaaaatgaatcagttcccgaagttgaagccctgctggcaagattacgagctttataagttaaactggtttttaaaaaaaatgattaagccaaatataaagccatgctctaaactataacacttgaaaaaattgcttttatgtaagtgactttatatagttttaaattatgatatatattagaaaaataaagctaaatatatgattgcaatgctttttctatgtactggaggttttggtttattcaagattgtaccgggctttaatccttttttttttttttttgtctcctggtattcctcagttctttatttggtggttaaattatacatattgctttagagagcaggtaggtggccatgtgttcagcagtgtgtccttaagaaaataccatctttctaagccactggaatttttactttactatttttaacattaatggatgtcaggtcatcaacctcaagtctttacatatccatgtatattccatatatattgtttatataggcccaagtttctccttaattgggatctatatactaccagcacaacatcaaaaacatgtaattgaatacatcagagctatatatgtaaggaaatgactggtgaccccattatcatcattgttgaattcatgttaagtagaccctctaggggaccataaggcaattgagcacataacgaaaaatgatgcaataagaatgtatgcactctctttgccaaatgcatgtgcttttgtgtaacgtggatgtaaacagaattgcagtgctgccgaaattcttgatcttggctaagagagtatttttccccttgtaattatgactctgagataaaattgccattttgaaatttccaaagtaacaactttttttattttatgaataaacttgggattgcaatttctctgatctgacaatcaataactttaacaaagatctaaataagtgtttcaaggaaagttttcctaagcaaatgtaatattacctcatttgggcatcattactctgttaattctatatcaaaggaaataaacttgctacttgcactaaatgaaaaaaaa

SEQ ID NO: 33617 - DNA, 4794 bp, Artificial Sequence
  derived and/or modified sequence
tgatccggcggcgcgggattggccagtcccgggccaacacgggtggcgggagttttcagatgtgttggctgcggccccgacttcagcggttgggctaggctgtgctgactgtttgggtggcggaccccgggagtaaaacctgttgtcgatccctcagcttccagcttgcggcttgctgagtggccaccttctttccggtccccggagctgcggggaaagatggaacggcaccagccgcggctgcaccacccggcccaaggctcagccgctgggactccctacccttcctcagcctctctccgcggctgccgggaaagcaagatgccgcgcaggaagggcccccaacaccctccgccgcccagtggccccgaggagcctggggagaagcgccccaagtttcatttaaatattaggacactgacggatgatatgctggacaaatttgccagcataagaattccagggagcaagaaagagagacctccacttcccaacctgaagactgcatttgcaagcagtgattgctcagcagcacctttagagatgatggagaactttccaaagccactgtcagagaatgaactcttagaactttttgaaaaaatgatggaagatatgaatttaaatgaagataaaaaggcaccattgcgggaaaaggacttcagtatcaaaaaagaaatggtgatgcagtacattaatactgcttctaagacaggaagtcttaagagaagccgacagatctcacctcaggaattcattcatgagctgaaaatggggtctgcagatgagagacttgtcacatgcctggagtctctccgagtgtctttgaccagcaatcctgtgagttgggtggaaagctttggacatgaagggcttggattattattagacattttggaaaaactgattagtggaaaaatccaagaaaaagttgtaaagaaaaatcaacataaagtcatacagtgtctaaaagccctgatgaatacgcagtatggcttggaaagaattatgagtgaggagaggagcctttccttattggccaaagccgtggatcccagacaccccaatatgatgacagatgtggttaaacttctctctgcggtatgcattgtaggggaagaaagcatccttgaagaagttttagaagctttaacttcagctggtgaagaaaaaaaaattgacagatttttttgtattgtggaaggcctccggcacaattcagttcaactgcaagtagcttgtatgcagctcatcaatgccctggttacatctcctgatgatttggatttcaggcttcacatcagaaatgaatttatgcgttgtggattgaaagagatattgccaaatttaaaatgcattaagaatgatggcctggatatccaacttaaagtctttgatgagcataaagaagaagatttgtttgagttatcccatcgccttgaagatattagagctgaacttgatgaagcatatgatgtttacaacatggtgtggagcacagttaaagaaactagagcagagggatattttatttctattcttcagcatcttttgctgattcgaaatgattattttataaggcaacaatacttcaaattaattgatgagtgtgtatcccagattgtattgcatagagatggaatggatccagacttcacatatcgaaaaagactagatttagatttaacccagtttgtagacatttgcatagatcaagcaaaactagaagagtttgaagagaaagcatcagaactttacaagaaatttgaaaaagagtttaccgaccaccaagaaactcaggctgaattgcagaaaaaagaggcaaagattaatgagcttcaagcagagctacaagcttttaagtctcagtttggtgccttgccagctgattgtaatattcctttgcctccctctaaagaaggtggaactggccactcagcacttcctcctccgcctccactgccttctggtggaggggtgccgcctccacctcctcccccaccacctcctccacttccaggaatgcggatgccattcagtggtcctgtgcctccaccacctcccctgggattccttggaggacaaaattctcctcctctaccaatcctgccatttgggttgaaaccaaagaaagaatttaaacctgaaatcagcatgagaagattgaattggttaaagatcagacctcatgaaatgactgaaaactgtttctggataaaagtaaatgaaaataagtatgaaaacgtggatttgctttgtaaacttgagaatacattttgttgccaacaaaaagagagaagagaagaggaagatattgaagagaagaaatcgattaagaaaaaaattaaagaacttaagtttttagattctaaaattgcccagaacctttcaatcttcctgagctcttttcgggtgccatatgaggaaatcagaatgatgatattggaagtagatgaaacacggttggcagagtctatgattcagaacttaataaagcatcttcctgatcaagagcaattaaattcattgtctcagttcaagagtgaatatagcaacttatgtgaacctgagcagtttgtggttgtgatgagcaatgtgaagagactacggccacggctcagtgctattctctttaagcttcagtttgaagagcaggtgaacaacatcaaacctgacatcatggctgtcagtactgcctgcgaagagataaagaagagcaaaagctttagcaagttgctggaacttgtattgctaatgggaaactacatgaatgctggctcccggaatgctcaaaccttcggatttaaccttagctctctctgtaaactaaaggacacaaaatcagcagatcagaaaacaacgctacttcatttcctggtagaaatatgtgaagagaagtaccctgatatactgaattttgtggatgatttggaacctttagacaaagctagtaaagtctctgtagaaacgctggaaaagaatttgaggcagatgggaaggcagcttcaacagcttgagaaggaattggaaacctttccccctcctgaggacttgcatgacaagtttgtgacaaagatgtccatatttgttatcagtgcaaaagaacaatatgagacactttcgaagttacacgaaaacatggaaaagttataccagagtataataggatactatgccattgatgtgaagaaggtgtctgtggaagactttcttactgacctgaataacttcagaaccacattcatgcaagcaataaaggagaatatcaaaaaaagagaagcagaggaaaaagaaaaacgtgtcagaatagctaaagaattagcagagcgagaaagactcgaacgccaacaaaagaaaaagcgtttattagaaatgaagactgagggtgatgagacaggagtgatggataatctgctggaggccttgcagtccggggctgccttccgcgacagaagaaaaaggacaccgatgccaaaagatgttcggcagagtctcagtccaatgtctcagaggcctgttctgaaagtttgtaaccatgaaaatcagaaagtgcagttgacagaagggtcacgttcacactacaatatcaattgcaactcaacaaggactccagtcgccaaggagcttaattataatctagacactcatacgtctactgggaggatcaaggcagctgagaagaaggaagcgtgtaatgtagaaagcaacagaaaaaaggaaacggaacttcttggctctttttctaaaaatgaatcagttcccgaagttgaagccctgctggcaagattacgagctttataagttaaactggtttttaaaaaaaatgattaagccaaatataaagccatgctctaaactataacacttgaaaaaattgcttttatgtaagtgactttatatagttttaaattatgatatatattagaaaaataaagctaaatatatgattgcaatgctttttctatgtactggaggttttggtttattcaagattgtaccgggctttaatccttttttttttttttttgtctcctggtattcctcagttctttatttggtggttaaattatacatattgctttagagagcaggtaggtggccatgtgttcagcagtgtgtccttaagaaaataccatctttctaagccactggaatttttactttactatttttaacattaatggatgtcaggtcatcaacctcaagtctttacatatccatgtatattccatatatattgtttatataggcccaagtttctccttaattgggatctatatactaccagcacaacatcaaaaacatgtaattgaatacatcagagctatatatgtaaggaaatgactggtgaccccattatcatcattgttgaattcatgttaagtagaccctctaggggaccataaggcaattgagcacataacgaaaaatgatgcaataagaatgtatgcactctctttgccaaatgcatgtgcttttgtgtaacgtggatgtaaacagaattgcagtgctgccgaaattcttgatcttggctaagagagtatttttccccttgtaattatgactctgagataaaattgccattttgaaatttccaaagtaacaactttttttattttatgaataaacttgggattgcaatttctctgatctgacaatcaataactttaacaaagatctaaataagtgtttcaaggaaagttttcctaagcaaatgtaatattacctcatttgggcatcattactctgttaattctatatcaaaggaaataaacttgctacttgcactaaatg

SEQ ID NO: 33618 - DNA, 3582 bp, Artificial Sequence
  derived and/or modified sequence
atggagcggcaccagccccggctgcaccacccagcccagggcagcgctgctggcaccccctaccccagcagcgccagcctgcggggctgccgggagagcaagatgcccaggaggaagggcccccagcaccccccaccacccagcggccctgaggagcctggagagaagaggcccaagttccacctgaacatccgcaccctgacagatgacatgctggacaagtttgccagcatccgcatccctggcagcaagaaggagcggccccccctgcccaacctgaagacagcctttgccagcagtgactgcagcgctgcccccctggagatgatggagaacttccccaagcccctgtctgaaaatgagctgctggagctgtttgagaagatgatggaggacatgaacctgaatgaagacaagaaggcccccctgcgggagaaggacttcagcatcaagaaggagatggtgatgcagtacatcaacacagccagcaagacaggcagcctgaagaggagccggcagatcagcccccaggagttcatccacgagctgaagatgggcagcgcagatgagcggctggtgacctgcctggagagcctgcgggtgtccctgaccagcaaccctgtgtcctgggtggagagctttggccacgagggcctgggcctgctgctggacatcctggagaagctgatcagcggcaagatccaggagaaggtggtgaagaagaaccagcacaaggtgatccagtgcctgaaggccctgatgaacacccagtatggcctggagcgcatcatgtctgaggagaggagcctgagcctgctggccaaggctgtggaccccaggcaccccaacatgatgacagatgtggtgaagctgctgtctgctgtgtgcatcgtgggggaggagagcatcctggaggaggtgctggaggccctgaccagcgctggggaggagaagaagattgaccgcttcttctgcatcgtggagggcctgcggcacaacagcgtgcagctgcaggtggcctgcatgcagctgatcaatgccctggtgaccagcccagatgacctggacttccggctgcacatcagaaatgagttcatgagatgtggcctgaaggagatcctgcccaacctgaagtgcatcaagaatgatggcctggacatccagctgaaggtgtttgatgagcacaaggaggaggacctgtttgagctgagccaccggctggaggacatccgggcagagctggatgaggcctatgatgtgtacaacatggtgtggagcacagtgaaggagaccagggctgagggctacttcatcagcatcctgcagcacctgctgctgatcagaaatgactacttcatccggcagcagtacttcaagctgattgatgaatgtgtgtcccagatcgtgctgcacagagatggcatggaccctgacttcacctacaggaagaggctggacctggacctgacccagtttgtggacatctgcatcgaccaggccaagctggaggagtttgaggagaaggccagcgagctgtacaagaagtttgagaaggagttcacagaccaccaggagacccaggccgagctgcagaagaaggaggccaagatcaatgagctgcaggccgagctgcaggccttcaagagccagtttggagccctgcctgctgactgcaacatccccctgccccccagcaaggagggcggcaccggccacagcgccctgcccccacctccacccctgcccagcggcggcggcgtgcccccacctcctcctcctcctcctcctccacccctgcccggcatgaggatgcccttcagcggccctgtgcccccacctccacccctgggcttcctgggcggccagaacagcccccccctgcccatcctgcccttcggcctgaagcccaagaaggagttcaagccagagatctccatgaggcggctgaactggctgaagatccggccccatgagatgacagagaactgcttctggatcaaggtgaatgaaaacaagtatgaaaatgtggacctgctgtgcaagctggagaacaccttctgctgccagcagaaggagcggcgggaggaggaggacatcgaggagaagaagagcatcaagaagaagatcaaggagctgaagttcctggacagcaagatcgcccagaacctgagcatcttcctgagcagcttccgggtgccctatgaggagatccgcatgatgatcctggaggtggatgagacccggctggccgagagcatgatccagaacctgatcaagcacctgcctgaccaggagcagctgaacagcctgagccagttcaagtctgagtacagcaacctgtgtgagcctgagcagtttgtggtggtgatgagcaatgtgaagaggctgcggccccggctgagcgccatcctcttcaagctgcagtttgaggagcaggtgaacaacatcaagccagacatcatggctgtgtccacagcctgtgaggagatcaagaagagcaagagcttcagcaagctgctggagctggtgctgctgatgggcaactacatgaatgccggcagcagaaatgcccagaccttcggcttcaacctgagcagcctgtgcaagctgaaggacaccaagtctgctgaccagaagaccaccctgctgcacttcctggtggagatctgtgaggagaagtacccagacatcctgaactttgtggatgacctggagcccctggacaaggccagcaaggtgtctgtggagaccctggagaagaacctgcggcagatgggccggcagctgcagcagctggagaaggagctggagaccttccccccacctgaggacctgcatgacaagtttgtgaccaagatgagccgcttcgtcatcagcgccaaggagcagtatgagaccctgagcaagctgcacgagaacatggagaagctgtaccagagcatcatcggctactatgccattgatgtgaagaaggtgtctgtggaggacttcctgacagacctgaacaacttccgcaccaccttcatgcaggccatcaaggagaacatcaagaagcgggaggccgaggagaaggagaagagggtgcgcatcgccaaggagctggccgagcgggagcggctggagcggcagcagaagaagaagaggctgctggagatgaagacagaaggagatgaaacaggagtgatggacaacctgctggaggccctgcagagcggggccgccttccgggacaggaggaagaggacccccatgcccaaggatgtgcggcagagcctgagccccatgagccagaggcctgtgctgaaggtgtgcaaccacgagaaccagaaggtgcagctgacagagggcagccgcagccactacaacatcaactgcaacagcaccaggacccctgtggccaaggagctgaactacaacctggacacccacaccagcacaggccgcatcaaggctgctgagaagaaggaggcctgcaatgtggagagcaacaggaagaaggagacagagctgctgggcagcttcagcaagaatgaatctgtgcctgaggtggaggccctgctggcccggctgcgggccctgtag

SEQ ID NO: 33619 - DNA, 3582 bp, Artificial Sequence
  derived and/or modified sequence
atggagcggcaccagccccggctgcaccacccagcccagggcagcgctgctggcaccccctaccccagcagcgccagcctgcggggctgccgggagagcaagatgcccaggaggaagggcccccagcaccccccaccacccagcggccctgaggagcctggagagaagaggcccaagttccacctgaacatccgcaccctgacagatgacatgctggacaagtttgccagcatccgcatccctggcagcaagaaggagcggccccccctgcccaacctgaagacagcctttgccagcagtgactgcagcgctgcccccctggagatgatggagaacttccccaagcccctgtctgaaaatgagctgctggagctgtttgagaagatgatggaggacatgaacctgaatgaagacaagaaggcccccctgcgggagaaggacttcagcatcaagaaggagatggtgatgcagtacatcaacacagccagcaagacaggcagcctgaagaggagccggcagatcagcccccaggagttcatccacgagctgaagatgggcagcgcagatgagcggctggtgacctgcctggagagcctgcgggtgtccctgaccagcaaccctgtgtcctgggtggagagctttggccacgagggcctgggcctgctgctggacatcctggagaagctgatcagcggcaagatccaggagaaggtggtgaagaagaaccagcacaaggtgatccagtgcctgaaggccctgatgaacacccagtatggcctggagcgcatcatgtctgaggagaggagcctgagcctgctggccaaggctgtggaccccaggcaccccaacatgatgacagatgtggtgaagctgctgtctgctgtgtgcatcgtgggggaggagagcatcctggaggaggtgctggaggccctgaccagcgctggggaggagaagaagattgaccgcttcttctgcatcgtggagggcctgcggcacaacagcgtgcagctgcaggtggcctgcatgcagctgatcaatgccctggtgaccagcccagatgacctggacttccggctgcacatcagaaatgagttcatgagatgtggcctgaaggagatcctgcccaacctgaagtgcatcaagaatgatggcctggacatccagctgaaggtgtttgatgagcacaaggaggaggacctgtttgagctgagccaccggctggaggacatccgggcagagctggatgaggcctatgatgtgtacaacatggtgtggagcacagtgaaggagaccagggctgagggctacttcatcagcatcctgcagcacctgctgctgatcagaaatgactacttcatccggcagcagtacttcaagctgattgatgaatgtgtgtcccagatcgtgctgcacagagatggcatggaccctgacttcacctacaggaagaggctggacctggacctgacccagtttgtggacatctgcatcgaccaggccaagctggaggagtttgaggagaaggccagcgagctgtacaagaagtttgagaaggagttcacagaccaccaggagacccaggccgagctgcagaagaaggaggccaagatcaatgagctgcaggccgagctgcaggccttcaagagccagtttggagccctgcctgctgactgcaacatccccctgccccccagcaaggagggcggcaccggccacagcgccctgcccccacctccacccctgcccagcggcggcggcgtgcccccacctcctcctcctcctcctcctccacccctgcccggcatgaggatgcccttcagcggccctgtgcccccacctccacccctgggcttcctgggcggccagaacagcccccccctgcccatcctgcccttcggcctgaagcccaagaaggagttcaagccagagatctccatgaggcggctgaactggctgaagatccggccccatgagatgacagagaactgcttctggatcaaggtgaatgaaaacaagtatgaaaatgtggacctgctgtgcaagctggagaacaccttctgctgccagcagaaggagcggcgggaggaggaggacatcgaggagaagaagagcatcaagaagaagatcaaggagctgaagttcctggacagcaagatcgcccagaacctgagcatcttcctgagcagcttccgggtgccctatgaggagatccgcatgatgatcctggaggtggatgagacccggctggccgagagcatgatccagaacctgatcaagcacctgcctgaccaggagcagctgaacagcctgagccagttcaagtctgagtacagcaacctgtgtgagcctgagcagtttgtggtggtgatgagcaatgtgaagaggctgcggccccggctgagcgccatcctcttcaagctgcagtttgaggagcaggtgaacaacatcaagccagacatcatggctgtgtccacagcctgtgaggagatcaagaagagcaagagcttcagcaagctgctggagctggtgctgctgatgggcaactacatgaatgccggcagcagaaatgcccagaccttcggcttcaacctgagcagcctgtgcaagctgaaggacaccaagtctgctgaccagaagaccaccctgctgcacttcctggtggagatctgtgaggagaagtacccagacatcctgaactttgtggatgacctggagcccctggacaaggccagcaaggtgtctgtggagaccctggagaagaacctgcggcagatgggccggcagctgcagcagctggagaaggagctggagaccttccccccacctgaggacctgcatgacaagtttgtgaccaagatgagcatcttcgtcatcagcgccaaggagcagtatgagaccctgagcaagctgcacgagaacatggagaagctgtaccagagcatcatcggctactatgccattgatgtgaagaaggtgtctgtggaggacttcctgacagacctgaacaacttccgcaccaccttcatgcaggccatcaaggagaacatcaagaagcgggaggccgaggagaaggagaagagggtgcgcatcgccaaggagctggccgagcgggagcggctggagcggcagcagaagaagaagaggctgctggagatgaagacagaaggagatgaaacaggagtgatggacaacctgctggaggccctgcagagcggggccgccttccgggacaggaggaagaggacccccatgcccaaggatgtgcggcagagcctgagccccatgagccagaggcctgtgctgaaggtgtgcaaccacgagaaccagaaggtgcagctgacagagggcagccgcagccactacaacatcaactgcaacagcaccaggacccctgtggccaaggagctgaactacaacctggacacccacaccagcacaggccgcatcaaggctgctgagaagaaggaggcctgcaatgtggagagcaacaggaagaaggagacagagctgctgggcagcttcagcaagaatgaatctgtgcctgaggtggaggccctgctggcccggctgcgggccctgtag

SEQ ID NO: 33620 - DNA, 3582 bp, Artificial Sequence
  derived and/or modified sequence
atggagcggcaccagccccggctgcaccaccccgcccagggcagcgccgcgggtactccctacccatcatccgcctctttacgggggtgtcgcgagtcaaaaatgcccagacggaaagggccccagcatccaccgccaccgagcggccctgaagaaccgggagagaagagacccaagttccatctgaatatacggactctaactgacgatatgctggacaaattcgcgtccatacgcattccgggcagcaaaaaggagcggcctcccttacccaacctcaaaacagcctttgcaagttcagattgctccgccgcgcccctggagatgatggagaattttcctaaaccactgtccgagaacgagctccttgaactattcgaaaagatgatggaggacatgaatctgaacgaagacaagaaagcccccttaagggagaaggattttagcattaaaaaggagatggtcatgcagtatataaacaccgcctccaagacggggtcactgaagcgctctcggcagattagtccacaggagtttatccacgaactaaagatgggttccgcagatgagaggctcgtcacgtgcctggaaagcctgagagtgagtttgacgtctaacccggtgtcctgggtcgaatcttttggccacgagggcctgggattgctgctggacattctcgagaagctcatcagcgggaagatccaagagaaggtagtaaaaaaaaaccagcacaaggtgatacaatgcctgaaggccctgatgaacacccagtatggcctggaacggatcatgtctgaagagaggagtctgagtctgttggctaaggccgtggacccccgacacccgaacatgatgaccgacgtggtaaagttgctgtcggcagtgtgtatcgttggagaggagtcaatcctggaggaggtactggaagccttaacgagcgctggcgaggagaaaaaaattgacaggttcttctgcatcgtagaggggttgcgccataattccgttcaattacaggtggcctgcatgcaacttatcaatgcacttgtgacaagccccgacgaccttgactttagactgcatattcgcaacgagtttatgagatgtggcctgaaagaaatcctgccaaatctgaaatgcattaagaacgacggcctcgacatacagcttaaagtttttgacgagcacaaagaagaagacttattcgagctcagccaccgcctcgaggacattcgggccgagctcgacgaagcatatgacgtgtacaatatggtgtggtcaaccgttaaagagacaagagccgaggggtatttcattagcatcctgcagcacctgctcctcatcagaaacgactattttattcgccagcaatactttaagttgatagatgagtgcgtgagccagattgtgttacacagggacggcatggaccctgacttcacctataggaagcgactggacttagacctaacccagtttgtggatatttgcatagatcaggcaaagctggaggaattcgaagaaaaggcctccgagctatacaagaagttcgagaaggagttcacagaccaccaggagacccaggccgagttacagaaaaaggaagccaagattaacgagctccaagccgagctacaggcgtttaagtcccagttcggtgccctgcctgctgattgtaacataccacttcccccgagtaaggaaggtggaacagggcactctgctctcccccccccaccgccacttcccagcggggggggagtccctcctccgcccccaccgccaccccccccaccactccccggaatgagaatgcctttttctggccccgtacctcccccaccccccctgggattcctcggcgggcaaaatagtcccccattgccaattttgccctttggcctgaagccaaagaaagagttcaagcctgagatctctatgcgtcgcctcaattggctgaagatccgacctcatgagatgacggagaattgtttttggatcaaagttaacgagaataagtatgagaacgtggatctgctgtgcaagttggagaacactttttgctgccagcaaaaggagagaagagaagaggaagacatcgaagaaaagaaatctatcaagaagaagatcaaggagctgaagtttctggattccaaaatcgcccaaaacctgagcatttttttgagctcctttagagtgccatacgaggagattagaatgatgatccttgaggtggacgagacgcgcctggctgagtccatgatccagaatttaatcaaacacctgcctgatcaggagcagctgaatagcttgagccaattcaaatccgaatatagcaacctctgtgaacccgagcagttcgtggttgtaatgagcaatgtaaagaggctaagaccaaggttgtctgctatcttgttcaagctccagttcgaggaacaggttaacaatatcaaaccagatatcatggcggtgtctacagcttgtgaagagatcaagaaatcaaagtcctttagcaaattactggagctggtacttttgatgggaaactatatgaacgccggcagtcgaaacgctcagacatttggctttaatttgtcctctctgtgtaagctgaaagacacaaagagcgctgaccagaagactacattactgcactttctggtggagatttgcgaggaaaaataccccgatattctgaacttcgtggacgatctcgagcctcttgacaaggccagcaaggtttcagttgagaccttggaaaaaaacctgcggcagatgggcaggcagttacagcaattagaaaaggaattggaaacatttcccccccccgaagatttgcatgataagttcgttactaagatgagccggttcgtgattagcgcaaaggaacagtacgagactttaagtaagctccacgaaaacatggagaagctgtaccaatctataatcggttactacgctattgacgtcaagaaagtgtccgtcgaggatttccttaccgaccttaacaattttaggactacgttcatgcaagcaattaaagagaatatcaagaagcgcgaggcagaagagaaggaaaagcgcgtgaggattgctaaggagctggccgaaagggagagattggagcgccagcagaagaagaagcggttgctcgaaatgaagacagagggagatgagaccggggtaatggacaacctcctggaagctctgcagtcaggggctgcttttcgggacagaagaaagagaactccaatgcccaaggatgtgcgccagtcgctgtcaccaatgagccagagacctgtgctcaaggtgtgtaatcatgagaaccagaaggtgcagctcacagagggttcgcggtcgcattacaacatcaattgtaactctacaaggactcccgtcgccaaggagttaaattacaacctggacacccacacaagcaccggccgaatcaaagcagccgagaagaaggaggcctgtaatgttgagagcaatagaaaaaaggagaccgaactgctcgggtcattcagcaaaaacgaatccgtacctgaagttgaggccctcctcgcaaggctgcgcgctctctag

SEQ ID NO: 33621 - DNA, 3582 bp, Artificial Sequence
  derived and/or modified sequence
atggagcggcaccagccccggctgcaccaccccgcccagggcagcgctgcagggaccccatacccctctagtgccagtctccgagggtgccgggagtccaagatgccgcggagaaaggggccccagcacccaccgccaccttcgggacccgaagaacccggcgagaagcggccaaagtttcacttaaatatccgtaccctgaccgacgacatgttggataaattcgcaagcataagaattcccggaagcaagaaagagagaccaccccttccgaacctgaaaaccgcgttcgcgagttctgactgctccgccgctcccctggagatgatggaaaacttccctaaacctttgtctgagaatgagctgctcgagctgttcgaaaaaatgatggaagatatgaaccttaatgaagacaagaaggctccattaagagaaaaagatttcagtatcaagaaggaaatggtgatgcagtacattaatactgccagtaaaacaggctcgctgaagagaagtcggcagatcagccctcaggagttcattcatgagctgaagatgggtagcgcagacgaaaggctcgtgacctgcctcgaaagcctaagagtgtcactcacttcgaatcccgtgtcatgggtggaaagcttcggccacgagggcctcggactcttgcttgacatcctagaaaagctgatatcaggaaaaatccaggaaaaagtagtcaagaagaatcaacataaagtgattcagtgcctaaaagcactgatgaacacccagtacgggttagaaagaatcatgagcgaggagcgttccttatccttgttggcgaaagccgttgatccccgccatcctaacatgatgactgatgtagtgaagttactttcggctgtgtgcatcgtgggtgaggagtctatcttagaagaggtcttggaagctctgacctccgcaggcgaagagaaaaaaatagaccgctttttctgcatcgtggaagggcttcgccataactcagttcagctgcaggtggcgtgtatgcagctgatcaacgcccttgtaaccagcccggatgacctggatttcaggctccacattcgaaatgagttcatgcggtgcggcctgaaagagattctacccaaccttaaatgtattaaaaacgacgggcttgacatccagttaaaggtgttcgacgaacataaggaagaagacctgttcgagctgagtcacaggctcgaagacattagagccgaacttgatgaagcgtacgatgtatataacatggtttggtccacagtaaaagaaactcgggcagaaggctactttatctctatcctgcagcatctacttctgattcgcaacgactatttcatccgccagcaatactttaagttaatagacgagtgcgtgtcacaaatagtcctacatcgtgatggaatggacccagactttacgtaccggaaaagactcgatttagatctcacccagttcgtggatatctgtatcgatcaagcaaagctcgaagaattcgaggaaaaagcttctgagctctataagaaatttgagaaggaattcacagaccatcaggaaacgcaggccgaacttcagaaaaaggaagctaagatcaacgaactgcaggcagagctacaagcgttcaaaagccagttcggggctctccccgcagactgcaatatcccacttcctccttcgaaagaaggtggtacgggccattctgccctccccccccctccccccttgcccagcgggggcggtgttccccccccgcctcctccacctccacctccaccacttcccggaatgagaatgcccttcagcgggccagtccctccaccacctcccctgggattcctgggggggcagaattctcccccccttccaatcctcccgttcgggctgaagccaaagaaggaattcaagccagagatcagtatgcgacgcttaaattggttgaaaatccggccacatgagatgaccgagaattgcttctggatcaaagtgaacgaaaacaagtacgagaatgtggatttgttatgtaagcttgaaaacactttctgttgccagcagaaagaaagaagagaagaggaagacatcgaagagaagaagagcattaaaaaaaagatcaaagaactgaagtttctcgactcaaagatcgcacagaatctcagcatcttcctgtcttctttccgcgttccttatgaagaaatccggatgatgatactagaagtggacgaaacccgccttgcagagtcgatgattcaaaaccttataaagcatctgcccgatcaggaacaacttaacagccttagccagtttaaatctgaatacagcaacctgtgtgaacccgaacaatttgttgttgtcatgtccaacgttaaaaggctaaggccacggttgtccgcgatattgttcaagttgcaatttgaggagcaggttaataacattaagcccgatatcatggccgtgtccaccgcctgcgaggagataaaaaagtccaaatccttcagtaaactgctggagctggtcctcctgatgggaaactacatgaacgctggtagtcgcaatgcccagaccttcggttttaacttatccagcctttgtaagctgaaagacaccaagagcgctgaccagaagaccactctgctgcatttcctcgtcgagatctgcgaggagaaataccccgatatcttaaatttcgtcgacgacctggaacccctagacaaagcctccaaagtcagtgttgaaaccctggagaagaatctccgacaaatgggccgtcagctgcagcaactggaaaaagaattagagacctttccccccccagaggatctccatgataagtttgtaaccaagatgagcatctttgtcatctcagccaaggagcagtacgaaacactgtcgaagctgcacgaaaatatggaaaaactgtaccagtccatcattgggtattatgcaattgatgtgaaaaaagtgtctgtcgaagatttcctgaccgatcttaacaatttccgaactaccttcatgcaagccatcaaagagaacatcaagaagagagaggctgaagaaaaagagaaacgcgttagaatcgccaaagagttagccgagcgcgagcgtttggagaggcaacagaaaaaaaaaaggttgcttgagatgaagaccgagggggatgaaaccggggtgatggataaccttctggaagctctgcagtcgggcgccgctttccgagacagacggaagcgaaccccaatgcctaaagatgtcagacagtccctgagccccatgtctcagcggccagtgctgaaggtgtgcaatcacgaaaaccaaaaagtgcagttgaccgaagggtcacggtcccattataatattaattgtaactccacaagaactcccgtcgccaaggagctgaattacaatttggatacccatacctctaccgggaggatcaaggctgcagagaaaaaggaggcctgtaacgtggaaagtaatcgaaagaaagagaccgaattactggggtcctttagtaaaaacgagtcggttcctgaggtagaggccctgcttgcccggctaagagctctctag

SEQ ID NO: 33622 - DNA, 3582 bp, Artificial Sequence
  derived and/or modified sequence
atggaaagacaccagccgagactgcaccatcctgctcaaggaagcgccgctggcactccatacccctcttcagcctcgctgcggggttgtcgggaaagtaagatgcctcgcagaaagggcccacagcacccgcctcctccttctggtccagaggagcccggagagaagcgacctaagttccaccttaatatccgtactctcacagacgatatgctggataagttcgctagtatccgcatcccagggtccaaaaaagaacggcctccactacccaacttaaaaacggcctttgcctcctccgattgctctgctgctccactcgagatgatggaaaattttcctaagccactgagcgagaatgagttgctcgagctgttcgaaaaaatgatggaggatatgaatttaaacgaggataagaaggcccctctccgagaaaaagatttctccataaagaaagaaatggtgatgcagtacatcaacacagccagtaaaaccgggtctttgaagaggagtcggcagatttcgccccaggagtttatccacgagctcaagatgggctcagctgacgaacgactggtgacatgtttagagtctctgcgggtgtcactaacatctaatccagtgtcttgggtggaatcttttggacacgaaggcctgggcctgctgctcgacatcctggaaaagctcatatctggtaaaatccaggaaaaggtggttaaaaagaaccaacacaaggtgatacagtgcctgaaggctctcatgaatacccaatatggattggagaggattatgagcgaggagagatctctgtcgctgctcgcaaaggccgtcgaccccaggcatcccaatatgatgacagacgtggtgaagctcctctctgcagtgtgcatcgtgggagaagagtccatcttggaagaagtgctggaggcactcacctctgcaggcgaagaaaagaagatagatcggttcttttgcattgtcgaaggcctccgccataattctgtccaactgcaggtggcttgcatgcagctgatcaatgctttggtgacgtcacctgacgaccttgatttccgactgcatatacgcaacgaatttatgcggtgcgggctcaaagagatcctaccaaacctcaagtgtattaaaaatgatgggctggatattcagctgaaggtctttgatgaacacaaggaagaggacctctttgagctgtctcaccgactggaagatatccgagccgaactggatgaggcctacgatgtgtataacatggtgtggtccaccgtgaaggaaactcgcgcagaaggttatttcattagcatcctgcagcacctattgttgatcagaaacgattattttattagacaacagtacttcaaactgatcgacgagtgtgtatcacaaatagtgttacacagggacggtatggatcccgattttacgtatcggaagcgtctggacctggatctcacgcagttcgtcgacatatgcatagaccaagcaaagttggaagagtttgaggaaaaggcctctgagctttataagaaattcgagaaggaattcaccgaccatcaggaaactcaggcagaactgcagaagaaggaggctaaaatcaacgaactccaggctgagttacaggctttcaagtcccaatttggagcactccccgctgactgcaacattcccctgcctcccagtaaggaaggagggaccggtcacagcgctctgccacctcccccacctctcccctccgggggtggagtgccccctccccctccgccaccacccccacctcccttgccaggtatgaggatgcccttctcaggacctgtgcctccccctcctccacttggcttcctaggaggacagaactcgcccccactccctattctcccttttggtctaaagccaaaaaaggagttcaaacctgagatatctatgaggagactgaactggctgaaaatacgacctcatgagatgactgaaaattgcttctggataaaggtcaatgaaaataaatatgagaatgttgatcttctatgtaagttggaaaacacattttgctgccagcagaaggagaggcgcgaggaagaggacatcgaggaaaaaaaatcaattaagaagaaaatcaaggaactgaagtttcttgattccaagatcgcccagaatctttcaatctttctatcctctttcagggttccttatgaagagattagaatgatgattctggaagttgacgagactagactcgccgagagtatgatacagaacctgattaagcatcttcctgaccaggagcagctgaatagtttatcacagtttaaatccgaatatagcaacttatgtgagcccgagcaattcgtggttgtaatgagtaatgtgaaacggctccggcctcggttatctgcaatcctgttcaaattacagttcgaggagcaagtgaataacattaaacctgacatcatggccgtttccactgcttgtgaggaaatcaagaaatccaaaagcttttctaagctcttggaactggttctgctgatgggaaattacatgaacgcgggaagccgcaatgcacagacttttggtttcaatctctcctcattgtgcaagctcaaggataccaagtccgcggatcagaagaccaccctgctccacttccttgtggaaatctgtgaagaaaaataccctgacatcctgaactttgttgatgacctcgagccgctggataaagcctcgaaagttagtgtagaaacgctcgaaaagaatctccgacagatggggagacagctgcaacagttagaaaaagagctggaaacattcccaccacctgaagacttacatgacaaatttgtgaccaaaatgagcaggtttgtgatctcagctaaggagcagtacgaaacactgtctaaattacatgaaaatatggaaaaattgtaccaatcaatcattggatactacgctatcgacgtaaagaaggtctcagtggaggattttctgaccgatttgaacaactttcgcacaacattcatgcaggccatcaaggaaaacataaagaagcgagaagcggaagagaaagaaaaacgggtgagaattgccaaagagttggctgaaagagagaggctcgagcgccagcagaagaaaaagcggctgctcgaaatgaaaacagaaggggacgagacgggagttatggacaacctgctggaagccttgcaatctggtgctgcctttagggaccggaggaagcggactcccatgcccaaggatgtacgccagagcctctccccgatgagccagagaccagtcctgaaggtgtgcaaccacgagaatcagaaagtgcagctcaccgaggggagcaggtcccattataacattaattgtaattccacacgcacccccgtggcaaaggagctcaattataacttggacacccatacttctactgggaggatcaaggccgctgagaaaaaagaagcatgtaatgtggagtctaacagaaaaaaagagacagagttgctgggcagcttttccaagaacgaaagcgtgcctgaagtggaggcactgttggcgcgactccgggcactgtag

SEQ ID NO: 33623 - DNA, 3582 bp, Artificial Sequence
  derived and/or modified sequence
atggagcgtcaccagcctcgcctgcatcaccccgcacaaggttctgccgctggaacaccatacccctcctccgcatcactcaggggttgccgggaatctaagatgccaagaaggaagggccctcaacaccctccacccccaagtgggcctgaagagcccggagagaagagacccaaatttcaccttaacattcgcactttgaccgatgacatgctggacaagtttgcctccattcgaatcccaggctcaaagaaagaaaggccacctctgccgaacctgaagacagcctttgcctccagtgactgctcagctgcgcctcttgagatgatggagaacttcccaaagccactttctgaaaacgagctgctagagttgtttgagaagatgatggaggatatgaatctcaacgaggacaaaaaggcacctctgcgagaaaaggatttctctatcaaaaaagaaatggtcatgcagtatatcaacactgcttctaaaaccgggtcacttaaacgatctcggcaaatttcgccccaggagttcattcacgaactcaaaatgggaagtgctgacgaaagacttgtcacttgccttgagagcttaagagtcagccttacgtcaaaccctgtgagctgggtcgaatccttcgggcatgagggactgggcttgctcctggatatcctggagaagctgatcagcggtaaaatccaagaaaaggtggtgaagaaaaaccagcacaaagtgatacagtgccttaaggccttaatgaacacccaatacgggctggaacggatcatgagtgaggagagatccctgtccctgctcgcaaaagccgtggacccacgacatcctaacatgatgacagacgtcgtcaaattactctctgctgtgtgcattgtcggcgaagaatccatcctcgaggaagtcctggaggccctaacaagcgcaggcgaggagaagaaaatagatcggtttttttgtattgtggaagggttaaggcataactccgtgcagcttcaggtcgcttgtatgcagctgatcaacgctctggtaacctcccccgatgatcttgatttcagactccacattcgcaatgagtttatgaggtgcggcttgaaggagatcctccctaatctaaagtgcattaagaatgatgggcttgatatccagctgaaggtgttcgatgagcacaaagaagaagacctgtttgagctgagtcacagattggaagatatacgagcagaattagacgaggcctacgacgtctacaatatggtctggagtactgttaaagagacacgggcagaaggctatttcatcagcattctgcagcatctccttctgattaggaacgattatttcatccgtcagcagtatttcaagctcatcgatgagtgcgtgtcacagattgtgttacacagggatggaatggaccctgactttacttatcgtaagagactcgatcttgatttaacccagtttgtagacatctgcattgaccaagccaagctggaggagttcgaagaaaaggcatcagagctttacaagaagttcgaaaaggagtttacagatcaccaggaaactcaagcagagctgcagaagaaggaggcaaaaataaacgaacttcaggcagagttgcaggcctttaagtcccaatttggcgcactgcccgcagattgcaacattcccctcccccctagcaaagaggggggaaccggtcatagcgccctgcctccaccaccacccctcccctctgggggaggggtccccccaccacccccaccccctccaccccctcccctgcctggcatgcgcatgccattcagcgggccagtgcctccgccaccgcctctagggttcttgggcggtcaaaactcaccacctctgccgatcctccccttcggattgaagccgaagaaggagtttaaaccagagatatctatgcgaagactgaattggctaaaaatccgcccacatgaaatgactgagaactgtttctggatcaaggtgaacgaaaataaatatgagaacgtcgatctgctgtgtaagctggagaacactttctgctgtcaacaaaaagaacgacgagaagaggaagatatcgaggagaaaaagagtatcaagaagaaaattaaagagcttaaattcctggactccaagattgcacagaacttgagcatctttcttagttcgtttcgggtcccgtacgaggaaattagaatgatgatcctggaggtggatgagactagactcgcagagagcatgattcagaacttaattaagcacttgcccgatcaggaacagttgaatagcctcagccagttcaagtccgagtactccaacctctgcgaacccgagcagtttgtggtggtcatgtcgaacgtgaaaaggctgcggccacgtttgtccgcaattttgttcaagcttcagtttgaggaacaggttaataatattaagcctgatattatggctgtaagcactgcttgcgaggaaatcaaaaagagtaagtcattctctaaactcctggaactggtgctgcttatgggcaactacatgaatgccggatccaggaacgcccaaaccttcgggtttaatctgtcttcactgtgtaagctaaaggataccaaaagcgcagaccaaaagacgactctcttgcacttcctagtggagatatgtgaggagaaatacccagacatcctcaactttgtagatgatctggagcctcttgacaaggcgagtaaggttagtgttgaaacacttgaaaagaatcttcggcagatggggagacagctgcagcagctcgaaaaagaattggagacgttccctcctcctgaagatctgcacgacaagttcgtgaccaagatgtccattttcgttatctcagcgaaggaacaatatgaaactttatctaagttacacgagaacatggagaagctgtaccagtctattataggctattacgcaatcgacgtgaagaaagtttctgtggaagattttctgactgatctgaacaattttaggaccacgtttatgcaggcaataaaagagaacattaagaaaagagaagctgaggagaaagaaaaacgcgtccggatcgctaaagaactggctgagcgggagcgcctggagcgccagcagaaaaagaaacgccttctcgagatgaaaactgaaggtgacgagactggcgttatggataacctgctagaggctctccagtctggcgcagccttcagggaccgcaggaagagaacacccatgcccaaggacgtaagacagtctttgtctcctatgtcccagcgcccagttttaaaggtgtgcaaccacgagaatcagaaagtgcagcttaccgaaggatcccggagccattataatattaactgcaacagtacaagaacacctgtggctaaggagcttaactataacctagacactcacacctctacggggaggattaaggccgcagaaaaaaaagaggcctgtaacgtggaaagtaacaggaaaaaagaaaccgaattgctgggtagcttcagcaagaacgagtctgtgcccgaagtggaggcgctgctggccagactccgagctctgtag

SEQ ID NO: 33624 - protein, 335 aa, Artificial Sequence
  derived and/or modified sequence
MQGQGRRRGTCKDIFCSKMASYLYGVLFAVGLCAPIYCVSPANAPSAYPRPSSTKSTPASQVYSLNTDFAFRLYRRLVLETPSQNIFFSPARINSHVKKKTQGKVVDIIQGLDLLTAMVLVNHIFFKAKWEKPFHPEYTRKNFPFLVGEQVTVHVPMMHQKEQFAFGVDTELNCFVLQMDYKGDAVAFFVLPSKGKMRQLEQALSARTLRKWSHSLQKRWIEVFIPRFSISASYNLETILPKMGIQNVFDKNADFSGIAKRDSLQVSKATHKAVLDVSEEGTEATAATTTKFIVRSKDGPSYFTVSFNRTFLMMITNKATDGILFLGKVENPTKS

SEQ ID NO: 33625 - DNA, 1008 bp, Artificial Sequence
  derived and/or modified sequence
atgcagggacaggggaggcgcaggggaacatgtaaagacattttctgtagcaaaatggcgtcctatctgtatggtgttctgttcgccgttggcctgtgcgcccctatttactgcgtcagcccagccaatgcaccctctgcctatccccgtccatctagcaccaaaagtacacccgcatctcaggtctacagccttaatacagattttgcattccggctgtaccgccgtttggtgctagaaaccccctcacagaacatcttcttcagccccgctcgcataaactctcatgtgaagaagaaaacgcagggaaaggttgtggatattattcaaggccttgatctgctgaccgcgatggtgttggtcaatcatatcttcttcaaagccaagtgggaaaagccgtttcatccagaatatacacgtaagaactttccttttttagtaggcgaacaggtgaccgtgcacgtgcctatgatgcatcagaaggagcagttcgctttcggtgtagatactgaactcaactgctttgtcttgcagatggattataaaggtgacgccgtcgccttcttcgtcctcccgagcaagggcaagatgcgccagctggaacaagctctttcggctcgcacattgaggaaatggtctcactcccttcagaagcggtggatcgaagttttcatacccaggttctccattagtgcatcttacaacctagaaacaatcctgccaaagatgggcatccagaacgttttcgacaagaatgctgatttttccggaatagctaagagggattcactacaggtgtctaaagcaacccacaaagccgtactggatgtgagcgaggaaggtacagaagccacagcggcaacaacaaccaagttcatcgtgaggtccaaggacggaccctcctattttacagtgtctttcaatagaactttcctgatgatgattacaaataaagctaccgatggcattttattcctcggcaaggtagagaatcccaccaaaagctag

SEQ ID NO: 33626 - DNA, 1008 bp, Artificial Sequence
  derived and/or modified sequence
atgcagggccaggggaggagacgaggcacatgtaaagatatcttctgcagcaagatggccagctatttatatggagttcttttcgccgtaggcctttgtgccccaatctactgcgtgtctcccgctaatgccccttcagcctacccccgaccatcaagtaccaagtccacaccggcatctcaagtgtactccctgaacacagactttgccttccgactttatcgacgcctggtactggagaccccttcacagaacattttcttttccccagcgcggatcaattcgcacgtgaaaaaaaaaacccagggaaaagtcgtggatattatacaggggttggacctgctaacagcaatggtccttgtgaaccatattttttttaaagccaagtgggaaaagccctttcaccccgagtataccaggaagaacttccccttcctcgtgggagagcaggttacagttcacgtcccgatgatgcaccaaaaagagcagttcgcctttggagttgacactgagttgaattgtttcgtcttgcaaatggattacaaaggagacgctgtggcctttttcgtgctgccttccaagggcaaaatgaggcagctcgaacaggccctgtccgctcggacactgagaaagtggtcacacagtctgcagaaaagatggatcgaggtgttcataccccgcttcagcataagcgccagctataacttggagaccatactacccaaaatggggatccaaaacgtctttgataagaacgcggacttcagcgggatcgccaaaagagactccctgcaggtgagtaaagccactcataaagccgtccttgacgtttctgaagagggaaccgaggctactgccgctacaaccaccaagttcatcgtgcgatctaaagacggacctagctatttcacagtcagtttcaatagaacttttttaatgatgattaccaacaaagctactgacggcatcctttttttgggcaaagtcgagaatccaacgaaatcatag

SEQ ID NO: 33627 - DNA, 1008 bp, Artificial Sequence
  derived and/or modified sequence
atgcaaggacaggggcgccgccgaggtacatgcaaagatatcttctgctctaaaatggccagctacttgtacggcgttttattcgcggtgggactctgtgcaccaatttattgtgtttcaccagccaatgccccctccgcctaccctcgcccttccagcaccaaatcaacccccgcatcacaagtctattctttaaacacagacttcgctttcaggctctatcggaggctcgtcttggagacccccagtcagaacatcttcttttctcctgccaggatcaactctcacgtgaaaaaaaaaacccagggtaaagtcgtggatataatccaaggcttggatcttctgactgctatggtccttgtgaatcatatcttcttcaaagcgaaatgggaaaaacctttccaccctgaatacactcgtaagaatttccctttcctagtgggcgagcaagttacagtgcacgtgccaatgatgcatcaaaaggagcagtttgcttttggtgtggatactgaactcaactgctttgtgttacagatggactataaaggagacgccgtcgcattttttgtgttaccatctaagggtaaaatgcgacaactggaacaggccctctccgcgagaacactgcgaaaatggtcccatagtttgcagaaaagatggatagaagtttttattccccggtttagcatctctgcatcctacaacttagagaccatactgccaaaaatggggattcagaatgtgtttgacaaaaacgctgattttagcggcattgcgaaaagggactcattacaggtttccaaagccacacacaaagccgtgttagatgtcagtgaagaagggacagaagcgacagccgcgacaaccacaaagtttatcgtgcgcagtaaagacggtccaagctatttcacagtcagtttcaatagaacttttttaatgatgattaccaacaaagctactgacggcatcctttttttgggcaaagtcgagaatccaacgaaatcatag

SEQ ID NO: 33628 - DNA, 1423 bp, Artificial Sequence
  derived and/or modified sequence
agctacaaccaagtaagcaagtgtcagggctcaccaaccatgcaaggacagggcaggagaagaggaacctgcaaagacatattttgttccaaaatggcatcttacctttatggagtactctttgctgttggcctctgtgctccaatctactgtgtgtccccggccaatgcccccagtgcatacccccgcccttcctccacaaagagcacccctgcctcacaggtgtattccctcaacaccgactttgccttccgcctataccgcaggctggttttggagaccccgagtcagaacatcttcttctcccctgcgaggatcaacagccatgtgaaaaagaagacccaagggaaggttgtagacataatccaaggccttgaccttctgacggccatggttctggtgaaccacattttctttaaagccaagtgggagaagccctttcaccctgaatatacaagaaagaacttcccattcctggtgggcgagcaggtcactgtgcatgtccccatgatgcaccagaaagagcagttcgcttttggggtggatacagagctgaactgctttgtgctgcagatggattacaagggagatgccgtggccttctttgtcctccctagcaagggcaagatgaggcaactggaacaggccttgtcagccagaacactgagaaagtggagccactcactccagaaaaggtggatagaggtgttcatccccagattttccatttctgcctcctacaatctggaaaccatcctcccgaagatgggcatccaaaatgtctttgacaaaaatgctgatttttctggaattgcaaagagagactccctgcaggtttctaaagcaacccacaaggctgtgctggatgtcagtgaagagggcactgaggccacagcagctaccaccaccaagttcatagtccgatcgaaggatggcccctcttacttcactgtctccttcaataggaccttcctgatgatgattacaaataaagccacagacggtattctctttctagggaaagtggaaaatcccactaaatcctaggtgggaaatggcctgttaactgatggcacattgctaatgcacaagaaataacaaaccacatccctctttctgttctgagggtgcatttgaccccagtggagctggattcgctggcagggatgccacttccaaggctcaatcaccaaaccatcaacagggaccccagtcacaagccaacacccattaaccccagtcagtgcccttttccacaaattctcccaggtaactagcttcatgggatgttgctgggttaccatatttccattccttggggctcccaggaatggaaatacgccaacccaggttaggcacctctattgcagaattacaataacacattcaataaaactaaaatatgaattcatctgtcaacaga

SEQ ID NO: 33629 - DNA, 1008 bp, Artificial Sequence
  derived and/or modified sequence
atgcagggccagggcagaagaagaggcacctgcaaggacatcttctgcagcaagatggccagctacctgtacggcgtgctgttcgccgtgggcctgtgcgcccccatctactgcgtgagccccgccaacgcccccagcgcctaccccagacccagcagcaccaagagcacccccgccagccaggtgtacagcctgaacaccgacttcgccttcagactgtacagaagactggtgctggagacccccagccagaacatcttcttcagccccgccagaatcaacagccacgtgaagaagaagacccagggcaaggtggtggacatcatccagggcctggacctgctgaccgccatggtgctggtgaaccacatcttcttcaaggccaagtgggagaagcccttccaccccgagtacaccagaaagaacttccccttcctggtgggcgagcaggtgaccgtgcacgtgcccatgatgcaccagaaggagcagttcgccttcggcgtggacaccgagctgaactgcttcgtgctgcagatggactacaagggcgacgccgtggccttcttcgtgctgcccagcaagggcaagatgagacagctggagcaggccctgagcgccagaaccctgagaaagtggagccacagcctgcagaagagatggatcgaggtgttcatccccagattcagcatcagcgccagctacaacctggagaccatcctgcccaagatgggcatccagaacgtgttcgacaagaacgccgacttcagcggcatcgccaagagagacagcctgcaggtgagcaaggccacccacaaggccgtgctggacgtgagcgaggagggcaccgaggccaccgccgccaccaccaccaagttcatcgtgagaagcaaggacggccccagctacttcaccgtgagcttcaacagaaccttcctgatgatgatcaccaacaaggccaccgacggcatcctgttcctgggcaaggtggagaaccccaccaagagctag

SEQ ID NO: 33630 - DNA, 1008 bp, Artificial Sequence
  derived and/or modified sequence
atgcaaggtcaaggccggcggaggggcacctgcaaagacattttctgttctaaaatggcatcatacctgtatggagtgctgttcgctgtaggcctgtgcgccccaatctattgtgtgtcgccagccaacgctcctagcgcctacccgcgtccttctagcaccaaaagcacccctgcctcacaagtttacagcctgaatacagacttcgcgttccggctttatcgcagattagtcctggagactccttctcagaacatatttttttcccccgctagaattaacagccacgtcaagaaaaagacccagggcaaggtagtcgacattatccagggtctggatctgctcaccgcaatggtactggtcaatcatattttcttcaaggccaaatgggaaaagccctttcatccggagtatacacggaagaacttccctttcctcgtgggcgagcaggtgaccgtgcatgtgccaatgatgcaccaaaaggagcagttcgcattcggtgttgatactgagctcaattgtttcgtcctgcaaatggactataaaggggacgcggttgctttctttgtgttgccatcaaaggggaagatgcgccagttggagcaggccctgagtgcgcgcacactgcgcaagtggtcacacagtctgcagaaacggtggattgaggtattcatcccgcgcttcagcattagcgcttcttacaacctggagaccattctgcctaaaatggggatacagaatgtcttcgataaaaacgcagatttttctggaattgccaaacgagattcgttacaagttagtaaagccacccacaaggcggtgcttgacgtgtctgaagaaggtacagaagccacagccgccactacaacaaaatttatcgtccgctccaaggacgggcccagctatttcacagtcagctttaatcgtactttccttatgatgatcacgaataaagcaacagacgggatcttattcctgggaaaagtggagaatccgaccaagtcatag

SEQ ID NO: 33631 - DNA, 1008 bp, Artificial Sequence
  derived and/or modified sequence
atgcagggccagggcagaagaagaggcacctgcaaggacatcttctgcagcaagatggccagctacctgtatggagtgctgtttgctgtgggcctgtgtgcccccatctactgtgtgtccccagccaatgcccccagcgcctacccccggcccagcagcaccaagagcaccccagccagccaggtgtacagcctgaacacagactttgccttccggctgtacagaaggctggtgctggagacccccagccagaacatcttcttcagccctgcccgcatcaacagccacgtgaagaagaagacccagggcaaggtggtggacatcatccagggcctggacctgctgacagccatggtgctggtgaaccacatcttcttcaaggccaagtgggagaagcccttccaccctgagtacaccaggaagaacttccccttcctggtgggggagcaggtgacagtgcacgtgcccatgatgcaccagaaggagcagtttgccttcggcgtggacacagagctgaactgctttgtgctgcagatggactacaagggagatgctgtggccttctttgtgctgcccagcaagggcaagatgaggcagctggagcaggccctgagcgcccggaccctgaggaagtggagccacagcctgcagaagcgctggattgaggtgttcatcccccgcttcagcatcagcgccagctacaacctggagaccatcctgcccaagatgggcatccagaatgtgtttgacaagaatgctgacttcagcggcatcgccaagagggacagcctgcaggtgtccaaggccacccacaaggctgtgctggatgtgtctgaggagggcacagaggccacagctgccaccaccaccaagttcatcgtgcgcagcaaggatggccccagctacttcaccgtgtccttcaacagaaccttcctgatgatgatcaccaacaaggccacagatggcatcctcttcctgggcaaggtggagaaccccaccaagagctag

SEQ ID NO: 33632 - DNA, 1008 bp, Artificial Sequence
  derived and/or modified sequence
atgcagggccagggccggcggcggggcacctgcaaggacatcttctgctcaaagatggctagttacctctacggagtgctcttcgcggtcgggctgtgcgctcccatctattgcgtgtcccccgccaacgcccctagtgcgtatccgcgcccctcctccacaaaatccactcctgcaagtcaggtgtactccttaaacaccgatttcgcatttcgtttatatagacgccttgtgctggagacccccagtcagaacatctttttttcccccgctcgcatcaactcccatgtgaagaaaaagacacaggggaaggtcgtggatattattcagggtctcgacctgctaacagcgatggttttagtgaatcatatattttttaaagccaaatgggagaaaccattccacccagagtacactcgaaaaaactttccatttctggttggagagcaggtaacagtgcacgtccccatgatgcatcagaaggagcaatttgcctttggtgttgataccgagttaaattgcttcgtcctgcagatggactacaagggcgacgctgtggcttttttcgtgctgccgtcgaaaggcaagatgaggcagctggagcaggccctctctgcaaggacgctgagaaagtggagccacagcttgcagaaaagatggattgaggtcttcattccaagatttagcatcagtgcctcatataatttggagactattctccccaagatgggaattcagaatgtgtttgataaaaatgctgatttttcggggatcgcaaagcgagacagcctccaggttagcaaggccactcacaaggcagtacttgacgtgagcgaagaggggactgaggccacggctgccacgaccacaaaatttatcgtgagaagtaaagatggcccaagctactttacagtctccttcaacagaacctttctcatgatgataaccaataaagccacagatggcatcctgtttctgggcaaggttgagaatccaacaaagtcatag

SEQ ID NO: 33633 - RNA, 1008 nt, Artificial Sequence
  derived and/or modified sequence
augcagggccaggggaggagacgaggcacauguaaagauaucuucugcagcaagauggccagcuauuuauauggaguucuuuucgccguaggccuuugugccccaaucuacugcgugucucccgcuaaugccccuucagccuacccccgaccaucaaguaccaaguccacaccggcaucucaaguguacucccugaacacagacuuugccuuccgacuuuaucgacgccugguacuggagaccccuucacagaacauuuucuuuuccccagcgcggaucaauucgcacgugaaaaaaaaaacccagggaaaagucguggauauuauacagggguuggaccugcuaacagcaaugguccuugugaaccauauuuuuuuuaaagccaagugggaaaagcccuuucaccccgaguauaccaggaagaacuuccccuuccucgugggagagcagguuacaguucacgucccgaugaugcaccaaaaagagcaguucgccuuuggaguugacacugaguugaauuguuucgucuugcaaauggauuacaaaggagacgcuguggccuuuuucgugcugccuuccaagggcaaaaugaggcagcucgaacaggcccuguccgcucggacacugagaaaguggucacacagucugcagaaaagauggaucgagguguucauaccccgcuucagcauaagcgccagcuauaacuuggagaccauacuacccaaaauggggauccaaaacgucuuugauaagaacgcggacuucagcgggaucgccaaaagagacucccugcaggugaguaaagccacucauaaagccguccuugacguuucugaagagggaaccgaggcuacugccgcuacaaccaccaaguucaucgugcgaucuaaagacggaccuagcuauuucacagucaguuucaauagaacuuuuuuaaugaugauuaccaacaaagcuacugacggcauccuuuuuuugggcaaagucgagaauccaacgaaaucauag

SEQ ID NO: 33634 - RNA, 1008 nt, Artificial Sequence
  derived and/or modified sequence
augcaaggacaggggcgccgccgagguacaugcaaagauaucuucugcucuaaaauggccagcuacuuguacggcguuuuauucgcggugggacucugugcaccaauuuauuguguuucaccagccaaugcccccuccgccuacccucgcccuuccagcaccaaaucaacccccgcaucacaagucuauucuuuaaacacagacuucgcuuucaggcucuaucggaggcucgucuuggagacccccagucagaacaucuucuuuucuccugccaggaucaacucucacgugaaaaaaaaaacccaggguaaagucguggauauaauccaaggcuuggaucuucugacugcuaugguccuugugaaucauaucuucuucaaagcgaaaugggaaaaaccuuuccacccugaauacacucguaagaauuucccuuuccuagugggcgagcaaguuacagugcacgugccaaugaugcaucaaaaggagcaguuugcuuuugguguggauacugaacucaacugcuuuguguuacagauggacuauaaaggagacgccgucgcauuuuuuguguuaccaucuaaggguaaaaugcgacaacuggaacaggcccucuccgcgagaacacugcgaaaauggucccauaguuugcagaaaagauggauagaaguuuuuauuccccgguuuagcaucucugcauccuacaacuuagagaccauacugccaaaaauggggauucagaauguguuugacaaaaacgcugauuuuagcggcauugcgaaaagggacucauuacagguuuccaaagccacacacaaagccguguuagaugucagugaagaagggacagaagcgacagccgcgacaaccacaaaguuuaucgugcgcaguaaagacgguccaagcuauuucacagucaguuucaauagaacuuuuuuaaugaugauuaccaacaaagcuacugacggcauccuuuuuuugggcaaagucgagaauccaacgaaaucauag

SEQ ID NO: 33635 - protein, 593 aa, Artificial Sequence
  derived and/or modified sequence
MRTPRLRAQPRGAVYQAPSPPPAPVGLGSMAVFRSGLLVLTTPLASLAPRLASILTSAARLVNHTLYVHLQPGMSLEGPAQPQSSPVQATFEVLDFITHLYAGADVHRHLDVRILLTNIRTKSTFLPPLPTSVQNLAHPPEVVLTDFQTLDGSQYNPVKQQLVRYATSCYSCCPRLASVLLYSDYGIGEVPVEPLDVPLPSTIRPASPVAGSPKQPVRGYYRGAVGGTFDRLHNAHKVLLSVACILAQEQLVVGVADKDLLKSKLLPELLQPYTERVEHLSEFLVDIKPSLTFDVIPLLDPYGPAGSDPSLEFLVVSEETYRGGMAINRFRLENDLEELALYQIQLLKDLRHTENEEDKVSSSSFRQRMLGNLLRPPYERPELPTCLYVIGLTGISGSGKSSIAQRLKGLGAFVIDSDHLGHRAYAPGGPAYQPVVEAFGTDILHKDGIINRKVLGSRVFGNKKQLKILTDIMWPIIAKLAREEMDRAVAEGKRVCVIDAAVLLEAGWQNLVHEVWTAVIPETEAVRRIVERDGLSEAAAQSRLQSQMSGQQLVEQSHVVLSTLWEPHITQRQVEKAWALLQKRIPKTHQALD

SEQ ID NO: 33636 - protein, 269 aa, Artificial Sequence
  derived and/or modified sequence
MAINRFRLENDLEELALYQIQLLKDLRHTENEEDKVSSSSFRQRMLGNLLRPPYERPELPTCLYVIGLTGISGSGKSSIAQRLKGLGAFVIDSDHLGHRAYAPGGPAYQPVVEAFGTDILHKDGIINRKVLGSRVFGNKKQLKILTDIMWPIIAKLAREEMDRAVAEGKRVCVIDAAVLLEAGWQNLVHEVWTAVIPETEAVRRIVERDGLSEAAAQSRLQSQMSGQQLVEQSHVVLSTLWEPHITQRQVEKAWALLQKRIPKTHQALD

SEQ ID NO: 33637 - DNA, 1782 bp, Artificial Sequence
  derived and/or modified sequence
atgcgcacgccccggcttagagcacagcctcggggcgcagtctaccaggccccctcgcccccgcctgccccagtgggactcgggtctatggcggtattccgttctggacttttagtcttgaccacccccttagcctctctggcaccacgcctggcgtcaattctcacaagcgctgctaggctggtcaaccatacactgtatgtgcatcttcagccaggtatgtcattagagggcccagcccagcctcaatcttccccagttcaggccacatttgaggtcttggattttatcacccacctgtatgcaggagccgatgtgcatagacatctggatgtacgaattctgctgactaacatcagaacaaaatcaactttcctcccgccactgcctaccagtgtccagaatctggcccacccacctgaggtcgtgctgactgactttcagactttggatggctcccagtataacccagtgaaacagcagctggtgagatatgcaacatcttgctacagctgctgcccgagactggcttccgtcttgctttactccgattacggcattggagaagtcccagtggagcccttggatgtgcctctgccatctaccattcgacccgcgagtccagtcgcaggatcgcctaagcaaccggtaaggggctactatagaggggccgtcggcggaaccttcgatcggctccacaacgcccacaaggtccttctgtccgtcgcttgtatcctcgctcaagagcagctggtcgtgggggtagccgacaaggatctgttaaagagcaagctcctgccagaactgctgcaaccctacacagagagggtggaacatttgtcagaattcctggtcgatataaagccctcattgacctttgatgtcattcctctactggacccctatgggcccgctggctctgacccctcactcgaatttttagtcgtgtccgaagagacatatcggggcggcatggcgatcaacaggtttcgcttggaaaatgacctggaagagctcgccctgtatcaaatacagctgttgaaggacctgaggcacacagaaaatgaagaggacaaggtatccagctccagctttagacagaggatgctgggaaatctgttgagaccaccatacgagcggccggaactgcccacttgcttgtacgtgatcggactcacagggatcagcgggtccgggaagagtagcatcgctcagaggcttaaaggcctcggagcctttgtgatcgattcagaccacctcggccatagagcgtatgccccgggcggaccagcctatcagccagtggtagaggcctttggcaccgacattctgcacaaggatggtatcatcaataggaaagtgctgggaagtagagtcttcggtaataaaaagcaattaaagatcttaacagatattatgtggcctatcattgccaagttggccagagaggagatggatagggctgtcgccgagggtaaaagggtctgcgtaatcgatgctgctgttctcctggaggccggctggcaaaacctggtccatgaggtctggacagctgtcatccccgagaccgaagctgttaggaggatcgtggaacgcgacgggttgagtgaggccgccgcccagagtaggcttcagagtcagatgtccgggcagcagttggtcgagcagtcacacgtggtgctcagtactctgtgggagccacacatcacacagagacaggtggagaaggcatgggccctcctgcagaagcgaattcccaagacacatcaggcgttggactag

SEQ ID NO: 33638 - DNA, 1782 bp, Artificial Sequence
  derived and/or modified sequence
atgcggacccctcgcttgcgcgcacaaccacggggcgcagtgtatcaagcaccatcacctcctcccgccccagtgggactgggcagtatggccgtcttccgctccggcttgcttgtgctgaccaccccacttgccagcctggcccctcgcctggcgagcatcctgacgagcgcggccagactggtcaatcatacactctatgtgcacttgcagcccggcatgagcctggagggacccgcacaaccacagtcctctcccgttcaggctaccttcgaagtgctggattttataactcatctgtatgcgggagcggatgtccataggcatctagacgtgcgtatcctactgacaaatatccgcactaagtcaactttcctaccacccctgcctacctcagtgcagaacctcgctcatccgcccgaagttgtgctgaccgactttcagaccctagacggctcccagtacaaccctgttaaacagcagctggtgaggtacgcaacaagctgctatagttgttgtcctaggctcgcgtcggtgctgctctactcagattacggcattggagaggtgcctgtggaaccgctggacgtcccactcccctcaaccatccgcccggctagccccgtggcaggctctccaaaacagcctgtccgcggatattaccggggcgccgtcggggggaccttcgataggctgcataatgcccacaaagtgcttctcagcgttgcatgtatattagcccaggaacaactcgtcgtcggggtggccgataaggacctccttaaatccaagttgcttccggagctgctccaaccctacacagagagggttgaacatctctccgagtttctcgtggacattaaaccgagcttgacttttgatgtcataccgctcctggatccttacggaccggctggatccgatccaagcctcgagtttcttgtggtgtccgaagagacctacagggggggaatggctataaatcggttccgattggaaaacgacctggaggagcttgcattataccagattcagcttcttaaggacctcagacacacagagaacgaggaagacaaagtgtccagctcctcatttcgacagcggatgctgggaaacctgttgcgtccgccgtacgaacgtccagagctaccaacttgcctctacgtcatagggctcaccgggatcagcggatccgggaagagttctattgcccagagactgaagggtcttggcgcatttgtgatcgactctgaccatctcggacaccgtgcgtatgccccggggggccctgcatatcagcctgtggtcgaggcttttggaacagatatcttgcacaaggacgggataataaatagaaaggtgctcggctccagagtgttcggtaacaagaaacagctcaaaattctgacagatattatgtggcccatcattgccaaactggcccgcgaagagatggaccgcgcggtggcagaggggaagcgagtgtgtgttattgacgccgcagtgctcctagaggccggttggcagaacctggtccacgaggtgtggactgccgtgattccagaaactgaagccgtccgccgcatcgtggagagagatggtctgagcgaagctgccgcgcaaagccggctgcagtcccaaatgagtggacagcagctggtggaacaatcacatgtcgttttatccacgctgtgggagccccacataacacaacgtcaggtcgagaaggcatgggccctgcttcaaaaaagaatacccaaaacgcatcaggctctggactag

SEQ ID NO: 33639 - DNA, 1782 bp, Artificial Sequence
  derived and/or modified sequence
atgaggaccccccggctgcgggcccagcccagaggagctgtgtaccaggcccccagccccccaccagcccctgtgggcctgggctccatggctgtgttccgcagcggcctgctggtgctgaccacccccctggccagcctggccccccggctggccagcatcctgaccagcgctgcccggctggtgaaccacaccctgtatgtgcacctgcagcccggcatgagcctggagggccctgcccagccccagagcagccctgtgcaggccacctttgaggtgctggacttcatcacccacctgtatgctggagcagatgtgcaccgccacctggatgtgcgcatcctgctgaccaacatccgcaccaagagcaccttcctgccccccctgcccacctctgtgcagaacctggcccaccccccagaggtggtgctgacagacttccagaccctggatggcagccagtacaaccctgtgaagcagcagctggtgcgctatgccaccagctgctacagctgctgcccccggctggcctctgtgctgctgtacagcgactatggaattggagaggtgcctgtggagcccctggatgtgcccctgcccagcaccatccggcctgccagccctgtggccggcagccccaagcagcctgtgcggggctactacagaggagctgtgggcggcacctttgaccggctgcacaatgcccacaaggtgctgctgtctgtggcctgcatcctggcccaggagcagctggtggtgggcgtggccgacaaggacctgctgaagagcaagctgctgcctgagctgctgcagccctacacagagcgggtggagcacctgtctgagttcctggtggacatcaagcccagcctgacctttgatgtgatccccctgctggacccctacggccctgctggcagtgaccccagcctggagttcctggtggtgtctgaggagacctacagaggaggcatggccatcaaccgcttccggctggagaatgacctggaggagctggccctgtaccagatccagctgctgaaggacctgcggcacacagaaaatgaggaggacaaggtgagcagcagcagcttccggcagaggatgctgggcaacctgctgcggcccccctatgaaagacctgagctgcccacctgcctgtatgtgattggcctgaccggcatcagcggcagcggcaagagcagcatcgcccagaggctgaagggcctgggcgcctttgtgattgacagcgaccacctgggccaccgggcctatgcccctgggggccctgcctaccagcctgtggtggaggcctttggaacagacatcctgcacaaggatggcatcatcaacaggaaggtgctgggcagccgggtgtttggaaacaagaagcagctgaagatcctgacagacatcatgtggcccatcatcgccaagctggcccgggaggagatggacagagctgtggccgagggcaagagggtgtgtgtgattgatgctgctgtgctgctggaggccggctggcagaacctggtgcatgaggtgtggacagctgtgattcctgagacagaagctgtgagaagaattgtggagagagatggcctgtctgaggccgccgcccagagccggctgcagagccagatgagcggccagcagctggtggagcagagccacgtggtgctgagcaccctgtgggagccccacatcacccagaggcaggtggagaaggcctgggccctgctgcagaagaggatccccaagacccaccaggccctggactag

SEQ ID NO: 33640 - DNA, 1782 bp, Artificial Sequence
  derived and/or modified sequence
atgcggaccccccggctgcgggcccagccccggggcgccgtgtaccaagctcccagccctccgcctgcacctgtgggcctgggctccatggccgtattcaggtcaggattgctcgtacttaccaccccactggcgagcctagccccgcgtttagcttcaattttgacgtcggcagctcggctggtgaatcacaccttatacgtacacttacagcctggaatgagcctcgaaggacccgcacagccacagagctcccctgtgcaggctaccttcgaggtccttgacttcatcacccatctgtacgccggggccgatgtgcataggcacttggatgtgcgcatcttgcttacaaatattcgcacaaagagtacattcctgcctcccctacccacatctgtccagaacttagcccatcctcccgaagtcgtactgaccgatttccaaactttagatgggtcacagtacaatccagtgaaacagcagctcgttcgatacgcaacaagctgttattcttgctgtcctagactcgctagtgtgctgctctacagcgattatgggatcggcgaggtgcctgtggaacctcttgacgtcccactccccagcaccatacggccagcttcacctgtcgccgggtcgcccaaacagcctgtaagggggtactaccggggggcagtcggtgggacgttcgaccgtctccataacgcccataaggttctcttgtctgtggcttgtatcttagcccaggagcagctagtggtgggcgtagccgacaaggacctgctgaaatccaagcttctgccggaactccttcaaccctacaccgagagggtggagcacttgtctgaatttcttgtggacattaagccttcactgaccttcgacgtgattcctctactggatccatatgggcccgctggctctgatccctctctggagttcctggtggtttctgaggagacttaccgcgggggaatggcaatcaacaggttccggctcgaaaacgatttagaagagttggctctgtaccagattcagcttctcaaagacctgaggcataccgagaacgaggaggataaagtgagcagctcttccttccggcagcgtatgctcggcaacttgctccgccctccctacgaacggccggaacttcctacttgtctatatgtcatcggcctgaccggcatctccggttctggaaagtcttcaatcgcccagagactaaagggtctcggggcctttgttatcgatagcgatcatctgggacatcgggcctatgctccagggggtccagcgtaccagcctgtggtcgaggctttcggcactgatatcttacacaaagatggcataatcaaccgtaaagtgctgggaagtagagtgttcgggaacaaaaagcagcttaagatactgactgacatcatgtggccgatcatcgccaagctggctagggaagagatggatcgtgctgttgccgaaggaaaaagagtttgcgtgattgatgctgccgtgctactggaagcagggtggcagaatctggtgcacgaggtgtggaccgctgttattccagagaccgaagcagtgcgacggattgtggagcgggacggtctgagcgaagcggccgcccagagccgcttacagagccagatgtcaggacagcagctggtcgagcagtctcacgtggtattgagtacgctctgggagcctcacatcacgcaaaggcaagtcgagaaggcatgggccctgttgcagaagagaatacctaaaacccaccaagccttggactag

SEQ ID NO: 33641 - DNA, 1782 bp, Artificial Sequence
  derived and/or modified sequence
atgcggaccccccggctgcgggcccagccccggggcgccgtgtaccaagctcctagcccacctcccgcacccgtgggcttaggaagcatggccgttttccggagtggcctgctcgtgctgacgacacccttggcttctttggctccgagactagcctctattttaacctccgccgcacgactggttaatcatacgctgtacgtacacctgcagccggggatgtcattggaaggcccagcccaaccccagtcctctcccgtgcaggccaccttcgaagtcctcgacttcatcacccacttgtacgctggtgcggacgttcatcgacacttggatgtgcggattcttctgaccaacatccgcacaaaatccacttttttaccacctctgcctacaagcgtccagaatctcgcacatcccccagaggtggtgttaacggattttcagactcttgacggttcacagtataaccccgttaaacaacagttagtgcggtatgccactagctgttacagttgctgtccacgccttgccagtgtgttgctttacagtgattatggaatcggtgaagtcccagtggagccattagacgtcccactgccttctactattcgaccagcctcccccgttgcgggttcccccaaacagcccgttcgaggttattaccgcggtgctgtgggcgggacattcgatcgcctgcataatgcacataaagtactgttgagcgtggcctgtatactcgcacaggagcagcttgtggtgggggtcgcagacaaggatttgctgaagagtaagcttctaccggagctcctgcaaccctatactgagagagtggaacacctgtccgagtttctcgtcgacatcaagccctccctgactttcgatgtcataccgttgctagatccgtacgggcctgcaggctctgacccctccctcgagttcttagtggtttctgaggagacttatcgcggcggaatggccataaaccgtttcaggctcgagaacgatttggaggagctggccctttaccagattcagctattgaaggacctcagacacacggaaaatgaggaggacaaggtgagctccagtagtttccggcaacgcatgctgggcaatcttctgcgccccccttacgagagaccagaactcccaacctgtctttatgtcatcggcctgaccggcatctcaggatccggaaagagttcaatagcacagcggttgaaaggactcggtgccttcgttattgacagtgatcacctgggccaccgcgcgtatgcccccggaggccccgcgtaccagccggtggtggaggcatttggcacagacatcctgcataaagacggtatcataaatagaaaggtactcggcagtagggtattcggtaacaagaagcagctaaagatcctcaccgatatcatgtggcccatcattgccaagctggcacgagaggaaatggacagggctgtcgccgaaggcaaaagggtgtgtgttatcgatgcagctgtcctgctcgaagccgggtggcagaatttggtgcatgaggtgtggacagctgtcatccccgagaccgaggcagtgcggcgtatcgtggaaagagacggcttatccgaggccgccgcccagtccagactccagtcgcagatgtctggacagcaactggtcgaacagtcacatgtggttctgagtacgctgtgggagcctcacatcacgcagaggcaggtggagaaagcttgggccttactgcagaagagaatccctaagacccatcaggccctcgattag

SEQ ID NO: 33642 - DNA, 1782 bp, Artificial Sequence
  derived and/or modified sequence
atgagaactccaaggcttcgtgcccagccacgcggagcagtgtaccaagccccaagccctcctcctgctcccgtgggcttgggatccatggccgtgtttcgcagtggacttctggtcttaactactccactggcttctctggcacctcgcctcgcatcaattctcacctcagctgctcgactggttaaccacacattatacgtgcacttgcaacccggaatgtccctggagggaccagcccaaccacagagttctcccgtgcaggccactttcgaggtgctggattttattactcacctgtacgcaggcgcagacgtgcataggcacctggatgttaggatcctcctgaccaacatccggaccaaatccaccttcctaccccctctacccacctctgttcagaacctggcccaccctcccgaggtcgtattgaccgactttcagacccttgatgggtctcaatataatccagttaagcaacaactcgtacggtacgcaacatcttgctactcctgctgtccacggctggcgtccgttctgttatacagtgactatggaattggagaggtgcctgtagagcccctggatgtgccactcccttctacaatccgcccagcctctccggtggcaggcagtcctaagcagcccgttcggggatactacagaggtgccgtagggggaacattcgataggctccataacgcacacaaagtgctgctttccgtagcctgcatactcgcgcaggaacagctagtcgtgggtgtggccgacaaggatctgctaaagtcaaagctgctgcccgagcttctgcagccctacacagaacgggtcgaacacttatcagaatttctggtagacattaaaccatcgcttacctttgatgtgatacccctgctggatccatatggccctgctgggtctgaccctagtttggaattccttgtggtgagcgaggagacataccgcggagggatggccataaaccggttccgtctggaaaacgatttggaggaactcgctctctatcagatccagctgcttaaggatctccgccataccgagaacgaggaggataaggtctccagcagctcctttagacagcggatgttgggcaacctcctgagaccaccctacgagaggcccgagctccccacatgtctctacgttatcggtctgaccggaatctctggatctggcaaaagttccatcgcccaaaggctcaagggattaggagcgttcgttatcgactccgaccacctggggcatagggcctacgctcccggagggccagcttaccagcctgtcgtggaggcgtttggtactgatatcctgcataaggacgggattatcaaccgcaaggtgctgggatcacgggtgttcggcaataagaagcaactgaaaatcctgactgatattatgtggcccattatagctaaactggcaagggaagaaatggatagggctgtagctgaagggaaaagggtctgtgttatcgatgccgctgtcttgctagaagccggatggcaaaacttggttcacgaggtctggacggcggtgatccctgagacagaggctgtgcgcaggattgttgagcgtgacggactgtctgaggccgcagctcagtctagacttcagtctcagatgtccgggcaacaactggttgagcaaagccatgtggttctttccacactgtgggaaccccacatcactcaacggcaggtggaaaaagcttgggccctgctgcagaagaggatacccaagacgcatcaggcccttgattag

SEQ ID NO: 33643 - DNA, 528 bp, Artificial Sequence
  derived and/or modified sequence
atggctgtgttcagatcaggactgctggtcctcaccactccgctggctagcctagccccacggcttgccagcatcctcacctcagccgctcgtttggtaaatcacacgctgtatgtccacctgcagccaggaatgtctctggagggtcctgcccagccgcaatcttcacccgtgcaggctacatttgaggtgttagattttatcacacatctgagcccatcccctgcccacctatctcctgaaagtaggcctcccgcaagaagtcgtgtggaccggtttccagatcccggttggaagcccgtgcagccagggcagacagccgcttcagccctacggcatcagctgctccagcttttgtccgccaccggcctgggtgccgcaattttgcggctgtgggaccgtcggtccgccagaggcgctccagggtgcccattaactctgcatgaccaggcctccttccccaggggacgggtgtccaaagctgcgggagcatggctgctcccatggagatgcagatggcatgtttag

SEQ ID NO: 33644 - DNA, 1782 bp, Artificial Sequence
  derived and/or modified sequence
atgcgaacaccacgcttgagagctcagccgcgaggggcagtctatcaggccccttcaccaccacccgcacccgttggattaggatctatggcagtgtttagaagcggcctgcttgtcctgaccacccctcttgctagtcttgctcctaggctggcgtcaatcctaaccagcgcagctaggcttgtcaatcacaccctgtacgtccacctgcagcctggaatgtcacttgaaggacctgcacagcctcagtcctcccccgtccaggccacctttgaggttctcgattttataacgcacttgtatgctggggcagacgtccaccggcatctggacgtgaggattctgctcacaaatatcagaacaaaaagcacctttcttccacctctgcccacttctgtacagaacctggctcatcctcccgaagtcgtactcacagactttcagaccctggacggctcgcaatacaatccggtgaaacagcagttggtacgctacgctacctcttgctactcctgctgcccacggctggccagcgtgttactgtatagtgattatgggattggggaagttccagtggaaccactggatgtgcctctgccatccactattagacctgccagtcctgtggctggtagccctaaacagcccgtgagagggtactatcggggagcggtcggaggcacattcgaccggctgcacaacgcccataaggtcctcctgtccgtcgcttgcatactggcgcaggaacagttagtcgtgggcgtggcggacaaagacctgctgaagagcaagcttcttcccgaacttctacagccctatacagagagggttgagcatctttctgaatttctggtggacatcaaaccatccttgacatttgacgtgatccccttgctcgatccatacggtcccgctggaagcgaccctagtttagagtttctcgttgtctcggaagagacctatcgaggtggtatggccatcaatcgatttagactggaaaatgatcttgaggagctggccctctaccagatccaactcctcaaggatctaagacataccgagaatgaagaagataaagtgtcctcgagctcctttcgacaaagaatgttaggtaatctacttaggccaccttatgagcgacccgaactgcccacctgcctatacgttattggcctaacagggatttctgggagtggcaaatcctccatcgcccagagactgaaagggctgggggcatttgtgatcgacagcgatcacctgggtcaccgcgcatacgctccaggtgggccagcatatcagcccgtggtggaggcttttggaactgacatcctgcacaaggacgggatcattaacaggaaggtcctgggttctcgcgtgttcgggaacaaaaagcagctgaaaattctgaccgatatcatgtggcctatcatagcaaagctggcacgcgaggaaatggatcgcgcagtggccgaggggaaacgggtgtgcgtgatcgacgccgcagtcctcctagaggctgggtggcagaatctggtgcacgaggtgtggaccgcagttatacccgagaccgaggctgttagaagaatcgtggagcgggacggcctgtctgaagctgctgctcagtccaggctccagagtcagatgagcggacagcagctcgtggagcagtctcatgtggtgctgtcgacactttgggaaccccatatcacccaaagacaagtagagaaggcctgggcgctcctgcagaagcggattcccaagacacaccaggcgctggattag

SEQ ID NO: 33645 - DNA, 2290 bp, Artificial Sequence
  derived and/or modified sequence
agaatcccgcgctgaagcgaagtcgagacgtttgaccttcctccgtttccgtagttccgagttgcggtttctccgttagtgcttccgggttgcagccagggaagcctccgcggtggtgcaagtggaacccaagccttgaggtttcatttccccctcccaggatttcgactcagttcagcgaagtcaccgccccgtctgagaaatgaggacaccaaggcttagagcacagccccgaggcgccgtctaccaggccccgtcccctcccccggctcctgtcggcctgggcagcatggccgtattccggtcgggtctcctggtgctgacgacgccgctggcctccctagcccctcgcctggcctccatcctgacctcggcggcccggctggtgaatcacacactctatgttcacctgcagccgggcatgagcctggagggcccggctcagccccagtccagccccgtgcaggccacgtttgaggttcttgatttcatcacgcacctctatgctggcgccgacgtccacaggcacttggacgtcagaatcctactgaccaatatccgaaccaagagcacctttctccctcccctgcccacctcagtccagaatctcgcccacccgccagaagtcgtgttgacagatttccagaccctggatggaagccagtacaacccggtcaaacagcagctagtgcgttacgccaccagctgttacagctgttgtccgcgactggcctcggtgctgctatactccgattatgggataggagaagtgcccgtggagcccctggatgtccccttaccctccacgatcaggccagcttcccccgtggccgggtctccaaagcagccggtgcgtggctactaccgtggcgctgtcggtggcacgtttgaccgcctgcacaacgcccacaaggtgttgctcagtgtcgcgtgcatcctggcccaggagcagcttgtggtgggagtagcagacaaagatctgttgaagagcaagttgctccctgagctgctccaaccttatacagaacgtgtggaacatctgagtgaattcctggtggacatcaagccctccttgacttttgatgtcatccccctgctggacccctatgggcccgctggctctgacccctccctggagttcctggtggtcagcgaggagacctatcgtggggggatggccatcaaccgcttccgccttgagaatgacctggaggaacttgctttgtaccagatccagctgctgaaggacctcagacatacagagaatgaagaggacaaagtcagctcctccagcttccgccagcgaatgttggggaacctgcttcggcctccatatgaaaggccagagctccccacatgtctctatgtaattgggctgactggcatcagtggctctgggaagagctcaatagctcagcgactgaagggcctgggggcgtttgtcattgacagtgaccacctgggtcatcgggcctatgccccaggtggccctgcctaccagcctgtggtggaggcctttggaacagatattctccataaagatggcatcatcaacaggaaggtcctaggcagccgggtgtttgggaataagaagcagctgaagatactcacggacattatgtggccaattatcgcaaagctggcccgagaggagatggatcgggctgtggctgagggaaagcgtgtgtgtgtgattgatgccgctgtgttgcttgaagccggctggcagaacctggtccatgaggtgtggactgctgtcatcccagagactgaggctgtaagacgcattgtggagagggatggcctcagtgaagccgcggctcaaagccggctgcagagccagatgagcgggcagcagcttgtggaacagagccacgtggtgctcagcaccttgtgggagccgcatatcacccaacgccaggtggagaaagcctgggccctcttgcagaagcgcattcccaagactcatcaggccctcgactgaaaagttctcagtggggccagactggctcctggagctgacaagcgaccccgtggtgaggagaaatgggggccttgatgctcaccctggttcaggcccagaggtccaagctatactgtgcaggacatggccaggcctggtggacacaggaagcctacccaacacgctggtatttggccaacactgaggatgtggttcatgggggagcagtcccctccccactcttgcccatgggtgactcttacccacagctgactagggccagcgcaaatactggaacctgtaacagaattaaaggtgaatgttctg

SEQ ID NO: 33646 - DNA, 1179 bp, Artificial Sequence
  derived and/or modified sequence
agtgcttccgggttgcagccagggaagcctccgcggtggtgcaagtggaacccaagccttgaggtttcagcctgggcagcatggccgtattccggtcgggtctcctggtgctgacgacgccgctggcctccctagcccctcgcctggcctccatcctgacctcggcggcccggctggtgaatcacacactctatgttcacctgcagccgggcatgagcctggagggcccggctcagccccagtccagccccgtgcaggccacgtttgaggttcttgatttcatcacgcacctttctccctcccctgcccacctcagtccagaatctcgcccacccgccagaagtcgtgttgacagatttccagaccctggatggaagccagtacaacccggtcaaacagcagctagtgcgttacgccaccagctgttacagctgttgtccgcgactggcctcggtgctgctatactccgattatgggataggagaagtgcccgtggagcccctggatgtccccttaccctccacgatcaggccagcttcccccgtggccgggtctccaaagcagccggtgcgtggctactaccgtggcgctgtcggtggcacgtttgaccgcctgcacaacgcccacaaggtgttgctcagtgtcgcgtgcatcctggcccaggagcagcttgtggtgggagtagcagacaaagatctgttgaagagcaagttgctccctgagctgctccaaccttatacagaacgtgtggaacatctgagtgaattcctggtggacatcaagccctccttgacttttgatgtcatccccctgctggacccctatgggcccgctggctctgacccctccctggagttcctggtggtcagcgaggagacctatcgtggggggatggccatcaaccgcttccgccttgagaatgacctggaggaacttgctttgtaccagatccagctgctgaaggacctcagacatacagagaatgaagaggacaaagtcagctcctccagcttccgccagcgaatgttggggaacctgcttcggcctccatatgaaaggccagagctccccacatgtctctatgtaattgggctgactggcatcagtggctctgggaagagctcaatagctcagcgactgaagggcctgggggcgtttgtcattgacagtgaccacctg

SEQ ID NO: 33647 - DNA, 1976 bp, Artificial Sequence
  derived and/or modified sequence
agtgcttccgggttgcagccagggaagcctccgcggtggtgcaagtggaacccaagccttgaggtttcatttccccctcccaggatttcgactcagttcagcgaagtcaccgccccgtctgagaaatgaggacaccaaggcttagagcacagccccgaggcgccgtctaccaggccccgtcccctcccccggctcctgtcggcctgggcagcatggccgtattccggtcgggtctcctggtgctgacgacgccgctggcctccctagcccctcgcctggcctccatcctgacctcggcggcccggctggtgaatcacacactctatgttcacctgcagccgggcatgagcctggagggcccggctcagccccagtccagccccgtgcaggccacgtttgaggttcttgatttcatcacgcacctctatgctggcgccgacgtccacaggcacttggacgtcagaatcctactgaccaatatccgaaccaagagcacctttctccctcccctgcccacctcagtccagaatctcgcccacccgccagaagtcgtgttgacagatttccagaccctggatggaagccagtacaacccggtcaaacagcagctagtgcgttacgccaccagctgttacagctgttgtccgcgactggcctcggtgctgctatactccgattatgggataggagaagtgcccgtggagcccctggatgtccccttaccctccacgatcaggccagcttcccccgtggccgggtctccaaagcagccggtgcgtggctactaccgtggcgctgtcggtggcacgtttgaccgcctgcacaacgcccacaaggtgttgctcagtgtcgcgtgcatcctggcccaggagcagcttgtggtgggagtagcagacaaagatctgttgaagagcaagttgctccctgagctgctccaaccttatacagaacgtgtggaacatctgagtgaattcctggtggacatcaagccctccttgacttttgatgtcatccccctgctggacccctatgggcccgctggctctgacccctccctggagttcctggtggtcagcgaggagacctatcgtggggggatggccatcaaccgcttccgccttgagaatgacctggaggaacttgctttgtaccagatccagctgctgaaggacctcagacatacagagaatgaagaggacaaagtcagctcctccagcttccgccagcgaatgttggggaacctgcttcggcctccatatgaaaggccagagctccccacatgtctctatgtaattgggctgactggcatcagtggctctgggaagagctcaatagctcagcgactgaagggcctgggggcgtttgtcattgacagtgaccacctgggtcatcgggcctatgccccaggtggccctgcctaccagcctgtggtggaggcctttggaacagatattctccataaagatggcatcatcaacaggaaggtcctaggcagccgggtgtttgggaataagaagcagctgaagatactcacggacattatgtggccaattatcgcaaagctggcccgagaggagatggatcgggctgtggctgagggaaagcgtgtgtgtgtgattgatgccgctgtgttgcttgaagccggctggcagaacctggtccatgaggtgtggactgctgtcatcccagagactgaggctgtaagacgcattgtggagagggatggcctcagtgaagccgcggctcaaagccggctgcagagccagatgagcgggcagcagcttgtggaacagagccacgtggtgctcagcaccttgtgggagccgcatatcacccaacgccaggtggagaaagcctgggccctcttgcagaagcgcattcccaagactcatcaggccctcgactgaaaagttctcagtggggccagactggctcctggagctgacaagcgaccccgtggtgaggagaaatggggg

SEQ ID NO: 33648 - DNA, 1782 bp, Artificial Sequence
  derived and/or modified sequence
atgagaacccccagactgagagcccagcccagaggcgccgtgtaccaggcccccagccccccccccgcccccgtgggcctgggcagcatggccgtgttcagaagcggcctgctggtgctgaccacccccctggccagcctggcccccagactggccagcatcctgaccagcgccgccagactggtgaaccacaccctgtacgtgcacctgcagcccggcatgagcctggagggccccgcccagccccagagcagccccgtgcaggccaccttcgaggtgctggacttcatcacccacctgtacgccggcgccgacgtgcacagacacctggacgtgagaatcctgctgaccaacatcagaaccaagagcaccttcctgccccccctgcccaccagcgtgcagaacctggcccacccccccgaggtggtgctgaccgacttccagaccctggacggcagccagtacaaccccgtgaagcagcagctggtgagatacgccaccagctgctacagctgctgccccagactggccagcgtgctgctgtacagcgactacggcatcggcgaggtgcccgtggagcccctggacgtgcccctgcccagcaccatcagacccgccagccccgtggccggcagccccaagcagcccgtgagaggctactacagaggcgccgtgggcggcaccttcgacagactgcacaacgcccacaaggtgctgctgagcgtggcctgcatcctggcccaggagcagctggtggtgggcgtggccgacaaggacctgctgaagagcaagctgctgcccgagctgctgcagccctacaccgagagagtggagcacctgagcgagttcctggtggacatcaagcccagcctgaccttcgacgtgatccccctgctggacccctacggccccgccggcagcgaccccagcctggagttcctggtggtgagcgaggagacctacagaggcggcatggccatcaacagattcagactggagaacgacctggaggagctggccctgtaccagatccagctgctgaaggacctgagacacaccgagaacgaggaggacaaggtgagcagcagcagcttcagacagagaatgctgggcaacctgctgagacccccctacgagagacccgagctgcccacctgcctgtacgtgatcggcctgaccggcatcagcggcagcggcaagagcagcatcgcccagagactgaagggcctgggcgccttcgtgatcgacagcgaccacctgggccacagagcctacgcccccggcggccccgcctaccagcccgtggtggaggccttcggcaccgacatcctgcacaaggacggcatcatcaacagaaaggtgctgggcagcagagtgttcggcaacaagaagcagctgaagatcctgaccgacatcatgtggcccatcatcgccaagctggccagagaggagatggacagagccgtggccgagggcaagagagtgtgcgtgatcgacgccgccgtgctgctggaggccggctggcagaacctggtgcacgaggtgtggaccgccgtgatccccgagaccgaggccgtgagaagaatcgtggagagagacggcctgagcgaggccgccgcccagagcagactgcagagccagatgagcggccagcagctggtggagcagagccacgtggtgctgagcaccctgtgggagccccacatcacccagagacaggtggagaaggcctgggccctgctgcagaagagaatccccaagacccaccaggccctggactag

SEQ ID NO: 33649 - protein, 396 aa, Artificial Sequence
  derived and/or modified sequence
MNFQAGGGQSPQQQQSLAAPGGGGAAAQQLVCGGQFGGAGPGAGGGGGPSQQLAGGPPQQFALSNSAAIRAEIQRFESVHPNIYAIYDLIERIEDLALQNQIREHVISIEDSFVNSQEWTLSRSVPELKVGIVGNLSSGKSALVHRYLTGTYVQEESPEGGRFKKEIVVDGQSYLLLIRDEGGPPELQFAAWVDAVVFVFSLEDEISFQTVYNYFLRLCSFRNASEVPMVLVGTQDAISAANPRVIDDSRARKLSTDLKRCTYYETCATYGLNVERVFQDVAQKVVALRKKQQLAIGPCKSLPNSPSHSAVSAASIPAVHINQATNGGGSAFSDYSSSVPSTPSISQRELRIETIAASSTPTPIRKQSKRRSNIFTICATVSNFSSTKRPFQLLPN

SEQ ID NO: 33650 - DNA, 1191 bp, Artificial Sequence
  derived and/or modified sequence
atgaacttccaggccggcggcggccagagcccccagcagcagcagagcctggccgcccccggcggcggcggcgccgccgcccagcagctggtgtgcggcggccagttcggcggcgccggccccggcgccggcggcggcggcggccccagccagcagctggccggcggccccccccagcagttcgccctgagcaacagcgccgccatcagagccgagatccagagattcgagagcgtgcaccccaacatctacgccatctacgacctgatcgagagaatcgaggacctggccctgcagaaccagatcagagagcacgtgatcagcatcgaggacagcttcgtgaacagccaggagtggaccctgagcagaagcgtgcccgagctgaaggtgggcatcgtgggcaacctgagcagcggcaagagcgccctggtgcacagatacctgaccggcacctacgtgcaggaggagagccccgagggcggcagattcaagaaggagatcgtggtggacggccagagctacctgctgctgatcagagacgagggcggcccccccgagctgcagttcgccgcctgggtggacgccgtggtgttcgtgttcagcctggaggacgagatcagcttccagaccgtgtacaactacttcctgagactgtgcagcttcagaaacgccagcgaggtgcccatggtgctggtgggcacccaggacgccatcagcgccgccaaccccagagtgatcgacgacagcagagccagaaagctgagcaccgacctgaagagatgcacctactacgagacctgcgccacctacggcctgaacgtggagagagtgttccaggacgtggcccagaaggtggtggccctgagaaagaagcagcagctggccatcggcccctgcaagagcctgcccaacagccccagccacagcgccgtgagcgccgccagcatccccgccgtgcacatcaaccaggccaccaacggcggcggcagcgccttcagcgactacagcagcagcgtgcccagcacccccagcatcagccagagagagctgagaatcgagaccatcgccgccagcagcacccccacccccatcagaaagcagagcaagagaagaagcaacatcttcaccatctgcgccaccgtgagcaacttcagcagcaccaagagacccttccagctgctgcccaactag

SEQ ID NO: 33651 - DNA, 1191 bp, Artificial Sequence
  derived and/or modified sequence
atgaatttccaagcgggggggggtcaatctcctcagcagcagcaaagtctggctgcccccggcgggggaggagccgcagcacaacagctggtgtgtggcggccagtttggcggggctggaccaggagccgggggggggggaggccccagccagcaactggctggtgggcctccgcagcagttcgccctgagcaattctgccgctattcgcgccgaaattcagcggttcgaatctgtacaccctaacatttatgctatttacgatctaatcgaaaggatagaagacctcgctcttcaaaaccagatccgcgagcatgttatcagcatcgaggacagcttcgtgaacagtcaggagtggactctcagccgctccgtgccagaactcaaagtcggcattgtaggaaatctgtccagcggaaagtcggccttagtccaccggtacctaactggaacctatgtccaggaggagtccccagagggcgggcgtttcaaaaaagaaatcgtcgttgacggccaaagctatctgctgctgattcgggacgaaggaggccctccggagttacagtttgcagcctgggtcgatgcagtggtcttcgtcttttcccttgaggatgaaatatcatttcagaccgtgtacaactacttcttgcggctatgcagctttcggaatgctagcgaagttcccatggttctggtggggacacaggatgcaatcagtgcagctaatccccgagttatcgacgactctagagcacgaaagctcagtaccgatctcaagcgatgcacttattatgaaacgtgcgccacctatgggttgaatgtcgagagagtttttcaggatgtggcccagaaggtcgtggcactgagaaaaaaacagcagctggccattgggccatgcaagagcctgccaaactcccccagtcacagcgctgtcagcgccgccagtattcccgccgtccacatcaaccaagccacaaacggcggaggctccgcctttagcgactatagttcctccgtcccatctacccccagtatatcacaacgggagctgcggattgaaaccattgccgcgtcctccaccccaacacccatacggaagcagtcaaagagaaggtctaatatattcactatctgtgccaccgtcagcaactttagcagtacaaagcgaccattccagctccttcctaactag

SEQ ID NO: 33652 - DNA, 1191 bp, Artificial Sequence
  derived and/or modified sequence
atgaacttccaggccggcggcggccagagcccccagcagcagcagagcctggccgcccctgggggcggcggggccgccgcccagcagctggtgtgtggcggccagtttggaggagctggccctggagctgggggcggcggcggccccagccagcagctggccggcggccccccccagcagtttgccctgagcaacagcgctgccatccgggcagagatccagagatttgagagcgtgcaccccaacatctatgccatctatgacctgattgaaagaattgaggacctggccctgcagaaccagatccgggagcacgtgatcagcattgaggacagctttgtgaacagccaggagtggaccctgagccgctctgtgcctgagctgaaggtgggcatcgtgggcaacctgagcagcggcaagagcgccctggtgcaccgctacctgaccggcacctacgtgcaggaggagagccctgagggcggccgcttcaagaaggagatcgtggtggatggccagagctacctgctgctgatcagagatgagggcggccccccagagctgcagtttgctgcctgggtggatgctgtggtgtttgtgttcagcctggaggatgagatctccttccagacagtgtacaactacttcctgcggctgtgcagcttcagaaatgccagcgaggtgcccatggtgctggtgggcacccaggatgccatctctgctgccaacccccgggtgattgatgacagccgggccaggaagctgagcacagacctgaagcgctgcacctactatgagacctgtgccacctacggcctgaatgtggagagggtcttccaggatgtggcccagaaggtggtggccctgaggaagaagcagcagctggccatcggcccctgcaagagcctgcccaacagccccagccacagcgctgtgtctgctgccagcatcccagctgtgcacatcaaccaggccaccaacggcggcggcagcgccttcagtgactacagcagctctgtgcccagcacccccagcatcagccagcgggagctgcgcatcgagaccatcgccgccagcagcacccccacccccatcaggaagcagagcaagaggaggagcaacatcttcaccatctgtgccaccgtgagcaacttcagcagcaccaagaggcccttccagctgctgcccaactag

SEQ ID NO: 33653 - DNA, 1191 bp, Artificial Sequence
  derived and/or modified sequence
atgaacttccaggccggcggcggccagagcccccagcagcagcagtcgctagccgctcctggcggcggaggagcagctgcacagcaacttgtgtgcggcgggcagttcggcggggctgggccgggcgcaggcgggggaggaggacccagccagcaactcgcgggcgggccccctcagcagttcgcattgtcaaattccgctgctatcagagctgagatacagcgatttgaatctgtgcatcctaatatatacgctatatacgacctcatcgaacggattgaggacctggccctgcaaaaccaaattcgggaacatgtgataagcatcgaggacagcttcgtgaacagccaggaatggacactatccagaagcgtacccgaactgaaagtcggcattgtcgggaacctctcctccggaaaaagcgcactggtgcataggtatctgacgggcacctatgtacaggaggagtctcctgagggggggagatttaagaaagagatcgttgtcgacggccagagttaccttttgctgattcgggacgagggcggaccccctgagctgcagtttgccgcatgggtcgacgcagtggtatttgtcttctcgctggaggatgaaatctccttccagaccgtttataactacttcctgagattgtgttctttcagaaacgccagtgaggtgcctatggtcctggttgggacccaggatgcaatttcagctgccaacccaagggtgatagacgactctcgggccaggaagcttagtaccgatctgaagcggtgcacatactatgaaacatgcgcaacctacggtctcaatgtggagcgggtcttccaagatgtggcccagaaagtggtggcacttcgtaagaagcaacagctggctattggcccctgcaagtctttgcccaactcacccagtcattccgcggtctccgctgcttccatccccgcagttcatattaatcaggctacgaatggcggcggtagcgctttcagcgactactcatccagcgttcctagtaccccatctatctcccaacgagagctcaggatcgagactatcgccgcaagctccacccctactcctatccgcaagcagtctaagaggcgctcaaatatctttaccatatgcgcaacggtcagtaacttctcttccacaaagcgaccctttcagctcctgccaaactag

SEQ ID NO: 33654 - DNA, 1191 bp, Artificial Sequence
  derived and/or modified sequence
atgaactttcaagctggaggagggcagtccccccagcaacagcaatccctggctgccccagggggaggcggtgctgccgcacagcagctcgtgtgcggcggtcagttcgggggtgctgggcctggagctggcggtggaggaggacctagtcagcagcttgcagggggaccaccccaacagtttgccctcagcaacagcgccgcaattcgggctgaaatccaacggttcgaatcagtgcacccgaacatctacgccatatatgacctgatcgagcggattgaggacctagccctgcagaaccagatccgtgagcatgttatcagtatcgaggattcatttgttaacagccaagaatggacgctttctagatctgtccccgagctgaaggttgggatcgtaggtaacctcagttccggaaagtccgccctggtgcaccggtacctcaccggcacatatgttcaggaggagagccctgagggcggacgattcaagaaggagattgtggttgacggacagtcataccttcttctgattcgggacgaaggcggtccacctgagctgcagttcgccgcttgggtggacgcagtggttttcgttttcagtctggaagatgagattagctttcagacggtgtataactactttcttcgactttgctctttccgtaacgcttccgaggtaccaatggtgctcgtgggcacacaggacgccataagtgcagcgaaccccagggtgatcgatgattctagagcgcgaaaactcagtactgatctgaaacggtgcacctattacgagacctgcgctacttacggccttaatgtagagagagtgttccaggatgtggcccagaaagtggtcgcactgcgcaagaaacagcaactagccatcgggccatgcaagagcctgcccaattccccgagccactctgcggtctccgccgcaagcatccctgccgtacatattaaccaagcgacaaatggagggggatcagcctttagcgattatagcagctccgtgcccagcacccccagtatctctcagcgcgagctacgcattgaaaccattgccgctagtagcactcctacaccaattcggaagcagtcaaaaagacggagtaacatttttaccatctgcgccacagtgtcaaacttctcttcaactaagcgacctttccagctgttgccaaattag

SEQ ID NO: 33655 - DNA, 2039 bp, Artificial Sequence
  derived and/or modified sequence
atgaacttccaggcgggcggggggcagagcccgcagcagcagcagagcctggcggctccggggggcggcggcgctgccgcgcagcagctcgtctgcggcgggcagttcggcggcgcggggcccggggccgggggcggcggcggcccctcgcagcagctggccggcgggcccccccagcagttcgcgctctccaactccgcggccatccgggccgagatccagcgcttcgagtccgtgcatcccaatatctacgccatctacgacctgatcgagcgcatcgaggatttggcgctgcagaaccagatccgggagcacgtcatctccatcgaggactcgtttgtgaacagccaggagtggacgctgagccgctccgtaccggagcttaaagtgggcatagtggggaacctgtctagcgggaagtcagccctggtgcaccgctatctgacggggacctatgtccaggaggagtcccctgaaggggggcggtttaagaaggagattgtggtggatggccagagttacctgctgctgatccgagatgaaggaggcccccctgagctccagtttgctgcctgggtggatgcagtggtgtttgtgttcagcctggaggatgaaatcagtttccagacggtgtacaactacttcctgcgtctctgcagcttccgcaacgccagcgaggtgcccatggtgcttgtgggcacgcaggatgccatcagcgctgcgaatccccgggttatcgacgacagcagagcccgcaagctctccacagatctgaagcggtgcacctactatgagacgtgcgcgacctacgggctcaatgtggagcgtgtcttccaggacgtggcccagaaggtagtggccttgcgaaagaagcagcaactggccatcgggccctgcaagtcactgcccaactcgcccagccactcggccgtgtccgccgcctccatcccggccgtgcacatcaaccaggccacgaatggcggcggcagcgccttcagcgactactcgtcctcagtcccctccacccccagcatcagccagcgggagctgcgcatcgagaccatcgctgcctcctccacccccacacccatccgaaagcagtccaagcggcgctccaacatcttcacgatatgtgccactgtttccaacttttcatcaacaaaaaggcctttccaactccttccaaattagaagaccagttggtgacacacagcacctctggacatgccccctgtgcggggccggaggcgggccgggccctgggactgctctcagatgagaagcggccgccgagctccccactccagagacccacgggaacctttgtaactaaccccacccccagggaaggctaggagcgccggagcccgcgctgggggctgccggggaccaggcccggccggacgctgcaggctcgctgcatggagaagaaggcagctcggccccacgcccggcgctggccagcgcgacgaggcccagaggggcgggggagtccaagcccgcccggcccggctgctcctggggggcgctttcctgcccctcccctcctctgctccttcctgcatggacctctgccgttcctgctcctgctccggaagccgccgccgccgccgcgcttgccttgccccctctttttggcctccccctatttcctaggatccgcattcgggtggactctgccccaggagcttgacagggtgcagggcctcttctggcctctctcctctctctgtccatccactgtgccccttgggccacgccgacgcgctcggtgccacgtgccgtgtggtgtctgtgccgcagacgggccatctgcccgctcacttgtggactttgcgctcccggttgtcgcgccctgtgctcccgaccagcagccccaccgtccacctcctcgcccccgcttctcttacgcccccgccccgggcgtgctcctcgcgccctcggcctctctgtccttgctcttttgtaaggggcgggcccggctcagtgacctgtgctgctctgtatggtgccgtgtgtaagaataaacccgttggaat

SEQ ID NO: 33656 - protein, 701 aa, Artificial Sequence
  derived and/or modified sequence
MARRGWRRAPLRRGVGSSPRARRLMRPLWLLLAVGVFDWAGASDGGGGEARAMDEEIVSEKQAEESHRQDSANLLIFILLLTLTILTIWLFKHRRARFLHETGLAMIYGLLVGLVLRYGIHVPSDVNNVTLSCEVQSSPTTLLVNVSGKFYEYMLKGEISSHELNNVQDNEMLRKVTFDPEVFFNILLPPIIFYAGYSLKRRHFFRNLGSILAYAFLGTAISCFVIGSIMYGCVTLMKVTGQLAGDFYFTDCLLFGAIVSATDPVTVLAIFHELQVDVELYALLFGESVLNDAVAIVLSSSIVAYQPAGDNSHTFDVTAMFKSIGIFLGIFSGSFAMGAATGVVTALVTKFTKLREFQLLETGLFFLMSWSTFLLAEAWGFTGVVAVLFCGITQAHYTYNNLSTESQHRTKQLFELLNFLAENFIFSYMGLTLFTFQNHVFNPTFVVGAFVAIFLGRAANIYPLSLLLNLGRRSKIGSNFQHMMMFAGLRGAMAFALAIRDTATYARQMMFSTTLLIVFFTVWVFGGGTTAMLSCLHIRVGVDSDQEHLGVPENERRTTKAESAWLFRMWYNFDHNYLKPLLTHSGPPLTTTLPACCGPIARCLTSPQAYENQEQLKDDDSDLILNDGDISLTYGDSTVNTEPATSSAPRRFMGNSSEDALDRELAFGDHELVIRGTRLVLPMDDSEPPLNLLDNTRHGPA

SEQ ID NO: 33657 - DNA, 2106 bp, Artificial Sequence
  derived and/or modified sequence
atggccagaagaggctggagaagagcccccctgagaagaggcgtgggcagcagccccagagccagaagactgatgagacccctgtggctgctgctggccgtgggcgtgttcgactgggccggcgccagcgacggcggcggcggcgaggccagagccatggacgaggagatcgtgagcgagaagcaggccgaggagagccacagacaggacagcgccaacctgctgatcttcatcctgctgctgaccctgaccatcctgaccatctggctgttcaagcacagaagagccagattcctgcacgagaccggcctggccatgatctacggcctgctggtgggcctggtgctgagatacggcatccacgtgcccagcgacgtgaacaacgtgaccctgagctgcgaggtgcagagcagccccaccaccctgctggtgaacgtgagcggcaagttctacgagtacatgctgaagggcgagatcagcagccacgagctgaacaacgtgcaggacaacgagatgctgagaaaggtgaccttcgaccccgaggtgttcttcaacatcctgctgccccccatcatcttctacgccggctacagcctgaagagaagacacttcttcagaaacctgggcagcatcctggcctacgccttcctgggcaccgccatcagctgcttcgtgatcggcagcatcatgtacggctgcgtgaccctgatgaaggtgaccggccagctggccggcgacttctacttcaccgactgcctgctgttcggcgccatcgtgagcgccaccgaccccgtgaccgtgctggccatcttccacgagctgcaggtggacgtggagctgtacgccctgctgttcggcgagagcgtgctgaacgacgccgtggccatcgtgctgagcagcagcatcgtggcctaccagcccgccggcgacaacagccacaccttcgacgtgaccgccatgttcaagagcatcggcatcttcctgggcatcttcagcggcagcttcgccatgggcgccgccaccggcgtggtgaccgccctggtgaccaagttcaccaagctgagagagttccagctgctggagaccggcctgttcttcctgatgagctggagcaccttcctgctggccgaggcctggggcttcaccggcgtggtggccgtgctgttctgcggcatcacccaggcccactacacctacaacaacctgagcaccgagagccagcacagaaccaagcagctgttcgagctgctgaacttcctggccgagaacttcatcttcagctacatgggcctgaccctgttcaccttccagaaccacgtgttcaaccccaccttcgtggtgggcgccttcgtggccatcttcctgggcagagccgccaacatctaccccctgagcctgctgctgaacctgggcagaagaagcaagatcggcagcaacttccagcacatgatgatgttcgccggcctgagaggcgccatggccttcgccctggccatcagagacaccgccacctacgccagacagatgatgttcagcaccaccctgctgatcgtgttcttcaccgtgtgggtgttcggcggcggcaccaccgccatgctgagctgcctgcacatcagagtgggcgtggacagcgaccaggagcacctgggcgtgcccgagaacgagagaagaaccaccaaggccgagagcgcctggctgttcagaatgtggtacaacttcgaccacaactacctgaagcccctgctgacccacagcggcccccccctgaccaccaccctgcccgcctgctgcggccccatcgccagatgcctgaccagcccccaggcctacgagaaccaggagcagctgaaggacgacgacagcgacctgatcctgaacgacggcgacatcagcctgacctacggcgacagcaccgtgaacaccgagcccgccaccagcagcgcccccagaagattcatgggcaacagcagcgaggacgccctggacagagagctggccttcggcgaccacgagctggtgatcagaggcaccagactggtgctgcccatggacgacagcgagccccccctgaacctgctggacaacaccagacacggccccgcctag

SEQ ID NO: 33658 - DNA, 2106 bp, Artificial Sequence
  derived and/or modified sequence
atggcaagacgtggttggagacgggcccctcttcggagaggagtggggagctcacctcgcgccagacgccttatgaggccactctggctgctcctggccgtgggcgtgttcgactgggctggagcgtcagatggtggcggcggcgaagcacgggcgatggatgaggagattgtgtctgaaaagcaggcagaagaatcccaccggcaggactctgcaaatctgctgatcttcatcctcctactcaccttgaccattttaacaatctggttgttcaaacaccgtagggctcgatttcttcacgagactggtttggccatgatctacggactgctggtaggactggtgttacgctacgggattcacgtgccaagcgatgtgaacaatgtaactttatcttgtgaggtgcaatcttcacctacaacattgctggtaaatgtatccgggaagttttatgagtacatgcttaagggggagatatcatctcacgagcttaacaacgttcaggataatgagatgttgcgcaaagtgaccttcgatccagaagtattcttcaacattcttttacctccaattatcttctacgccggctattccctgaagagaaggcattttttccgtaacctgggaagcattctggcctatgcctttctgggcactgctatctcttgttttgtcattgggtccattatgtacggatgcgtaaccctaatgaaggtcacgggacagctggctggagacttctatttcacagactgcctgctttttggagcaatcgtttccgcaactgacccagtgactgtcctcgccattttccacgagttgcaggtcgatgtcgaactgtacgcactcctgttcggcgagtctgtgctgaacgatgcagtggctatagtgctttccagctctatagtggcctaccagccggctggagacaatagccataccttcgatgtaaccgcaatgttcaaatccataggcatttttttgggcatcttttctggatccttcgccatgggggccgccacgggtgtggtgaccgcactggtgactaagttcacgaagctgagagaattccagctactggagacggggcttttcttcctgatgtcctggagcaccttcttgctggcagaagcgtgggggtttacaggagtggtcgcggtgctgttttgcggaatcacgcaggcgcactatacttacaacaatctctccactgaatctcagcacaggacgaaacagttattcgagttattgaacttccttgcagaaaattttatcttctcctatatgggtctgacgctctttactttccagaaccatgtgttcaaccctacttttgtggttggcgcctttgttgccatattcctagggcgcgccgccaatatctatccactgtctttattgctcaacctcgggagaagatctaagattggatccaactttcagcatatgatgatgttcgcaggcctcaggggagccatggctttcgcactggctattcgggacacagccacttatgcccgccagatgatgtttagcaccactctgctgatagtgttttttacagtgtgggtttttggcgggggcacaaccgctatgctgtcatgcctccatatcagagtgggcgtcgactccgaccaagaacatctgggcgtacctgaaaatgaacgtcggactactaaagccgaatctgcctggctgttccggatgtggtataatttcgaccataattacctgaagccactgttgactcattcaggaccacctctgacaacaactctgcctgcctgttgcggacccatagcccgttgcttgacgtcaccccaggcatatgagaaccaagaacagctgaaggacgacgattcagatttgatactgaatgatggcgacatcagtctcacatatggagatagtactgtcaacaccgagcccgccacatcttcagccccgcgaaggttcatgggtaattcatctgaggatgctttggatcgcgagctggcctttggggaccatgaactcgtcatccgaggaacaaggctggtgctccccatggacgactccgaacctcctctcaatcttctagacaatacacggcacggacctgcttag

SEQ ID NO: 33659 - DNA, 2106 bp, Artificial Sequence
  derived and/or modified sequence
atggcccggcggggctggaggcgggcccccctgcggcggggcgtgggcagcagcccccgggcccggcggctgatgaggcccctgtggctgctgctggccgtgggcgtgtttgactgggccggggccagtgatggcggcggcggggaggcccgggccatggatgaggagatcgtgtctgagaagcaggccgaggagagccaccggcaggacagcgccaacctgctgatcttcatcctgctgctgaccctgaccatcctgaccatctggctgttcaagcaccggcgggcccgcttcctgcacgagaccggcctggccatgatctacggcctgctggtgggcctggtgctgcgctatggcatccacgtgcccagtgatgtgaacaacgtgaccctgagctgtgaggtgcagagcagccccaccaccctgctggtgaatgtgtctgggaagttctatgagtacatgctgaagggggagatcagcagccatgagctgaacaacgtgcaggacaatgagatgctgaggaaggtgacctttgatcctgaggtgttcttcaacatcctgctgccccccatcatcttctacgccggctacagcctgaagagaagacacttcttcaggaacctgggcagcatcctggcctatgccttcctgggcacagccatcagctgcttcgtcatcggcagcatcatgtatggctgtgtgaccctgatgaaggtgacaggccagctggccggggacttctacttcacagactgcctgctgtttggagccatcgtgtctgccacagatcctgtgacagtgctggccatcttccacgagctgcaggtggatgtggagctgtatgccctgctgtttggagagagcgtgctgaatgatgctgtggccatcgtgctgagcagcagcatcgtggcctaccagcctgctggggacaacagccacacctttgatgtgacagccatgttcaagagcatcggcatcttcctgggcatcttcagcggcagctttgccatgggcgccgccactggagtggtgacagccctggtgaccaagttcaccaagctgcgggagttccagctgctggagaccggcctcttcttcctgatgtcctggagcaccttcctgctggccgaggcctggggcttcaccggggtggtggccgtgctcttctgtggcatcacccaggcccactacacctacaacaacctgagcacagagagccagcacaggaccaagcagctgtttgagctgctgaacttcctggccgagaacttcatcttctcctacatgggcctgaccctcttcaccttccagaaccacgtgttcaaccccacctttgtggtgggcgcctttgtggccatcttcctgggccgggccgccaacatctaccccctgagcctgctgctgaacctgggccgccgcagcaagattggcagcaacttccagcacatgatgatgtttgctggcctgcggggggccatggcctttgccctggccatccgggacacagccacctacgcccggcagatgatgttcagcaccaccctgctgattgtgttcttcaccgtgtgggtgtttggaggcggcaccacagccatgctgagctgcctgcacatccgggtgggcgtggacagcgaccaggagcacctgggcgtgcctgaaaatgaaagaaggaccaccaaggccgagagcgcctggctgttcaggatgtggtacaactttgaccacaactacctgaagcccctgctgacccacagcggcccccccctgaccaccaccctgcctgcctgctgcggccccatcgcccgctgcctgaccagcccccaggcctatgagaaccaggagcagctgaaggatgatgacagcgacctgatcctgaatgatggagacatcagcctgacctacggggacagcacagtgaacacagagcccgccaccagcagcgccccccggcgcttcatgggcaacagcagtgaagatgccctggaccgggagctggcctttggagaccacgagctggtgatccggggcacccggctggtgctgcccatggatgacagcgagccccccctgaacctgctggacaacaccaggcatggccctgcctag

SEQ ID NO: 33660 - DNA, 2106 bp, Artificial Sequence
  derived and/or modified sequence
atggcccggcggggctggcggcgggcccccctgcggcggggcgtgggttccagtccacgggcaagacgactcatgcgcccactgtggttgctcctggccgttggagtctttgactgggccggcgccagcgacgggggcggaggggaggcccgagctatggacgaagagattgtgagtgaaaagcaggctgaggagagtcaccgtcaggatagtgccaacttgctgatcttcatcttgttgctgaccctgactatcttgactatttggttgtttaaacaccgcagagcccgctttttgcacgagaccggacttgccatgatctacggcttactggtgggccttgtgctaaggtacggaattcacgttccctcggatgtgaataatgtgactctatcctgcgaggtacagtctagcccaacaacgttattagttaacgtgtcaggaaaattttatgaatatatgctgaaaggggagattagcagccacgagcttaacaacgtccaagataatgaaatgctgaggaaggtgacctttgaccctgaggtttttttcaacatcctcctgccaccaatcatcttctatgccggatattctcttaagcgtagacacttcttcagaaatcttggctcaatacttgcctatgcgttcctgggcaccgccatttcctgcttcgttatagggagcattatgtacgggtgcgtgactttgatgaaggtcactgggcagcttgcaggggatttctatttcactgactgcctcctgttcggggctatcgtcagtgccacggaccccgtcacagttttagcaatctttcacgagctccaggtcgatgttgagctttacgccctcctgttcggcgagagtgtactgaatgacgctgtcgccatcgtcttaagctctagcattgtcgcctaccaaccggcgggagataattctcatacattcgatgtcacagcaatgttcaagtctataggcatcttcttaggtatctttagtgggagtttcgccatgggcgctgccacaggtgtcgtaaccgccttggtgacaaagtttactaagctacgcgagtttcagcttctggagactggcctgttcttcctcatgagctggtctaccttcttgctggccgaggcttgggggttcacaggagtggtcgcagtgctgttctgtggtatcactcaggcccactacacctataacaacctctctaccgagtcacagcaccggaccaaacaactgttcgagctgctgaacttccttgccgagaattttattttctcatacatgggattgaccctgttcaccttccagaaccacgtctttaaccccacttttgtggtgggggcctttgtagccatctttctgggccgggccgctaacatctaccccctgtcactgttgttgaatctggggcggcgttctaagattgggtccaattttcagcatatgatgatgttcgccggtctccggggcgccatggcgtttgcactcgccatccgcgacacggctacgtatgctcgccaaatgatgttttccacgaccttgcttatcgtgttcttcacagtttgggtattcggtggagggaccacggcaatgctgtcttgtctgcacatcagggtgggggtggactccgatcaggagcatttaggagtacctgagaacgagcgcaggacaaccaaggccgagagcgcctggctgtttagaatgtggtacaattttgatcacaattatctgaaacctcttctaacacactccggacccccactgacaacaacccttcctgcctgttgcgggcctatcgcccggtgtctaaccagtccccaagcttacgaaaatcaggagcagttgaaggacgacgactcagacctgatcctgaatgacggcgatataagtctcacttacggtgattcgacggtgaatactgaacctgcaaccagctcagccccaagaaggttcatgggaaattcatctgaagacgcacttgatcgggagttggcttttggggaccatgagctcgtgattcggggaacgaggttggttctgcccatggacgatagcgagccaccactgaatctgctagacaacacgcggcatggacccgcatag

SEQ ID NO: 33661 - DNA, 2106 bp, Artificial Sequence
  derived and/or modified sequence
atggctagaagaggatggcgcagggcaccgctgaggcgaggggtcgggtcttccccaagggcccgacgattaatgagaccgctttggctgctacttgccgttggagtttttgactgggccggagcttctgacggaggcggaggggaggcgcgtgccatggatgaagagatcgtaagtgagaagcaggctgaagaatctcatcgccaagattccgctaaccttctgatattcattctgctgcttaccctgacaatcctgactatctggctgttcaagcaccgaagggcacgctttttgcatgaaacaggcctcgcaatgatctacggcctgctggtcggcctcgtcttgcgctatggaattcacgtgccatccgacgtaaacaatgtcaccctgtcatgcgaggtgcagtcgagccccaccacactgctagtgaatgtatccgggaaattttacgagtatatgctcaagggcgagatctcctcacacgaactaaataacgtgcaggataatgagatgttgaggaaagtgacattcgaccccgaagttttctttaacatcctgctgcctccaatcattttttatgcagggtactcactaaaacgcagacactttttcaggaatcttggcagcattttggcctatgccttccttggcactgccatttcttgcttcgtaatcggatctataatgtacggctgtgtgactctgatgaaagtgaccgggcaactagcaggggacttctatttcactgattgtctgctgtttggtgctatcgtctctgcaaccgacccagtgacggtactcgctatcttccacgaattgcaggttgacgtggagctgtatgccctccttttcggagagagcgtcctgaacgacgctgtggcaatcgtcctctcctctagtatcgtcgcttatcagccagctggtgataattctcacacctttgacgtgaccgctatgtttaagtcgatagggattttccttggaatcttttcaggctccttcgccatgggcgctgcaaccggggtggtcactgcacttgtgacaaaatttaccaagcttcgggaatttcaactcttagaaactggtctgttcttcctgatgtcttggagtacatttttactcgccgaagcatggggcttcactggcgtggttgccgtgctcttttgtggcataactcaggcccactacacctataataacttaagcaccgaatcccagcaccggacaaaacagctgtttgagttgctcaactttctcgctgaaaacttcattttctcgtatatggggttgactctctttacttttcaaaatcacgttttcaatccaacgtttgtggtgggggcattcgtggctatctttctcgggcgtgcagctaacatctatcccctgtctttgctgcttaacttgggaaggcggagcaaaattggcagcaactttcaacacatgatgatgttcgctggtctgaggggtgcgatggcattcgcactagcaatacgcgacactgccacatatgcccgtcaaatgatgttttccacaactctgttgatcgttttttttaccgtttgggtgtttgggggagggactactgcaatgttgagctgcctccacattcgggtgggggtagatagtgaccaagaacatctaggcgtacccgagaacgagcgcagaactaccaaggctgagagcgcctggctttttcgcatgtggtacaattttgaccacaactacttgaagcctctcttgacccattccgggccaccattaaccactacgctcccagcttgttgtgggccaatcgcgaggtgccttacgtcccctcaagcatacgaaaatcaggagcagttgaaggacgacgacagcgacctcattcttaatgacggcgatattagcctgacttacggcgatagtacggtcaatacagagcctgccacaagcagcgcacctagaaggttcatgggcaattctagcgaagatgcgttagaccgcgagctggcctttggagaccacgaactggtgattaggggcacgcgcctcgtgctccccatggacgattctgaacctcctctgaatctcctggataatactcggcatggcccagcctag

SEQ ID NO: 33662 - DNA, 4681 bp, Artificial Sequence
  derived and/or modified sequence
cgccggtgaggtaggggcgggaggcggggggagacatggctcggcgcggctggcggcgggcacccctccgccgtggcgtcggcagcagtccccgagcccgcaggctcatgcggcccctttggttgctcctcgcagtgggcgtctttgactgggcaggggcttcggacggcggcggcggagaggctagagccatggacgaggagatcgtgtccgagaagcaagccgaggagagccaccggcaggacagcgccaacctgctcatcttcatcctgctgctcaccctcaccattctcacaatctggctcttcaagcaccgccgggcccgcttcctgcacgaaaccggcctggctatgatttatggtcttttggtgggccttgtgcttcggtatggcattcatgttccgagtgatgtaaataatgtgaccctgagctgtgaagtgcagtcaagtccaactaccttactggtaaatgttagtggaaaattttatgagtatatgctgaaaggagagattagttcacatgaactcaataatgttcaagataatgaaatgcttagaaaggttacttttgatccagaagtatttttcaacatattacttcctcctatcatattttatgcaggttatagcctgaaaaggagacatttttttcgaaatcttgggtctatcctagcatacgcttttcttggaacagcaatttcttgtttcgttattgggtcaataatgtatggctgtgtaacgctgatgaaggtaacgggacaacttgcaggagatttttactttacagattgcctactgtttggtgccattgtatcagcaactgatccagtgactgttcttgctatattccacgagcttcaagttgatgttgaactctatgcacttctttttggtgaaagtgtcctcaatgatgctgttgccatagtgctgtcctcctcaatagtggcataccagccagctggagacaacagtcacacctttgatgtcacagcgatgttcaagtctattgggatcttccttggaatcttcagtggatcttttgcaatgggtgctgctactggagtggtgacagctttagtgacaaagttcaccaaattacgggagttccagttgttggagacaggcctgttcttcttgatgtcctggagtaccttcctcttggctgaagcatggggcttcacaggtgtagttgcagtattgttttgtggcatcacacaagcacattatacgtataataatttgtccacggagtctcagcatagaactaaacagttgtttgagcttctcaatttcttggcagagaatttcatcttctcctacatggggctgacactgttcaccttccagaaccatgtctttaacccaacatttgtagtaggagcatttgttgctattttcttgggaagagctgccaatatttaccccttgtccctcttacttaatttgggtagaagaagtaagattggatcaaattttcaacacatgatgatgtttgctggccttcgtggtgcaatggcatttgccttggccattcgagatactgccacttatgcacggcaaatgatgttcagcaccacgcttctgattgtgttttttaccgtgtgggtatttggtggtggcaccactgcaatgctgtcatgcttgcatatcagggttggtgttgattcagaccaagaacacttgggtgttcctgaaaatgaaaggagaactaccaaagcagagagtgcttggcttttccggatgtggtacaactttgatcataactatctgaagcctctgctgacccacagcgggcctccgctgacaacaacactccctgcctgctgtggacccatcgccaggtgcctcaccagcccccaggcttacgaaaaccaggaacagttgaaagatgatgattctgatcttattctcaatgatggtgacatcagtttgacatatggagattctactgtgaacactgaaccggccacatccagcgccccaaggagatttatgggaaacagttctgaagatgccttggatcgggagcttgcatttggggaccatgaactggtcattcgaggaacacgcctggttcttccaatggatgattctgaacccccgctaaatttgttagataatacgagacatggtccagcctaagcttactaatactcacttagtgatttgtaaaatttgcacatgtgattgtgaagaaatttgtactacctaaaagtcccagtgcatgtctctgaatgtgtaagctatataaatgctatttatatggcatagaaagaatataaatatcctgtacacggcagattgtgaacaaactatattcctttaagttttcctggttgcactctgtagactggatctgttttaggaagttactttcacagtgatgttgtgtgttctgttagttttatgtctcagttaaagtgtaaaaagtgacggattttctctttcttaaacttacctgacacttaaccagagtaccagttctcgtgatgtgaattaatttttttgtgtgctaggggagggagagtgaggagggagtgttatttccttgggaacctagggaggagaggttcctttgttgggaaacttttgttgatagctgctgcctttgtcctgatcgttttctttcccttttctctggtggcctgttgtggtgcaacgagctgatggcatttgatcttgccccattcaggttggggagtgaagtgtgaggacccttttcccccgcttgctgtgaaagcacagattcattgactacagtacactgttgttcagaaaagaaggctgcaaatgacttctgagactttatgtcttttcttccagaccaagaccgtagaaggagtcacatctagccggcttagccaaagtacaggtgtatatagttcagggcacttgatttagatttggaggggctggggtgggcagagagcaagaggcgagtaaagagaatggtggtttcagagatctctcttcccaaatgtgtaaatattctataccagataagtttaaataagaaatttaattgctgcttaatttttgattatgtactttatctgtatagcaggctttgtcgtcagaagtttttatatcgatttaaattgctgctctttagcagccaaacaggagcaaaatgtaaaatttttgaacttactgtgtctaatcatcatttgttagtctgtagttaatgtcaacagttaatttatgaacccacgatcgttccacactgcaccaaagtcagtcataagagaaatcgaatattctggagcactgattgcagcagggtggctcctttgtgtgcagcaggtgtagtagtcttcattttcatggtacgttttaatattaattacctaagctgccatgcatttttttttttacagttctcaaggaagagcacagaacaatttctcatttcatatttggagtatgaaagtagattctattttgtaatgctgataatacctaaagatgcattgaatgcttggaagaatgctttttgatgttgattttgacctgttcatgattcagaagaaaaacaaacttttttggattttttttccctcaggtctgagtagcattgccttaaatcttatccagttagaacattgatttatttacatgatgttcagattttccagtgaaaaatacccttctgaacaaaacatgtacttactctccgaaaggcatctatctgtgctattgcaaacactccttgagattttaggggaattctaatgttgtaccctttcgtggcagctttgactgttggcatagccatttgttatgtagtggtagcgactttcctgctatgcaggaatccctcccatgacgtgtatgttttacatgatgtgtgcctcttcacgcagtaaatagtttcttgttaatgtatgtttgaggagtttgaacgtcagtgtcacttacccacaaagttattcaagttgtaaaaggttatacaataatttaacaactaccttttttattctgtcgggttactgacctcactttatgtaaatacttcgcatgacaaattcagtaactcgtctatttcagcatgcataagacttttcactagggaaactgataaagcttgagtcaactaaatctgccttcatactttatcaaggggaaccaagcctgctgtgcttacatcagcatctggaagactttcctctcctctaatctgtgtacacatctccaagcaaggaagaaaaaacaaactctgctcagacgcctatgaaacacctgaatgaactttgatgaagtacagtctgagttaccatcatgcacaagtagaactgctcttggacttgttttcctgttgtttgtggaacctacgcgtttgaatggcttgaacgttgcatcttttaaagttattttttaaggtttcttggcatttatcctagttgtccgtgtttggcaatgtgctgttaaagtaatagacttttaatctttatgtattttttgttttctctggagtacttggacagatgttatagtggtttcttttaggaaaatctgtcattaaaaaagttatagccttgcaaataaccactcacagtatttgagtcacagtttattttagtgagacgtaaagagtgctgacttcatttatttttctacctatatacctagtggaaaaggggaagactaatgttttcaaataaacaaacagaaacctaacagaa

SEQ ID NO: 33663 - DNA, 4460 bp, Artificial Sequence
  derived and/or modified sequence
cctcggggagtggtccgaccgcgggcggccgccggtgagtgggcgtctttgactgggcaggggcttcggacggcggcggcggagaggctagagccatggacgaggagatcgtgtccgagaagcaagccgaggagagccaccggcaggacagcgccaacctgctcatcttcatcctgctgctcaccctcaccattctcacaatctggctcttcaagcaccgccgggcccgcttcctgcacgaaaccggcctggctatgatttatggtcttttggtgggccttgtgcttcggtatggcattcatgttccgagtgatgtaaataatgtgaccctgagctgtgaagtgcagtcaagtccaactaccttactggtaaatgttagtggaaaattttatgagtatatgctgaaaggagagattagttcacatgaactcaataatgttcaagataatgaaatgcttagaaaggttacttttgatccagaagtatttttcaacatattacttcctcctatcatattttatgcaggttatagcctgaaaaggagacatttttttcgaaatcttgggtctatcctagcatacgcttttcttggaacagcaatttcttgtttcgttattgggtcaataatgtatggctgtgtaacgctgatgaaggtaacgggacaacttgcaggagatttttactttacagattgcctactgtttggtgccattgtatcagcaactgatccagtgactgttcttgctatattccacgagcttcaagttgatgttgaactctatgcacttctttttggtgaaagtgtcctcaatgatgctgttgccatagtgctgtcctcctcaatagtggcataccagccagctggagacaacagtcacacctttgatgtcacagcgatgttcaagtctattgggatcttccttggaatcttcagtggatcttttgcaatgggtgctgctactggagtggtgacagctttagtgacaaagttcaccaaattacgggagttccagttgttggagacaggcctgttcttcttgatgtcctggagtaccttcctcttggctgaagcatggggcttcacaggtgtagttgcagtattgttttgtggcatcacacaagcacattatacgtataataatttgtccacggagtctcagcatagaactaaacagttgtttgagcttctcaatttcttggcagagaatttcatcttctcctacatggggctgacactgttcaccttccagaaccatgtctttaacccaacatttgtagtaggagcatttgttgctattttcttgggaagagctgccaatatttaccccttgtccctcttacttaatttgggtagaagaagtaagattggatcaaattttcaacacatgatgatgtttgctggccttcgtggtgcaatggcatttgccttggccattcgagatactgccacttatgcacggcaaatgatgttcagcaccacgcttctgattgtgttttttaccgtgtgggtatttggtggtggcaccactgcaatgctgtcatgcttgcatatcagggttggtgttgattcagaccaagaacacttgggtgttcctgaaaatgaaaggagaactaccaaagcagagagtgcttggcttttccggatgtggtacaactttgatcataactatctgaagcctctgctgacccacagcgggcctccgctgacaacaacactccctgcctgctgtggacccatcgccaggtgcctcaccagcccccaggcttacgaaaaccaggaacagttgaaagatgatgattctgatcttattctcaatgatggtgacatcagtttgacatatggagattctactgtgaacactgaaccggccacatccagcgccccaaggagatttatgggaaacagttctgaagatgccttggatcgggagcttgcatttggggaccatgaactggtcattcgaggaacacgcctggttcttccaatggatgattctgaacccccgctaaatttgttagataatacgagacatggtccagcctaagcttactaatactcacttagtgatttgtaaaatttgcacatgtgattgtgaagaaatttgtactacctaaaagtcccagtgcatgtctctgaatgtgtaagctatataaatgctatttatatggcatagaaagaatataaatatcctgtacacggcagattgtgaacaaactatattcctttaagttttcctggttgcactctgtagactggatctgttttaggaagttactttcacagtgatgttgtgtgttctgttagttttatgtctcagttaaagtgtaaaaagtgacggattttctctttcttaaacttacctgacacttaaccagagtaccagttctcgtgatgtgaattaatttttttgtgtgctaggggagggagagtgaggagggagtgttatttccttgggaacctagggaggagaggttcctttgttgggaaacttttgttgatagctgctgcctttgtcctgatcgttttctttcccttttctctggtggcctgttgtggtgcaacgagctgatggcatttgatcttgccccattcaggttggggagtgaagtgtgaggacccttttcccccgcttgctgtgaaagcacagattcattgactacagtacactgttgttcagaaaagaaggctgcaaatgacttctgagactttatgtcttttcttccagaccaagaccgtagaaggagtcacatctagccggcttagccaaagtacaggtgtatatagttcagggcacttgatttagatttggaggggctggggtgggcagagagcaagaggcgagtaaagagaatggtggtttcagagatctctcttcccaaatgtgtaaatattctataccagataagtttaaataagaaatttaattgctgcttaatttttgattatgtactttatctgtatagcaggctttgtcgtcagaagtttttatatcgatttaaattgctgctctttagcagccaaacaggagcaaaatgtaaaatttttgaacttactgtgtctaatcatcatttgttagtctgtagttaatgtcaacagttaatttatgaacccacgatcgttccacactgcaccaaagtcagtcataagagaaatcgaatattctggagcactgattgcagcagggtggctcctttgtgtgcagcaggtgtagtagtcttcattttcatggtacgttttaatattaattacctaagctgccatgcatttttttttttacagttctcaaggaagagcacagaacaatttctcatttcatatttggagtatgaaagtagattctattttgtaatgctgataatacctaaagatgcattgaatgcttggaagaatgctttttgatgttgattttgacctgttcatgattcagaagaaaaacaaacttttttggattttttttccctcaggtctgagtagcattgccttaaatcttatccagttagaacattgatttatttacatgatgttcagattttccagtgaaaaatacccttctgaacaaaacatgtacttactctccgaaaggcatctatctgtgctattgcaaacactccttgagattttaggggaattctaatgttgtaccctttcgtggcagctttgactgttggcatagccatttgttatgtagtggtagcgactttcctgctatgcaggaatccctcccatgacgtgtatgttttacatgatgtgtgcctcttcacgcagtaaatagtttcttgttaatgtatgtttgaggagtttgaacgtcagtgtcacttacccacaaagttattcaagttgtaaaaggttatacaataatttaacaactaccttttttattctgtcgggttactgacctcactttatgtaaatacttcgcatgacaaattcagtaactcgtctatttcagcatgcataagacttttcactagggaaactgataaagcttgagtcaactaaatctgccttcatactttatcaaggggaaccaagcctgctgtgcttacatcagcatctggaagactttcctctcctctaatctgtgtacacatctccaagcaaggaagaaaaaacaaactctgctcagacgcctatgaaacacctgaatgaactttgatgaagtacagtctgagttaccatcatgcacaagtagaactgctcttggacttgttttcctgttgtttgtggaacctacgcgtttgaatggcttgaacgttgcatcttttaaagttattttttaaggtttcttggcatttatcctagttgtccgtgtttggcaatgtgctgttaaagtaatagacttttaatctttatgtattttttgttttctctggagtacttggacagatgttatagtggtttcttttaggaaaatctgtcattaaaaaagttatagccttgcaaataaccactcacagta

SEQ ID NO: 33664 - protein, 493 aa, Artificial Sequence
  derived and/or modified sequence
MFPVFPCTLLAPPFPVLGLDSRGVGGLMNSFPPPQGHAQNPLQVGAELQSRFFASQGCAQSPFQAAPAPPPTPQAPAAEPLQVDLLPVLAAAQESAAAAAAAAAAAAAVAAAPPAPAAASTVDTAALKQPPAPPPPPPPVSAPAAEAAPPASAATIAAAAATAVVAPTSTVAVAPVASALEKKTKSKGPYICALCAKEFKNGYNLRRHEAIHTGAKAGRVPSGAMKMPTMVPLSLLSVPQLSGAGGGGGEAGAGGGAAAVAAGGVVTTTASGKRIRKNHACEMCGKAFRDVYHLNRHKLSHSDEKPYQCPVCQQRFKRKDRMSYHVRSHDGAVHKPYNCSHCGKSFSRPDHLNSHVRQVHSTERPFKCEKCEAAFATKDRLRAHTVRHEEKVPCHVCGKMLSSAYISDHMKVHSQGPHHVCELCNKGFTTAAYLRIHAVKDHGLQAPRADRILCKLCSVHCKTPAQLAGHMQTHLGGAAPPVPGDAPQPQPTC

SEQ ID NO: 33665 - DNA, 1482 bp, Artificial Sequence
  derived and/or modified sequence
atgttccccgtgttcccctgcaccctgctggccccccccttccccgtgctgggcctggacagcagaggcgtgggcggcctgatgaacagcttcccccccccccagggccacgcccagaaccccctgcaggtgggcgccgagctgcagagcagattcttcgccagccagggctgcgcccagagccccttccaggccgcccccgcccccccccccaccccccaggcccccgccgccgagcccctgcaggtggacctgctgcccgtgctggccgccgcccaggagagcgccgccgccgccgccgccgccgccgccgccgccgccgccgtggccgccgccccccccgcccccgccgccgccagcaccgtggacaccgccgccctgaagcagccccccgcccccccccccccccccccccccgtgagcgcccccgccgccgaggccgccccccccgccagcgccgccaccatcgccgccgccgccgccaccgccgtggtggcccccaccagcaccgtggccgtggcccccgtggccagcgccctggagaagaagaccaagagcaagggcccctacatctgcgccctgtgcgccaaggagttcaagaacggctacaacctgagaagacacgaggccatccacaccggcgccaaggccggcagagtgcccagcggcgccatgaagatgcccaccatggtgcccctgagcctgctgagcgtgccccagctgagcggcgccggcggcggcggcggcgaggccggcgccggcggcggcgccgccgccgtggccgccggcggcgtggtgaccaccaccgccagcggcaagagaatcagaaagaaccacgcctgcgagatgtgcggcaaggccttcagagacgtgtaccacctgaacagacacaagctgagccacagcgacgagaagccctaccagtgccccgtgtgccagcagagattcaagagaaaggacagaatgagctaccacgtgagaagccacgacggcgccgtgcacaagccctacaactgcagccactgcggcaagagcttcagcagacccgaccacctgaacagccacgtgagacaggtgcacagcaccgagagacccttcaagtgcgagaagtgcgaggccgccttcgccaccaaggacagactgagagcccacaccgtgagacacgaggagaaggtgccctgccacgtgtgcggcaagatgctgagcagcgcctacatcagcgaccacatgaaggtgcacagccagggcccccaccacgtgtgcgagctgtgcaacaagggcttcaccaccgccgcctacctgagaatccacgccgtgaaggaccacggcctgcaggcccccagagccgacagaatcctgtgcaagctgtgcagcgtgcactgcaagacccccgcccagctggccggccacatgcagacccacctgggcggcgccgccccccccgtgcccggcgacgccccccagccccagcccacctgctag

SEQ ID NO: 33666 - DNA, 1482 bp, Artificial Sequence
  derived and/or modified sequence
atgttccctgtgttcccatgcacattgttggccccgcccttccctgtcctcggcttagacagtcgcggtgtgggcggactgatgaattcattcccgccacctcaggggcacgcccagaaccctctgcaggttggggccgaactccagagccggttcttcgcctcccaaggttgcgctcagagtccattccaggccgcgcccgcacccccgcccacacctcaggccccggctgctgaacctctgcaagtcgatctgttgcctgtgctcgcggctgcacaggagtctgctgcagctgctgccgctgccgcagccgcagccgcggccgttgccgctgcccccccagcaccagctgccgcatctaccgtcgacaccgccgctcttaagcaaccccctgctcctcctcccccgccaccccccgtgagtgctcctgccgccgaagcagcacctccagcgtccgcggctactattgcggctgctgcagccacagctgtggtggctccaacctcaacagttgctgtggcccccgttgcttcggccctggagaaaaaaactaagagcaaaggaccttacatttgtgcactgtgcgctaaagagtttaagaacgggtacaatctccgccgtcacgaggccattcacaccggtgcaaaggctggcagggtgccgtcaggtgcgatgaaaatgccaaccatggttcccctatctctcctgagtgttccccagttgagtggtgccggaggtggcggtggtgaggccggcgcgggggggggtgccgccgccgtggctgccgggggggttgttacaaccacagcctcaggcaaacgcattaggaagaatcacgcttgcgagatgtgtggtaaagcctttcgcgacgtctatcatctgaaccgacataagctgtcccatagcgatgaaaagccctatcagtgccccgtgtgccagcaaaggtttaagagaaaagatcgaatgtcctatcatgtcagatcccatgacggcgccgtgcataaaccttataactgtagtcattgcggaaaaagcttttcccgccctgatcacttgaattcccacgtgcgccaggtgcactccaccgaaagaccttttaagtgcgagaagtgcgaggctgccttcgcaaccaaagatagactgagggctcacaccgtgaggcacgaagaaaaagtaccgtgccacgtctgtggaaaaatgctgagctctgcatacatcagcgatcacatgaaggtgcactcccaggggcctcatcacgtctgcgaactttgcaacaagggattcacgaccgctgcctatctacgcatccatgccgtgaaggatcatggtttacaggcccccagagccgaccgcatcttgtgtaagctgtgctccgtgcattgtaagactcctgcacagctagccgggcacatgcagacgcaccttggcggggctgcgccgccagtccctggtgacgccccccagccacagcctacatgttag

SEQ ID NO: 33667 - DNA, 1482 bp, Artificial Sequence
  derived and/or modified sequence
atgtttcctgtgttcccctgcaccctgctggccccacccttccctgtgctgggcctggacagcagaggagtgggcggcctgatgaacagcttccccccaccccagggccacgcccagaaccccctgcaggtgggcgctgagctgcagagccgcttctttgccagccagggctgtgcccagagccccttccaggccgccccagcccccccacccaccccccaggccccagctgctgagcccctgcaggtggacctgctgcctgtgctggccgccgcccaggagagcgctgctgctgctgctgctgctgctgctgctgctgctgctgtggccgccgcccccccagccccagctgctgccagcacagtggacacagctgccctgaagcagcccccagcccctcctcctcctcctcctcctgtgtctgccccagctgctgaggccgcccccccagccagcgctgccaccatcgctgctgctgctgccacagctgtggtggcccccaccagcacagtggccgtggcccctgtggccagcgccctggagaagaagaccaagagcaagggcccctacatctgtgccctgtgtgccaaggagttcaagaatggctacaacctgcggagacatgaggccatccacactggagccaaggccggccgggtgcccagcggggccatgaagatgcccaccatggtgcccctgagcctgctgtctgtgccccagctgagcggggccggcggcggcggcggggaggccggggccggcggcggcgctgctgctgtggccgccggcggcgtggtgaccaccacagccagcggcaagaggatcaggaagaaccacgcctgtgagatgtgtgggaaggccttcagagatgtgtaccacctgaacagacacaagctgagccacagtgatgagaagccctaccagtgccctgtgtgccagcagcgcttcaagaggaaggacaggatgagctaccacgtgcgcagccatgatggagctgtgcacaagccctacaactgcagccactgtgggaagagcttcagcaggccagaccacctgaacagccacgtgcggcaggtgcacagcacagagcggcccttcaagtgtgagaagtgtgaggccgcctttgccaccaaggaccggctgcgggcccacacagtgagacatgaggagaaggtgccctgccacgtgtgtgggaagatgctgagcagcgcctacatcagtgaccacatgaaggtgcacagccagggcccccaccacgtgtgtgagctgtgcaacaagggcttcaccacagctgcctacctgcgcatccatgctgtgaaggaccacggcctgcaggcccccagggctgaccgcatcctgtgcaagctgtgcagcgtgcactgcaagaccccagcccagctggccggccacatgcagacccacctgggcggggccgcccctcctgtgcctggagatgccccccagccccagcccacctgctag

SEQ ID NO: 33668 - DNA, 1482 bp, Artificial Sequence
  derived and/or modified sequence
atgttccccgtgttcccctgcaccctgctggccccccccttccccgtcttgggcctggatagtcggggcgttgggggtctgatgaatagtttcccacccccacaaggtcacgcgcagaaccccctgcaggtgggagccgagctgcagagcaggttttttgcctctcaaggctgcgcccagtctcccttccaggctgctcctgccccccctcctacaccacaagcacctgctgccgagcctttgcaggtggatctcctgcccgtgctggcagctgctcaggagtctgccgcggccgcagcagctgcagcagccgctgcagctgcagtggccgccgctcccccagcacctgccgccgcatccacggtggacaccgcagccttgaagcagccccccgctcccccgccacccccacctcctgtgagcgcccctgctgccgaagccgcgcctcccgcgtctgccgccaccatcgctgcagccgctgctactgcagtggttgctcccacttccactgtggcagttgcgcccgtggcatccgctctggagaaaaaaacaaagtccaagggaccctacatttgcgcgctatgcgccaaggaattcaagaacgggtataaccttagacgccatgaagcgatacacactggcgcaaaagccggcagagtgcccagcggcgcgatgaagatgcctacaatggtgccgctgtccttgctgtccgtgccacagctgtctggagcaggaggcggaggcggcgaggccggtgctggaggcggcgcagcagcagtggcagccggcggtgtcgtcaccacaaccgcgtctgggaaacggattaggaaaaatcatgcttgcgagatgtgcggcaaagcctttcgggacgtataccacctaaacagacacaaactgtctcacagcgatgagaaaccataccaatgtcccgtgtgtcagcagcgcttcaagaggaaagatagaatgtcctatcacgttcgatctcacgatggagctgtacacaagccttataactgctcgcactgcggtaaatctttctcccggcccgatcaccttaacagtcacgtgagacaggtccattcaactgaacggccatttaaatgtgagaaatgcgaagccgcgtttgccacgaaagaccggttaagggctcatacagttcgtcacgaagagaaggtgccctgccacgtgtgtggcaagatgctctcgtccgcttacatttccgatcatatgaaggtacacagccagggtccacaccatgtctgtgagctgtgcaataaaggctttacgacagccgcttacctgcgaatccacgccgtcaaggaccacggactacaggctcccagagctgacagaatcctctgcaagctgtgctcagtacactgcaaaacccccgcacagctggccggacacatgcagactcacttggggggggcagctccacctgtgcccggcgatgcaccacagccccagcctacatgctag

SEQ ID NO: 33669 - DNA, 1482 bp, Artificial Sequence
  derived and/or modified sequence
atgtttcctgtgttcccgtgtactctgctggctcctccctttccagtcctagggctagatagcagaggcgttggaggcttaatgaactcctttcccccaccgcaggggcacgctcagaaccctctgcaggtcggtgctgaattacagtcaaggttcttcgcttcacagggctgcgcccagtccccttttcaagctgccccagcacctccgcctaccccacaggccccagccgctgaacccctgcaagtggatctcttacctgtgttggcagccgctcaggagagcgctgccgctgctgcagctgccgctgctgccgctgctgccgtggccgcagctcctcctgcccctgccgctgcctcgaccgttgacaccgcggctcttaaacagccgccagccccaccgccacctccccctccggtcagcgctcccgctgccgaggcagcacctcccgcaagcgccgctacaatcgcagcagctgctgccaccgcagtagtggctcccacctcaaccgtggccgtggcccctgtggctagcgcactcgagaagaagacgaaaagcaaggggccttacatctgcgccctgtgtgcaaaggagtttaaaaacggatacaacttgcgcaggcacgaagctattcacaccggcgcaaaggcaggcagggtccccagcggggctatgaaaatgcccacaatggtgcctctgtccttactttcagtccctcagttgtcgggagccggaggcggaggaggagaggccggagctggagggggagcagcggcagtggccgctgggggtgtagttaccaccacggccagtggtaagcgcatccgaaagaatcacgcgtgcgaaatgtgcggcaaagcgtttagggatgtgtaccacctgaatcgccacaaactcagtcattcagatgaaaagccgtatcagtgcccagtgtgtcaacaacggttcaaacggaaagatagaatgagctatcacgtacgcagccacgacggggctgtccataagccctacaactgtagccactgtggaaaatctttttcacgtccagatcaccttaatagccatgttcggcaggtgcacagcactgagaggccttttaaatgtgaaaaatgtgaggccgcttttgctaccaaagatagactgagggcccatacagtccggcacgaggagaaggttccctgccatgtctgcggcaagatgttatctagcgcatatatttccgaccatatgaaagtacactcccaggggccacaccacgtctgcgaattatgcaacaaagggtttactaccgcggcttacctgcgaatccatgccgtcaaagaccacgggctgcaggccccaagagccgatcgtatcctgtgcaaattgtgctcggtgcactgtaaaaccccagcacagctagctggacatatgcagacccacctcgggggagcagcacccccagtccctggagatgccccacaaccacaacctacctgctag

SEQ ID NO: 33670 - DNA, 2777 bp, Artificial Sequence
  derived and/or modified sequence
ttcctccctcccgccggccggggtgcgcgggcggcggggcggcccgcgggccatgcgttcggcgcggcccagcccggccggccgggggcggcgccccgagcccgggccccgcgcggcccgcgcccccggcccccgctgagccccgggggccccgctgcggccgaggccatgttcccggtgtttccttgcacgctgctggccccccccttccccgtgctgggcctggactcccggggggtgggcggcctcatgaactccttcccgccacctcagggtcacgcccagaaccccctgcaggtcggggctgagctccagtcccgcttctttgcctcccagggctgcgcccagagtccattccaggccgcgccggcgcccccgcccacgccccaggccccggcggccgagcccctccaggtggacttgctcccggtgctcgccgccgcccaggagtccgccgcggctgctgcggccgctgccgccgctgctgccgccgtcgctgccgcgcccccggcccctgccgccgcctctacggtggacacagcggccctgaagcagcctccggcgccccctccgccacccccgccagtgtcggcgcccgcggccgaggccgcgccccccgcctccgccgccactatcgccgcggcggcggccaccgccgtcgtagccccaacctcgacggtcgccgtggccccggtcgcgtctgccttggagaagaagacaaagagcaaggggccctacatctgcgctctgtgcgccaaggagttcaagaacggctacaatctccggaggcacgaagccatccacacgggagccaaggccggccgggtcccctcgggtgctatgaagatgccgaccatggtgcccctgagcctcctgagcgtgccccagctgagcggagccggcgggggagggggagaggcgggtgccggcggcggcgctgccgcagtggccgccggtggcgtggtgaccacgaccgcctcggggaagcgcatccggaagaaccatgcctgcgagatgtgtggcaaggccttccgcgacgtctaccacctgaaccgacacaagctgtcgcactcggacgagaagccctaccagtgcccggtgtgccagcagcgcttcaagcgcaaggaccgcatgagctaccacgtgcgctcacatgacggcgctgtgcacaagccctacaactgctcccactgtggcaagagcttctcccggccggatcacctcaacagtcacgtcagacaagtgcactcaacagaacggcccttcaaatgtgagaaatgtgaggcagctttcgccacgaaggatcggctgcgggcgcacacagtacgacacgaggagaaagtgccatgtcacgtgtgtggcaagatgctgagctcggcttatatttcggaccacatgaaggtgcacagccagggtcctcaccatgtctgtgagctctgcaacaaaggcttcaccacggcagcatacctgcgcatccacgcggtgaaggaccacgggctccaggccccgcgggctgaccgcatcctgtgcaagctgtgcagcgtgcactgcaagacccctgcccagctggccggccacatgcagacccatctggggggggccgccccccctgtcccgggagacgccccccagccacagcccacctgctgagggggacccccgcacccaccaggtactggtgaggtttgtccaatggcggcggcagcggcagcggcggcagcggcagcagcggcagcagtagcagcccctcccacagctgtgggctccctctcgggggcggagggggtgcctgtgagctctcagccacttccctcccaaccctggtgagctccaagttggttgcgggggagaggggagaatggagtagagtcccttggtacaagctcctctcccccctcttttcccaccaactcctatttccctaccaaccaaggagcctccagaaggaaaggaggaagaaatgttttcttaggggaattcgctaggttttaacgatttgtttctcctgctcctcttctgtcagacctgaccccacacaaacctgtcccctcggttgtgttgaagtcccctggacagtgggcaggggtggcagaggacacgagcagccactgcccgtaccccctctcctctctgtaagcccatgccctgtcttcccagggacttgtgagcctcttccctcgacggtcctcttctctccttccagtcctctccccctgctgtctgcagcccctccccggggagttggtgctttcttttccttttttttttttttccagggggagggaggagaggaaggagggggatcagagctgtcccaaagagggaaagcggtgaggtttgaggaggggcagaagcagggccggcaaaggttgtaccttcataaggtggtatggggggttggggtcaggccctgaacatcgtcctacttgagaatctgtcaggggaaaaagtcaaggggagcaggaggaagagccaggagggccagaggcagagaagagatggagtcttaggggccagggtgagcgaggggtccagggcctagaggtgcttcctgggggcgggggaatgcagccagtgtccccctcccctcttccaccccagctccagccctggtcttgtcttttcatccctcttccccacgacagaagaagttgtggccctggccatgtcatcgtgttcctgtgtcccctgcatgtaccccaccctccaccccttccttttgcgcggaccccattacaataaattttaaataaaatcctgtttctggctctggattg

SEQ ID NO: 33671 - protein, 103 aa, Artificial Sequence
  derived and/or modified sequence
MSGGLLKALRSDSYVELSQYRDQHFRGDNEEQEKLLKKSYAENAMRYINGTRLDDRIIRTDWDAGFKEGRQYGRGRSGGQVRDEYRQDYDAGRGGYGKLAQNQ

SEQ ID NO: 33672 - DNA, 312 bp, Artificial Sequence
  derived and/or modified sequence
atgagcggcggcctgctgaaggccctgagaagcgacagctacgtggagctgagccagtacagagaccagcacttcagaggcgacaacgaggagcaggagaagctgctgaagaagagctacgccgagaacgccatgagatacatcaacggcaccagactggacgacagaatcatcagaaccgactgggacgccggcttcaaggagggcagacagtacggcagaggcagaagcggcggccaggtgagagacgagtacagacaggactacgacgccggcagaggcggctacggcaagctggcccagaaccagtag

SEQ ID NO: 33673 - DNA, 312 bp, Artificial Sequence
  derived and/or modified sequence
atgagtggagggctgctcaaggccttgagatcagactcctacgtcgaactatcacagtacagggatcagcacttcagaggggataatgaagagcaggagaagctgctgaaaaagtcctacgctgagaatgcaatgagatacataaatggaactcgactggatgataggattatccggacagattgggatgctgggttcaaggagggcaggcaatatgggcgcggccgctctgggggtcaagtgcgagacgagtaccgccaagattatgacgccgggcgaggggggtatggaaagttggcccaaaaccagtag

SEQ ID NO: 33674 - DNA, 312 bp, Artificial Sequence
  derived and/or modified sequence
atgtctgggggcctgctgaaggccctgcggagtgacagctatgtggagctgagccagtacagagaccagcacttccggggggacaatgaggagcaggagaagctgctgaagaagagctatgcagaaaatgccatgagatacatcaatggcacccggctggatgaccgcatcatcagaacagactgggatgctggcttcaaggagggccggcagtatggccggggccgcagcggcggccaggtgagagatgagtaccggcaggactatgatgctggccggggcggctacggcaagctggcccagaaccagtag

SEQ ID NO: 33675 - DNA, 312 bp, Artificial Sequence
  derived and/or modified sequence
atgagcggcggcctgctgaaggccctgcggagcgacagctacgtggaactatcccagtaccgagaccagcacttccgcggggataacgaggaacaggagaagctgctgaaaaaatcatacgccgagaatgctatgcgctacatcaatggaaccagactggatgacaggattatccgcaccgattgggacgccggttttaaggaaggacgacaatatgggcgcgggagatccggcgggcaagttagagacgagtacaggcaggattatgacgccggccgggggggctatggaaagctcgctcagaatcagtag

SEQ ID NO: 33676 - DNA, 312 bp, Artificial Sequence
  derived and/or modified sequence
atgagcggcggactgttgaaagccctgcggtcagattcatatgtcgagttatctcagtaccgggatcaacacttcagaggagataatgaggagcaggaaaagctccttaagaagagctatgcggagaacgctatgcggtacatcaacgggacaagacttgatgatcggatcattagaacggactgggatgctggtttcaaggaagggaggcaatatggcagagggaggtctgggggacaggtgcgcgatgagtaccggcaggactatgacgctgggagaggaggttacggcaagctggcgcagaaccagtag

SEQ ID NO: 33677 - DNA, 1946 bp, Artificial Sequence
  derived and/or modified sequence
atcgcggacgcagcctcgtgccgggagtcgccgcattgtggtccgcttctctgcactatgtcgggtggcctcctgaaggcgctgcgcagcgactcctacgtggagctgagccagtaccgggaccagcacttccggggtgacaatgaagaacaagaaaaattactgaagaaaagctatgcggaaaacgccatgcggtacataaatgggacgcgtctggatgaccgaatcattcgcacagactgggacgcaggctttaaggagggcaggcaatacggccgtgggcgatctgggggccaggttcgggatgagtatcggcaggactacgatgctgggagaggaggctatggaaaactggcacagaaccagtgagtggtgagagctctgtcagtgacaaacactcctttggcctgttgaatttgctgaagaacatcacctaaagtctgcacacgagcccatttttaccaagatttgatcagtgtctttactgagctggaagcctctgaaagttattaaaggacagaatccaaaagaatgcctttaattcttgtctgagaatcttggccatgtgtcagattatcagaacaattttgttaccaggtcagaaattgtgttctttgacaacagattggatctgtaatgttgattagtctttagccataaccactacacttttagaaagacagaaaaatgtaagaatttgtttttaccataatgagtcttaagtaggttcatgatctacattggggcctgggattatttttttaattttaagtttgcatgagatagcctaataaatggaggtggggccaggcatggtggctcacacgtgtaatcccaacactttgggaggctgaggaggaaggatagcttgaggccaggagtttgagactagactgggcaacatagcaagaccccgtctctacaaagcacaacgaaaaacaacaaatggagttgtgctatgttgtattgctttgcacaaaattaggaacaggtgtttgacaattgaatttgttttctgtgaattctaacctctaaaggcatgcttagaggtcaaggaccttcctgtgtagttggtgcaaaagcaatctccacaggacagcactgcttccatgcttcatacatcaggaaatgaggccagaacttgagtatttactaacacgtttttcaaaagatgtcagtgttatacctaaagctaaaaaaaagcaagggtttgtcatagagggaacctctaaataatttcaggggtaggggagatgttgtcaataggaaatgggataaaatatcaagagacaatgaaaacactgccttgacatgaggaccagcaagtttattcttttcattttcagtgatgttgggaatggactgggttttaaaagggagcttgaagagggaatgtttgacagtcacagaaggttcctgcagcagatgcctcttttagccatttctcatttttttcctcaaattttacctactgaggctcaagccttcacagtgagctgatggtctctacagggaggggagtctagggaatttatttggtatttgtaaggcaagaggtgatttctctctaatatatctgagttattgctcatttaaaactgttaagtccagtataattttccctgatatgaaaaaatgtgcatttttttcacttagcaacaaagtaccttctaatttccaatagtccgtgaaagttggggctgaagtacctaagtgtgaatgtctctcccgttaaactgagtgtagaaatctgaatttttaaaagagctgtaactagttgtaagtgcttaggaagaaactttgcaaacatttaatgaggatacactgttcatttttaaaattccttcacactgtaatttaatgtgttttatattcttttgtagtaaaacaacataactcagatttctacaggagacagtggttttattcggattgtcttctgtaat

SEQ ID NO: 33678 - protein, 449 aa, Artificial Sequence
  derived and/or modified sequence
MAHVRHFRTLVSGFYFWEAALLLSLVATKETDSARSRSAPMSPSDFLDKLMGRTSGYDARIRPNFKGPPVNVTCNIFINSFGSIAETTMDYRVNIFLRQKWNDPRLAYSEYPDDSLDLDPSMLDSIWKPDLFFANEKGANFHEVTTDNKLLRIFKNGNVLYSIRLTLTLSCPMDLKNFPMDVQTCIMQLESFGYTMNDLIFEWQDEAPVQVAEGLTLPQFLLKEEKDLRYCTKHYNTGKFTCIEVRFHLERQMGYYLIQMYIPSLLIVILSWVSFWINMDAAPARVALGITTVLTMTTQSSGSRASLPKVSYVKAIDIWMAVCLLFVFSALLEYAAVNFVSRQHKELLRFRRKRKNKDDEVRESRFSFTAYGMGPCLQAKDGMTPKGPNHPVQVMPKSPDEMRKVFIDRAKKIDTISRACFPLAFLIFNIFYWVIYKILRHEDIHQQQD

SEQ ID NO: 33679 - DNA, 1350 bp, Artificial Sequence
  derived and/or modified sequence
atggctcacgtgcgccatttcaggacccttgtgtccgggttctacttttgggaagccgcgttgttactgagcctggtcgcaactaaggagacagattccgcccgttcacggtcagccccaatgtccccatctgattttctcgataagttaatgggccgtacatcgggttatgatgctcgtattcggccaaacttcaagggacctcccgttaacgtcacatgcaatatttttatcaactctttcggcagcatagctgagaccacaatggattatcgagtcaatatcttcctgagacaaaaatggaatgacccccgcttggcgtatagcgaatatccggacgatagccttgatctagatccgtccatgttagactcaatttggaagcccgatttgttcttcgcaaacgagaagggcgcaaatttccatgaggtcaccaccgacaataagctgctcagaatctttaagaatggcaatgttctgtatagtattcgattgacattgactttaagttgtcctatggatttaaagaacttccctatggacgtgcagacatgtataatgcaactcgaatccttcggctatacaatgaatgacctgatttttgagtggcaagacgaagcgccagtgcaggtcgccgagggcctgacgctgccacagtttctactgaaggaggaaaaggacctccgctattgcacaaagcattacaacaccggtaagttcacatgtatcgaagttagatttcacctggaacgccaaatgggctactatctaattcagatgtatatcccttcactcctgattgttattctgtcatgggtgtcgttttggattaatatggatgccgctccagcccgcgtagctctcggcatcacgacagtattgactatgacaacacagagtagcggatcccgagcttccctgcctaaggtgtcctatgtaaaagccatagatatctggatggcagtgtgcctattgttcgtgttcagcgcacttctggaatatgctgcagtgaacttcgtgtcacgacaacacaaagaattattacgcttcagacgcaagaggaagaataaggatgacgaagtgagagagtctagattctccttcactgcctatggcatgggtccctgcctccaggcaaaggacggcatgacgcctaagggtcctaaccaccctgttcaagtcatgccaaagagtcccgatgagatgcgcaaagtgttcatcgatagagccaaaaaaatcgacactatctctagggcttgctttccattggcctttcttatctttaatattttttattgggtaatttataagatacttaggcatgaggatattcatcaacagcaggactag

SEQ ID NO: 33680 - DNA, 3065 bp, Artificial Sequence
  derived and/or modified sequence
attccggcgggcggcgcttggagcaggtggagaggcgtcctctttccggctgttgctgctcttcttcctccaatcctgggtctcagtcagggaagaacgaacattcttcctttgctgctggagctttagagaactgttgcccagcacctaggcacttcagacatttcatctcactcatttttgtaatttcactgtaaaaatcacctgcacatttataacactgtgactctccacttctgctcaatgctgagaaggggtccgcatactgcggggagctgtctaaggtgctgaagcttcccaagcatcagtctacaccaacaccatgcggggttagattgtacattttcattctgtctttctggttccccatgccttggataagactattttcaggatcgtgaatatctctccgtatcatggcccacgtgagacactttcggacattagtttcgggattttacttctgggaagcagcactgttactcagtttggttgccacaaaggaaacagacagtgcaagatctcgaagtgctccaatgtcaccttctgattttctggataaattaatgggcaggacatcaggatatgatgcaagaatcagacccaattttaaaggccctccagttaatgtcacatgcaacatattcatcaacagctttggctctatcgcagagacgaccatggattacagagtgaatatctttcttcgtcagaaatggaatgatccccgcctcgcgtacagtgaatatcctgacgactctttagacctcgacccctccatgttggactccatttggaaacctgatttgttctttgccaatgaaaagggtgccaactttcatgaagtcactacagacaacaaattgctaagaattttcaaaaatggaaatgttctttattcaataagattaacattaacactttcctgtccaatggatctcaagaattttcccatggatgtacaaacatgtataatgcaactggaaagctttgggtacacaatgaatgatctcatttttgaatggcaagatgaggcacccgtacaagtggcagaaggactcactttgccccagtttctgttgaaagaagaaaaagatttacgatactgcactaaacattacaatacaggaaagtttacgtgtatagaagtgcgattccatctggagcgacaaatgggatactatctgatccagatgtacattcccagtctcctgattgttattctatcctgggtttcattctggatcaacatggatgcagcaccggccagggtagctctggggataaccactgtgctaacgatgactacacagagttcaggatcacgagcttccttgccaaaagtttcatatgtcaaagctattgatatttggatggcagtatgcctcctttttgtgttttcagcacttctggagtatgcagctgtaaattttgtatcaagacaacacaaagaacttctgagatttcgacgaaagagaaagaataaggatgatgaggtaagggaaagccgattcagcttcacagcctatggaatgggaccatgtctacaagcaaaggatggcatgactccaaagggccccaaccaccctgtccaggtaatgccaaaaagtcctgatgaaatgaggaaggtctttatcgaccgggccaagaagattgataccatctcccgagcctgcttcccattagcttttttgatttttaatattttctactgggttatctataaaattcttaggcatgaggatattcatcagcagcaagattaagtctctgggggcatgcaaatgcaaatggtcaattcagaagaaagtgtctctgccataggtgtgtatgtgtatatgtgtgcgtgtggtatacaaatgatgaccattgtattaaaatggcatatggaaaagctttgtattttggttagctatgcaaagtcatgagaaagatgagattcttttaatgaatataaaatatttattaggggattctatttcatattaattccaggtgatttgttttttcacagtaaaccatgtaagtggaagctttactgccaatgtgtttatatgttatataatatctcataatagtagacatgaaaactactttgaaattccttgatttgtaattcaatgctattaaatcatacaaaagcaaattttgcacagtaaaccaatagtttgagatttaaaactattttcttatagtatagttacaaaatgggaaaataattagttacagtgggaaattcactcatattaatggaggattgtacatataaatactatttaaacaacatatgtaattttgaaaatttttaaataagagcattaaaagactttaatgatttggaatactaaatttaattgtttagaatattaagttttcctctgtgcaaatttaaaacaaataacaagagatcgtgttacagtcacaatctacttttcttaaactttgtatctctaggaacgaaggtggaaatacgggaaacaactttgtttttaaataagtattatagctatgtatttttagttattgccaaacattgaacaattcaagccagcacccttgtttttgttagacttttaatagctacttaactgtatgtgattgtgtttaataatttgatataacaggacaaaattcagtaagacttttatattttagtttagaatgtgactttaaaattcaatgggattaaagtatttacattttgataaaaatgaatacaatgaaaacaaaatggattcatggaagattttttaataaaaaccattttcccatcaatgttttatgggtctcaactcctatctccaaatataagtagggaaagttttaattttaaatgatataagtaagtcatttctataaagtgaggactctttttctatttctgaattaatgatttcaaaatctaagccattcgcaagatgtgaataattttaaatgaaatttttacataaaatttttcaatgaccccatgggattacttcaacaaaaacagagcattagtaacttgttttttgcagtgtaattgggtgcaaatgtatgatagagttcttggtaaacagaaccag

SEQ ID NO: 33681 - DNA, 1350 bp, Artificial Sequence
  derived and/or modified sequence
atggcccacgtgcgccacttccgcaccctggtgtctggcttctacttctgggaggccgccctgctgctgagcctggtggccaccaaggagacagattctgcccggagccgcagcgcccccatgagccccagcgacttcctggacaagctgatgggccgcaccagcggctatgatgcccgcatccggcccaacttcaagggcccccctgtgaatgtgacctgcaacatcttcatcaacagctttggcagcattgctgagaccaccatggactacagagtgaacatcttcctgcggcagaagtggaatgacccccggctggcctacagcgagtacccagatgacagcctggacctggaccccagcatgctggacagcatctggaagccagacctcttctttgccaatgaaaaaggagccaacttccacgaggtgaccacagacaacaagctgctgcgcatcttcaagaatggaaatgtgctgtacagcatccggctgaccctgaccctgagctgccccatggacctgaagaacttccccatggatgtgcagacctgcatcatgcagctggagagctttggctacaccatgaatgacctgatctttgagtggcaggatgaggcccctgtgcaggtggccgagggcctgaccctgccccagttcctgctgaaggaggagaaggacctgcgctactgcaccaagcactacaacacaggcaagttcacctgcatcgaggtgcgcttccacctggagcggcagatgggctactacctgatccagatgtacatccccagcctgctgattgtcatcctgtcctgggtgtccttctggatcaacatggatgctgccccagcccgggtggccctgggcatcaccaccgtgctgaccatgaccacccagagcagcggcagccgggccagcctgcccaaggtgtcctatgtgaaggccatcgacatctggatggctgtgtgcctgctgtttgtgttttctgccctgctggagtatgctgctgtgaactttgtgtcccggcagcacaaggagctgctgcgcttccggaggaagaggaagaacaaggatgatgaggtgcgggagagccgcttctccttcaccgcctacggcatgggcccctgcctgcaggccaaggatggcatgacccccaagggccccaaccaccctgtgcaggtgatgcccaagagcccagatgagatgaggaaggtgttcatcgaccgggccaagaagattgacaccatcagccgggcctgcttccccctggccttcctgatcttcaacatcttctactgggtgatctacaagatcctgcggcatgaggacatccaccagcagcaggactag

SEQ ID NO: 33682 - DNA, 1350 bp, Artificial Sequence
  derived and/or modified sequence
atggcccacgtgcggcacttccggaccctggtgagcggcttctacttttgggaagcagcgctgctgttatcactcgtggcaaccaaggaaaccgactccgcacggagtcgcagcgcccccatgtccccctccgatttccttgataaattaatggggcgcacttctgggtatgacgctcggattaggcccaattttaaagggccccctgttaacgtaacttgcaacatatttattaatagcttcggctcaatcgccgagacaacaatggactaccgggtcaacatcttcctgaggcagaagtggaatgaccccaggctcgcatatagtgaatatccagacgactcattggatctcgatcctagtatgctggattccatatggaaacccgacctgttcttcgccaacgagaaaggcgctaacttccacgaggttacaacagataataaattgctcaggatattcaagaacggaaatgtgctgtacagtatcagacttaccctgacgcttagttgccccatggacctgaagaacttccccatggacgtgcagacttgtattatgcagctggaatcttttggctatactatgaacgacttgatcttcgagtggcaggacgaagctcccgtgcaggtcgccgaaggcctgacgttgccgcagtttctgcttaaggaagaaaaagacctgcgttattgtactaagcactataacacaggaaagttcacatgcatcgaggtgcgttttcatctggaacgccagatggggtactatctgatccaaatgtatatcccttccctactgatcgtaatcctgagttgggtgtccttctggattaacatggacgctgccccggccagagtcgccctcggcatcacgactgtgctcactatgactactcagtcctccggatctagggcaagcctccccaaggtcagttatgtaaaggctatagatatatggatggcagtttgcctgctgttcgtgttttcagctctgctcgaatatgccgcagtgaacttcgtgtctcggcagcacaaagagctgttaagatttcggcgtaaaagaaagaacaaagatgacgaagtccgggaaagcaggttcagctttacggcttacggcatgggcccttgcttacaagccaaagatggcatgacccccaaaggccccaatcaccctgtgcaagttatgcctaagtcccccgacgaaatgcggaaggttttcatagatagggcaaagaagatcgacacaattagccgcgcttgtttccctctcgcctttttaattttcaatatattttattgggtcatctataagattctgagacatgaggacattcaccagcagcaggattag

SEQ ID NO: 33683 - DNA, 1350 bp, Artificial Sequence
  derived and/or modified sequence
atggctcatgtgcgtcatttccggactcttgtgagtgggttctatttctgggaggcagcactgctgttatctttagtggcaacaaaagagacagattccgcccgttctaggagtgcccctatgagcccgagtgacttcttagacaagctgatggggcgtacatcaggatatgacgcgaggatacgacctaactttaaaggtcctccagtcaatgtcacctgcaacatctttatcaactccttcggttctatcgcagagaccaccatggactatagagtgaatatcttcctccgccagaaatggaatgatcccagactggcatacagtgagtatccggatgattcccttgatctcgacccatcaatgctggactccatctggaaaccagatctcttctttgccaatgagaaaggcgctaactttcatgaagtaacaactgataataagctgctgcgcattttcaagaacggcaacgtgctctactccatcagactcaccctcacgctgtcatgccccatggatttaaaaaactttccaatggacgtgcaaacgtgcatcatgcaactggagagcttcggctacacgatgaacgacttgatctttgaatggcaggacgaggcccctgtccaggtggcggaaggactcacgctgccacagttccttctgaaggaggagaaagatttgaggtactgcacaaaacattacaatactgggaaattcacttgcatcgaggtgagatttcatcttgaaagacagatggggtactaccttattcaaatgtatattcctagcctgctgattgtcatcttatcttgggtctctttttggatcaacatggacgcagctccggcacgggtggccctgggcattaccacagtgttgacgatgacaacacagtctagcggatctcgagctagtttgccaaaagtgtcctacgtgaaggccattgacatttggatggccgtttgccttctgttcgtctttagcgccctattggaatacgccgcagtgaactttgtatcccgccaacacaaagagttacttcggttcaggaggaagcgaaaaaacaaggatgacgaggttagggaaagtcgattttcttttacagcctatggaatggggccatgcctccaggctaaggacgggatgaccccgaaagggcctaaccaccctgtccaggtgatgcccaaaagtccggacgaaatgcgcaaggtattcattgaccgggcaaaaaaaatcgacacaatatcccgggcatgctttcccttggccttcctaatatttaacattttctactgggttatctataagatactccgccacgaggatatccatcaacaacaagattag

SEQ ID NO: 33684 - DNA, 1350 bp, Artificial Sequence
  derived and/or modified sequence
atggcccacgtgagacacttcagaaccctggtgagcggcttctacttctgggaggccgccctgctgctgagcctggtggccaccaaggagaccgacagcgccagaagcagaagcgcccccatgagccccagcgacttcctggacaagctgatgggcagaaccagcggctacgacgccagaatcagacccaacttcaagggcccccccgtgaacgtgacctgcaacatcttcatcaacagcttcggcagcatcgccgagaccaccatggactacagagtgaacatcttcctgagacagaagtggaacgaccccagactggcctacagcgagtaccccgacgacagcctggacctggaccccagcatgctggacagcatctggaagcccgacctgttcttcgccaacgagaagggcgccaacttccacgaggtgaccaccgacaacaagctgctgagaatcttcaagaacggcaacgtgctgtacagcatcagactgaccctgaccctgagctgccccatggacctgaagaacttccccatggacgtgcagacctgcatcatgcagctggagagcttcggctacaccatgaacgacctgatcttcgagtggcaggacgaggcccccgtgcaggtggccgagggcctgaccctgccccagttcctgctgaaggaggagaaggacctgagatactgcaccaagcactacaacaccggcaagttcacctgcatcgaggtgagattccacctggagagacagatgggctactacctgatccagatgtacatccccagcctgctgatcgtgatcctgagctgggtgagcttctggatcaacatggacgccgcccccgccagagtggccctgggcatcaccaccgtgctgaccatgaccacccagagcagcggcagcagagccagcctgcccaaggtgagctacgtgaaggccatcgacatctggatggccgtgtgcctgctgttcgtgttcagcgccctgctggagtacgccgccgtgaacttcgtgagcagacagcacaaggagctgctgagattcagaagaaagagaaagaacaaggacgacgaggtgagagagagcagattcagcttcaccgcctacggcatgggcccctgcctgcaggccaaggacggcatgacccccaagggccccaaccaccccgtgcaggtgatgcccaagagccccgacgagatgagaaaggtgttcatcgacagagccaagaagatcgacaccatcagcagagcctgcttccccctggccttcctgatcttcaacatcttctactgggtgatctacaagatcctgagacacgaggacatccaccagcagcaggactag

SEQ ID NO: 33685 - protein, 1623 aa, Artificial Sequence
  derived and/or modified sequence
MPRPGTSGRRPLLLVLLLPLFAAATSAASPSPSPSQVVEVPGVPSRPASVAVCRCCPGQTSRRSRCIRAFCRVRSCQPKKCAGPQRCLNPVPAVPSPSPSVRKRQVSLNWQPLTLQEARALLKRRRPRGPGGRGLLRRRPPQRAPAGKAPVLCPLICHNGGVCVKPDRCLCPPDFAGKFCQLHSSGARPPAPAVPGLTRSVYTMPLANHRDDEHGVASMVSVHVEHPQEASVVVHQVERVSGPWEEADAEAVARAEAAARAEAAAPYTVLAQSAPREDGYSDASGFGYCFRELRGGECASPLPGLRTQEVCCRGAGLAWGVHDCQLCSERLGNSERVSAPDGPCPTGFERVNGSCEDVDECATGGRCQHGECANTRGGYTCVCPDGFLLDSSRSSCISQHVISEAKGPCFRVLRDGGCSLPILRNITKQICCCSRVGKAWGRGCQLCPPFGSEGFREICPAGPGYHYSASDLRYNTRPLGQEPPRVSLSQPRTLPATSRPSAGFLPTHRLEPRPEPRPDPRPGPELPLPSIPAWTGPEIPESGPSSGMCQRNPQVCGPGRCISRPSGYTCACDSGFRLSPQGTRCIDVDECRRVPPPCAPGRCENSPGSFRCVCGPGFRAGPRAAECLDVDECHRVPPPCDLGRCENTPGSFLCVCPAGYQAAPHGASCQDVDECTQSPGLCGRGACKNLPGSFRCVCPAGFRGSACEEDVDECAQEPPPCGPGRCDNTAGSFHCACPAGFRSRGPGAPCQDVDECARSPPPCTYGRCENTEGSFQCVCPMGFQPNTAGSECEDVDECENHLACPGQECVNSPGSFQCRTCPSGHHLHRGRCTDVDECSSGAPPCGPHGHCTNTEGSFRCSCAPGYRAPSGRPGPCADVNECLEGDFCFPHGECLNTDGSFACTCAPGYRPGPRGASCLDVDECSEEDLCQSGICTNTDGSFECICPPGHRAGPDLASCLDVDECRERGPALCGSQRCENSPGSYRCVRDCDPGYHAGPEGTCDDVDECQEYGPEICGAQRCENTPGSYRCTPACDPGYQPTPGGGCQDVDECRNRSFCGAHAVCQNLPGSFQCLCDQYEGARDGRHCVDVNECETLQGVCGAALCENVEGSFLCVCPNSPEEFDPMTGRCVPPRTSAGTFPGSQPQAPASPVLPARPPPPPLPRRPSTPRQGPVGSGRRECYFDTAAPDACDNILARNVTWQECCCTVGEGWGSGCRIQQCPGTETAEYQSLCPHGRGYLAPSGDLSLRRDVDECQLFRDQVCKSGVCVNTAPGYSCYCSNGYYYHTQRLECIDNDECADEEPACEGGRCVNTVGSYHCTCEPPLVLDGSQRRCVSNESQSLDDNLGVCWQEVGADLVCSHPRLDRQATYTECCCLYGEAWGMDCALCPAQDSDDFEALCNVLRPPAYSPPRPGGFGLPYEYGPDLGPPYQGLPYGPELYPPPALPYDPYPPPPGPFARREAPYGAPRFDMPDFEDDGGPYGESEAPAPPGPGTRWPYRSRDTRRSFPEPEEPPEGGSYAGSLAEPYEELEAEECGILDGCTNGRCVRVPEGFTCRCFDGYRLDMTRMACVDINECDEAEAASPLCVNARCLNTDGSFRCICRPGFAPTHQPHHCAPARPRA

SEQ ID NO: 33686 - DNA, 4872 bp, Artificial Sequence
  derived and/or modified sequence
atgccaaggcccggtacttcaggacgcagacccctgctgcttgttctactactgcctctgtttgccgccgccacttcagctgcgagcccctctcctagcccttctcaggtcgtggaagtcccaggggtaccatccagacctgcctctgtcgcagtttgtaggtgctgccctggccaaactagccggcggagccggtgcattcgcgccttttgcagggtgcgctcctgtcagccaaagaaatgcgctggcccccagcggtgcctgaaccccgtcccggcagtaccttcacctagtccgagtgtgcggaagaggcaggtctcactcaattggcagccgctgacactccaggaagctcgagctctcctgaagaggcgacgtccacgcggccccggcggccgagggctcctgcggcgcaggccacctcaacgggcccctgcggggaaggcaccagtactttgccccctgatttgccacaatggaggagtctgcgtgaagcccgacaggtgcctttgccccccggatttcgctggcaaattttgccaactgcacagctctggcgcccggccacccgcccccgcagtgcccggtctgactcgctccgtgtacacgatgcctctagctaatcatcgcgatgacgagcatggggtggccagcatggtgtctgtccacgtcgagcacccacaagaagctagtgttgtcgtccaccaggtagagcgcgtgtctggaccgtgggaagaggctgacgctgaggccgtggccagagctgaggcggcagcaagagccgaagcagcagcaccatataccgttctggctcagtctgccccaagggaagacggctacagcgatgcttccggcttcggatattgttttagagagttaagaggaggtgagtgtgcctcccccctcccaggtttgcggacccaggaggtgtgttgccgaggagcgggcctggcatggggcgttcacgactgccagctatgctctgagcggttaggaaactcagagcgggtcagcgcccctgacggcccctgccccacaggcttcgagagggttaatggttcttgcgaagacgtcgatgaatgtgcaactgggggaagatgccagcacggggaatgcgcgaatactcgagggggttacacatgcgtgtgtcccgatggatttttacttgactccagccgctcctcatgcataagccagcacgtgatcagtgaagcaaaaggcccttgttttcgagtgctgcgcgacggcggctgcagtctgccgatcttgcgcaatattacaaagcagatttgttgttgtagtagggtgggaaaagcatgggggcgaggctgtcagctgtgtcccccgttcggaagcgagggcttccgggaaatatgtccagcagggcccggctaccactacagtgctagcgatcttcggtataatacccgtccattaggacaggagccaccccgcgtgtccctgtcacaaccacgtacccttcccgccaccagtcggccttctgccggcttcctgccaacccatcgcctggagcctcggcctgaacctcgccccgaccccaggccggggcctgaacttccgttgccgtccattcctgcctggacaggacccgaaatccctgagtccgggccgagcagcggcatgtgtcaacgaaacccacaggtttgcggccctggccggtgtataagtagacctagcgggtacacttgcgcctgtgattccggcttcagattgtctccccaggggacacgctgcattgatgtcgatgagtgcaggcgggttccccccccctgcgctcctggaagatgcgaaaattctccagggtcctttcggtgcgtctgcggccccggattccgggccggaccccgcgcagctgagtgccttgacgtagatgaatgccatagggtcccacctccttgtgacttgggacgctgtgaaaatacccccggctcattcctgtgtgtgtgtccagctggttaccaagccgcaccgcacggtgcctcatgccaagacgtcgacgaatgcacgcaaagtccaggcctttgtggacgcggggcctgtaaaaaccttcccggatctttcagatgcgtgtgcccagccggattcaggggatctgcttgcgaggaagacgttgacgagtgcgctcaggagcctcccccgtgtggtcctggcagatgtgataacaccgccggtagcttccactgcgcgtgtcccgcaggcttcaggagtcgcggacccggggccccgtgtcaagacgtggacgagtgcgccaggtctcccccaccctgcacctacggtcggtgtgagaacactgaaggcagtttccaatgcgtgtgtcctatgggcttccaaccgaacacagccggcagcgagtgtgaggacgttgacgagtgcgaaaatcatctcgcctgtccaggccaggagtgtgtcaactccccagggagcttccagtgcaggacctgccctagtgggcatcatctgcacagggggcgctgcacagatgtcgacgagtgcagctctggggctcccccgtgcggacctcatggacattgcaccaataccgagggttcatttcgttgctcctgtgctccgggttacagagccccgtcaggacggccagggccttgcgcagacgtgaacgagtgtcttgagggagatttttgttttccccacggtgagtgtctaaatacagatggttctttcgcctgcacatgcgcacctggctacagaccaggcccacgtggagcgtcttgtctggatgtagatgagtgttccgaggaagatctgtgccagtcagggatttgcaccaatactgatgggtccttcgaatgcatttgcccccccgggcaccgagccggccccgacttggcgtcgtgcctggacgtggatgagtgcagagagagaggtcccgccctttgtgggtcccagaggtgcgagaacagtcccgggtcatatcgatgcgtccgtgattgtgacccaggctaccacgcaggccctgaaggcacgtgcgacgatgtagatgaatgccaggagtatggaccggagatttgtggtgcccagaggtgcgaaaacaccccgggctcctacagatgtaccccagcttgcgaccccgggtaccagcctacgccggggggtggatgccaagatgtcgacgagtgtcgtaataggagtttttgcggtgctcatgcagtatgtcagaatttgccagggagcttccagtgtctctgcgaccagtatgaaggggcccgcgacggccgccattgcgtagacgtgaacgagtgcgaaaccctgcagggggtctgcggggcagcattgtgcgagaacgtggaggggagttttctgtgcgtctgccctaactcccccgaagagttcgaccctatgactgggagatgcgtgccacccaggacgtcagctgggacatttccaggatctcaaccacaggccccagcctccccagtgctccccgctcgaccgcctccacccccactaccgaggagacctagcacgccccggcagggccctgttggaagcggccgcagggagtgctattttgatacagccgctccagacgcctgtgataacattttggcccggaacgtgacctggcaggagtgttgttgcaccgtcggagaaggctggggctcaggctgccggatacaacagtgccctggcaccgagaccgccgagtaccaatctctctgccctcatggacgcggctacctggcaccaagtggagacctatctcttcggagggatgtggacgagtgccagctgttcagggatcaggtatgcaagagcggcgtctgcgtgaacaccgctccggggtactcgtgctactgcagtaacggttactattaccacacacaaagattggaatgtatagacaatgatgagtgtgccgacgaggaaccagcatgtgaggggggacgatgtgtgaacactgttggctcgtaccactgcacctgcgagcctcccttggtgctcgatggttcacagcgccgctgcgtgtccaatgagtctcaatctttagatgacaacctgggtgtgtgctggcaggaggtgggtgccgacttggtgtgtagccacccgcgactggataggcaagcgacttatactgaatgctgttgcctgtacggagaagcctggggcatggattgcgcactgtgtcctgcacaggactctgacgactttgaggctttgtgcaacgtgctccgccctccagcatactcccctcctaggccgggaggtttcggcctcccttacgaatatgggcctgacctgggcccgccctaccagggattgccttacggacctgaattgtatccaccccccgctctgccttatgacccgtatccgccaccccccggtccattcgccagacgagaagccccttatggggccccgcgcttcgacatgccagactttgaggacgatggcgggccttatggcgagagcgaggcccctgctccgcctggtcccggcacgagatggccttaccgatctcgcgacacacgcaggtccttcccggagcccgaagaaccaccggaagggggatcgtacgccggaagcctggccgaaccatacgaagagctcgaagctgaagagtgtgggattctagatgggtgcaccaacggacgatgcgtgcgcgtgcctgaaggattcacttgtcgatgttttgacggctatagacttgacatgaccagaatggcttgtgtggacattaatgaatgcgatgaggctgaagcagcaagccctctatgtgtgaatgctcggtgtctgaatactgacggctctttccgctgtatatgcaggcctggattcgcacccacgcaccaaccccaccactgcgctcccgccagaccccgggcatag

SEQ ID NO: 33687 - DNA, 5142 bp, Artificial Sequence
  derived and/or modified sequence
atgccgaggcctggcaccagcggccgccgccccctcctgctggtgctgttgctgccgctcttcgcagccgccacctccgccgccagccccagccccagccccagccaggtcgtcgaggtcccgggggtccccagccgcccggccagcgttgctgtttgtcgctgctgcccgggccagacgtctaggaggagccgctgcatccgagccttctgcagggtccgaagctgccagcccaaaaagtgtgcaggcccccagcggtgcctgaacccagtgcctgcagtgcccagtcccagccccagcgtgaggaagagacaggtgtccctcaactggcagccactgacgctccaggaggccagagctctactgaagcggcggcggccccgggggccagggggccggggactactgagaaggaggcccccacagcgtgcccccgctggcaaggccccggtcctgtgtcccttgatctgtcacaatggcggtgtgtgcgtgaagcctgaccgctgcctctgtcccccggacttcgctggcaagttctgccagttgcactcctcgggcgcccggcccccggccccggctgtaccaggcctcacccgctccgtgtacactatgccactggccaaccaccgcgacgacgagcacggcgtggcatctatggtgagcgtccacgtggagcacccgcaggaggcgtcggtggtggtgcaccaggtggagcgtgtgtctggcccttgggaggaggcggacgctgaggcggtggcgcgggcggaagcggcggcgcgggcggaggcggcagcgccctacacggtgttggcacagagcgcgccgcgggaggacggctactcagatgcctcgggcttcggttactgctttcgggagctgcgcggaggcgaatgcgcgtccccgctgcccgggctccggacgcaggaggtctgctgccgaggggccggcttggcctggggcgttcacgactgtcagctgtgctccgagcgcctggggaactccgaaagagtgagcgccccagatggaccttgtccaaccggctttgaaagagttaatgggtcctgcgaagatgtggatgagtgcgcgactggcgggcgctgccagcacggcgagtgtgcaaacacgcgcggcgggtacacgtgtgtgtgccccgacggctttctgctcgactcgtcccgcagcagctgcatctcccaacacgtgatctcagaggccaaagggccctgcttccgcgtgctccgcgacggcggctgttcgctgcccattctgcggaacatcactaaacagatctgctgctgcagccgcgtaggcaaggcctggggccggggctgccagctctgcccacccttcggctcagagggtttccgggagatctgcccggctggtcctggttaccactactcggcctccgacctccgctacaacaccagacccctgggccaggagccaccccgagtgtcactcagccagcctcgtaccctgccagccacctctcggccatctgcaggctttctgcccacccatcgcctggagccccggcctgaaccccggcccgatccccggcccggccctgagcttcccttgcccagcatccctgcctggactggtcctgagattcctgaatcaggtccctcctccggcatgtgtcagcgcaacccccaggtctgcggcccaggacgctgcatttcccggcccagcggctacacctgcgcttgcgactctggcttccggctcagcccccagggcacccgatgcattgatgtggacgaatgtcgccgcgtgcccccgccctgtgctcccgggcgctgcgagaactcaccaggcagcttccgctgcgtgtgcggcccgggcttccgagccggcccacgggctgcggaatgcctggatgtggacgagtgccaccgcgtgccgccgccgtgtgacctcgggcgctgcgagaacacgccaggcagcttcctgtgcgtgtgccccgccgggtaccaggctgcaccgcacggagccagctgccaggatgtggatgaatgcacccagagcccaggcctgtgtggccgaggggcctgcaagaacctgcctggctctttccgctgtgtttgcccggctggcttccggggctcggcgtgtgaagaggatgtggatgagtgtgcccaggagccgccgccctgtgggcccggccgctgtgacaacacggcaggctcctttcactgtgcctgccctgctggcttccgctcccgagggcccggggccccctgccaagatgtggatgagtgtgcccgaagccccccaccctgcacctacggccggtgtgagaacacagaaggcagcttccagtgtgtctgccccatgggcttccaacccaacactgctggctccgagtgcgaggatgtggatgagtgtgagaaccacctcgcatgccctgggcaggagtgtgtgaactcgcccggctccttccagtgcaggacctgtccttctggccaccacctgcaccgtggcagatgcactgatgtggacgaatgcagttcgggtgcccctccctgtggtccccacggccactgcactaacaccgaaggctccttccgctgcagctgcgcgccaggctaccgggcgccgtcgggtcggcccgggccctgcgcagacgtgaacgagtgcctggagggcgatttctgcttccctcacggcgagtgcctcaacactgacggctcctttgcctgtacttgtgcccctggctaccgacccggaccccgcggagcctcttgcctcgacgttgacgagtgcagcgaggaggacctttgccagagcggcatctgtaccaacaccgacggctccttcgagtgcatctgtcctccgggacaccgcgctggcccggacctcgcctcctgcctcgacgtggacgaatgtcgcgagcgaggcccagccctgtgcgggtcgcagcgctgtgagaactctcccggctcctaccgctgtgtccgggactgcgatcctgggtaccacgcgggccccgagggcacctgtgacgatgtggatgagtgccaagaatatggtcccgagatttgtggagcccagcgttgtgagaacacccctggctcctaccgctgcacaccagcctgtgaccctggctatcagcccacgccagggggcggatgccaggatgtggacgaatgccggaaccggtccttctgcggtgcccacgccgtgtgccagaacctgcccggctccttccagtgcctctgtgaccagtacgagggggcacgggatgggcgtcactgcgtggatgtgaacgagtgtgaaacactacagggtgtatgtggagctgccctgtgtgaaaatgtcgaaggctccttcctctgtgtctgccccaacagcccggaagagtttgaccccatgactggacgctgtgttcccccacgaacttctgctggcacgttcccaggctcgcagccccaggcacctgctagccccgttctgcccgccaggccacctccgccacccctgccccgccgacccagcacacctaggcagggccctgtggggagtgggcgccgggagtgctactttgacacagcggccccggatgcatgtgacaacatcctggctcggaatgtgacatggcaggagtgctgctgtactgtgggtgagggctggggcagcggctgccgcatccagcagtgcccgggcaccgagacagctgagtaccagtcattgtgccctcacggccggggctacctggcgcccagtggagacctgagcctccggagagacgtggacgaatgtcagctcttccgagaccaggtgtgcaagagtggcgtgtgtgtgaacacggccccgggctactcatgctattgcagcaacggctactactaccacacacagcggctggagtgcatcgacaatgacgagtgcgccgatgaggaaccggcctgtgagggcggccgctgtgtcaacactgtgggctcttatcactgtacctgcgagcccccactggtgctggatggctcgcagcgccgctgcgtctccaacgagagccagagcctcgatgacaatctgggagtgtgctggcaggaagtgggggctgacctcgtgtgcagccaccctcggctggaccgtcaggccacctacacagagtgctgctgcctgtatggagaggcctggggcatggactgcgccctctgccctgcgcaggactcagatgacttcgaggccctgtgcaatgtgctacgcccccccgcatatagccccccgcgaccaggtggctttggactcccctacgagtacggcccagacttaggtccaccttaccagggcctcccatatgggcctgagttgtacccaccacctgcgctaccctacgacccctacccaccgccacctgggcccttcgcccgccgggaggctccttatggggcaccccgcttcgacatgccagactttgaggacgatggtggcccctatggcgaatctgaggctcctgcgccacctggcccgggcacccgctggccctatcggtcccgggacacccgccgctccttcccagagcccgaggagcctcctgaaggtggaagctatgctggttccctggctgagccctacgaggagctggaggcggaggagtgcgggatcctggacggctgcaccaacggccgctgcgtgcgcgtccccgaaggcttcacctgccgttgcttcgacggctaccgcctggacatgacccgcatggcctgcgttgacatcaacgagtgtgatgaggccgaggctgcctccccgctgtgcgtcaacgcgcgttgcctcaacacggatggctccttccgctgcatctgccgcccgggattcgcacccacgcaccagccgcaccactgtgcgcccgcacggccccgggcctgagccctggcacccgctggccgcccacccgcgcccgccactcggggcccctgccgcgcatcctgcagcccgcttatgcgtatgtgcacggggccgcccgcctggacctggagaagggacctacggacgcctggaagctgcgacgccctgcactgctcccgcctccaccagcgcctcccactgatgtcgtggtcccgggcctggcccaggggcccctttacatgccctctcccttttataaaattttccattaaaaaccacctattttctatc

SEQ ID NO: 33688 - DNA, 4872 bp, Artificial Sequence
  derived and/or modified sequence
atgccccggcccggcaccagcggcagaagacccctgctgctggtgctgctgctgcccctgtttgctgctgccaccagcgctgccagccccagccccagccccagccaggtggtggaggtgcctggggtgcccagcaggcctgcctctgtggccgtgtgccgctgctgccccggccagaccagccgccgcagccgctgcatccgggccttctgccgggtgcgcagctgccagcccaagaagtgtgccggcccccagcgctgcctgaaccctgtgcctgctgtgcccagccccagccccagcgtgaggaagaggcaggtgtccctgaactggcagcccctgaccctgcaggaggcccgggccctgctgaagagaagaagaccccggggccctgggggccggggcctgctgcggcggcggcccccccagagggccccagctgggaaggcccctgtgctgtgccccctcatctgccacaatggaggagtgtgtgtgaagccagaccgctgcctgtgccccccagactttgctgggaagttctgccagctgcacagcagcggggcccggcccccagccccagctgtgcccggcctgaccaggtctgtgtacaccatgcccctggccaaccacagagatgatgagcacggcgtggcctccatggtgtctgtgcacgtggagcacccccaggaggcctctgtggtggtgcaccaggtggagcgggtgtctggcccctgggaggaggctgatgctgaggccgtggcccgggcagaggccgccgcccgggcagaggccgccgccccctacacagtgctggcccagagcgcccccagagaagatggctacagtgatgccagcggcttcggctactgcttccgggagctgcggggaggagaatgtgccagccccctgcccggcctgcggacccaggaggtgtgctgcagaggagctggcctggcctggggcgtgcatgactgccagctgtgcagcgagcggctgggcaacagcgagcgggtgtctgccccagatggcccctgccccaccggctttgagcgggtgaatggcagctgtgaagatgtggatgaatgtgccactggaggccgctgccagcacggagaatgtgccaacacccggggcggctacacctgtgtgtgcccagatggcttcctgctggacagcagccgcagcagctgcatcagccagcacgtgatcagcgaggccaagggcccctgcttccgggtgctgagagatggcggctgcagcctgcccatcctgaggaacatcaccaagcagatctgctgctgcagccgggtgggcaaggcctggggccggggctgccagctgtgcccccccttcggcagcgagggcttccgggagatctgcccagctggccctggctaccactacagcgccagtgacctgcgctacaacacccggcccctgggccaggagcccccccgggtgtccctgagccagcccaggaccctgcctgccaccagccggcccagcgctggcttcctgcccacccaccggctggagcccaggcctgagcccaggccagacccccggcccggccctgagctgcccctgcccagcatcccagcctggacaggccctgagatccctgagagcggccccagcagcggcatgtgccagaggaacccccaggtgtgtggccctggccgctgcatcagccggcccagcggctacacctgtgcctgtgacagcggcttccggctgagcccccagggcacccgctgcattgatgtggatgagtgccggcgggtgcccccaccctgtgcccctggccgctgtgagaacagccctggcagcttccgctgtgtgtgtggccctggcttccgggccggccccagggctgctgagtgcctggatgtggatgagtgccaccgggtgcccccaccctgtgacctgggccgctgtgagaacaccccaggcagcttcctgtgtgtgtgcccagctggctaccaggccgcccctcatggagccagctgccaggatgtggatgagtgcacccagagccctggcctgtgtggccgcggggcctgcaagaacctgcccggcagcttccgctgtgtgtgcccagctggcttccggggcagcgcctgtgaagaagatgtggatgaatgtgcccaggagcccccaccctgtggccctggccgctgtgacaacacagctggcagcttccactgtgcctgcccagctggcttccgcagccggggccctggggccccctgccaggatgtggatgaatgtgcccggagccccccaccctgcacctacggccgctgtgaaaatacagagggcagcttccagtgtgtgtgccccatgggcttccagcccaacacagctggctctgaatgtgaagatgtggatgaatgtgagaaccacctggcctgccccggccaggagtgtgtgaacagccctggcagcttccagtgcaggacctgccccagcggccaccacctgcaccggggccgctgcacagatgtggatgaatgtagcagcggggccccaccctgtggcccccacggccactgcaccaacacagagggcagcttccgctgcagctgtgcccctggctaccgggcccccagcggccggcccggcccctgtgctgatgtgaatgaatgtctggagggggacttctgcttcccccatggagaatgtctgaacacagatggcagctttgcctgcacctgtgcccctggctacagacctggccccaggggggccagctgcctggatgtggatgaatgttctgaggaggacctgtgccagagcggcatctgcaccaacacagatggcagctttgagtgcatctgccccccaggccaccgggccggccctgacctggccagctgcctggatgtggatgagtgccgggagcggggccctgccctgtgtggcagccagagatgtgagaacagccctggcagctaccgctgtgtgcgggactgtgaccccggctaccacgccggccctgagggcacctgtgatgatgtggatgagtgccaggagtatggccctgagatctgtggggcccagagatgtgagaacaccccaggcagctaccgctgcaccccagcctgtgaccccggctaccagcccaccccaggcggcggctgccaggatgtggatgagtgcaggaacagaagcttctgtggggcccatgctgtgtgccagaacctgcccggcagcttccagtgcctgtgtgaccagtatgaaggagccagagatggccgccactgtgtggatgtgaatgaatgtgagaccctgcagggcgtgtgtggggccgccctgtgtgaaaatgtggagggcagcttcctgtgtgtgtgccccaacagccctgaggagtttgaccccatgacaggccgctgtgtgccccccaggaccagcgctggcaccttccctggcagccagccccaggccccagccagccctgtgctgcctgcccggcccccacctccacccctgccccggcggcccagcaccccccggcagggccctgtgggcagcggcagaagagagtgctactttgacacagctgccccagatgcctgtgacaacatcctggccagaaatgtgacctggcaggagtgctgctgcaccgtgggggagggctggggcagcggctgccgcatccagcagtgccctggaacagaaacagctgagtaccagagcctgtgcccccacggccggggctacctggcccccagcggggacctgagcctgcggagagatgtggatgagtgccagctgttccgggaccaggtgtgcaagagcggcgtgtgtgtgaacacagcccctggctacagctgctactgcagcaatggctactactaccacacccagaggctggagtgcatcgacaatgatgaatgtgctgatgaggagcccgcctgtgagggcggccgctgtgtgaacacagtgggcagctaccactgcacctgtgagccccccctggtgctggatggcagccagaggcgctgtgtgtccaatgaaagccagagcctggatgacaacctgggcgtgtgctggcaggaggtgggcgctgacctggtgtgcagccacccccggctggaccggcaggccacctacacagagtgctgctgcctgtatggagaggcctggggcatggactgtgccctgtgcccagcccaggacagtgatgactttgaggccctgtgcaatgtgctgcggcccccagcctacagcccccccaggcctgggggcttcggcctgccctatgaatatggccctgacctgggccccccctaccagggcctgccctacggccctgagctgtacccacctccagccctgccctatgacccctacccacctcctcctggcccctttgcccggcgggaggccccctatggagcccccaggtttgacatgccagactttgaagatgatggcggcccctacggggagagcgaggccccagcccctcctggccctggcacccgctggccctaccgcagccgggacaccaggaggagcttccctgagcctgaggagcccccagagggcggcagctatgccggcagcctggccgagccctatgaggagctggaggccgaggagtgtggcatcctggatggctgcaccaacggccgctgtgtgcgggtgcctgagggcttcacctgccgctgctttgatggctaccgcctggacatgaccaggatggcctgtgtggacatcaatgaatgtgatgaggccgaggccgccagccccctgtgtgtgaatgcccgctgcctgaacacagatggcagcttccgctgcatctgcaggcctggctttgcccccacccaccagccccaccactgtgccccagcccggccccgggcctag

SEQ ID NO: 33689 - DNA, 4872 bp, Artificial Sequence
  derived and/or modified sequence
atgccccggcccggcaccagcggccggcggcccctgctgctggtgctcctcctgccccttttcgcggctgctacatcagcagcttccccaagccctagccccagtcaggtggtggaggtacctggcgtgccttcccggcccgcaagcgtcgccgtttgccggtgctgtcctggtcagacctcccgtaggagccgatgcataagggcattctgccgagtcagatcgtgccaacccaaaaagtgcgcgggcccacagcgatgtctgaatcccgtaccagccgtcccatcccccagcccatcggtgaggaaaaggcaggtttccttaaactggcagccactgaccctgcaggaagccagggccctcctaaagcgcagacgtccccggggacctggagggcggggcctgttaagacgaaggcccccgcaacgagcccctgcaggcaaagcccctgttttatgccctttaatttgccacaatggaggcgtttgcgtgaaaccagatcgttgtctctgccccccagattttgcagggaagttctgccagttgcacagtagtggcgcgcgcccgcctgcaccagcagtccccggccttactaggagcgtctacactatgcccctcgccaatcatcgcgatgatgaacacggcgtcgcatcaatggtgagcgtccacgtggagcacccccaagaggccagcgtcgtggtgcatcaggttgagcgggtctcaggaccttgggaagaggcggatgctgaggctgtggctcgcgccgaggctgctgcacgggccgaggcagcggctccttacactgtgctggcccagtcagcacctcgggaggatggctactcagacgcaagtggatttgggtattgctttcgagagctacggggcggcgagtgcgcttctcctctccctgggctgcgaacccaagaggtttgttgtcggggcgccggactggcctggggcgtccacgattgccaactgtgctccgagcgtctgggtaactctgaaagggttagtgctccagacggaccttgccccacagggtttgagcgagtgaatggatcctgtgaagacgtcgacgagtgcgcgacgggggggagatgtcagcacggagagtgtgcaaatactaggggcggctacacatgcgtctgcccggacggcttcctgctcgattcatcccggtctagctgtatctcccaacacgtcatctccgaggccaagggcccttgctttcgcgtcctaagagacggagggtgttcgctccctattctgcgtaatattaccaagcaaatttgttgctgctccagggtcggaaaggcttgggggcgaggttgccagttgtgccccccgtttggcagcgagggcttccgagagatctgccccgcggggccagggtaccattacagcgcttccgacctgaggtacaacactcggccactcgggcaagagcctcctcgagtatctctaagccagccccgcacactgcccgcaacttcaaggccctctgccggctttttacccactcatcggctggaaccacgaccagaaccccgcccagacccacggcccggcccagagctgccattgccttctattcctgcttggacaggtccagagatccccgaaagtggcccgtcatcgggaatgtgtcagcgtaatccccaggtgtgcggacccggcaggtgcattagtcggcctagtgggtacacatgcgcctgtgacagcggctttaggctcagcccccagggaacaaggtgtatcgatgtggatgagtgccgtcgagtgcccccgccttgcgcccccggtaggtgtgagaattctccgggctcctttcgatgtgtgtgcggccccgggtttcgcgcgggccctcgcgccgccgagtgtctcgatgtcgacgaatgtcatcgcgttcctccaccgtgtgatcttggccggtgtgaaaacacccctgggtcctttctgtgcgtctgccctgcaggataccaggccgccccacatggggccagctgccaggacgtggacgagtgcacccagagcccaggcctatgcggcagaggcgcatgcaagaacctgcctggctcgtttcgatgcgtctgtccagcaggatttagaggatccgcatgcgaggaggatgtggatgaatgcgctcaagagcctccaccttgcggccctggtagatgtgacaacactgctgggtcatttcattgtgcatgtcctgcaggattcagaagcaggggacctggggctccctgccaggacgtcgacgaatgcgcccgctctccccccccttgcacgtatggacgatgcgagaataccgaaggcagcttccagtgtgtatgtcccatgggttttcagcctaatacagctggttccgaatgcgaggacgtggatgagtgcgaaaatcacctggcctgtccaggccaggagtgcgtcaactccccaggcagcttccagtgcaggacatgccccagcggacaccatctgcataggggccggtgcaccgatgtggatgagtgtagttcaggcgcccccccatgcggccctcacggacattgtaccaacacagaaggctctttccggtgcagctgcgctccgggttatagagctccctctgggagacctggtccctgcgctgatgtgaatgagtgcctcgagggtgatttctgcttcccccacggcgagtgtcttaacacagacggcagttttgcctgcacgtgcgcccctggctacaggcccggccctcgcggggcctcctgtctcgatgtcgacgaatgctctgaagaggatctgtgccagtctggaatctgcaccaataccgacggcagcttcgaatgtatctgtcctcctggtcaccgagctggcccagatctggccagttgtctggacgtcgacgagtgccgagagcgaggccccgccctttgcggatcacagcggtgtgagaactcgcctggttcatatcggtgcgtccgagattgcgatcccggctaccatgcagggcctgaaggaacctgtgatgacgtggacgagtgccaagagtacggaccagagatttgtggagcgcaaagatgcgaaaacaccccaggaagctaccgctgtaccccggcctgcgatccaggctatcagccgactccgggggggggctgccaggatgtggatgaatgcaggaataggtccttttgcggggcccatgcagtatgccagaatctcccaggatccttccaatgcttgtgcgatcaatatgaaggagcaagggacggacggcactgcgtggacgtgaatgagtgcgagacactccagggggtttgcggcgctgctttgtgtgaaaacgttgagggttcttttttgtgcgtttgtcctaactctccggaggaattcgacccgatgaccggtcgttgcgtacctccacgcacttccgctggcactttcccaggctcccagcctcaggctcccgccagtcctgtacttcctgctaggccccctccacctccactgcccagacgaccttctactcctaggcagggcccagttggatcaggccggagggaatgttatttcgacacagctgcaccagacgcgtgcgacaatatcctggctagaaacgtgacatggcaggagtgctgctgtaccgtgggggaagggtggggtagcggctgcaggattcagcagtgccccgggaccgagaccgccgagtaccagtccctgtgtccacatggacgaggttacctggctccaagcggagatctgtccttgcggagagatgttgatgaatgccaacttttccgcgaccaggtgtgcaagagtggcgtatgtgtgaataccgcccccgggtactcctgctactgctccaatggctactactaccatacccaaagacttgagtgtatagataatgacgagtgcgccgatgaagagcccgcatgcgaggggggccgctgtgtgaacacagtgggctcctaccactgcacatgtgagccccctctggttcttgatggctcccagcggcgatgcgtgtctaatgaatctcagtcacttgatgataacttgggggtctgttggcaagaagtcggtgccgaccttgtttgctcccaccctcggttagaccgccaagctacctacacggaatgctgttgtctatatggcgaggcatggggcatggattgcgccctgtgtcccgcccaggattctgacgatttcgaagccctctgtaacgttctgcggcccccagcgtattcgcctcctcgccccggcggttttggcctgccctacgaatatggccccgacctgggaccaccctatcagggcctgccttacggtcctgagctgtatcctccacccgcactgccatacgacccctacccaccacccccaggtcctttcgcccggagggaagccccctatggagctcccagattcgacatgcctgattttgaggacgacggcggaccctacggtgagtccgaggctcctgctcccccgggcccaggaacacggtggccctaccgctcgagagacacccgtaggagtttcccagagcctgaagagcctccagagggcggctcctacgcgggatcactggcagaaccctatgaggagctagaagctgaagaatgcgggatccttgatggatgcaccaacggccgctgcgtgagggtgccagagggatttacgtgccggtgtttcgatggctacaggttagatatgaccaggatggcttgtgtggacattaacgaatgtgatgaggcggaagctgccagccccctgtgcgtcaatgcccggtgtctgaacacagacggaagcttcagatgtatttgcagacctggtttcgctcctactcatcagccccaccattgcgcaccggctcgaccaagagcctag

SEQ ID NO: 33690 - DNA, 4872 bp, Artificial Sequence
  derived and/or modified sequence
atgcctcggcctgggacctctggaaggcgccctctgctgctggtcctccttttgcctttgtttgcggcagccacttcggctgcatcaccttctccttctccttctcaggtagttgaagtgccaggggtcccttctcgtccagcgtcagtggcggtgtgccggtgctgcccgggacagactagcaggaggtctcgctgtatacgagcgttctgcagggttcggtcatgccaaccgaaaaaatgtgccggaccccagaggtgtttaaacccggtccctgcagtaccaagcccttctcccagtgtgaggaagcgccaagttagtctcaattggcagccgctgactctgcaggaagccagagccttgttaaagcgccgaaggcctcggggaccaggcggtcggggactcttaagaaggaggccaccccagcgcgcaccagctgggaaagccccagtcctgtgtccattaatctgccacaacgggggagtgtgcgttaagcccgatcggtgcctgtgtccacctgactttgctggaaagttctgccaactgcattctagcggagccaggcctcctgcccctgccgtgcccggactgacgaggtcagtgtatactatgcccctggcaaaccaccgtgacgacgagcacggggtggcttctatggtttcagtgcacgtggagcacccgcaagaggccagcgtcgtggttcaccaggttgagcgcgtcagtggcccatgggaggaggccgacgctgaggctgtcgccagggcagaagccgctgcacgagccgaggctgccgctccatataccgtcctggctcagagtgccccacgggaagatggctactcagacgcttccgggtttggttactgctttagagaactgcggggaggagagtgtgcctcgcctctccccggacttaggacgcaggaggtgtgttgcagaggagcaggactcgcttggggggttcacgactgccagctgtgctccgaacgcctgggtaacagtgagcgcgtgtcagcccctgacggaccttgtccgactggcttcgagagagtgaacggtagttgcgaagatgtcgacgagtgtgccactggcggaaggtgccaacatggcgagtgcgctaatactaggggcggttacacatgtgtttgtcccgacggatttctgcttgacagcagtcgcagctcctgtataagccagcacgtcatctctgaggccaaaggtccttgtttccgggtcttacgtgatggcggatgctcactaccaattctgcgtaatattacgaagcagatctgctgttgcagccgtgtgggaaaggcctggggtcgcggttgtcagctgtgtcctccgtttgggagtgaaggatttagagagatctgtccagccggtcctgggtaccattactcggccagcgacctacgctacaacactagaccccttgggcaggagcctcctagggtcagcttatcccagccaagaacccttccagccacatcccgcccatctgccggtttcctccccacgcaccggcttgaacctcgccctgaaccgagaccagaccctagaccgggacctgaacttccacttcctagcatccctgcttggactggccctgagatccccgaatctggtccgagcagcggcatgtgccagaggaacccacaggtgtgtggccctgggcgatgcatttcaagacctagtggctacacctgtgcatgtgatagcggctttcgacttagtccgcagggaactagatgtatcgatgtcgatgagtgccggcgagttcctccaccatgcgcccctgggcgttgtgagaattctccgggtagcttcagatgcgtatgtggccctggatttagggcaggtcccagggccgcagaatgtctggacgtggatgagtgccaccgggtccctccaccatgcgacttagggcgatgtgagaataccccaggcagctttttgtgtgtgtgtccagctgggtatcaggccgcaccacatggggcttcatgtcaggacgtggatgagtgtactcagtcccccggactgtgtggtaggggcgcatgcaagaatcttcctggatccttccgctgtgtttgcccggcaggattcagaggatccgcctgtgaagaggacgttgacgagtgcgctcaggagccacctccttgcggccctggacgctgtgataatacagccggtagttttcactgtgcttgtcctgctggctttagaagtcgaggccctggggctccttgtcaggatgtcgatgagtgtgctaggtccccacccccatgtacttatggcagatgtgagaataccgagggcagttttcaatgtgtctgcccaatgggattccaaccgaacactgccggaagtgagtgtgaagacgtcgacgagtgcgagaatcatttagcttgtccaggccaggagtgtgtcaattcacccggtagctttcagtgccggacttgtcccagcggccaccacttgcacaggggaagatgcacagatgtggatgagtgctccagcggcgcaccaccatgcggtcctcatggccattgtaccaacaccgagggttccttcagatgctcttgtgctcccggatacagggccccatcgggccgacccggaccctgcgcagatgtgaacgagtgtctcgaaggagacttctgctttcctcacggcgagtgtcttaatactgatggctcctttgcttgtacgtgcgcacccggatacaggcctggcccaagaggggcttcttgtctggacgtggatgaatgctccgaagaggacctgtgccaaagtgggatttgcacgaatacggacggatctttcgagtgcatctgcccacctggccatcgagctggaccggacctcgccagctgcttggacgtcgatgaatgtcgggagagaggtcctgccttatgtgggtcacaacgttgcgagaattccccgggatcctaccgctgcgtgagagattgcgaccccggttaccatgctggcccagagggcacctgcgacgacgtcgatgagtgccaggagtatgggccagagatctgtggggctcagcgatgtgagaatactccaggctcgtacaggtgcacccccgcttgtgatcctggatatcagcccacccctgggggaggttgtcaggatgtggatgagtgtcggaataggtctttttgtggcgctcatgcagtctgtcaaaacctgcccggatctttccagtgtctctgcgaccagtacgagggcgctcgagatggcagacattgtgttgatgtgaacgaatgtgagacactacagggcgtgtgcggagctgctctgtgtgagaacgtcgagggctctttcctgtgtgtctgcccaaactctcctgaggaatttgatccgatgaccggcagatgcgtacccccaaggacctctgcagggacctttcccggttcgcagccacaggccccagcatctcccgtcctaccagctaggcctcccccacctccactccccaggcgcccaagtacaccaaggcaaggacccgtgggctcagggaggagggagtgctactttgacacagccgcaccagacgcctgtgacaatatcctggctaggaacgtcacctggcaggaatgctgctgcaccgtaggagaggggtggggctctgggtgcagaatccaacagtgtccaggcacggaaacagctgaataccagagcttatgcccgcacggccgaggttacttagcgcctagtggtgacctctctttgcgcagggatgtggacgagtgtcagctcttccgcgaccaggtgtgtaaaagcggcgtatgcgtgaacacggcaccagggtattcatgctactgctccaacggctactattaccacacccagagactagaatgcatcgataatgacgaatgtgccgatgaagagcctgcctgcgagggaggcagatgcgttaatacagtaggatcctaccattgcacatgcgaaccaccattagtactggatggatctcagcggcgatgtgtgtccaatgaaagccaaagccttgatgacaatctcggagtgtgctggcaggaggtaggcgcagaccttgtctgctctcacccaagactcgatcggcaagcaacctataccgagtgttgttgtctgtatggggaggcctggggcatggattgtgcactctgccccgctcaagatagtgatgatttcgaagcactgtgcaacgtcctacgtccaccagcatatagtccacccagacctggcggatttgggctaccttatgaatatggccctgacttaggccctccatatcaggggcttccttatggccctgagctgtacccgcctcccgcactaccgtatgacccctatccacctcccccaggcccttttgccagaagagaggcaccctacggggctcctcgatttgatatgcctgacttcgaggatgatgggggtccttatggggagagtgaggccccagctccccctggcccaggcacccggtggccttaccgatcaagagacacccggaggtcctttcctgagccagaagaacccccagaaggtgggagctatgcagggtccctggccgagccctacgaagagctagaggccgaagaatgcggtatcctcgatggctgtactaatggaagatgtgtccgggtgcccgaggggtttacatgcaggtgcttcgatgggtaccgccttgatatgacccggatggcatgcgtggatattaacgaatgtgacgaagcagaagccgcttctccactgtgcgtgaacgcgaggtgtctcaacactgatgggagcttccgatgcatctgcagaccgggtttcgccccaacacatcagcctcatcattgcgccccagccaggcctagagcttag

SEQ ID NO: 33691 - DNA, 4872 bp, Artificial Sequence
  derived and/or modified sequence
atgcccagacccggcaccagcggcagaagacccctgctgctggtgctgctgctgcccctgttcgccgccgccaccagcgccgccagccccagccccagccccagccaggtggtggaggtgcccggcgtgcccagcagacccgccagcgtggccgtgtgcagatgctgccccggccagaccagcagaagaagcagatgcatcagagccttctgcagagtgagaagctgccagcccaagaagtgcgccggcccccagagatgcctgaaccccgtgcccgccgtgcccagccccagccccagcgtgagaaagagacaggtgagcctgaactggcagcccctgaccctgcaggaggccagagccctgctgaagagaagaagacccagaggccccggcggcagaggcctgctgagaagaagacccccccagagagcccccgccggcaaggcccccgtgctgtgccccctgatctgccacaacggcggcgtgtgcgtgaagcccgacagatgcctgtgcccccccgacttcgccggcaagttctgccagctgcacagcagcggcgccagaccccccgcccccgccgtgcccggcctgaccagaagcgtgtacaccatgcccctggccaaccacagagacgacgagcacggcgtggccagcatggtgagcgtgcacgtggagcacccccaggaggccagcgtggtggtgcaccaggtggagagagtgagcggcccctgggaggaggccgacgccgaggccgtggccagagccgaggccgccgccagagccgaggccgccgccccctacaccgtgctggcccagagcgcccccagagaggacggctacagcgacgccagcggcttcggctactgcttcagagagctgagaggcggcgagtgcgccagccccctgcccggcctgagaacccaggaggtgtgctgcagaggcgccggcctggcctggggcgtgcacgactgccagctgtgcagcgagagactgggcaacagcgagagagtgagcgcccccgacggcccctgccccaccggcttcgagagagtgaacggcagctgcgaggacgtggacgagtgcgccaccggcggcagatgccagcacggcgagtgcgccaacaccagaggcggctacacctgcgtgtgccccgacggcttcctgctggacagcagcagaagcagctgcatcagccagcacgtgatcagcgaggccaagggcccctgcttcagagtgctgagagacggcggctgcagcctgcccatcctgagaaacatcaccaagcagatctgctgctgcagcagagtgggcaaggcctggggcagaggctgccagctgtgcccccccttcggcagcgagggcttcagagagatctgccccgccggccccggctaccactacagcgccagcgacctgagatacaacaccagacccctgggccaggagccccccagagtgagcctgagccagcccagaaccctgcccgccaccagcagacccagcgccggcttcctgcccacccacagactggagcccagacccgagcccagacccgaccccagacccggccccgagctgcccctgcccagcatccccgcctggaccggccccgagatccccgagagcggccccagcagcggcatgtgccagagaaacccccaggtgtgcggccccggcagatgcatcagcagacccagcggctacacctgcgcctgcgacagcggcttcagactgagcccccagggcaccagatgcatcgacgtggacgagtgcagaagagtgccccccccctgcgcccccggcagatgcgagaacagccccggcagcttcagatgcgtgtgcggccccggcttcagagccggccccagagccgccgagtgcctggacgtggacgagtgccacagagtgccccccccctgcgacctgggcagatgcgagaacacccccggcagcttcctgtgcgtgtgccccgccggctaccaggccgccccccacggcgccagctgccaggacgtggacgagtgcacccagagccccggcctgtgcggcagaggcgcctgcaagaacctgcccggcagcttcagatgcgtgtgccccgccggcttcagaggcagcgcctgcgaggaggacgtggacgagtgcgcccaggagccccccccctgcggccccggcagatgcgacaacaccgccggcagcttccactgcgcctgccccgccggcttcagaagcagaggccccggcgccccctgccaggacgtggacgagtgcgccagaagcccccccccctgcacctacggcagatgcgagaacaccgagggcagcttccagtgcgtgtgccccatgggcttccagcccaacaccgccggcagcgagtgcgaggacgtggacgagtgcgagaaccacctggcctgccccggccaggagtgcgtgaacagccccggcagcttccagtgcagaacctgccccagcggccaccacctgcacagaggcagatgcaccgacgtggacgagtgcagcagcggcgcccccccctgcggcccccacggccactgcaccaacaccgagggcagcttcagatgcagctgcgcccccggctacagagcccccagcggcagacccggcccctgcgccgacgtgaacgagtgcctggagggcgacttctgcttcccccacggcgagtgcctgaacaccgacggcagcttcgcctgcacctgcgcccccggctacagacccggccccagaggcgccagctgcctggacgtggacgagtgcagcgaggaggacctgtgccagagcggcatctgcaccaacaccgacggcagcttcgagtgcatctgcccccccggccacagagccggccccgacctggccagctgcctggacgtggacgagtgcagagagagaggccccgccctgtgcggcagccagagatgcgagaacagccccggcagctacagatgcgtgagagactgcgaccccggctaccacgccggccccgagggcacctgcgacgacgtggacgagtgccaggagtacggccccgagatctgcggcgcccagagatgcgagaacacccccggcagctacagatgcacccccgcctgcgaccccggctaccagcccacccccggcggcggctgccaggacgtggacgagtgcagaaacagaagcttctgcggcgcccacgccgtgtgccagaacctgcccggcagcttccagtgcctgtgcgaccagtacgagggcgccagagacggcagacactgcgtggacgtgaacgagtgcgagaccctgcagggcgtgtgcggcgccgccctgtgcgagaacgtggagggcagcttcctgtgcgtgtgccccaacagccccgaggagttcgaccccatgaccggcagatgcgtgccccccagaaccagcgccggcaccttccccggcagccagccccaggcccccgccagccccgtgctgcccgccagacccccccccccccccctgcccagaagacccagcacccccagacagggccccgtgggcagcggcagaagagagtgctacttcgacaccgccgcccccgacgcctgcgacaacatcctggccagaaacgtgacctggcaggagtgctgctgcaccgtgggcgagggctggggcagcggctgcagaatccagcagtgccccggcaccgagaccgccgagtaccagagcctgtgcccccacggcagaggctacctggcccccagcggcgacctgagcctgagaagagacgtggacgagtgccagctgttcagagaccaggtgtgcaagagcggcgtgtgcgtgaacaccgcccccggctacagctgctactgcagcaacggctactactaccacacccagagactggagtgcatcgacaacgacgagtgcgccgacgaggagcccgcctgcgagggcggcagatgcgtgaacaccgtgggcagctaccactgcacctgcgagccccccctggtgctggacggcagccagagaagatgcgtgagcaacgagagccagagcctggacgacaacctgggcgtgtgctggcaggaggtgggcgccgacctggtgtgcagccaccccagactggacagacaggccacctacaccgagtgctgctgcctgtacggcgaggcctggggcatggactgcgccctgtgccccgcccaggacagcgacgacttcgaggccctgtgcaacgtgctgagaccccccgcctacagcccccccagacccggcggcttcggcctgccctacgagtacggccccgacctgggccccccctaccagggcctgccctacggccccgagctgtaccccccccccgccctgccctacgacccctacccccccccccccggccccttcgccagaagagaggccccctacggcgcccccagattcgacatgcccgacttcgaggacgacggcggcccctacggcgagagcgaggcccccgccccccccggccccggcaccagatggccctacagaagcagagacaccagaagaagcttccccgagcccgaggagccccccgagggcggcagctacgccggcagcctggccgagccctacgaggagctggaggccgaggagtgcggcatcctggacggctgcaccaacggcagatgcgtgagagtgcccgagggcttcacctgcagatgcttcgacggctacagactggacatgaccagaatggcctgcgtggacatcaacgagtgcgacgaggccgaggccgccagccccctgtgcgtgaacgccagatgcctgaacaccgacggcagcttcagatgcatctgcagacccggcttcgcccccacccaccagccccaccactgcgcccccgccagacccagagcctag

SEQ ID NO: 33692 - protein, 1556 aa, Artificial Sequence
  derived and/or modified sequence
MAGGVRLLWVSLLVLLAQLGPQPGLGRLGERLRVRFTPVVCGLRCVHGPTGSRCTPTCAPRNATSVDSGAPGGAAPGGPGFRAFLCPLICHNGGVCVKPDRCLCPPDFAGKFCQLHSSGARPPAPAVPGLTRSVYTMPLANHRDDEHGVASMVSVHVEHPQEASVVVHQVERVSGPWEEADAEAVARAEAAARAEAAAPYTVLAQSAPREDGYSDASGFGYCFRELRGGECASPLPGLRTQEVCCRGAGLAWGVHDCQLCSERLGNSERVSAPDGPCPTGFERVNGSCEDVDECATGGRCQHGECANTRGGYTCVCPDGFLLDSSRSSCISQHVISEAKGPCFRVLRDGGCSLPILRNITKQICCCSRVGKAWGRGCQLCPPFGSEGFREICPAGPGYHYSASDLRYNTRPLGQEPPRVSLSQPRTLPATSRPSAGFLPTHRLEPRPEPRPDPRPGPELPLPSIPAWTGPEIPESGPSSGMCQRNPQVCGPGRCISRPSGYTCACDSGFRLSPQGTRCIDVDECRRVPPPCAPGRCENSPGSFRCVCGPGFRAGPRAAECLDVDECHRVPPPCDLGRCENTPGSFLCVCPAGYQAAPHGASCQDVDECTQSPGLCGRGACKNLPGSFRCVCPAGFRGSACEEDVDECAQEPPPCGPGRCDNTAGSFHCACPAGFRSRGPGAPCQDVDECARSPPPCTYGRCENTEGSFQCVCPMGFQPNTAGSECEDVDECENHLACPGQECVNSPGSFQCRTCPSGHHLHRGRCTDVDECSSGAPPCGPHGHCTNTEGSFRCSCAPGYRAPSGRPGPCADVNECLEGDFCFPHGECLNTDGSFACTCAPGYRPGPRGASCLDVDECSEEDLCQSGICTNTDGSFECICPPGHRAGPDLASCLDVDECRERGPALCGSQRCENSPGSYRCVRDCDPGYHAGPEGTCDDVDECQEYGPEICGAQRCENTPGSYRCTPACDPGYQPTPGGGCQDVDECRNRSFCGAHAVCQNLPGSFQCLCDQYEGARDGRHCVDVNECETLQGVCGAALCENVEGSFLCVCPNSPEEFDPMTGRCVPPRTSAGTFPGSQPQAPASPVLPARPPPPPLPRRPSTPRQGPVGSGRRECYFDTAAPDACDNILARNVTWQECCCTVGEGWGSGCRIQQCPGTETAEYQSLCPHGRGYLAPSGDLSLRRDVDECQLFRDQVCKSGVCVNTAPGYSCYCSNGYYYHTQRLECIDNDECADEEPACEGGRCVNTVGSYHCTCEPPLVLDGSQRRCVSNESQSLDDNLGVCWQEVGADLVCSHPRLDRQATYTECCCLYGEAWGMDCALCPAQDSDDFEALCNVLRPPAYSPPRPGGFGLPYEYGPDLGPPYQGLPYGPELYPPPALPYDPYPPPPGPFARREAPYGAPRFDMPDFEDDGGPYGESEAPAPPGPGTRWPYRSRDTRRSFPEPEEPPEGGSYAGSLAEPYEELEAEECGILDGCTNGRCVRVPEGFTCRCFDGYRLDMTRMACVDINECDEAEAASPLCVNARCLNTDGSFRCICRPGFAPTHQPHHCAPARPRA

SEQ ID NO: 33693 - DNA, 372 bp, Artificial Sequence
  derived and/or modified sequence
atgctgggccctaacgcacaggtgactgttgtggttgcccagcccggccccgaccatctggatcacctgcttctcgatacacaacattgccagcattcttcttgcggcagcgcggcgtgcacgcagctcacgtgggtcccctgccttgggggatcccacaaggcttcaataaaaatgagtgcccaggccgtggtttccacagaagctccttgggagcggccctgtttccaggcccacctcggttgtctccagaattcagttctttgctcatgtcgcatggagggcttcagcttattccttgctatgttgtggggcggcgtcggcgagctaccttccgatccgagggggcacttgcagtttcttgccacttag

SEQ ID NO: 33694 - DNA, 4671 bp, Artificial Sequence
  derived and/or modified sequence
atggccggtggtgtgcggctgctgtgggtgtcactgctcgtccttctggctcaactgggtccccaacccggcctgggacgcttgggggaaaggctgcgggtgagattcacgcctgttgtttgcggattacggtgcgtccacggaccaactggcagcaggtgtacacctacttgcgcaccccggaatgcgacctctgttgactccggggcccctggcggtgctgcaccaggcggccccggtttccgggcttttctctgtcccttgatttgccataatggcggggtgtgtgtgaagcccgaccgctgcctgtgcccacctgacttcgccggcaagttctgtcagttgcacagctctggtgctagacccccagccccggccgtgcccgggctgaccagatctgtatacacaatgccgctcgcgaatcacagggatgatgaacacggtgtggcatccatggtctctgtccatgtcgaacacccacaggaggcctcggtggtcgtgcatcaggttgaaagagtgtctgggccatgggaagaggccgatgccgaggcagtggctagggccgaagccgctgcgcgcgccgaagcagctgccccatacactgtgcttgctcaatccgccccgcgggaggacggctacagcgatgcttccggcttcggctactgctttagagagttaaggggcggcgaatgtgcctcaccccttcccggactgcgtacccaggaggtgtgttgtcgtggagccggactggcctggggggtccacgactgtcagctctgctcagagcgactaggtaatagcgagcgggtatccgccccagatggaccatgccctactggattcgagcgcgtgaatggaagttgcgaggacgtcgacgagtgtgccaccggaggccgctgccagcacggggaatgtgcaaacaccagaggcggttacacatgcgtatgtccagacggattccttctggattcaagccggtcttcgtgtatttcccagcacgtgatttccgaggcaaaagggccctgtttccgcgttctccgagacggcgggtgctctttaccaattctaagaaatatcaccaaacagatatgctgttgcagccgcgtcggcaaagcttggggaaggggatgccagttgtgcccaccttttggctccgagggatttcgcgagatctgcccggctggccccggttaccactattcggcctctgaccttcgctataatacacgacctctggggcaagaacctcctcgggtgtctctttctcaaccccggactctccccgcaaccagcaggccttccgccggatttctgcctactcacagactcgagccgcggcccgagccccgccccgatccccgcccgggccccgagctgcccctgccctctatacccgcctggacagggcctgaaattcctgagtcaggacctagtagcgggatgtgtcaaagaaatccgcaggtctgtggacccgggcggtgtatttcacgcccatctggttatacctgcgcctgcgactcaggattcagactcagcccccagggaacaaggtgtatcgacgtggacgagtgccgccgggttcctcctccctgcgctccgggtcgatgcgagaactcccccggttcttttagatgtgtctgcggacccggctttcgagctggccctcgcgctgctgagtgtctagacgtcgatgagtgccacagagttccacccccttgcgacctcggacgctgcgagaacactcctgggagtttcctttgcgtttgtcctgcagggtaccaggccgcaccacacggagctagctgccaggatgtggatgagtgtacccagtctccaggactctgcggaaggggagcttgtaagaacctccccggatcctttcggtgtgtctgtcccgctggcttcagagggtccgcttgcgaggaagacgtggatgagtgtgcccaggagcccccaccttgtgggcccggacgctgcgacaacaccgccggctcgtttcactgtgcctgcccagcaggcttccgaagcagaggacctggagccccatgccaggatgttgatgaatgcgcccggagtccccccccctgtacctacggacgctgcgagaacacagagggttctttccaatgcgtgtgtcctatgggatttcaacctaatacggctggtagcgaatgcgaggacgtagacgagtgtgagaatcacctggcctgcccgggccaagagtgcgtcaactcccccggatcctttcaatgcaggacctgtccatctgggcatcacctacatcgagggcggtgtactgatgtagacgagtgtagcagtggcgcaccaccctgcggccctcacggccattgcacaaatactgaaggctccttcaggtgctcctgtgcccccggctaccgcgctcccagcggccgtcccggaccatgtgccgatgtgaacgaatgccttgaaggggacttctgctttcctcacggagagtgtctcaacacggatggctcttttgcttgcacctgtgcacccggttatcgaccaggcccgcgcggtgcctcctgtctggatgtagatgaatgcagcgaggaggacctgtgccaatcaggaatctgcactaacactgatgggtcatttgagtgcatttgtcctcccggccacagggctggacccgacctcgcttcctgcctggacgttgatgagtgccgagaacgcggccctgcactatgcggatcccagcgttgtgaaaattccccaggtagttatcgatgtgttcgagactgtgacccaggttaccatgctggaccagagggcacgtgcgacgacgtagacgaatgccaagagtatggacccgaaatctgcggcgcccagcgatgtgagaacacaccagggagctatcgttgcacgccagcctgcgaccccgggtatcaacctactccaggcggcggatgtcaagacgttgatgaatgcaggaataggtcattttgtggtgcgcacgcagtgtgccagaatttgcccggaagctttcagtgtctgtgtgatcaatatgaaggcgctcgagacggtcgtcattgtgtcgacgtcaacgagtgtgagacactacaaggcgtctgtggcgccgctttatgtgaaaacgtggagggatcctttctttgtgtttgtcctaactcccccgaggagtttgaccccatgaccggacgatgtgtgccaccccgtacatccgcagggactttccctgggtcacagcctcaagcccccgctagcccagtgctgcctgcccgcccacccccccccccgctgcctcggcggccttctaccccacgccaaggccctgtcgggagcggacgccgcgagtgttacttcgataccgctgctcccgatgcctgtgacaacatccttgcccgcaacgtgacctggcaagaatgttgttgcacagtgggtgagggctgggggagtggctgtcgcattcagcagtgtcctggaacggagaccgccgaatatcaaagcctgtgcccacacggtcggggctacctggctccatctggggacctgagcctgaggcgggatgtggatgagtgccagctcttccgcgaccaggtctgcaagtccggtgtttgcgttaatacggcacctgggtattcttgttattgctccaatggctactactaccatacacagaggctggaatgcatcgacaatgacgaatgcgcagatgaagagcctgcctgcgaaggagggcggtgtgtgaacacggtaggcagctaccactgcacctgcgagccgccgctggttcttgacggttctcaaaggcgatgcgtgtctaatgagtctcagtcactggatgacaatctgggcgtgtgttggcaagaagtaggggccgatctggtgtgtagtcacccccgtctcgacaggcaggccacgtacaccgagtgttgttgcctttatggggaagcttggggtatggattgcgctctctgccctgcccaggatagcgatgactttgaggcactgtgcaatgtgctccgccccccagcatacagccctccaaggcccggcggcttcgggctcccttacgagtatggacccgaccttggaccaccctatcagggactgccttatggacctgaactctaccctcctcccgctctgccttatgatccctatccgcctccccctggtcccttcgcacggagggaggcgccttacggcgctcctcggtttgacatgccagactttgaggatgacggcgggccttatggcgagagtgaggcgcccgcacccccgggccccgggactaggtggccttaccgttcacgggataccagaagaagttttcctgaaccagaggaaccccctgagggaggatcctatgctgggtcgctggccgaaccttatgaggaactcgaggccgaggaatgcggcatactggacggctgcaccaacggtaggtgcgtgcgcgtcccggaaggcttcacttgcaggtgtttcgacggctatcgcctggacatgactcgtatggcctgtgttgacattaatgagtgcgatgaggctgaagccgcctctcctctatgcgtaaacgctagatgtctgaacactgacggatcttttaggtgtatctgcaggcccggctttgcccccacccaccagccccaccattgtgcccccgcacgccctcgcgcttag

SEQ ID NO: 33695 - DNA, 4958 bp, Artificial Sequence
  derived and/or modified sequence
agcgcggcgctgcagccatggcgggcggcgtgcggctgctctgggtgtcgctattggtgctgctggcgcagctagggccgcagcctggactgggccggctcggagagcgtctccgcgtgcgcttcaccccggtcgtgtgcggcctgcgctgcgtccatgggccgaccggctcccgctgtaccccgacctgcgcgccccgcaacgccaccagcgtggacagcggcgctcccggcggggcggccccggggggacccggcttccgcgccttcctgtgtcccttgatctgtcacaatggcggtgtgtgcgtgaagcctgaccgctgcctctgtcccccggacttcgctggcaagttctgccagttgcactcctcgggcgcccggcccccggccccggctgtaccaggcctcacccgctccgtgtacactatgccactggccaaccaccgcgacgacgagcacggcgtggcatctatggtgagcgtccacgtggagcacccgcaggaggcgtcggtggtggtgcaccaggtggagcgtgtgtctggcccttgggaggaggcggacgctgaggcggtggcgcgggcggaagcggcggcgcgggcggaggcggcagcgccctacacggtgttggcacagagcgcgccgcgggaggacggctactcagatgcctcgggcttcggttactgctttcgggagctgcgcggaggcgaatgcgcgtccccgctgcccgggctccggacgcaggaggtctgctgccgaggggccggcttggcctggggcgttcacgactgtcagctgtgctccgagcgcctggggaactccgaaagagtgagcgccccagatggaccttgtccaaccggctttgaaagagttaatgggtcctgcgaagatgtggatgagtgcgcgactggcgggcgctgccagcacggcgagtgtgcaaacacgcgcggcgggtacacgtgtgtgtgccccgacggctttctgctcgactcgtcccgcagcagctgcatctcccaacacgtgatctcagaggccaaagggccctgcttccgcgtgctccgcgacggcggctgttcgctgcccattctgcggaacatcactaaacagatctgctgctgcagccgcgtaggcaaggcctggggccggggctgccagctctgcccacccttcggctcagagggtttccgggagatctgcccggctggtcctggttaccactactcggcctccgacctccgctacaacaccagacccctgggccaggagccaccccgagtgtcactcagccagcctcgtaccctgccagccacctctcggccatctgcaggctttctgcccacccatcgcctggagccccggcctgaaccccggcccgatccccggcccggccctgagcttcccttgcccagcatccctgcctggactggtcctgagattcctgaatcaggtccctcctccggcatgtgtcagcgcaacccccaggtctgcggcccaggacgctgcatttcccggcccagcggctacacctgcgcttgcgactctggcttccggctcagcccccagggcacccgatgcattgatgtggacgaatgtcgccgcgtgcccccgccctgtgctcccgggcgctgcgagaactcaccaggcagcttccgctgcgtgtgcggcccgggcttccgagccggcccacgggctgcggaatgcctggatgtggacgagtgccaccgcgtgccgccgccgtgtgacctcgggcgctgcgagaacacgccaggcagcttcctgtgcgtgtgccccgccgggtaccaggctgcaccgcacggagccagctgccaggatgtggatgaatgcacccagagcccaggcctgtgtggccgaggggcctgcaagaacctgcctggctctttccgctgtgtttgcccggctggcttccggggctcggcgtgtgaagaggatgtggatgagtgtgcccaggagccgccgccctgtgggcccggccgctgtgacaacacggcaggctcctttcactgtgcctgccctgctggcttccgctcccgagggcccggggccccctgccaagatgtggatgagtgtgcccgaagccccccaccctgcacctacggccggtgtgagaacacagaaggcagcttccagtgtgtctgccccatgggcttccaacccaacactgctggctccgagtgcgaggatgtggatgagtgtgagaaccacctcgcatgccctgggcaggagtgtgtgaactcgcccggctccttccagtgcaggacctgtccttctggccaccacctgcaccgtggcagatgcactgatgtggacgaatgcagttcgggtgcccctccctgtggtccccacggccactgcactaacaccgaaggctccttccgctgcagctgcgcgccaggctaccgggcgccgtcgggtcggcccgggccctgcgcagacgtgaacgagtgcctggagggcgatttctgcttccctcacggcgagtgcctcaacactgacggctcctttgcctgtacttgtgcccctggctaccgacccggaccccgcggagcctcttgcctcgacgttgacgagtgcagcgaggaggacctttgccagagcggcatctgtaccaacaccgacggctccttcgagtgcatctgtcctccgggacaccgcgctggcccggacctcgcctcctgcctcgacgtggacgaatgtcgcgagcgaggcccagccctgtgcgggtcgcagcgctgtgagaactctcccggctcctaccgctgtgtccgggactgcgatcctgggtaccacgcgggccccgagggcacctgtgacgatgtggatgagtgccaagaatatggtcccgagatttgtggagcccagcgttgtgagaacacccctggctcctaccgctgcacaccagcctgtgaccctggctatcagcccacgccagggggcggatgccaggatgtggacgaatgccggaaccggtccttctgcggtgcccacgccgtgtgccagaacctgcccggctccttccagtgcctctgtgaccagtacgagggggcacgggatgggcgtcactgcgtggatgtgaacgagtgtgaaacactacagggtgtatgtggagctgccctgtgtgaaaatgtcgaaggctccttcctctgtgtctgccccaacagcccggaagagtttgaccccatgactggacgctgtgttcccccacgaacttctgctggcacgttcccaggctcgcagccccaggcacctgctagccccgttctgcccgccaggccacctccgccacccctgccccgccgacccagcacacctaggcagggccctgtggggagtgggcgccgggagtgctactttgacacagcggccccggatgcatgtgacaacatcctggctcggaatgtgacatggcaggagtgctgctgtactgtgggtgagggctggggcagcggctgccgcatccagcagtgcccgggcaccgagacagctgagtaccagtcattgtgccctcacggccggggctacctggcgcccagtggagacctgagcctccggagagacgtggacgaatgtcagctcttccgagaccaggtgtgcaagagtggcgtgtgtgtgaacacggccccgggctactcatgctattgcagcaacggctactactaccacacacagcggctggagtgcatcgacaatgacgagtgcgccgatgaggaaccggcctgtgagggcggccgctgtgtcaacactgtgggctcttatcactgtacctgcgagcccccactggtgctggatggctcgcagcgccgctgcgtctccaacgagagccagagcctcgatgacaatctgggagtgtgctggcaggaagtgggggctgacctcgtgtgcagccaccctcggctggaccgtcaggccacctacacagagtgctgctgcctgtatggagaggcctggggcatggactgcgccctctgccctgcgcaggactcagatgacttcgaggccctgtgcaatgtgctacgcccccccgcatatagccccccgcgaccaggtggctttggactcccctacgagtacggcccagacttaggtccaccttaccagggcctcccatatgggcctgagttgtacccaccacctgcgctaccctacgacccctacccaccgccacctgggcccttcgcccgccgggaggctccttatggggcaccccgcttcgacatgccagactttgaggacgatggtggcccctatggcgaatctgaggctcctgcgccacctggcccgggcacccgctggccctatcggtcccgggacacccgccgctccttcccagagcccgaggagcctcctgaaggtggaagctatgctggttccctggctgagccctacgaggagctggaggcggaggagtgcgggatcctggacggctgcaccaacggccgctgcgtgcgcgtccccgaaggcttcacctgccgttgcttcgacggctaccgcctggacatgacccgcatggcctgcgttgacatcaacgagtgtgatgaggccgaggctgcctccccgctgtgcgtcaacgcgcgttgcctcaacacggatggctccttccgctgcatctgccgcccgggattcgcacccacgcaccagccgcaccactgtgcgcccgcacggccccgggcctgagccctggcacccgctggccgcccacccgcgcccgccactcggggcccctgccgcgcatcctgcagcccgcttatgcgtatgtgcacggggccgcccgcctggacctggagaagggacctacggacgcctggaagctgcgacgccctgcactgctcccgcctccaccagcgcctcccactgatgtcgtggtcccgggcctggcccaggggcccctttacatgccctctcccttttataaaattttccattaaaaaccacctattttctatc

SEQ ID NO: 33696 - DNA, 4671 bp, Artificial Sequence
  derived and/or modified sequence
atggccggcggcgtgcggctgctgtgggtgtccctgctggtgctgctggcccagctgggcccccagcccggcctgggccgcctgggggagcggctgcgggtgcgcttcacccctgtggtgtgtggcctgcgctgtgtgcacggccccaccggcagccgctgcacccccacctgtgcccccagaaatgccacctctgtggacagcggggcccctggaggagctgcccctgggggccctggcttccgggccttcctgtgccccctcatctgccacaacggcggcgtgtgtgtgaagccagaccgctgcctgtgccccccagactttgctgggaagttctgccagctgcacagcagcggggcccggcccccagccccagctgtgcccggcctgaccaggtctgtgtacaccatgcccctggccaaccacagagatgatgaacatggagtggcctccatggtgtctgtgcacgtggagcacccccaggaggcctctgtggtggtgcaccaggtggagcgggtgtctggcccctgggaggaggctgatgctgaggccgtggcccgggcagaggccgccgcccgggcagaggccgccgccccctacacagtgctggcccagagcgccccccgggaggatggctacagtgatgccagcggcttcggctactgcttccgggagctgcggggcggggagtgtgccagccccctgcccggcctgcggacccaggaggtgtgctgccgcggggccggcctggcctggggcgtgcatgactgccagctgtgcagcgagcggctgggcaacagcgagcgggtgtctgccccagatggcccctgccccactggatttgagcgggtgaatggcagctgtgaagatgtggatgaatgtgccaccggcggccgctgccagcacggggagtgtgccaacacccggggcggctacacctgtgtgtgcccagatggcttcctgctggacagcagccgcagcagctgcatcagccagcacgtgatcagcgaggccaagggcccctgcttccgggtgctgagagatggcggctgcagcctgcccatcctgaggaacatcaccaagcagatctgctgctgcagccgggtgggcaaggcctggggccggggctgccagctgtgccccccatttggaagtgagggcttccgggagatctgcccagctggccctggctaccactacagcgccagtgacctgcgctacaacacccggcccctgggccaggagcccccccgggtgtccctgagccagcccaggaccctgcctgccaccagccggcccagcgctggcttcctgcccacccaccggctggagcccaggcctgagcccaggccagaccccaggcctggccctgagctgcccctgcccagcatcccagcctggacaggccctgagatccctgagagcggccccagcagcggcatgtgccagaggaacccccaggtgtgtggccctggccgctgcatcagccggcccagcggctacacctgtgcctgtgacagcggcttccggctgagcccccagggcacccgctgcattgatgtggatgaatgtagaagagtgcccccaccctgtgcccctggccgctgtgagaacagccctggcagcttccgctgtgtgtgtggccctggcttccgggccggccccagggctgctgaatgtctggatgtggatgagtgccaccgggtgcccccaccctgtgacctgggccgctgtgagaacaccccaggcagcttcctgtgtgtgtgcccagctggctaccaggccgccccccacggggccagctgccaggatgtggatgaatgtacccagagccctggcctgtgtggccgcggggcctgcaagaacctgcccggcagcttccgctgtgtgtgcccagctggcttccggggcagcgcctgtgaggaggatgtggatgaatgtgcccaggagcccccaccctgtggccctggccgctgtgacaacacagctggcagcttccactgtgcctgcccagctggcttccgcagccggggccctggggccccctgccaggatgtggatgaatgtgcccggagccccccaccctgcacctacggccgctgtgagaacacagagggcagcttccagtgtgtgtgccccatgggcttccagcccaacacagctggctctgaatgtgaagatgtggatgaatgtgagaaccacctggcctgccccggccaggagtgtgtgaacagccctggcagcttccagtgcaggacctgccccagcggccaccacctgcaccggggccgctgcacagatgtggatgagtgcagcagcggggccccaccctgtggcccccacggccactgcaccaacacagagggcagcttccgctgcagctgtgcccctggctaccgggcccccagcggccggcccggcccctgtgctgatgtgaatgaatgtctggagggggacttctgcttcccccacggggagtgcctgaacacagatggcagctttgcctgcacctgtgcccctggctaccggcccggccccaggggggccagctgcctggatgtggatgagtgcagcgaggaggacctgtgccagagcggcatctgcaccaacacagatggcagctttgagtgcatctgccccccaggccacagagctggccctgacctggccagctgcctggatgtggatgaatgtcgggagcggggccctgccctgtgtggcagccagagatgtgagaacagccctggcagctaccgctgtgtgcgggactgtgaccccggctaccacgccggccctgagggcacctgtgatgatgtggatgagtgccaggagtatggccctgagatctgtggggcccagagatgtgagaacaccccaggcagctaccgctgcaccccagcctgtgaccccggctaccagcccacccctgggggcggctgccaggatgtggatgaatgtagaaacagaagcttctgtggggcccatgctgtgtgccagaacctgcccggcagcttccagtgcctgtgtgaccagtatgagggcgccagagatggccgccactgtgtggatgtgaatgaatgtgagaccctgcagggcgtgtgtggggccgccctgtgtgaaaatgtggagggcagcttcctgtgtgtgtgccccaacagccctgaggagtttgaccccatgacaggccgctgtgtgccccccaggaccagcgctggcaccttccctggcagccagccccaggccccagccagccctgtgctgcctgcccggcccccacctccacccctgccccggcggcccagcaccccccggcagggccctgtgggcagcggccggcgggagtgctactttgacacagctgccccagatgcctgtgacaacatcctggccagaaatgtgacctggcaggagtgctgctgcaccgtgggggagggctggggcagcggctgccgcatccagcagtgccccggcacagaaacagctgagtaccagagcctgtgcccccacggccggggctacctggcccccagcggggacctgagcctgcggagagatgtggatgagtgccagctgttccgggaccaggtgtgcaagtctggagtgtgtgtgaacacagcccctggctacagctgctactgcagcaatggctactactaccacacccagaggctggagtgcatcgacaatgatgaatgtgctgatgaggagcccgcctgtgagggcggccgctgtgtgaacacagtgggcagctaccactgcacctgtgagccccccctggtgctggatggcagccagaggcgctgtgtgtccaatgaaagccagagcctggatgacaacctgggcgtgtgctggcaggaggtgggcgctgacctggtgtgcagccacccccggctggaccggcaggccacctacacagagtgctgctgcctgtatggagaggcctggggcatggactgtgccctgtgcccagcccaggacagtgatgactttgaggccctgtgcaatgtgctgcggcccccagcctacagcccccccaggcctgggggcttcggcctgccctatgaatatggccctgacctgggccccccctaccagggcctgccctacggccctgagctgtacccacctccagccctgccctatgacccctacccacctcctcctggcccctttgcccggcgggaggccccctacggggcccccaggtttgacatgccagactttgaagatgatggcggcccctatggagagagcgaggccccagcccctcctggccctggcacccgctggccctaccgcagccgggacacccggcgctccttccctgagcctgaggagcccccagagggcggcagctatgccggcagcctggccgagccctatgaggagctggaggccgaggagtgtggcatcctggatggctgcaccaacggccgctgtgtgcgggtgcctgagggcttcacctgccgctgctttgatggctaccgcctggacatgaccaggatggcctgtgtggacatcaatgaatgtgatgaagctgaggccgccagccccctgtgtgtgaatgcccgctgcctgaacacagatggcagcttccgctgcatctgccggcccggctttgcccccacccaccagccccaccactgtgccccagcccggccccgggcctag

SEQ ID NO: 33697 - DNA, 4671 bp, Artificial Sequence
  derived and/or modified sequence
atggccggcggcgtgcggctgctgtgggtgagcctgctggtgctgctcgcgcaactcggacctcagcccggccttggccggttaggcgagagacttagagttagattcactcctgtagtctgcggcttgcggtgcgttcacggaccgaccggctctcggtgcacaccgacgtgcgcaccccggaatgcgacctctgtggacagtggggcccccggtggtgcggccccaggcggtcccggatttcgtgctttcctatgccccctcatctgtcataacggtggcgtgtgtgtcaagcccgatcgctgcctttgtcctccggattttgccggaaagttctgccagctgcactcctccggtgctcgaccgcccgccccggctgttccgggacttactcgctctgtttatactatgcccttagccaaccacagagacgatgaacacggggtggctagcatggtgagtgtgcacgtggaacatccacaggaagccagcgttgtcgtgcaccaggttgagagagtgtcgggaccctgggaggaggccgacgctgaagccgttgccagagccgaggcggcggcaagggctgaggctgccgccccctataccgtgctggcacaatcagcccctagagaggacggttattctgatgcaagtggatttgggtattgtttccgcgagctgcgggggggtgaatgcgccagtccactgccaggcctccggacgcaggaagtctgttgtcgcggggctggcctggcttggggggtgcacgactgtcagttatgctcagagaggttgggcaacagcgagcgtgtgagtgccccggatgggccttgcccaactggctttgaaagggtcaacgggagctgcgaggacgtggatgagtgtgctactggcggccgctgccagcacggcgaatgtgccaacacaagaggaggatacacttgcgtttgcccggacggctttcttctggatagctctagatcatcttgtatctcgcagcacgtgatatccgaagctaagggaccatgctttcgagttctgcgcgacggcggttgcagcctacctattcttagaaatatcactaaacagatatgttgttgctcgagggttggcaaggcgtgggggcgtgggtgtcaactatgccccccttttggaagtgaagggtttagagaaatttgtcctgctggacccggctaccactattccgcttctgacctacggtacaacacgcggccgttaggacaggagcctcctcgtgttagccttagccagccacgcactctgcccgccacgagccggcccagtgcaggatttcttccgacacacaggttggagcctaggcctgagccccggcccgatccaaggcctgggcccgagctgcctctgcctagtattcctgcctggaccggcccagaaattcctgaaagcgggccttccagtggtatgtgtcagcgaaaccctcaggtgtgtggtcctggccgctgtatatcacggccctctggatacacatgcgcttgtgatagtggctttcgtctgagcccccaggggactcggtgcattgacgtggacgagtgtcgccgggtccctcccccatgtgcccccggtaggtgcgaaaactctccaggcagctttcgctgcgtgtgtggtccaggctttcgcgcaggacctcgggcagctgagtgcctggatgtagacgaatgtcacagggtgcctcccccctgcgacctggggagatgtgagaacactcccggttcattcttgtgcgtctgcccagccggttaccaggccgccccccacggagctagctgccaggatgttgacgagtgtacacagagcccaggtctctgtggaagaggtgcctgtaagaacctcccagggtcattccgctgcgtctgccccgcaggttttcgcggctccgcctgtgaggaagacgtcgatgagtgtgcacaggaaccacctccctgtggacccgggcgatgcgataacaccgctggttcgtttcattgcgcgtgccctgctgggtttcggagccggggtccaggagccccttgtcaggacgtcgacgaatgcgccaggtctcccccgccgtgcacatacgggcgctgcgagaacaccgagggttcctttcagtgtgtctgtcccatgggattccaacctaacactgctggatccgaatgcgaggacgtggatgagtgcgagaaccacctggcttgtcctggccaggagtgtgtcaatagtcctggtagctttcagtgtagaacctgtccttccggacatcatttgcatcggggccgttgcacagatgtggatgagtgttcctcaggagcccccccatgtgggccccatgggcattgtactaacaccgagggctccttccgttgctcatgtgctcccgggtaccgggccccttccggcaggccagggccttgtgccgacgtgaatgagtgtcttgagggtgatttctgctttcctcatggggagtgtctgaatacggacggcagttttgcctgtacctgcgcccctggctatagaccaggccctaggggcgcatcatgcttggacgttgacgaatgcagtgaggaggacctgtgtcaatctgggatttgtaccaatactgacggctctttcgagtgtatatgcccgcccggacaccgggcagggccagatctcgctagttgtctggatgtcgacgagtgcagagaacgcggcccagccctgtgcggtagccagaggtgtgagaatagtcccggctcttatcggtgtgttagggactgtgatccagggtatcacgccggccccgagggaacatgcgatgacgtggacgagtgccaggaatacggacctgagatctgtggcgcccaaagatgcgaaaatacaccaggtagctatcgctgtacccccgcctgcgaccctggttaccagcccactcctgggggcggttgtcaggacgtggacgagtgtcggaatagaagcttttgtggagcgcatgctgtctgccaaaacctgccaggtagctttcaatgtctctgtgaccaatatgaaggtgctagggacggccgtcattgtgtggacgttaacgagtgcgagactctgcagggcgtttgcggagcggcactgtgcgaaaatgtagaaggatcttttctctgcgtctgccccaactcccccgaagaattcgatcctatgaccggaaggtgtgtaccgcctcgcacttctgcagggactttccctgggagtcagccacaagcacctgcatcacccgtgctgccagcacggcctcccccaccacccctgccacgaagaccctccactccgcggcaagggcctgtaggttcagggcgtcgcgagtgttactttgacaccgccgcccctgatgcctgtgataacatccttgctagaaatgtcacttggcaggaatgctgctgcaccgtcggcgagggatggggaagtgggtgtagaatccaacagtgtccgggcacagaaactgccgaatatcaatcactgtgccctcacgggagaggatatttggccccttcgggggacttgtcattaaggagggatgtggatgagtgtcagcttttccgggaccaagtatgtaaatctggagtttgtgtcaacacagctcctgggtactcttgttattgttcgaacggctattactatcacacccagcgcctagagtgcatcgataacgatgagtgtgcagatgaggagcctgcgtgcgaaggcggtcgttgtgtgaataccgtggggtcctatcattgcacctgcgagcccccactggtgttagatggcagtcagaggaggtgcgtctcaaatgagagccagagtctggacgataacctcggagtgtgttggcaggaagtcggggccgacctggtctgtagtcacccacgcctggataggcaggccacttatacagagtgttgctgtctctacggcgaggcctggggaatggattgcgccttgtgtccggcccaggactcggacgacttcgaggccctgtgtaacgtgctgcgaccgcctgcctactctcccccgaggccaggaggatttgggctgccttacgaatatggcccggacttgggaccaccatatcaaggcctcccttacggacccgagctgtatccaccgccagccttaccatacgacccctaccccccgccaccgggcccctttgcaaggagagaggccccatacggcgcaccacgctttgatatgcccgattttgaggacgatggggggccttacggcgagtcagaggcccctgctccccctgggccaggaaccaggtggccctatcgcagcagagataccagacggagtttcccagagcccgaggaacctcccgagggagggtcctacgccggatctctcgctgagccctatgaagagttggaggctgaagagtgcgggatcctggatggatgtactaatggtaggtgtgtgcgcgtacctgagggcttcacatgccgatgcttcgatggttaccggctcgacatgacgcgaatggcctgcgtagacattaatgagtgtgacgaggccgaggcagctagtcccctttgcgtgaatgccagatgtctgaacacagatggtagctttcgttgcatctgccggccagggtttgctcccacccaccaaccacatcattgtgcaccagcccgtccaagagcatag

SEQ ID NO: 33698 - DNA, 4671 bp, Artificial Sequence
  derived and/or modified sequence
atggccggaggagtccgcctgctgtgggtttccctgcttgtgctcctggctcaactcggaccccagccgggtctggggaggctgggagagaggctgagggtacggttcacacctgtggtgtgcggacttcggtgtgttcacgggccaacagggagtagatgtacacccacgtgtgcacccaggaacgccacttcggttgacagtggtgccccaggcggagctgctcccggagggcctgggtttagagccttcctgtgccccctgatctgtcacaatggcggtgtctgtgtgaaacccgaccgatgcttatgccctccggactttgcaggcaagttttgtcagcttcacagttcaggagcccgtcccccagctcccgctgttcctggactgaccaggtcagtgtataccatgcctctagccaaccatagagacgacgagcacggcgtggcctccatggtgagtgtgcatgtcgagcatccgcaagaggccagcgttgtcgtgcatcaggtagagcgggtgagtggcccatgggaagaagcagacgcggaagcagtagccagggctgaagcggctgcaagagcagaggccgctgcaccttatacagtgctggcgcagtctgccccacgagaggacggctatagcgatgcatctggatttgggtattgtttcagggagttgcggggaggggagtgcgcctctccgctcccaggcctgcggacgcaggaagtatgttgtaggggagctggactagcgtggggtgttcacgactgtcagctctgctcagagcggttgggtaacagtgaaagggtttctgctcccgacggaccgtgtcccactggctttgaacgcgttaacggctcttgcgaggatgtagacgagtgcgcaacgggaggacgttgccagcatggcgaatgcgcgaatacccgaggtgggtacacctgcgtctgcccagatggcttcctgctcgactcatccagaagtagttgcatcagccagcatgtcatatccgaagcgaaaggcccatgcttcagagtgctgcgggacggcggttgttccctgcctatcctccgcaatatcacaaaacagatatgttgctgcagccgtgtgggaaaggcttggggacgcggatgccagctatgcccccctttcggttccgagggatttcgcgaaatctgcccagccggacccggatatcactacagtgcgtctgatctccgctacaatacgaggcctctaggccaggagccccctcgtgtaagcctgtctcagccacgtaccttacccgctaccagcaggccctcggcaggtttcctccccactcatcgcctggagccgaggcccgaaccacgccctgatccacgacccggtccagaattgcctctgccttccatccctgcttggaccggaccagagatcccggagtctgggccatcctccggcatgtgccaacgcaatccacaggtgtgcggaccagggaggtgtatctcacggccaagtggctacacctgcgcctgcgatagcggtttccgcctgtccccccaggggacgcggtgtattgatgttgatgagtgtagacgcgttcctcccccatgtgccccaggacgatgtgaaaactcaccagggtctttcaggtgtgtttgcgggcctgggtttcgtgccggacctcgggctgcagaatgcctggatgtcgacgagtgccatcgggtgccccctccatgtgacctgggccgatgcgagaacacaccgggatcttttctgtgtgtgtgtcctgcaggctaccaagctgccccacatggtgccagctgtcaggacgttgacgaatgtacacagtctcccggactctgtggcaggggggcttgcaagaacttacccggttcttttcgctgcgtttgccctgcgggatttagaggatccgcttgtgaggaggacgtagatgagtgcgcacaggagccgccaccctgtggtcccggtcgatgcgataataccgccggatctttccactgtgcttgccccgctgggtttcggtctcgcggaccaggcgctccctgccaggacgttgatgaatgtgccaggagcccaccaccttgtacctacggaagatgtgaaaatactgagggaagcttccagtgcgtttgtcctatgggctttcagccaaatactgccggatctgagtgtgaggatgtggacgagtgtgagaatcatctggcgtgtcccggtcaggagtgtgttaattcgccgggatccttccaatgccgaacctgtcccagcgggcatcacctgcatcggggaaggtgtacagatgtcgatgagtgcagttcaggcgcaccaccttgtggacctcacggccactgtactaacacagagggctcctttagatgctcctgcgcacctggctacagggcaccctccgggagaccaggcccatgcgctgacgtgaacgagtgccttgaaggtgacttttgttttccccatggtgagtgcttgaacactgacggctcttttgcttgcacatgcgcccctggctacagaccgggtcctaggggggcatcctgtctcgatgttgatgaatgcagcgaagaggacctctgccaaagcgggatctgcactaatactgatggttccttcgaatgtatatgcccaccgggacaccgtgccggaccggacctggcttcctgcctggacgtggatgaatgcagagaacgcggacccgctctgtgtggctcacagcggtgcgagaactctccgggaagctaccgctgcgtgcgcgactgtgatcctgggtatcatgccggacccgaaggcacctgcgatgacgtggacgaatgccaagagtatgggcctgaaatatgtggtgcacaacgctgtgagaatacgcctggctcttacaggtgcacacctgcttgcgaccctggatatcagccgacgccagggggtggatgccaagacgtagacgagtgtagaaacaggtccttctgcggcgcacacgcagtctgtcagaacctgccaggcagcttccagtgcctctgtgaccaatacgaaggtgcacgggatgggaggcactgtgtcgacgtgaatgagtgcgagactctgcaaggtgtgtgcggcgctgccctgtgtgagaacgtcgagggctctttcctgtgcgtctgccccaacagtccggaagaattcgaccctatgactgggagatgcgttccaccacggaccagcgccggaacctttcccggtagtcagccccaagctcctgcctcgccagtgctgcccgcaaggcctccgcctccgccactcccaaggcggcctagcacaccccgtcaggggcctgttggttcaggaagaagagagtgctattttgacactgctgctcctgacgcttgtgataatattcttgccagaaacgtgacttggcaagagtgttgttgtactgttggcgagggctggggcagcgggtgtcggattcagcagtgtcctggcacagagactgcagagtaccagtcactgtgcccccatgggagaggatacttggcaccctcaggcgatctgagtctgcggagggacgtcgacgaatgtcagctgttcagagatcaggtgtgcaagtccggcgtttgtgtgaacacagcccctggatactcttgctactgctcaaatgggtactactaccatacgcagcgactcgagtgcatcgacaacgacgagtgcgcagacgaggaacccgcatgtgagggaggcaggtgcgtcaacactgtcggctcataccattgtacatgtgaacccccactggtgctcgatggttctcagagacgatgcgtgtccaacgagagccaatccctggatgataacctaggggtgtgctggcaggaggtgggtgcagacctggtgtgctcccatccaaggctggatcgtcaggcgacctatactgagtgctgttgcttgtatggagaggcttggggcatggactgtgccctttgtcccgcacaagactctgatgactttgaagcactgtgcaacgtccttcggcctcccgcttactctccccctcgaccgggtggttttggtctgccctatgaatatggtcccgacttgggcccaccataccagggtctcccctatgggcctgagctatatcccccacccgctcttccctatgacccttacccaccgcctcccggtccattcgcacggcgtgaggctccctatggagccccacgattcgatatgccagatttcgaagacgatggcggtccgtacggggagtccgaggcacctgcgcctccaggacctggcacaaggtggccatataggtctcgggacacaaggcgctcctttcccgagcccgaggaaccaccggaagggggaagttatgctggatctctcgcagagccttatgaggaacttgaagctgaggagtgcggcattctggacgggtgcactaatggcaggtgtgtcagagtgcctgaaggattcacctgtagatgttttgatggctaccggctggacatgactcggatggcctgtgtggatatcaatgaatgcgacgaagcggaagccgcttctcccctctgtgtgaatgccaggtgcctcaacactgacggcagcttccggtgtatctgtagacccggattcgccccaacccaccaaccacaccattgcgcaccagcgaggccacgagcctag

SEQ ID NO: 33699 - DNA, 4671 bp, Artificial Sequence
  derived and/or modified sequence
atggccggcggcgtgagactgctgtgggtgagcctgctggtgctgctggcccagctgggcccccagcccggcctgggcagactgggcgagagactgagagtgagattcacccccgtggtgtgcggcctgagatgcgtgcacggccccaccggcagcagatgcacccccacctgcgcccccagaaacgccaccagcgtggacagcggcgcccccggcggcgccgcccccggcggccccggcttcagagccttcctgtgccccctgatctgccacaacggcggcgtgtgcgtgaagcccgacagatgcctgtgcccccccgacttcgccggcaagttctgccagctgcacagcagcggcgccagaccccccgcccccgccgtgcccggcctgaccagaagcgtgtacaccatgcccctggccaaccacagagacgacgagcacggcgtggccagcatggtgagcgtgcacgtggagcacccccaggaggccagcgtggtggtgcaccaggtggagagagtgagcggcccctgggaggaggccgacgccgaggccgtggccagagccgaggccgccgccagagccgaggccgccgccccctacaccgtgctggcccagagcgcccccagagaggacggctacagcgacgccagcggcttcggctactgcttcagagagctgagaggcggcgagtgcgccagccccctgcccggcctgagaacccaggaggtgtgctgcagaggcgccggcctggcctggggcgtgcacgactgccagctgtgcagcgagagactgggcaacagcgagagagtgagcgcccccgacggcccctgccccaccggcttcgagagagtgaacggcagctgcgaggacgtggacgagtgcgccaccggcggcagatgccagcacggcgagtgcgccaacaccagaggcggctacacctgcgtgtgccccgacggcttcctgctggacagcagcagaagcagctgcatcagccagcacgtgatcagcgaggccaagggcccctgcttcagagtgctgagagacggcggctgcagcctgcccatcctgagaaacatcaccaagcagatctgctgctgcagcagagtgggcaaggcctggggcagaggctgccagctgtgcccccccttcggcagcgagggcttcagagagatctgccccgccggccccggctaccactacagcgccagcgacctgagatacaacaccagacccctgggccaggagccccccagagtgagcctgagccagcccagaaccctgcccgccaccagcagacccagcgccggcttcctgcccacccacagactggagcccagacccgagcccagacccgaccccagacccggccccgagctgcccctgcccagcatccccgcctggaccggccccgagatccccgagagcggccccagcagcggcatgtgccagagaaacccccaggtgtgcggccccggcagatgcatcagcagacccagcggctacacctgcgcctgcgacagcggcttcagactgagcccccagggcaccagatgcatcgacgtggacgagtgcagaagagtgccccccccctgcgcccccggcagatgcgagaacagccccggcagcttcagatgcgtgtgcggccccggcttcagagccggccccagagccgccgagtgcctggacgtggacgagtgccacagagtgccccccccctgcgacctgggcagatgcgagaacacccccggcagcttcctgtgcgtgtgccccgccggctaccaggccgccccccacggcgccagctgccaggacgtggacgagtgcacccagagccccggcctgtgcggcagaggcgcctgcaagaacctgcccggcagcttcagatgcgtgtgccccgccggcttcagaggcagcgcctgcgaggaggacgtggacgagtgcgcccaggagccccccccctgcggccccggcagatgcgacaacaccgccggcagcttccactgcgcctgccccgccggcttcagaagcagaggccccggcgccccctgccaggacgtggacgagtgcgccagaagcccccccccctgcacctacggcagatgcgagaacaccgagggcagcttccagtgcgtgtgccccatgggcttccagcccaacaccgccggcagcgagtgcgaggacgtggacgagtgcgagaaccacctggcctgccccggccaggagtgcgtgaacagccccggcagcttccagtgcagaacctgccccagcggccaccacctgcacagaggcagatgcaccgacgtggacgagtgcagcagcggcgcccccccctgcggcccccacggccactgcaccaacaccgagggcagcttcagatgcagctgcgcccccggctacagagcccccagcggcagacccggcccctgcgccgacgtgaacgagtgcctggagggcgacttctgcttcccccacggcgagtgcctgaacaccgacggcagcttcgcctgcacctgcgcccccggctacagacccggccccagaggcgccagctgcctggacgtggacgagtgcagcgaggaggacctgtgccagagcggcatctgcaccaacaccgacggcagcttcgagtgcatctgcccccccggccacagagccggccccgacctggccagctgcctggacgtggacgagtgcagagagagaggccccgccctgtgcggcagccagagatgcgagaacagccccggcagctacagatgcgtgagagactgcgaccccggctaccacgccggccccgagggcacctgcgacgacgtggacgagtgccaggagtacggccccgagatctgcggcgcccagagatgcgagaacacccccggcagctacagatgcacccccgcctgcgaccccggctaccagcccacccccggcggcggctgccaggacgtggacgagtgcagaaacagaagcttctgcggcgcccacgccgtgtgccagaacctgcccggcagcttccagtgcctgtgcgaccagtacgagggcgccagagacggcagacactgcgtggacgtgaacgagtgcgagaccctgcagggcgtgtgcggcgccgccctgtgcgagaacgtggagggcagcttcctgtgcgtgtgccccaacagccccgaggagttcgaccccatgaccggcagatgcgtgccccccagaaccagcgccggcaccttccccggcagccagccccaggcccccgccagccccgtgctgcccgccagacccccccccccccccctgcccagaagacccagcacccccagacagggccccgtgggcagcggcagaagagagtgctacttcgacaccgccgcccccgacgcctgcgacaacatcctggccagaaacgtgacctggcaggagtgctgctgcaccgtgggcgagggctggggcagcggctgcagaatccagcagtgccccggcaccgagaccgccgagtaccagagcctgtgcccccacggcagaggctacctggcccccagcggcgacctgagcctgagaagagacgtggacgagtgccagctgttcagagaccaggtgtgcaagagcggcgtgtgcgtgaacaccgcccccggctacagctgctactgcagcaacggctactactaccacacccagagactggagtgcatcgacaacgacgagtgcgccgacgaggagcccgcctgcgagggcggcagatgcgtgaacaccgtgggcagctaccactgcacctgcgagccccccctggtgctggacggcagccagagaagatgcgtgagcaacgagagccagagcctggacgacaacctgggcgtgtgctggcaggaggtgggcgccgacctggtgtgcagccaccccagactggacagacaggccacctacaccgagtgctgctgcctgtacggcgaggcctggggcatggactgcgccctgtgccccgcccaggacagcgacgacttcgaggccctgtgcaacgtgctgagaccccccgcctacagcccccccagacccggcggcttcggcctgccctacgagtacggccccgacctgggccccccctaccagggcctgccctacggccccgagctgtaccccccccccgccctgccctacgacccctacccccccccccccggccccttcgccagaagagaggccccctacggcgcccccagattcgacatgcccgacttcgaggacgacggcggcccctacggcgagagcgaggcccccgccccccccggccccggcaccagatggccctacagaagcagagacaccagaagaagcttccccgagcccgaggagccccccgagggcggcagctacgccggcagcctggccgagccctacgaggagctggaggccgaggagtgcggcatcctggacggctgcaccaacggcagatgcgtgagagtgcccgagggcttcacctgcagatgcttcgacggctacagactggacatgaccagaatggcctgcgtggacatcaacgagtgcgacgaggccgaggccgccagccccctgtgcgtgaacgccagatgcctgaacaccgacggcagcttcagatgcatctgcagacccggcttcgcccccacccaccagccccaccactgcgcccccgccagacccagagcctag

SEQ ID NO: 33700 - protein, 380 aa, Artificial Sequence
  derived and/or modified sequence
MAADGDWQDFYEFQEPARSLLDQENCNASPEPGAEAGAEAGGGADGFPAPACSLEEKLSLCFRPSDPGAEPPRTAVRPITERSLLQGDEIWNALTDNYGNVMPVDWKSSHTRTLHLLTLNLSEKGVSDSLLFDTSDDEELREQLDMHSIIVSCVNDEPLFTADQVIEEIEEMMQESPDPEDDETPTQSDRLSMLSQEIQTLKRSSTGSYEERVKRLSVSELNEILEEIETAIKEYSEELVQQLALRDELEFEKEVKNSFISVLIEVQNKQKEHKETAKKKKKLKNGSSQNGKNERSHMPGTRFSMEGISNVIQNGLRHTFGNSGGEKQYLTTVIPYEKKNGPPSVEDLQILTKILRAMKEDSEKVPSLLTDYILKVLCPT

SEQ ID NO: 33701 - DNA, 1143 bp, Artificial Sequence
  derived and/or modified sequence
atggccgccgacggcgactggcaggacttctacgagttccaggagcccgccagaagcctgctggaccaggagaactgcaacgccagccccgagcccggcgccgaggccggcgccgaggccggcggcggcgccgacggcttccccgcccccgcctgcagcctggaggagaagctgagcctgtgcttcagacccagcgaccccggcgccgagccccccagaaccgccgtgagacccatcaccgagagaagcctgctgcagggcgacgagatctggaacgccctgaccgacaactacggcaacgtgatgcccgtggactggaagagcagccacaccagaaccctgcacctgctgaccctgaacctgagcgagaagggcgtgagcgacagcctgctgttcgacaccagcgacgacgaggagctgagagagcagctggacatgcacagcatcatcgtgagctgcgtgaacgacgagcccctgttcaccgccgaccaggtgatcgaggagatcgaggagatgatgcaggagagccccgaccccgaggacgacgagacccccacccagagcgacagactgagcatgctgagccaggagatccagaccctgaagagaagcagcaccggcagctacgaggagagagtgaagagactgagcgtgagcgagctgaacgagatcctggaggagatcgagaccgccatcaaggagtacagcgaggagctggtgcagcagctggccctgagagacgagctggagttcgagaaggaggtgaagaacagcttcatcagcgtgctgatcgaggtgcagaacaagcagaaggagcacaaggagaccgccaagaagaagaagaagctgaagaacggcagcagccagaacggcaagaacgagagaagccacatgcccggcaccagattcagcatggagggcatcagcaacgtgatccagaacggcctgagacacaccttcggcaacagcggcggcgagaagcagtacctgaccaccgtgatcccctacgagaagaagaacggcccccccagcgtggaggacctgcagatcctgaccaagatcctgagagccatgaaggaggacagcgagaaggtgcccagcctgctgaccgactacatcctgaaggtgctgtgccccacctag

SEQ ID NO: 33702 - DNA, 1143 bp, Artificial Sequence
  derived and/or modified sequence
atggcagccgatggtgactggcaggacttctatgagtttcaggagcctgcaagatcattgctcgaccaggaaaattgcaatgcctctcccgagcccggtgccgaggcgggtgccgaggcgggcggtggtgcagatggatttcccgcccctgcatgttccctggaggagaagctttctttgtgttttagacccagcgatccaggagccgaaccccccaggactgccgttagacctattacagagagaagcctgttacagggcgatgagatctggaatgctctgaccgacaattatggcaacgttatgccagtggattggaaatccagtcacaccaggacccttcacctcctgaccctgaacctgagtgagaagggggttagtgacagcctgctctttgatacatcagacgacgaagaactcagagaacagctcgatatgcattcaatcatagtgtcttgcgtgaacgatgagcccctgtttactgccgatcaggttatcgaggagatcgaagaaatgatgcaggagagccctgacccagaggatgacgaaacccccacacagagcgaccgattgagcatgctgtcccaggagatccagaccctcaagagatcctcaactggttcgtacgaggagagggtgaaacgactttctgttagcgagctcaatgagatactggaggaaattgaaaccgctattaaggagtactctgaagaacttgttcagcaactcgcattgcgcgacgaacttgagttcgagaaagaagtgaaaaattcgtttatctcagtgctgatagaagttcagaataagcagaaggaacataaggagactgcgaaaaagaaaaagaagctgaaaaacgggtcctcccaaaacggaaagaatgagagaagtcacatgccaggcacccgcttctcgatggaggggatttccaatgtaattcagaatggactgcgacacacgttcggtaatagtggaggcgaaaagcagtatctgacaacagtgattccttacgagaagaaaaacgggcctccttcagtcgaagacctacagattctgacaaaaatcctccgtgcaatgaaagaagattcagagaaagtgccatccctgctgacagactatatcctgaaggtgctttgccctacctag

SEQ ID NO: 33703 - DNA, 2097 bp, Artificial Sequence
  derived and/or modified sequence
gggcgggctgggccggcctgggcggggcgcgcgactgctccgggcggcgatggcggcggacggggactggcaggatttctatgagttccaggagccggcccggagcctcctggaccaggagaactgtaacgcgagccccgagcctggggcggaggcgggggccgaggcgggtgggggcgccgacggtttcccggccccggcctgcagcttggaggagaagctgagcctgtgcttccgcccctcggatccgggcgccgagcccccgaggacggccgtgcggcccatcacggagcgcagcctcctgcagggggacgagatttggaatgccctgacagataattatgggaatgtgatgcctgtagactggaagtcatcgcatactaggaccttgcacttgcttactctgaacctctcagaaaaaggggtaagtgacagtttgctctttgatacatcagatgatgaagagctgagagaacagctggatatgcactcaatcatcgtctcctgtgttaatgatgaacccctcttcacggcagaccaggttattgaagaaattgaagaaatgatgcaggaatcaccggacccagaagatgatgaaacccctacacagtcagatcggctttcaatgctttcccaggaaattcaaactctcaagaggtctagtaccggcagttatgaagagagagtgaaaaggctctcagtgtctgagttaaatgaaatcctggaagaaattgagactgccattaaggagtactctgaggagctggtgcagcagttggctttacgagatgaactggagtttgaaaaggaagtgaaaaacagctttatttctgttcttattgaagtgcaaaacaaacagaaagagcacaaagaaacagcaaaaaagaaaaagaaactaaaaaatggcagctctcagaatgggaagaatgagagaagtcatatgcccggcacacgcttcagcatggaagggatctcaaatgtcattcagaatggcctccgccacacctttggaaattcaggtggagagaaacagtatttgactacagtcattccttatgagaaaaaaaacggaccaccgtctgttgaagatcttcaaatattaacaaaaattcttcgtgccatgaaggaggacagtgaaaaagttccgagcttgttaactgattatattctgaaagttctgtgtcctacatagagcagcaactttatctgcggtgggctccaagctagatttccgacagcattattctgagagctggctaccattacccttcttgctattggaaactcagcacatttgaacttgggtttgattcagtattaacagatcttgactacactaattctttatattatagaaccaacggaaatatgggcactattttgaattctagagatggtttttgttaaatctactaataaactgttctcttagtagattaagagagagtaatattaattgtgcatgtgcagttgtatttctcattaactgacagtatgcccatttgtttttatggctttcttatctaaactgcactgatgaactagattaaagccttgggagatttatactataaattcagtgatggcaagaaccaacactgtttttttgtgagaattgtcagtgtaactattacctaccagtattgttcagagagattgaaacagaataaacgggctgttcttgaagaagcaaaaccagaatatgcattactttggtttaatacttagtgctaacattgaaactgttggtggtgatggattttgtagcttgctgcttgtttcaccactggtcaaattttaaccattaaattgccattcacttttagaatcttgtatttaagttttgattttcaaatgttctgcttcatgtgtctgtgaagaattgtactttaagtgtgtgtcctctgaggtgcttgagaaagtgtacactgcagaactgcccattctcattactgtgtcctattttattcatgcctgtgtgtttttcttaagtatgaattctagatacagctacttatggattcatcaatatcatgagcacttttgctggttccagtcaaatcaatggcatttaataaattttttaagaagtaaaaa

SEQ ID NO: 33704 - DNA, 1143 bp, Artificial Sequence
  derived and/or modified sequence
atggctgctgatggagactggcaggacttctatgagttccaggagcccgcccggagcctgctggaccaggagaactgcaatgccagccctgagcccggggctgaggccggggctgaggccggcggcggcgcagatggcttccctgccccagcctgcagcctggaggagaagctgagcctgtgcttccggcccagcgaccctggagctgagccccccaggacagctgtgcggcccatcacagagaggagcctgctgcagggagatgagatctggaatgccctgacagacaactatggaaatgtgatgcctgtggactggaagagcagccacaccaggaccctgcacctgctgaccctgaacctgtctgagaagggcgtgtctgacagcctgctgtttgacaccagtgatgatgaggagctgcgggagcagctggacatgcacagcatcatcgtgtcctgtgtgaatgatgagcccctcttcaccgctgaccaggtgattgaggagattgaggagatgatgcaggagagcccagaccctgaagatgatgagacccccacccagagcgaccggctgtccatgctgagccaggagatccagaccctgaagaggagcagcacaggcagctatgaggagcgggtgaagaggctgtctgtgtctgagctgaatgagatcctggaggagattgaaacagccatcaaggagtacagcgaggagctggtgcagcagctggccctgagagatgagctggagtttgagaaggaggtgaagaacagcttcatctctgtgctgattgaggtgcagaacaagcagaaggagcacaaggagacagccaagaagaagaagaagctgaagaatggcagcagccagaatggcaagaatgaaagaagccacatgcctggcacccgcttctccatggagggcatcagcaatgtcatccagaatggcctgcggcacaccttcggcaacagcggcggggagaagcagtacctgaccaccgtcatcccctatgagaagaagaatggcccccccagcgtggaggacctgcagatcctgaccaagatcctgcgggccatgaaggaggacagcgagaaggtgcccagcctgctgacagactacatcctgaaggtgctgtgccccacctag

SEQ ID NO: 33705 - DNA, 1143 bp, Artificial Sequence
  derived and/or modified sequence
atggccgccgacggcgactggcaggacttctacgagttccaggagcctgcaagatctctgctagaccaggagaattgcaatgcaagtcccgaacccggggcagaagctggcgccgaagcagggggcggtgccgacggattccctgctcctgcctgcagccttgaggagaaattgtccctctgcttccggccttctgacccaggagccgaacctccacgaaccgccgtccggcccatcacggagcgtagtctgttgcagggcgacgagatctggaacgccttaaccgataattacggaaacgtgatgcccgttgactggaaaagtagccacactcgtaccctacatctgcttacactgaatctcagcgaaaagggcgtatccgattccctcctgtttgatacaagcgatgacgaggaattacgagagcagcttgatatgcactctattattgttagctgtgtcaacgacgaaccactattcacggccgatcaggtcatcgaagaaatagaggaaatgatgcaggaaagtcctgatcccgaagatgatgaaacaccaacacaatcagataggctgtctatgctgagccaggagattcagacactgaagagaagctctacagggagttacgaagagagagtgaagcgactgagtgtgagcgagttaaacgagattctagaggagatagaaaccgctataaaagaatactcagaggagctggtgcagcagcttgcgctccgagatgagttagaattcgaaaaggaggttaaaaactcttttatctccgtgttgatcgaggtgcagaacaagcagaaggagcacaaggaaacagctaaaaagaagaaaaaactcaaaaacggcagtagccaaaatggcaagaatgaaaggtctcacatgcctggaactagattttccatggagggaattagtaatgtgatccagaatgggctcagacataccttcggcaacagcggcggagagaagcaatacttaaccacagtgatcccttacgagaaaaagaatgggccaccctcggttgaagatcttcagatacttaccaagattctgagagcaatgaaggaggactctgagaaggtgcctagtctgttgaccgattatattctgaaggtcttatgtccaacttag

SEQ ID NO: 33706 - DNA, 1143 bp, Artificial Sequence
  derived and/or modified sequence
atggccgcagacggagattggcaggatttctatgaatttcaggagcccgcaaggagtttgcttgaccaagaaaactgtaatgcatctccagagcccggagccgaggctggggcagaggcaggaggcggtgcagatgggtttcccgcaccagcatgcagcctagaggagaaactgtccttatgctttcggccaagtgatccaggggctgagcctccaaggacggccgtcagacctatcaccgaacgatccctcctgcagggcgatgagatttggaatgcactcaccgacaattatggaaatgtgatgcctgtcgactggaaatcatcccacaccaggactttgcacctgttaaccctgaacctgtctgagaagggcgtgtcggattcgctcctcttcgacacatcggacgatgaggagctccgcgagcagttggatatgcacagtattatcgtgagctgtgtgaacgatgaaccactgttcactgctgatcaagtgatcgaggaaattgaggagatgatgcaagaatccccagatcccgaggatgacgaaacccccactcagtcggacaggctgtccatgctgagccaggagattcaaacgctgaagcggagttccactgggtcctatgaggagcgtgttaaaagactttccgtttctgagctcaacgagattctcgaagaaattgaaacagccatcaaggagtacagcgaagagttagtccagcagctggccttgcgcgacgagctggagtttgagaaggaggtgaagaatagcttcatcagcgtgctgatcgaggttcagaataaacagaaagagcataaagagaccgctaaaaagaaaaaaaagttgaaaaacggctcctcacagaatggcaagaacgagcgtagtcacatgccgggtacgagattttctatggagggaatttctaacgtgatccagaatggactgcgccacacgttcggcaactctgggggagagaaacagtaccttactaccgtgattccttatgagaagaaaaatgggcctcccagcgtggaagacttgcagatcctgacgaagattctgagggccatgaaggaagatagtgagaaagttcccagtcttctcacggactacatattgaaagttctgtgcccgacctag

SEQ ID NO: 33707 - protein, 869 aa, Artificial Sequence
  derived and/or modified sequence
VESAIAEGGASRFSASSGGGGSRGAPQHYPKTAGNSEFLGKTPGQNAQKWIPARSTRRDDNSAANNSANEKERHDAIFRKVRGILNKLTPEKFDKLCLELLNVGVESKLILKGVILLIVDKALEEPKYSSLYAQLCLRLAEDAPNFDGPAAEGQPGQKQSTTFRRLLISKLQDEFENRTRNVDVYDKRENPLLPEEEEQRAIAKIKMLGNIKFIGELGKLDLIHESILHKCIKTLLEKKKRVQLKDMGEDLECLCQIMRTVGPRLDHERAKSLMDQYFARMCSLMLSKELPARIRFLLQDTVELREHHWVPRKAFLDNGPKTINQIRQDAVKDLGVFIPAPMAQGMRSDFFLEGPFMPPRMKMDRDPLGGLADMFGQMPGSGIGTGPGVIQDRFSPTMGRHRSNQLFNGHGGHIMPPTQSQFGEMGGKFMKSQISLRPAQSFLMNKNQVPKLQPQITMIPPSAQPPRTQTPPLGQTPQLGLKTNPPLIQEKPAKTSKKPPPSKEELLKLTETVVTEYLNSGNANEAVNGVREMRAPKHFLPEMLSKVIILSLDRSDEDKEKASSLISLLKQEGIATSDNFMQAFLNVLDQCPKLEVDIPLVKSYLAQFAARAIISELVSISELAQPLESGTHFPLFLLCLQQLAKLQDREWLTELFQQSKVNMQKMLPEIDQNKDRMLEILEGKGLSFLFPLLKLEKELLKQIKLDPSPQTIYKWIKDNISPKLHVDKGFVNILMTSFLQYISSEVNPPSDETDSSSAPSKEQLEQEKQLLLSFKPVMQKFLHDHVDLQVSALYALQVHCYNSNFPKGMLLRFFVHFYDMEIIEEEAFLAWKEDITQEFPGKGKALFQVNQWLTWLETAEEEESEEEAD

SEQ ID NO: 33708 - protein, 124 aa, Artificial Sequence
  derived and/or modified sequence
VESAIAEGGASRFSASSGGGGSRGAPQHYPKTAGNSEFLGKTPGQNAQKWIPARSTRRDDNSAANNSANEKERHDAIFRKVRGILNKLTPEKFDKLCLELLNVGVESKLILKGVILLIVDKALE

SEQ ID NO: 33709 - protein, 116 aa, Artificial Sequence
  derived and/or modified sequence
VESAIAEGGASRFSASSGGGGSRGAPQHYPKTAGNSEFLGKTPGQNAQKWIPARSTRRDDNSAANNSANEKERHDAIFRKVRGILNKLTPEKFDKLCLELLNVGVESKLILKGVIL

SEQ ID NO: 33710 - protein, 444 aa, Artificial Sequence
  derived and/or modified sequence
VESAIAEGGASRFSASSGGGGSRGAPQHYPKTAGNSEFLGKTPGQNAQKWIPARSTRRDDNSAANNSANEKERHDAIFRKVRGILNKLTPEKFDKLCLELLNVGVESKLILKGVILLIVDKALEEPKYSSLYAQLCLRLAEDAPNFDGPAAEGQPGQKQSTTFRRLLISKLQDEFENRTRNVDVYDKRENPLLPEEEEQRAIAKIKMLGNIKFIGELGKLDLIHESILHKCIKTLLEKKKRVQLKDMGEDLECLCQIMRTVGPRLDHERAKSLMDQYFARMCSLMLSKELPARIRFLLQDTVELREHHWVPRKAFLDNGPKTINQIRQDAVKDLGVFIPAPMAQGMRSDFFLEGPFMPPRMKMDRDPLGGLADMFGQMPGSGIGTGPGVIQDRFSPTMGRHRSNQLFNGHGGHIMPPTQSQFGEMGGKFMKSQISLRPAQSFLM

SEQ ID NO: 33711 - DNA, 3346 bp, Artificial Sequence
  derived and/or modified sequence
gaaggtatttcatttctcctgtcccctcccctccccaccccatctattaatattattcttttgaagattcttcgttgtcaagccgccaaagtggagagtgcgattgcagaagggggtgcttctcgtttcagtgcttcttcgggcggaggaggaagtaggggtgcacctcagcactatcccaagactgctggcaacagcgagttcctggggaaaaccccagggcaaaacgctcagaaatggattcctgcacgaagcactagacgagatgacaactccgcagcaaacaactccgcaaacgaaaaagaacgacatgatgcaatcttcaggaaagtaagaggcatactaaataagcttactcctgaaaagtttgacaagctatgccttgagctcctcaatgtgggtgtagagtctaaactcatccttaaaggggtcatactgctgattgtggacaaagccctagaagagccaaagtatagctcactgtatgctcagctatgtctgcgattggcagaagatgcaccaaactttgatggcccagcagcagagggtcaaccaggacagaagcaaagcaccacattcagacgcctcctaatttccaaattacaagatgaatttgaaaaccgaactagaaatgttgatgtctatgataagcgtgaaaatcccctcctccccgaggaggaggaacagagagccattgctaagatcaagatgttgggaaacatcaaattcattggagagcttggcaagcttgatcttattcacgaatctatccttcataagtgcatcaaaacacttttggaaaagaagaagagagtccaactcaaagatatgggagaggatttggagtgcctctgtcagataatgaggacagtgggacctagattagaccatgaacgagccaagtccttaatggatcagtactttgcccgaatgtgctccttgatgttaagtaaggaattgccagcaaggattcgtttcctgctgcaggataccgtagagttgcgagaacaccattgggttcctcgcaaggcttttcttgacaatggaccaaagacgatcaatcaaattcgtcaagatgcagtaaaagatctaggggtgtttattcctgctcctatggctcaagggatgagaagtgacttctttctggagggaccgttcatgccacccaggatgaaaatggatagggacccacttggaggacttgctgatatgtttggacaaatgccaggtagcggaattggtactggtccaggagttatccaggatagattttcacccaccatgggacgtcatcgttcaaatcaactcttcaatggccatgggggacacatcatgcctcccacacaatcgcagtttggagagatgggaggcaagtttatgaaaagccagattagcctgaggcctgctcagtcgttcctaatgaataaaaatcaagtgccaaagcttcagccccagataactatgattcctcctagtgcacaaccaccacgcactcaaacaccacctctgggacagacacctcagcttggtctcaaaactaatccaccgcttatccaggaaaagcctgccaagaccagcaaaaagccaccaccgtcaaaggaagaactccttaaactaactgaaactgttgtgactgaatatctaaatagtggaaatgcaaatgaggctgtcaatggtgtaagagaaatgagggctcctaaacactttcttcctgagatgttaagcaaagtaatcatcctgtcactagatagaagcgatgaagataaagaaaaagcaagttctttgatcagtttactcaaacaggaagggatagccacaagtgacaacttcatgcaggctttcctgaatgtattggaccagtgtcccaaactggaggttgacatccctttggtgaaatcctatttagcacagtttgcagctcgtgccatcatttcagagctggtgagcatttcagaactagctcaaccactagaaagtggcacccattttcctctcttcctactttgtcttcagcagttagctaaattacaagatcgagaatggttaacagaactttttcaacaaagcaaggtcaatatgcagaaaatgctcccagaaattgatcagaataaggaccgcatgttggagattttggaaggaaagggactgagtttcttattcccactcctcaaattggagaaggaactgttgaagcaaataaagttggatccatcccctcaaaccatatataaatggattaaagataacatctctcccaaacttcatgtagataaaggatttgtgaacatcttaatgactagcttcttacagtacatttctagtgaagtaaacccccccagcgatgaaacagattcatcctctgctccttccaaagaacagttagagcaggaaaaacaactactactatctttcaagccagtaatgcagaaatttcttcatgatcacgttgatctacaagtcagtgccctgtatgctctccaggtgcactgctataacagcaacttcccaaaaggcatgttacttcgcttttttgtgcacttctatgacatggaaattattgaagaagaagctttcttggcttggaaagaagatataacccaagagtttccgggaaaaggcaaggctttgttccaggtgaatcagtggctaacctggttagaaactgctgaagaagaagaatcagaggaagaagctgactaaagaaccagccaaagccttaaattgtgcaaaacatactgttgctatgatgtaactgcatttgacctaaccactgcgaaaattcattccgctgtaatgttttcacaatatttaaagcagaagcacgtcagttaggatttccttctgcataaggtttttttgtagtgtaatgtcttaatcatagtctaccatcaaatattttaggagtatctttaatgtttagatagtatattagcagcatgcaataattacatcataagttctcaagcagaggcagtctattgcaaggaccttctttgctgccagttatcataggctgttttaagttagaaaactgaatagcaacactgaatactgtagaaatgcactttgctcagtaatacttgagttgttgcaatatttgattatccatttggttgttacagaaaaattcttaactgtaattgatggttgttgccgtaatagtatattgcctgtatttctacctctagtaatgggctttatgtgctagattttaatatccttgagcctgggcaagtgcacaagtctttttaaaagaaacatggtttacttgcacaaaactgatcagttttgagagatcgttaatgcccttgaagtggtttttgtgggtgtgaaacaaatggtgaga

SEQ ID NO: 33712 - DNA, 1286 bp, Artificial Sequence
  derived and/or modified sequence
agacacgccttagcgccagcagtgagtcggagctctatggaggtggcagcgggtaccgagtggcggctgcagcagcgactcctctgagctgagtttgaggccgtccccgactccttcctcccccttccctcccccttttttttgttttccgttcccctttcccctcccttccctatccccgacgaccggatcctgaggaggcagctgcggtggcagctgctgagttctcggtgaagaaggaaaacgtcagtgttggccaggccgccgtgcggtcatggccggatggccgacgcctgcagggacgaggccgtggcggaccgaggcacggctgtgctcggacggcgagggagcgtggctcggaccgctagcgccgtggcgggaggcacgcgggccggcagggaaggccaggccgttggcgcgggaccagggaaccgcaggcgtcccggagcctggcctcccggcggggaggtatttcatttctcctgtcccctcccctccccaccccatctattaatattattcttttgaagattcttcgttgtcaagccgccaaagtggagagtgcgattgcagaagggggtgcttctcgtttcagtgcttcttcgggcggaggaggaagtaggggtgcacctcagcactatcccaagactgctggcaacagcgagttcctggggaaaaccccagggcaaaacgctcagaaatggattcctgcacgaagcactagacgagatgacaactccgcagcaaacaactccgcaaacgaaaaagaacgacatgatgcaatcttcaggaaagtaagaggcatactaaataagcttactcctgaaaagtttgacaagctatgccttgagctcctcaatgtgggtgtagagtctaaactcatccttaaaggggtcatactgctgattgtggacaaagccctagaagagccaaagtatagctcactgtatgctcagctatgtctgcgattggcagaagatgcaccaaactttgatggcccagcagcagagggtcaaccaggacagaagcaaagcaccacattcagacgcctcctaatttccaaattacaagatgaatttgaaaaccgaactagaaatgttgatgtctatgataagcgtgaaaatcccctcctccccgaggaggaggaacagagagccattgctaagatcaagatgttgggaaacatcaaattcattggagagcttggcaagcttgatcttattcacgaatctatccttcataagtgcatcaaaacacttttggaaaagaagaagagagtccaactc

SEQ ID NO: 33713 - DNA, 581 bp, Artificial Sequence
  derived and/or modified sequence
gtgagtcggagctctatggaggtggcagcgggtaccgagtggcggctgcagcagcgactcctctgagctgagtttgaggccgtccccgactccttcctcccccttccctcccccttttttttgtatttcatttctcctgtcccctcccctccccaccccatctattaatattattcttttgaagattcttcgttgtcaagccgccaaagtggagagtgcgattgcagaagggggtgcttctcgtttcagtgcttcttcgggcggaggaggaagtaggggtgcacctcagcactatcccaagactgctggcaacagcgagttcctggggaaaaccccagggcaaaacgctcagaaatggattcctgcacgaagcactagacgagatgacaactccgcagcaaacaactccgcaaacgaaaaagaacgacatgatgcaatcttcaggaaagtaagaggcatactaaataagcttactcctgaaaagtttgacaagctatgccttgagctcctcaatgtgggtgtagagtctaaactcatccttaaaggggtcatactgctgattgtggacaaagccctagaag

SEQ ID NO: 33714 - DNA, 555 bp, Artificial Sequence
  derived and/or modified sequence
agtcctgtacacccggccccctctcgcgcgtctttccacgagctctccacggggaggaggcgaaagggtggacaggggaaaactgctgaagagctttcggagagacctcatctagtcgctggcctcgtcaaggtatttcatttctcctgtcccctcccctccccaccccatctattaatattattcttttgaagattcttcgttgtcaagccgccaaagtggagagtgcgattgcagaagggggtgcttctcgtttcagtgcttcttcgggcggaggaggaagtaggggtgcacctcagcactatcccaagactgctggcaacagcgagttcctggggaaaaccccagggcaaaacgctcagaaatggattcctgcacgaagcactagacgagatgacaactccgcagcaaacaactccgcaaacgaaaaagaacgacatgatgcaatcttcaggaaagtaagaggcatactaaataagcttactcctgaaaagtttgacaagctatgccttgagctcctcaatgtgggtgtagagtctaaactcatccttaaag

SEQ ID NO: 33715 - DNA, 591 bp, Artificial Sequence
  derived and/or modified sequence
agcagtgagtcggagctctatggaggtggcagcgggtaccgagtggcggctgcagcagcgactcctctgagctgagtttgaggccgtccccgactccttcctcccccttccctcccccttttttttgttttccgttcccctttcccctcccttccctatccccgacgaccggatcctgaggaggcagctgcggtggcagctgctgagttctcggtgaagattcttcgttgtcaagccgccaaagtggagagtgcgattgcagaagggggtgcttctcgtttcagtgcttcttcgggcggaggaggaagtaggggtgcacctcagcactatcccaagactgctggcaacagcgagttcctggggaaaaccccagggcaaaacgctcagaaatggattcctgcacgaagcactagacgagatgacaactccgcagcaaacaactccgcaaacgaaaaagaacgacatgatgcaatcttcaggaaagtaagaggcatactaaataagcttactcctgaaaagtttgacaagctatgccttgagctcctcaatgtgggtgtagagtctaaactcatccttaaaggggtcatactg

SEQ ID NO: 33716 - DNA, 1969 bp, Artificial Sequence
  derived and/or modified sequence
aaagagctgggcgccgggctggcgggggtggcctcagctgctcctccccgtcgagcgacccgggcctcgcggggaggttgtcggaagcacttccctaacttgcgcctgggtgggaggaatgctccgctcttttgttcccaggaagggaaaaacggggcggaggttcctgctgccatgttgtggccctggtcttccgcctgcaagtgctagtcctgtacacccggccccctctcgcgcgtctttccacgagctctccacggggaggaggcgaaagggtggacaggggaaaactgctgaagagctttcggagagacctcatctagtcgctggcctcgtcaaggcagtaaaaattcctagggcagacattttccacgtgatgttgctcgtgtctgtagttagacttttctattgatctcagtgctcagttttaaagatagtagaatgtggctttttcaaaagattcgttctgagccgtttaaaatgctcttgtgttctacgaagtctctttgcatccttgaacaccggggaatttccaggtggctaaacaaaatgtatttcatttctcctgtcccctcccctccccaccccatctattaatattattcttttgaagattcttcgttgtcaagccgccaaagtggagagtgcgattgcagaagggggtgcttctcgtttcagtgcttcttcgggcggaggaggaagtaggggtgcacctcagcactatcccaagactgctggcaacagcgagttcctggggaaaaccccagggcaaaacgctcagaaatggattcctgcacgaagcactagacgagatgacaactccgcagcaaacaactccgcaaacgaaaaagaacgacatgatgcaatcttcaggaaagtaagaggcatactaaataagcttactcctgaaaagtttgacaagctatgccttgagctcctcaatgtgggtgtagagtctaaactcatccttaaaggggtcatactgctgattgtggacaaagccctagaagagccaaagtatagctcactgtatgctcagctatgtctgcgattggcagaagatgcaccaaactttgatggcccagcagcagagggtcaaccaggacagaagcaaagcaccacattcagacgcctcctaatttccaaattacaagatgaatttgaaaaccgaactagaaatgttgatgtctatgataagcgtgaaaatcccctcctccccgaggaggaggaacagagagccattgctaagatcaagatgttgggaaacatcaaattcattggagagcttggcaagcttgatcttattcacgaatctatccttcataagtgcatcaaaacacttttggaaaagaagaagagagtccaactcaaagatatgggagaggatttggagtgcctctgtcagataatgaggacagtgggacctagattagaccatgaacgagccaagtccttaatggatcagtactttgcccgaatgtgctccttgatgttaagtaaggaattgccagcaaggattcgtttcctgctgcaggataccgtagagttgcgagaacaccattgggttcctcgcaaggcttttcttgacaatggaccaaagacgatcaatcaaattcgtcaagatgcagtaaaagatctaggggtgtttattcctgctcctatggctcaagggatgagaagtgacttctttctggagggaccgttcatgccacccaggatgaaaatggatagggacccacttggaggacttgctgatatgtttggacaaatgccaggtagcggaattggtactggtccaggagttatccaggatagattttcacccaccatgggacgtcatcgttcaaatcaactcttcaatggccatgggggacacatcatgcctcccacacaatcgcagtttggagagatgggaggcaagtttatgaaaagccagattagcctgaggcctgctcagtcgttcctaatg

SEQ ID NO: 33717 - DNA, 1069 bp, Artificial Sequence
  derived and/or modified sequence
aggcgtcccggagcctggcctcccggcggggaggtgtgtaggacctggagtcggcaggggctgcccttcgtcggggaggaaagagagagtgatgatttctgccccttttgtcagcagaggaggccgtggcgaggcggtatttcatttctcctgtcccctcccctccccaccccatctattaatattattcttttgaagattcttcgttgtcaagccgccaaagtggagagtgcgattgcagaagggggtgcttctcgtttcagtgcttcttcgggcggaggaggaagtaggggtgcacctcagcactatcccaagactgctggcaacagcgagttcctggggaaaaccccagggcaaaacgctcagaaatggattcctgcacgaagcactagacgagatgacaactccgcagcaaacaactccgcaaacgaaaaagaacgacatgatgcaatcttcaggaaagtaagaggcatactaaataagcttactcctgaaaagtttgacaagctatgccttgagctcctcaatgtgggtgtagagtctaaactcatccttaaaggggtcatactgctgattgtggacaaagccctagaagagccaaagtatagctcactgtatgctcagctatgtctgcgattggcagaagatgcaccaaactttgatggcccagcagcagagggtcaaccaggacagaagcaaagcaccacattcagacgcctcctaatttccaaattacaagatgaatttgaaaaccgaactagaaatgttgatgtctatgataagcgtgaaaatcccctcctccccgaggaggaggaacagagagccattgctaagatcaagatgttgggaaacatcaaattcattggagagcttggcaagcttgatcttattcacgaatctatccttcataagtgcatcaaaacacttttggaaaagaagaagagagtccaactcaaagatatgggagaggatttggagtgcctctgtcagataatgaggacagtgggacctagattagaccatgaacgagccaagtccttaatggatcagtactttgcccgaatgtgct

SEQ ID NO: 33718 - DNA, 573 bp, Artificial Sequence
  derived and/or modified sequence
agacacgccttagcgccagcagtgagtcggagctctatggaggtggcagcgggtaccgagaggcagctgcggtggcagctgctgagttctcggtgaaggtatttcatttctcctgtcccctcccctccccaccccatctattaatattattcttttgaagattcttcgttgtcaagccgccaaagtggagagtgcgattgcagaagggggtgcttctcgtttcagtgcttcttcgggcggaggaggaagtaggggtgcacctcagcactatcccaagactgctggcaacagcgagttcctggggaaaaccccagggcaaaacgctcagaaatggattcctgcacgaagcactagacgagatgacaactccgcagcaaacaactccgcaaacgaaaaagaacgacatgatgcaatcttcaggaaagtaagaggcatactaaataagcttactcctgaaaagtttgacaagctatgccttgagctcctcaatgtgggtgtagagtctaaactcatccttaaaggggtcatactgctgattgtggacaaagccctagaagagccaaagtatagctc

SEQ ID NO: 33719 - DNA, 762 bp, Artificial Sequence
  derived and/or modified sequence
atgcaggctttcttaaatgtcttagaccagtgccccaagctggaggtggacatcccgctcgttaaatcctaccttgctcaattcgcagctagggccatcatctccgagctggtttccatttccgagctggcgcagccacttgagagcgggactcattttccattgtttctcttgtgcctacagcaactggctaaactacaggatagagagtggctgaccgaattgttccaacagagtaaagtgaacatgcaaaagatgctccctgagatcgaccagaacaaagatcgaatgcttgagatcttagaaggtaaggggctatcattcttgtttcctctcctgaagttggagaaggagctgcttaagcagatcaaactggatccatctccgcaaacgatctacaagtggatcaaggacaacatatccccaaagctgcatgtggataaaggattcgtcaacattcttatgacatccttcttgcagtatatctcttcggaggtgaatcctccgtctgacgaaacagattcatctagcgctcccagcaaggagcagctggagcaggagaagcagctcctactctccttcaagccagtgatgcagaaattccttcacgatcacgtagaccttcaagtgagcgctctttatgctctgcaggtccactgttataattcgaacttccctaagggtatgctcttatttctttgtacctctatgacctggaagctcctgaagaaaaagttatcctggctgggaaaaaaaatttag

SEQ ID NO: 33720 - DNA, 2610 bp, Artificial Sequence
  derived and/or modified sequence
gtggagtccgccattgcagaaggaggcgcatcaaggttttcagccagcagtggtgggggcggatcaaggggagcaccgcaacattaccccaagacagccggcaattctgagtttttaggaaagaccccaggtcagaatgctcaaaaatggatacctgctcgtagcacccgacgggatgacaatagcgccgccaacaattccgcaaacgagaaagagcggcacgatgctatttttcgtaaagtgagggggatacttaacaagttgaccccagaaaagtttgacaaactctgcctggagctgttaaacgtcggagtggaaagtaagctcatcctcaaaggagtgattctattaattgttgacaaagcgcttgaggaaccaaaatatagcagcctatacgcccagctctgtcttagactggcagaagacgcaccgaatttcgatggtccagccgctgagggtcagccaggacagaaacagtccactacctttcgaaggctgcttatcagtaaactgcaggatgagttcgaaaacaggactcggaacgtggacgtctacgacaagcgggagaatcctttgcttcccgaggaagaggagcagagggctattgcaaagattaaaatgctcggaaacataaaatttatcggagaactaggaaagctagacttgatacacgagtctattcttcacaagtgcatcaagaccctgctggaaaaaaaaaagagagtgcaactgaaggacatgggagaagacttggaatgcctgtgccagattatgagaacagttggtccaaggttggaccatgagagagcaaaatctctgatggatcagtatttcgcacggatgtgcagcttgatgctcagtaaagagttaccagcacggatcagatttctgctgcaggacacagtggaacttagagaacatcattgggtcccccgtaaggccttcctcgacaacggccctaagacaatcaatcaaatcagacaggatgcagttaaagacctaggagtgtttatcccagcaccaatggcgcaagggatgcggtcagatttcttcctggaaggaccatttatgcctcccaggatgaagatggacagagacccccttggtggactggctgatatgtttggccaaatgccgggctctggtatcggcacaggcccaggagtcattcaggatcggttcagccctaccatggggaggcatcggtccaaccagttgttcaatggccacggtggccatattatgccccccacccaaagtcagttcggtgaaatgggagggaaatttatgaagtcccaaatttctctcaggccagctcaaagcttccttatgaataagaaccaagtcccaaagcttcaaccccagataacgatgataccacctagcgcacagcctccccggactcagacgccacctctcggacaaaccccccagctcggactgaagactaatcccccgctcatccaagaaaaaccagccaagacatccaagaagccaccacccagtaaagaggaactgcttaagctcaccgagactgtggtcaccgagtatctcaactccggtaatgcgaacgaagcagtgaacggggtcagagagatgagggcgcccaagcactttctaccagagatgttgtcaaaagttatcatcctgagcctcgaccgcagcgacgaggacaaagaaaaggcctcttcacttatctcactcctgaaacaagaagggattgccacaagtgataatttcatgcaggcatttctgaacgtgttggatcagtgccccaagctagaggtagacattcctctggtcaaatcctatctggcccaatttgcggcaagggcaattatcagtgaacttgtatcaatcagcgagctggcccaaccgcttgaatccggcactcacttccctctctttctcctgtgcttgcaacaacttgcaaagctgcaagatagggaatggttgactgagttatttcagcaaagcaaggttaacatgcagaagatgcttccagagatcgatcaaaacaaagaccgtatgttggagattctagaagggaaaggcctgtctttcctatttccccttctgaagcttgaaaaagagcttctgaagcagatcaagcttgatccgagcccacagactatctacaaatggatcaaggacaacatctcgcctaagctgcatgtggacaagggatttgtcaatatcctgatgacatcctttcttcagtatataagttctgaggtgaatcctcctagcgatgaaaccgattcctctagcgccccttctaaggaacagctcgaacaagagaagcagctgttgctctctttcaaacccgttatgcagaagtttctccatgaccatgtggacctgcaggttagcgccttgtatgctcttcaagtccattgttacaactctaacttccccaaagggatgctgctgaggttcttcgtccacttctatgacatggaaatcattgaggaggaagccttcctagcttggaaggaagacatcactcaggagtttcccggaaagggcaaggccttgttccaagtgaatcagtggctgacttggctggagactgcggaggaggaggaaagtgaagaggaagccgactag

SEQ ID NO: 33721 - DNA, 735 bp, Artificial Sequence
  derived and/or modified sequence
gtggaatcagctattgctgaaggaggcgcttccaggttttccgcctcttctggcgggggtggtagtagaggcgccccacagcattaccctaaaaccgcgggaaactctgagttccttggcaaaacaccggggcagaacgcacagaagtggatcccagccagatctacacgcagggacgacaacagcgcggccaacaactcggctaacgaaaaggaacggcacgacgccatttttcgcaaagtgagaggcatccttaacaagctgactcccgagaagttcgacaaactctgtctcgagttgttaaacgtgggggtggagtcaaagctaattctaaagggagtgatcttactcatcgtagacaaagcacttgaggagcccaaatattcttctctgtatgcacagctctgtctcaggttggcagaagatgcacccaatttcgatggacccgctgcggaggggcagcctggccagaagcagtctaccacctttcggagactcctgatatctaagcttcaggacgaatttgaaaacagaactcgcaatgtcgacgtgtacgacaagagggagaaccccctactgcccgaagaggaagaacagcgtgccattgccaaaatcaaaatgctgggtaatattaagttcatcggcgagttgggcaagctcgaccttattcacgaaagcattctccataagtgcatcaagacattgctcgaaaagaagaaacgcgtgcagttgtag

SEQ ID NO: 33722 - DNA, 375 bp, Artificial Sequence
  derived and/or modified sequence
gtcgagagcgccattgccgagggtggcgcttcccgattctcagcgtcgagtgggggggggggctcaagaggagctccccagcactatccgaagaccgccgggaattctgagttccttggcaagacacctggacagaacgcccagaaatggattcctgctagaagcacgcggagagacgataatagcgccgccaataatagtgccaacgaaaaggagcggcacgacgcgatctttcgcaaggtgcgcggcatattgaacaagttaactccggagaaattcgacaagttatgtctggagctgctgaatgtcggggtggagagcaagctgatcttaaaaggagtcatcctgctaatcgtggataaggccctggagtag

SEQ ID NO: 33723 - DNA, 339 bp, Artificial Sequence
  derived and/or modified sequence
gtggagtctgccatcgcagaagggggagcttctcgcttttccgcgagttcaggagggggtggttccagaggcgccccccaacactatccgaaaacagccggtaattctgagtttcttgggaagacccccggtcagaatgctcagaagtggattcctgcgaggagtacccgaagagatgacaattccgctgctaataactctgcaaacgagaaggaaagacacgacgctattttccgcaaggtcagggggattctcaacaagttgacacccgagaagtttgacaagctatgcctggagctgttgaatgttggcgtggagtctaagctcattctgaaatag

SEQ ID NO: 33724 - DNA, 351 bp, Artificial Sequence
  derived and/or modified sequence
gtcgaatccgccattgccgagggcggcgcaagtcggtttagtgcttccagcggcggtggaggctctcggggcgctccccagcattatcccaaaacagccggcaactccgagtttctgggaaaaactcccggacagaacgcgcagaaatggataccagcaaggtccacgagaagggatgacaatagtgctgcaaacaatagcgctaacgagaaggagagacatgacgccatttttcgaaaggtgcggggcatactaaacaaactgacccccgagaagtttgacaaactgtgccttgaactgctaaatgtgggcgttgaaagcaaactgatcctcaagggcgtcatcctctag

SEQ ID NO: 33725 - DNA, 1335 bp, Artificial Sequence
  derived and/or modified sequence
gtcgaaagcgcgatagccgagggaggcgccagcaggttttccgcatcatctggtggcggaggatcaaggggcgcgccacagcattaccccaagaccgctggcaatagtgagtttcttggaaaaacccccggacagaatgcccaaaaatggatccccgctcgcagtacaagacgcgacgataactctgccgccaacaatagtgccaacgagaaggaacgtcatgacgctatcttccggaaagtgcggggtatactgaataagcttactcctgaaaaattcgacaagctgtgtctggagttgcttaatgttggcgtggaatccaaactgatactgaagggggtgattctgttgattgtagacaaagcgctggaggaacctaagtattcctcgctgtatgctcagctatgtttacgcctggccgaagacgcgcccaattttgatggtcccgctgcagaaggccaacccggccaaaagcaatcgacaacttttaggaggctgctgattagcaaactgcaggatgagttcgagaatcgcaccaggaacgtcgacgtgtatgataaacgtgagaacccactgttacccgaggaggaagaacagagagccatcgcaaaaatcaagatgctggggaatataaaatttatcggggagctgggcaaactggacctgattcacgagagtatcctccataagtgtatcaagacattgctcgaaaagaagaaacgagttcagctgaaggatatgggcgaggatctggagtgtctgtgtcagatcatgcgaacggtgggacctcgattggatcatgaaagagccaagtcccttatggaccagtacttcgctagaatgtgcagcctgatgctctctaaggagttgccagccaggatccgcttcctcttgcaggacacagttgagctgcgggaacatcattgggtgccccgcaaagcgttccttgataatggcccaaagacaattaaccagatccgacaggacgccgtcaaggatctgggagtgttcattcctgcgccaatggcccaggggatgcggtcagatttttttttggaggggccattcatgcccccgcgaatgaaaatggaccgggatccactgggaggtctcgccgatatgttcggccagatgcctggctctggtatcggaaccggtcccggtgtgattcaagaccgcttctcgcctacaatggggaggcaccggtcgaaccagctctttaatgggcatggcgggcatatcatgccaccaactcagagccagttcggtgagatgggcggcaagttcatgaaatcgcagatctctctcagacccgctcagtcgtttctgatgtag

SEQ ID NO: 33726 - DNA, 849 bp, Artificial Sequence
  derived and/or modified sequence
gtggagtcagccatcgctgagggaggcgccagtagattcagcgcctcttccggaggcggaggcagtcgcggcgccccacagcattatccgaagaccgccgggaacagtgagtttcttggcaaaacaccaggccagaacgcccagaaatggatacccgccagaagcacgcgacgcgacgacaattccgccgcgaataattccgctaatgaaaaagagcgccatgacgcaattttccgcaaggtgcggggaatcctgaataaattaacacctgagaagttcgataagctgtgccttgagcttctgaacgtgggcgtggagtcgaaacttatactaaaaggtgtgatcctgctcattgtagacaaggccctggaggagcctaagtattcttcactgtatgctcagctgtgccttagactggctgaagatgcaccaaatttcgacgggcccgccgcggagggacagccgggtcagaagcagagtactacattccgcaggctgctcattagcaaattacaagacgaattcgaaaacagaactaggaatgtggacgtgtacgacaagcgtgagaatcccttgctgccagaggaggaggaacagcgggccattgccaagatcaagatgctgggcaacataaaattcatcggcgagttaggcaaactagatctaatccacgaatcaatcctccacaaatgcatcaaaacgcttctagagaagaagaaacgagtgcagctgaaagacatgggtgaggacctagagtgcctgtgtcagatcatgagaacagtggggccgaggctggaccacgaaagggccaagtccttgatggaccaatactttgcacgaatgtgctag

SEQ ID NO: 33727 - DNA, 393 bp, Artificial Sequence
  derived and/or modified sequence
gtggagagcgccatcgctgaaggcggcgcaagcagattttctgccagtagcggtggtggaggtagtcggggtgcaccgcagcattatccgaaaaccgccggcaattcagaattcctcggaaagacccctggtcaaaatgcccaaaagtggattcctgcccggtcaacacgccgcgacgacaattctgctgctaataattcagcaaacgagaaagaaagacatgacgccatctttagaaaagtccgcggcattctaaacaagctgactcccgagaagtttgataaactgtgtctggaactactgaatgtgggggtggagagcaaacttatcttaaagggagttatcctgttgattgtggataaggcacttgaagaaccgaagtacagcagttag

SEQ ID NO: 33728 - DNA, 762 bp, Artificial Sequence
  derived and/or modified sequence
atgcaggccttcctgaatgtgctggaccagtgccccaagctggaggtggacatccccctggtgaagagctacctggcccagtttgctgcccgggccatcatcagcgagctggtgtccatcagcgagctggcccagcccctggagagcggcacccacttccccctcttcctgctgtgcctgcagcagctggccaagctgcaggaccgggagtggctgacagagctgttccagcagagcaaggtgaacatgcagaagatgctgcctgagattgaccagaacaaggacaggatgctggagatcctggagggcaagggcctgtccttcctgttccccctgctgaagctggagaaggagctgctgaagcagatcaagctggaccccagcccccagaccatctacaagtggatcaaggacaacatcagccccaagctgcacgtggacaagggctttgtgaacatcctgatgaccagcttcctgcagtacatcagcagcgaggtgaaccccccatctgatgaaacagacagcagcagcgcccccagcaaggagcagctggagcaggagaagcagctgctgctgtccttcaagcctgtgatgcagaagttcctgcatgaccacgtggacctgcaggtgtctgccctgtatgccctgcaggtgcactgctacaacagcaacttccccaagggcatgctgctcttcctgtgcacctccatgacctggaagctgctgaagaagaagctgtcctggctgggcaagaagatctag

SEQ ID NO: 33729 - DNA, 2610 bp, Artificial Sequence
  derived and/or modified sequence
gtggagagcgccatcgccgagggcggggccagccgcttcagcgccagcagcggcggcggcggcagcagaggagccccccagcactaccccaagacagctggcaacagcgagttcctgggcaagaccccaggccagaatgcccagaagtggatcccagcccggagcaccaggagagatgacaacagcgctgccaacaacagcgccaatgagaaggagagacatgatgccatcttcaggaaggtgcggggcatcctgaacaagctgaccccagagaagtttgacaagctgtgcctggagctgctgaatgtgggcgtggagagcaagctgatcctgaagggcgtcatcctgctgattgtggacaaggccctggaggagcccaagtacagcagcctgtatgcccagctgtgcctgcggctggctgaagatgcccccaactttgatggccctgctgctgagggccagcccggccagaagcagagcaccaccttccggcggctgctgatcagcaagctgcaggatgaatttgagaacagaacaagaaatgtggatgtgtatgacaagcgggagaaccccctgctgcctgaggaggaggagcagagggccatcgccaagatcaagatgctgggcaacatcaagttcatcggggagctgggcaagctggacctgatccacgagagcatcctgcacaagtgcatcaagaccctgctggagaagaagaagagggtgcagctgaaggacatgggagaggacctggagtgcctgtgccagatcatgaggacagtgggcccccggctggaccacgagcgggccaagagcctgatggaccagtactttgccaggatgtgcagcctgatgctgagcaaggagctgcctgcccgcatccgcttcctgctgcaggacacagtggagctgcgggagcaccactgggtgcccaggaaggccttcctggacaatggccccaagaccatcaaccagatccggcaggatgctgtgaaggacctgggcgtcttcatcccagcccccatggcccagggcatgagaagtgacttcttcctggagggccccttcatgccacccaggatgaagatggaccgggaccccctgggcggcctggccgacatgtttggccagatgcctggcagcggcattggaactggacctggggtcatccaggaccgcttcagccccaccatgggccgccacaggagcaaccagctgttcaacggccacggcggccacatcatgccacccacccagagccagtttggagagatgggcggcaagttcatgaagagccagatcagcctgcggcctgcccagagcttcctgatgaacaagaaccaggtgcccaagctgcagccccagatcaccatgatcccccccagcgcccagccccccaggacccagaccccacccctgggccagaccccccagctgggcctgaagaccaaccccccactcatccaggagaagccagccaagaccagcaagaagcccccacccagcaaggaggagctgctgaagctgacagagaccgtggtgacagagtacctgaacagcggaaatgccaatgaggccgtgaatggagtgcgggagatgagggcccccaagcacttcctgcctgagatgctgagcaaggtgatcatcctgagcctggacagaagtgatgaggacaaggagaaggccagcagcctcatcagcctgctgaagcaggagggcatcgccaccagtgacaacttcatgcaggccttcctgaatgtgctggaccagtgccccaagctggaggtggacatccccctggtgaagagctacctggcccagtttgctgcccgggccatcatcagcgagctggtgtccatcagcgagctggcccagcccctggagagcggcacccacttccccctcttcctgctgtgcctgcagcagctggccaagctgcaggaccgggagtggctgacagagctgttccagcagagcaaggtgaacatgcagaagatgctgcctgagattgaccagaacaaggacaggatgctggagatcctggagggcaagggcctgtccttcctgttccccctgctgaagctggagaaggagctgctgaagcagatcaagctggaccccagcccccagaccatctacaagtggatcaaggacaacatcagccccaagctgcacgtggacaagggctttgtgaacatcctgatgaccagcttcctgcagtacatcagcagcgaggtgaaccccccatctgatgaaacagacagcagcagcgcccccagcaaggagcagctggagcaggagaagcagctgctgctgtccttcaagcctgtgatgcagaagttcctgcatgaccacgtggacctgcaggtgtctgccctgtatgccctgcaggtgcactgctacaacagcaacttccccaagggcatgctgctgcgcttctttgtgcacttctatgacatggagatcatcgaggaggaggccttcctggcctggaaggaggacatcacccaggagttccctgggaagggcaaggccctcttccaggtgaaccagtggctgacctggctggagacagctgaggaggaggagagcgaggaggaggccgactag

SEQ ID NO: 33730 - DNA, 735 bp, Artificial Sequence
  derived and/or modified sequence
gtggagagcgccatcgccgagggcggggccagccgcttcagcgccagcagcggcggcggcggcagcagaggagccccccagcactaccccaagacagctggcaacagcgagttcctgggcaagaccccaggccagaatgcccagaagtggatcccagcccggagcaccaggagagatgacaacagcgctgccaacaacagcgccaatgagaaggagagacatgatgccatcttcaggaaggtgcggggcatcctgaacaagctgaccccagagaagtttgacaagctgtgcctggagctgctgaatgtgggcgtggagagcaagctgatcctgaagggcgtcatcctgctgattgtggacaaggccctggaggagcccaagtacagcagcctgtatgcccagctgtgcctgcggctggctgaagatgcccccaactttgatggccctgctgctgagggccagcccggccagaagcagagcaccaccttccggcggctgctgatcagcaagctgcaggatgaatttgagaacagaacaagaaatgtggatgtgtatgacaagcgggagaaccccctgctgcctgaggaggaggagcagagggccatcgccaagatcaagatgctgggcaacatcaagttcatcggggagctgggcaagctggacctgatccacgagagcatcctgcacaagtgcatcaagaccctgctggagaagaagaagagggtgcagctgtag

SEQ ID NO: 33731 - DNA, 375 bp, Artificial Sequence
  derived and/or modified sequence
gtggagagcgccatcgccgagggcggggccagccgcttcagcgccagcagcggcggcggcggcagcagaggagccccccagcactaccccaagacagctggcaacagcgagttcctgggcaagaccccaggccagaatgcccagaagtggatcccagcccggagcaccaggagagatgacaacagcgctgccaacaacagcgccaatgagaaggagagacatgatgccatcttcaggaaggtgcggggcatcctgaacaagctgaccccagagaagtttgacaagctgtgcctggagctgctgaatgtgggcgtggagagcaagctgatcctgaagggcgtcatcctgctgattgtggacaaggccctggagtag

SEQ ID NO: 33732 - DNA, 339 bp, Artificial Sequence
  derived and/or modified sequence
gtggagagcgccatcgccgagggcggggccagccgcttcagcgccagcagcggcggcggcggcagcagaggagccccccagcactaccccaagacagctggcaacagcgagttcctgggcaagaccccaggccagaatgcccagaagtggatcccagcccggagcaccaggagagatgacaacagcgctgccaacaacagcgccaatgagaaggagagacatgatgccatcttcaggaaggtgcggggcatcctgaacaagctgaccccagagaagtttgacaagctgtgcctggagctgctgaatgtgggcgtggagagcaagctgatcctgaagtag

SEQ ID NO: 33733 - DNA, 351 bp, Artificial Sequence
  derived and/or modified sequence
gtggagagcgccatcgccgagggcggggccagccgcttcagcgccagcagcggcggcggcggcagcagaggagccccccagcactaccccaagacagctggcaacagcgagttcctgggcaagaccccaggccagaatgcccagaagtggatcccagcccggagcaccaggagagatgacaacagcgctgccaacaacagcgccaatgagaaggagagacatgatgccatcttcaggaaggtgcggggcatcctgaacaagctgaccccagagaagtttgacaagctgtgcctggagctgctgaatgtgggcgtggagagcaagctgatcctgaagggcgtcatcctgtag

SEQ ID NO: 33734 - DNA, 1335 bp, Artificial Sequence
  derived and/or modified sequence
gtggagagcgccatcgccgagggcggggccagccgcttcagcgccagcagcggcggcggcggcagcagaggagccccccagcactaccccaagacagctggcaacagcgagttcctgggcaagaccccaggccagaatgcccagaagtggatcccagcccggagcaccaggagagatgacaacagcgctgccaacaacagcgccaatgagaaggagagacatgatgccatcttcaggaaggtgcggggcatcctgaacaagctgaccccagagaagtttgacaagctgtgcctggagctgctgaatgtgggcgtggagagcaagctgatcctgaagggcgtcatcctgctgattgtggacaaggccctggaggagcccaagtacagcagcctgtatgcccagctgtgcctgcggctggctgaagatgcccccaactttgatggccctgctgctgagggccagcccggccagaagcagagcaccaccttccggcggctgctgatcagcaagctgcaggatgaatttgagaacagaacaagaaatgtggatgtgtatgacaagcgggagaaccccctgctgcctgaggaggaggagcagagggccatcgccaagatcaagatgctgggcaacatcaagttcatcggggagctgggcaagctggacctgatccacgagagcatcctgcacaagtgcatcaagaccctgctggagaagaagaagagggtgcagctgaaggacatgggagaggacctggagtgcctgtgccagatcatgaggacagtgggcccccggctggaccacgagcgggccaagagcctgatggaccagtactttgccaggatgtgcagcctgatgctgagcaaggagctgcctgcccgcatccgcttcctgctgcaggacacagtggagctgcgggagcaccactgggtgcccaggaaggccttcctggacaatggccccaagaccatcaaccagatccggcaggatgctgtgaaggacctgggcgtcttcatcccagcccccatggcccagggcatgagaagtgacttcttcctggagggccccttcatgccacccaggatgaagatggaccgggaccccctgggcggcctggccgacatgtttggccagatgcctggcagcggcattggaactggacctggggtcatccaggaccgcttcagccccaccatgggccgccacaggagcaaccagctgttcaacggccacggcggccacatcatgccacccacccagagccagtttggagagatgggcggcaagttcatgaagagccagatcagcctgcggcctgcccagagcttcctgatgtag

SEQ ID NO: 33735 - DNA, 849 bp, Artificial Sequence
  derived and/or modified sequence
gtggagagcgccatcgccgagggcggggccagccgcttcagcgccagcagcggcggcggcggcagcagaggagccccccagcactaccccaagacagctggcaacagcgagttcctgggcaagaccccaggccagaatgcccagaagtggatcccagcccggagcaccaggagagatgacaacagcgctgccaacaacagcgccaatgagaaggagagacatgatgccatcttcaggaaggtgcggggcatcctgaacaagctgaccccagagaagtttgacaagctgtgcctggagctgctgaatgtgggcgtggagagcaagctgatcctgaagggcgtcatcctgctgattgtggacaaggccctggaggagcccaagtacagcagcctgtatgcccagctgtgcctgcggctggctgaagatgcccccaactttgatggccctgctgctgagggccagcccggccagaagcagagcaccaccttccggcggctgctgatcagcaagctgcaggatgaatttgagaacagaacaagaaatgtggatgtgtatgacaagcgggagaaccccctgctgcctgaggaggaggagcagagggccatcgccaagatcaagatgctgggcaacatcaagttcatcggggagctgggcaagctggacctgatccacgagagcatcctgcacaagtgcatcaagaccctgctggagaagaagaagagggtgcagctgaaggacatgggagaggacctggagtgcctgtgccagatcatgaggacagtgggcccccggctggaccacgagcgggccaagagcctgatggaccagtactttgccaggatgtgctag

SEQ ID NO: 33736 - DNA, 393 bp, Artificial Sequence
  derived and/or modified sequence
gtggagagcgccatcgccgagggcggggccagccgcttcagcgccagcagcggcggcggcggcagcagaggagccccccagcactaccccaagacagctggcaacagcgagttcctgggcaagaccccaggccagaatgcccagaagtggatcccagcccggagcaccaggagagatgacaacagcgctgccaacaacagcgccaatgagaaggagagacatgatgccatcttcaggaaggtgcggggcatcctgaacaagctgaccccagagaagtttgacaagctgtgcctggagctgctgaatgtgggcgtggagagcaagctgatcctgaagggcgtcatcctgctgattgtggacaaggccctggaggagcccaagtacagcagctag

SEQ ID NO: 33737 - DNA, 762 bp, Artificial Sequence
  derived and/or modified sequence
atgcaggccttcctgaacgtgctggaccagtgccccaagctggaggtggatatccctcttgtaaagtcttacctggcgcagttcgcagcgcgggccatcattagtgaacttgtgtccatttctgaactagcacagcctctggagtccggcacacactttcctctgttcttactatgccttcagcagctggccaagctgcaagatagggaatggttaacagagctgttccagcaatcgaaagtcaacatgcagaagatgctccctgagattgaccagaataaagacagaatgctggaaatcctagaggggaaaggcctgtcctttctgtttccgcttctgaagctggaaaaggaattactgaaacaaatcaaactggatccatcgcctcagaccatatacaagtggatcaaagacaacatctcaccaaagttgcacgtcgataagggcttcgtgaatatcttgatgacaagctttttacaatacattagcagtgaggtgaatccccccagcgatgagactgacagctctagcgccccaagtaaggaacaactcgagcaggaaaagcaacttttgttaagttttaaaccggtaatgcagaagttcctgcatgaccacgtggacctacaggtatccgccttgtatgcgttacaggtgcactgttacaactcaaatttccccaagggtatgctgctatttctgtgtacaagtatgacatggaagctgctcaagaaaaaactctcatggctgggtaaaaagatttag

SEQ ID NO: 33738 - DNA, 2610 bp, Artificial Sequence
  derived and/or modified sequence
gtggagagcgccatcgccgagggcggcgccagccggttcagcgccagctcaggtgggggagggagcaggggcgcaccccagcactacccaaaaaccgctggtaacagtgagttcctggggaagactcctggacagaatgcccagaagtggatccccgcaaggagtactcgcagagatgacaactcagccgctaacaattcagcgaatgaaaaagagagacacgacgccatatttagaaaagttcgggggatccttaataagctaacccccgagaagtttgacaaactctgcttggagttgcttaatgtgggtgttgagagcaagctgattctcaagggtgtgatcttattaattgtagataaagctctcgaggaaccgaagtactctagtctttacgcccaactctgcctaagacttgctgaggatgcgcccaatttcgacggccccgccgccgaaggccagcctggccagaaacaatccactacattccgccgcttgcttatctctaagcttcaagacgaattcgagaacaggactaggaatgtggacgtgtatgacaagagagagaatccgctcctgcctgaggaagaggaacagagagccatcgccaaaatcaagatgctcggcaatattaagtttattggagagctagggaagctcgacctcattcacgaaagcattctccataagtgcattaaaacacttctcgagaagaaaaagagagtgcagctgaaggatatgggtgaggatttggaatgcctgtgtcagattatgcgaacagtaggcccccgattagaccatgaacgcgcaaagagcctcatggatcagtactttgccagaatgtgctccctgatgctcagtaaggaactccctgctaggatccgtttcctgctccaggacactgtcgagttgcgggagcatcattgggttcctagaaaagctttcctggacaacggccctaaaaccataaaccagatcagacaggacgcagttaaggatcttggtgtgtttatcccagcgccaatggcccaaggcatgaggtcagacttcttcttagagggtccatttatgccacctaggatgaaaatggatcgggatccattgggtggtctagctgacatgttcggccaaatgccagggagtggaatcggcacaggacccggggtgatccaggataggttttcccctacgatgggccggcaccgaagcaaccagctctttaatggtcatggcggccatattatgccaccaactcagtcgcagttcggagagatgggagggaaatttatgaagtctcaaatctctttgcgtcccgcccagtcattcctgatgaacaaaaaccaagtgcctaagctccagccccaaattaccatgatccccccgtccgcccagcccccacgaacacagacaccacccctgggacagacgccacagctcggattaaaaacaaacccacctctcatccaggagaagcctgcaaaaacttcgaaaaagcctcccccgagcaaagaagagctcttgaagttaacagagacggtggttacagagtatcttaactccggcaatgcgaatgaagccgtgaacggtgttcgcgagatgagagctcccaaacatttcctccctgagatgctgtccaaagtgattatcctctctctggataggtccgatgaggacaaggagaaggcctcatctttgatctccctactgaagcaagagggaatcgccacgtccgacaactttatgcaggcgtttcttaacgttttggaccagtgtccgaaactggaagtggacatccccctggtaaaatcataccttgcccagtttgccgctagggccatcattagcgagcttgtgtccattagcgagcttgcccagcctctggagtctgggactcatttccctctgttcctactctgtctccagcagttggccaagctccaggaccgcgaatggttgaccgagctgttccaacaatcaaaagtaaacatgcagaaaatgctccccgagattgatcagaacaaagaccggatgctcgagatactggaaggtaagggcctttccttcctgttccctctgctcaaactagaaaaggaactgcttaagcagatcaagctggacccctcgccccagactatttataagtggattaaagacaatatttcccccaagttgcacgttgataaggggtttgtcaatattctgatgacaagcttcctccaatatatcagttccgaggtgaatcctccgtcagacgagactgactcgtcaagcgcaccgagtaaggagcagctggagcaggagaaacagctgttactgagttttaaacctgtcatgcagaagtttctgcacgaccacgtagatttacaggtgtccgccctttatgctttgcaggtgcactgttataatagtaatttccctaagggcatgctgcttagatttttcgttcacttctacgatatggagatcattgaagaggaagcttttttggcctggaaagaagatattacccaggaattccctggaaagggcaaggcattgttccaggtgaaccagtggctaacctggctggagactgctgaagaagaggagagtgaggaagaggccgattag

SEQ ID NO: 33739 - DNA, 735 bp, Artificial Sequence
  derived and/or modified sequence
gtggagagcgccatcgccgagggcggcgccagccggttcagcgccagctccggagggggcggctcgagaggagccccacagcattatcccaaaactgctgggaactccgaattcctcggaaaaaccccaggccagaacgcgcagaagtggattcctgcccgctccacccgtcgcgacgacaactcagccgcaaataatagcgctaacgaaaaagaacgtcatgacgcgatcttccgcaaagtgaggggcatcctgaataaattgacccccgagaaattcgacaagctgtgtctcgaactgctgaacgtgggggtggagagcaagcttatcctgaagggtgttatcctgcttattgtcgataaggccttggaagaaccaaagtattcgtctctttacgctcaactctgcctgcgcctggcagaggacgctccaaatttcgatggccctgcagctgaagggcagccaggacagaagcagagcacaacgttccgcagacttttgatatctaaacttcaggacgaattcgagaataggactcggaatgtggatgtctatgataaacgcgagaaccccctgctacccgaggaggaagaacagagggccatcgccaagattaaaatgctggggaacatcaaattcattggcgagttaggcaaactggatctgatccatgagagtattctccataaatgcatcaagacattgctagagaagaagaaaagagtacagctatag

SEQ ID NO: 33740 - DNA, 375 bp, Artificial Sequence
  derived and/or modified sequence
gtggagagcgccatcgccgagggcggcgccagccggttcagcgcctcaagcggtgggggcggatctaggggagcaccgcagcattatcctaaaacagccggaaactctgaattcctgggtaaaacaccaggccagaacgcgcaaaagtggatccccgcacggagtacacgccgggacgataacagcgccgcgaataacagcgctaacgaaaaagaacggcacgacgctatcttccggaaggtgaggggcatcttgaacaaactaacgcccgagaagttcgacaagctatgtctggagctcctcaatgttggtgtggagagtaagctgatacttaagggagttatcctgcttatcgtggacaaggctctggaatag

SEQ ID NO: 33741 - DNA, 339 bp, Artificial Sequence
  derived and/or modified sequence
gtggagagcgccatcgccgagggcggcgccagccggttcagcgccagctccggtggcggagggtcccggggggctccacagcattatcccaaaaccgccgggaatagtgaatttttgggaaaaacccccggacagaacgctcagaagtggattcctgcccgcagcacaaggagagacgacaactccgcagcaaacaactcagcaaacgagaaagaacggcacgatgctattttcaggaaggttaggggcatcctgaataagctcaccccagaaaaattcgataagctgtgccttgagctgttaaacgtgggtgtagaatcgaagcttatcctcaagtag

SEQ ID NO: 33742 - DNA, 351 bp, Artificial Sequence
  derived and/or modified sequence
gtggagagcgccatcgccgagggcggcgccagccggttcagcgcctccagcgggggtggagggagcaggggcgctccccagcattaccctaagacggctgggaacagcgagttcttggggaaaacaccggggcagaacgctcaaaaatggatccccgctaggagcacccggcgagatgacaactctgccgccaacaacagtgccaacgagaaagaacgtcatgacgccatatttaggaaagtccgcggaatcctcaacaagctcacgcccgaaaagtttgataagctgtgcctggagttgcttaatgtgggagttgaatccaaactgattcttaagggcgtcatcttgtag

SEQ ID NO: 33743 - DNA, 1335 bp, Artificial Sequence
  derived and/or modified sequence
gtggagagcgccatcgccgagggcggcgccagccggttcagcgccagcagtggcggaggtggatcacgtggtgctccccagcactatcccaagacagctggaaacagtgagttcctgggcaaaactccggggcagaacgcgcaaaaatggatccccgcaagatctacacggagagatgataattcagccgcgaacaactctgccaacgaaaaggagcgccacgacgcaatctttagaaaggtgagaggaattctgaacaagcttaccccagagaaattcgacaaattgtgtttggagctgctgaatgtaggcgtggagtcgaaattgattctgaaaggagtaattctcttgatcgttgataaggcccttgaggaaccaaagtattctagtctgtacgcacagttatgcctccgcctcgccgaagacgctccaaacttcgacggacctgctgccgaggggcagccgggacagaagcagagcacaacgttccggcggctcttaatctcaaagttgcaagatgagttcgaaaatcggacaaggaacgtggacgtctacgacaaacgggagaaccctctcctccctgaggaagaggagcaacgggccatagcaaagatcaaaatgctgggcaacataaagttcatcggcgagctcgggaaactggatctgatacatgaaagcatccttcacaaatgcataaagacccttttggaaaagaagaagcgcgtgcaattgaaggatatgggtgaggatctggaatgtctatgccagataatgagaactgttggacccagactggatcatgagcgagccaagagcctcatggatcagtacttcgcgaggatgtgttcgctcatgttgtcgaaagagctgccagccaggattcgatttcttctccaggatacagtcgagttacgggaacaccactgggtgccacgcaaggccttccttgacaacggccctaaaaccatcaatcagattcgacaggacgcagtgaaggacttgggcgtcttcattcccgcccccatggcccaggggatgaggagcgacttcttcttggagggtccttttatgcctccaaggatgaaaatggatagagacccgctcggcggcctggccgacatgtttggtcagatgcccgggagcggaatagggacagggccgggcgtgattcaagacagattcagccccactatgggtcggcaccgctcaaatcagcttttcaatggacacggaggccacatcatgccccccacgcagagtcaattcggtgaaatgggaggtaagttcatgaagtctcagatttccctgcgcccagctcagagctttctcatgtag

SEQ ID NO: 33744 - DNA, 849 bp, Artificial Sequence
  derived and/or modified sequence
gtggagagcgccatcgccgagggcggcgccagccggttcagcgcctcttccggtggaggtgggtcccgtggtgcgccccaacactaccctaagaccgcaggaaactccgaatttttaggaaagactccaggtcagaatgctcagaagtggatccctgcgcgatccacccgaagagacgacaatagtgcagctaacaactcagccaatgagaaagagcggcacgacgctatctttcgcaaggtccggggcatcttgaacaaattgacgccagaaaaatttgacaagctctgtcttgagctgttaaacgtcggcgtcgagtcgaaactgatcctgaagggagttattttactaattgtggacaaagccctggaggagccaaagtactcaagcctgtacgctcagctctgtctgcgcctcgcagaggatgcaccaaattttgacggaccagcagccgaaggtcaaccagggcagaaacagtctacaactttcagaaggctactgatcagcaaactccaagacgagtttgagaacaggacccgcaacgtcgatgtttacgacaaacgagagaacccactgcttccagaggaggaagagcagcgggccatcgcgaaaatcaagatgttgggcaacattaaattcatcggagaactgggaaagcttgacctgatccacgagtccattttacataagtgcatcaagaccctgctggagaagaagaagcgggtacagctgaaagacatgggagaggatctggagtgcctatgtcagatcatgcggacggtaggtccaagattagaccacgagagagcaaagagcctgatggaccagtactttgccaggatgtgttag

SEQ ID NO: 33745 - DNA, 393 bp, Artificial Sequence
  derived and/or modified sequence
gtggagagcgccatcgccgagggcggcgccagccggttcagcgccagcagtggcggtggaggttctcggggagccccgcagcattatcctaagactgccgggaacagcgagttcctgggtaagactcccggccagaatgctcagaaatggatccctgccaggagcaccaggcgagatgacaattccgctgcaaataattctgctaatgaaaaagaacgacacgatgcaatcttcaggaaagtgcgaggaatcctgaacaagttgacacccgagaaatttgacaagttgtgcctagagttgctgaacgtgggcgtcgaatccaagctgatcctcaagggagtgattcttttaatcgttgacaaagccctggaagagcccaaatattcctcctag

SEQ ID NO: 33746 - DNA, 762 bp, Artificial Sequence
  derived and/or modified sequence
atgcaggccttccttaatgtactagatcagtgtccaaaacttgaggtggacattccacttgtcaaatcctatctggctcaatttgcggctagagccatcatatcagagctggtgagcatttctgaattagcgcagcctctcgagtccgggactcattttccactgtttttgctatgtctacaacagctcgccaaactgcaggaccgggagtggttgacagagctgttccagcaaagcaaggtcaatatgcagaagatgttaccggagattgaccagaataaggatcgcatgctagagattttagaggggaagggactgagctttctctttcccttgctgaaactggagaaggaattactgaagcaaatcaagctcgatccgtctccacagacaatttacaagtggattaaggacaatatcagtcctaagctgcacgttgataagggattcgtgaacattctaatgaccagctttcttcaatacatcagcagcgaggtgaacccgccttccgatgaaaccgattcaagttccgcaccaagtaaagagcaactagagcaggagaagcaactgctcctgtcctttaaacccgtgatgcagaagttcctgcacgaccatgtcgacctgcaagtttcggcactctatgccttacaagttcattgttacaatagcaacttccccaagggtatgttgctttttctgtgcacatcaatgacatggaaattgctcaagaagaagctctcttggttgggaaagaaaatctag

SEQ ID NO: 33747 - DNA, 2610 bp, Artificial Sequence
  derived and/or modified sequence
gtggagtctgccattgcagagggtggcgctagccggttttccgcctccagcggtggagggggatcacggggagccccacagcactatcctaaaactgctggtaattctgagtttctcggaaaaacaccgggacagaacgcccagaagtggattccagctaggagcacccgacgggacgacaattccgcagcaaacaattccgcaaatgaaaaggaaaggcacgatgcgatttttaggaaggtcaggggaattcttaataaactcactccagagaaattcgacaaattgtgcctggagcttctgaatgtgggagtggaaagtaagcttattctgaagggcgtgatactgcttatcgtagataaagctcttgaggagcctaaatattcctccctttacgctcagttgtgcctcagattggctgaggatgctccaaactttgatggacctgcggcagagggccagcctgggcagaagcagtccacaacattcaggcgactgctcatttctaagctgcaggatgagtttgaaaacaggactcggaacgtcgatgtatatgataagcgcgaaaatcctctgctgcccgaagaggaggagcagcgggcaatagctaaaatcaagatgctaggcaacatcaaatttatcggggaattaggaaaacttgatctaatccacgagtccatcctccataaatgtataaaaacacttctggaaaagaagaaacgggtccaactgaaagacatgggggaagacctggagtgcctgtgccagatcatgcggaccgtcgggcctagactggatcatgaacgggctaagtcactgatggaccaatactttgcgaggatgtgttcccttatgctatctaaagaacttccggcaagaataaggttcctgctacaggacacggtagagctgcgtgaacatcattgggtgccacgcaaggccttcctggataacgggccaaagaccatcaaccagatccgccaggacgctgtgaaggacctcggcgtgttcatcccggctccaatggcccaagggatgagaagcgatttctttttggagggcccatttatgccccctcggatgaagatggaccgggacccattggggggactggccgacatgtttggtcaaatgcccggttcgggcattggtacaggcccaggcgtgatccaggaccgattcagtcccactatgggtcgtcatcgtagtaatcagttgttcaacgggcatggcggacatatcatgcctcctactcagagtcagttcggagagatgggaggaaagttcatgaaatctcagataagtctgaggcctgctcagtcattcctcatgaataaaaaccaagtcccaaaactacagccccaaatcacaatgattccccctagcgcccagcctccaaggacccagacgccacccctgggccagactccacagctgggactgaagactaatcctcccttgattcaggagaagcccgcaaagacatcaaaaaaaccgcctccctctaaggaagagctactcaagttaaccgaaacagtggttactgaatacttaaacagtggcaacgccaatgaagcggtaaacggcgtgcgcgagatgagagcacctaaacactttttacctgaaatgctgtccaaagtaatcattctgagcctggataggtcagatgaggacaaagagaaggcatcgagccttatttctctcctcaaacaagagggcatcgcaacttctgataattttatgcaagcatttctgaacgtgttggaccaatgcccaaaactcgaggtcgacataccgttggtgaagtcttacctcgcccagttcgccgctcgggcaattatttcggaactcgtctcaatctctgagctagctcagccccttgagagcggtactcacttcccactctttctattgtgccttcagcaactcgcgaagttacaagatcgtgagtggttgacagaactgtttcagcaaagcaaggtcaatatgcagaagatgctgccagagatagaccagaacaaagatcgaatgctcgagatactcgagggtaagggactgagcttcctgttccccctgcttaagttagagaaagagttgttaaaacagattaagctggaccctagtcctcagaccatctacaagtggattaaagacaatatctcccccaagcttcatgtggacaagggttttgtgaatattttaatgacttctttcctgcagtacatctcatctgaagtcaacccccctagtgatgagactgatagctcctctgcgccaagtaaagagcaattggagcaggagaagcagcttctgctttcctttaagcccgtgatgcagaagtttctccatgatcatgtagatctgcaggtttctgccctttacgccctgcaagttcactgctacaactccaatttccccaaaggtatgctcttgcgcttctttgtccacttttacgatatggaaatcattgaagaggaggcattcctcgcatggaaggaggacatcacgcaagaattccccggaaaggggaaagccctcttccaagtcaaccagtggttgacatggctggaaaccgctgaggaggaagaaagcgaagaggaagctgattag

SEQ ID NO: 33748 - DNA, 735 bp, Artificial Sequence
  derived and/or modified sequence
gtggagagtgccatcgccgaggggggagcttcacggttcagcgcctcaagtgggggaggtggttccaggggcgctccacagcactatcccaaaacagctggcaactcagagtttcttggtaaaactccgggacagaacgctcagaagtggatccccgctcgctcaacgcgaagagacgacaactctgctgccaataactccgcaaatgaaaaagagagacacgacgctatattccgtaaggtgcggggaatcttaaacaaactgacacctgagaagttcgataagctatgtctggaactgctcaatgttggagtggaaagtaagttaatactcaaaggagtcatcttgctgattgtggataaagccctggaggagccaaagtactcatcattgtatgcccagctgtgcctgaggttggccgaagatgctccaaactttgatggccctgcagctgaggggcagccaggacaaaagcaatccactaccttccgtcgacttctgatcagcaagctgcaggacgagtttgagaatcgcaccaggaacgtcgatgtttatgataagcgggaaaaccctctgttacctgaggaggaagagcagagggccatcgctaagattaagatgttaggcaatatcaagttcattggcgagctgggcaaacttgacctcattcacgaatcaatcctccacaagtgtatcaaaacgctcctggagaagaagaagcgcgtgcagctttag

SEQ ID NO: 33749 - DNA, 375 bp, Artificial Sequence
  derived and/or modified sequence
gtggagagcgccatagccgaaggaggagcttctagattcagcgccagtagtggcggaggcggttccaggggtgctccgcagcactaccccaaaaccgccggaaactcagagttcctcggaaagactccaggccagaatgcccagaagtggattccggcaaggtcgactagaagggacgacaacagcgcagcaaacaattcagctaatgagaaagagagacacgacgcaattttccggaaggttagggggatcctgaacaagctgacacctgaaaaattcgacaagctatgcctagagctcctcaacgtaggggtggagagtaagctcatcctgaagggtgtgatccttctgatcgttgacaaagccctggagtag

SEQ ID NO: 33750 - DNA, 339 bp, Artificial Sequence
  derived and/or modified sequence
gttgagtcagcaatagcggaggggggagcatccaggttttctgcaagtagtggcggaggcggatcgagaggggcaccgcagcactaccctaaaaccgccggaaattccgagtttctaggaaagactccaggccagaatgcccagaagtggatccctgcgagatctacgcgccgagatgataatagtgccgcaaacaactcagccaatgagaaggagcggcacgacgccatctttcgaaaagtgcggggaatattgaataaattgacgcctgagaagtttgataagctctgtctggagctgctgaatgttggggtggaatctaagctcattctaaaatag

SEQ ID NO: 33751 - DNA, 351 bp, Artificial Sequence
  derived and/or modified sequence
gtggagagcgcaatcgccgaagggggagcaagtcgattctccgcatctagcgggggtgggggaagtcggggagctccccagcattaccccaaaactgcaggcaatagtgagttcctggggaaaacccccggtcagaatgcacagaagtggattcccgctcgttcaacgaggcgcgacgacaattctgctgccaataattcagccaacgaaaaagagcggcatgatgcgatctttaggaaagtgcggggaattcttaacaaattaacccccgagaagttcgataagctttgcctggagctcttaaacgtcggcgtggagagcaaacttatacttaaaggcgtaatcctgtag

SEQ ID NO: 33752 - DNA, 1335 bp, Artificial Sequence
  derived and/or modified sequence
gtagagtctgccatcgccgaagggggagccagccgattttctgccagttccggtgggggaggctctagaggcgcaccccagcattacccgaagactgccggtaattctgagtttctgggcaaaactccaggccagaatgctcagaagtggattcctgccaggtccactagacgtgacgacaattcagccgcaaataactccgcaaacgagaaagaacgccacgatgcaatattccgcaaggtgaggggaattctcaacaagcttacgccggaaaagttcgataagctgtgcctggagctgttaaatgtgggggtggaatccaaattgattctcaagggagtcatactgctgattgtggataaggcactagaggaaccaaagtacagctcactgtacgcacagttatgcctgaggcttgctgaagacgcccctaactttgatggaccggctgcagaaggtcagcctggacagaagcagagcactacctttcgtcgtttactaatttccaagcttcaggacgaattcgagaatcgcacacggaacgtggacgtctacgataaaagggaaaatcctctgctgcctgaagaggaagagcagcgggctatagccaaaatcaagatgttaggaaacattaaattcatcggcgagttgggcaagttagacctcatccacgaaagtatcctacataagtgcatcaaaacactgctggagaagaagaagcgagtccaacttaaggacatgggcgaagatctggagtgtctctgtcagataatgagaactgtggggcctaggctggaccacgaacgcgctaaaagtcttatggatcagtactttgcaagaatgtgcagtctgatgctgtctaaggaattgcctgcacggatcagattccttctgcaggatactgtggaactgagggaacatcactgggtgcctagaaaagcgtttctggacaacggaccaaaaacgatcaaccagattcggcaggatgccgtgaaggatctaggagtcttcatccctgcccctatggctcagggtatgcgatccgactttttcctggaggggccattcatgcctccacgaatgaagatggaccgcgaccctttgggaggcttagctgatatgtttggccaaatgcctggatccggcataggcacgggccctggtgtgattcaggaccgcttttctcctaccatgggccgacaccgttcaaatcaactgtttaacggccatgggggacacataatgccccctactcagtcccaattcggagagatgggcggaaaatttatgaagtcccagatttcactcaggcccgctcaaagttttctgatgtag

SEQ ID NO: 33753 - DNA, 849 bp, Artificial Sequence
  derived and/or modified sequence
gtagaaagtgccatagcagaaggaggagcctcaaggtttagtgcttcttctggcggaggaggatcaaggggtgcccctcaacattaccccaagacggctggcaattccgagttcctcggcaaaacccctggccaaaacgcacagaagtggatccctgctcggtctacccgccgagacgataatagtgccgctaataatagcgccaacgagaaggagcggcacgacgctatcttcagaaaagttcggggaatactgaacaaactgacccccgaaaaattcgataagctctgtcttgaattactgaatgtaggcgttgaatctaagctgattctgaaaggagttatcctgctgatagtggataaggccctcgaggagccgaaatattccagcctatacgcccagttatgtctgcggctggctgaggacgccccaaacttcgatggccctgctgcagagggacagccaggacagaaacaaagcaccacttttcgaaggctgctgatttcaaaactgcaggacgagtttgagaatcgtacccgcaacgtagatgtgtacgacaaaagggaaaacccacttctgcccgaagaagaagagcaaagagctatcgcaaaaatcaaaatgctcggaaacataaagttcattggcgagcttgggaagctggatctcatccacgaatctatcttgcacaaatgtatcaagactttactagagaagaagaagcgcgtgcagcttaaggacatgggagaagacctggagtgcctatgtcaaataatgcggaccgtcggcccaagactggaccacgaaagggccaagagcttgatggaccagtactttgccaggatgtgctag

SEQ ID NO: 33754 - DNA, 393 bp, Artificial Sequence
  derived and/or modified sequence
gtagagtcagcaatcgccgaagggggagcctcccgtttttctgcatccagtggagggggaggatctaggggtgctccacagcattaccctaagaccgccggtaactccgagttccttggcaagactcccggacagaacgctcagaagtggattccagctcgctccacccgcagggatgataattcggccgcaaacaacagcgccaacgagaaagagagacacgatgccattttcaggaaggtgagaggtatccttaataagctcacccccgagaagtttgataagctgtgcctggagttgctgaatgtgggggtcgagtctaagctgattctgaagggcgtaattctgctgattgtagacaaagccctcgaagagcccaaatattcaagctag

SEQ ID NO: 33755 - DNA, 762 bp, Artificial Sequence
  derived and/or modified sequence
atgcaggccttcctgaacgtgctggaccagtgccccaagctggaggtggacatccccctggtgaagagctacctggcccagttcgccgccagagccatcatcagcgagctggtgagcatcagcgagctggcccagcccctggagagcggcacccacttccccctgttcctgctgtgcctgcagcagctggccaagctgcaggacagagagtggctgaccgagctgttccagcagagcaaggtgaacatgcagaagatgctgcccgagatcgaccagaacaaggacagaatgctggagatcctggagggcaagggcctgagcttcctgttccccctgctgaagctggagaaggagctgctgaagcagatcaagctggaccccagcccccagaccatctacaagtggatcaaggacaacatcagccccaagctgcacgtggacaagggcttcgtgaacatcctgatgaccagcttcctgcagtacatcagcagcgaggtgaacccccccagcgacgagaccgacagcagcagcgcccccagcaaggagcagctggagcaggagaagcagctgctgctgagcttcaagcccgtgatgcagaagttcctgcacgaccacgtggacctgcaggtgagcgccctgtacgccctgcaggtgcactgctacaacagcaacttccccaagggcatgctgctgttcctgtgcaccagcatgacctggaagctgctgaagaagaagctgagctggctgggcaagaagatctag

SEQ ID NO: 33756 - DNA, 2610 bp, Artificial Sequence
  derived and/or modified sequence
gtggagagcgccatcgccgagggcggcgccagcagattcagcgccagcagcggcggcggcggcagcagaggcgccccccagcactaccccaagaccgccggcaacagcgagttcctgggcaagacccccggccagaacgcccagaagtggatccccgccagaagcaccagaagagacgacaacagcgccgccaacaacagcgccaacgagaaggagagacacgacgccatcttcagaaaggtgagaggcatcctgaacaagctgacccccgagaagttcgacaagctgtgcctggagctgctgaacgtgggcgtggagagcaagctgatcctgaagggcgtgatcctgctgatcgtggacaaggccctggaggagcccaagtacagcagcctgtacgcccagctgtgcctgagactggccgaggacgcccccaacttcgacggccccgccgccgagggccagcccggccagaagcagagcaccaccttcagaagactgctgatcagcaagctgcaggacgagttcgagaacagaaccagaaacgtggacgtgtacgacaagagagagaaccccctgctgcccgaggaggaggagcagagagccatcgccaagatcaagatgctgggcaacatcaagttcatcggcgagctgggcaagctggacctgatccacgagagcatcctgcacaagtgcatcaagaccctgctggagaagaagaagagagtgcagctgaaggacatgggcgaggacctggagtgcctgtgccagatcatgagaaccgtgggccccagactggaccacgagagagccaagagcctgatggaccagtacttcgccagaatgtgcagcctgatgctgagcaaggagctgcccgccagaatcagattcctgctgcaggacaccgtggagctgagagagcaccactgggtgcccagaaaggccttcctggacaacggccccaagaccatcaaccagatcagacaggacgccgtgaaggacctgggcgtgttcatccccgcccccatggcccagggcatgagaagcgacttcttcctggagggccccttcatgccccccagaatgaagatggacagagaccccctgggcggcctggccgacatgttcggccagatgcccggcagcggcatcggcaccggccccggcgtgatccaggacagattcagccccaccatgggcagacacagaagcaaccagctgttcaacggccacggcggccacatcatgccccccacccagagccagttcggcgagatgggcggcaagttcatgaagagccagatcagcctgagacccgcccagagcttcctgatgaacaagaaccaggtgcccaagctgcagccccagatcaccatgatcccccccagcgcccagccccccagaacccagaccccccccctgggccagaccccccagctgggcctgaagaccaacccccccctgatccaggagaagcccgccaagaccagcaagaagcccccccccagcaaggaggagctgctgaagctgaccgagaccgtggtgaccgagtacctgaacagcggcaacgccaacgaggccgtgaacggcgtgagagagatgagagcccccaagcacttcctgcccgagatgctgagcaaggtgatcatcctgagcctggacagaagcgacgaggacaaggagaaggccagcagcctgatcagcctgctgaagcaggagggcatcgccaccagcgacaacttcatgcaggccttcctgaacgtgctggaccagtgccccaagctggaggtggacatccccctggtgaagagctacctggcccagttcgccgccagagccatcatcagcgagctggtgagcatcagcgagctggcccagcccctggagagcggcacccacttccccctgttcctgctgtgcctgcagcagctggccaagctgcaggacagagagtggctgaccgagctgttccagcagagcaaggtgaacatgcagaagatgctgcccgagatcgaccagaacaaggacagaatgctggagatcctggagggcaagggcctgagcttcctgttccccctgctgaagctggagaaggagctgctgaagcagatcaagctggaccccagcccccagaccatctacaagtggatcaaggacaacatcagccccaagctgcacgtggacaagggcttcgtgaacatcctgatgaccagcttcctgcagtacatcagcagcgaggtgaacccccccagcgacgagaccgacagcagcagcgcccccagcaaggagcagctggagcaggagaagcagctgctgctgagcttcaagcccgtgatgcagaagttcctgcacgaccacgtggacctgcaggtgagcgccctgtacgccctgcaggtgcactgctacaacagcaacttccccaagggcatgctgctgagattcttcgtgcacttctacgacatggagatcatcgaggaggaggccttcctggcctggaaggaggacatcacccaggagttccccggcaagggcaaggccctgttccaggtgaaccagtggctgacctggctggagaccgccgaggaggaggagagcgaggaggaggccgactag

SEQ ID NO: 33757 - DNA, 735 bp, Artificial Sequence
  derived and/or modified sequence
gtggagagcgccatcgccgagggcggcgccagcagattcagcgccagcagcggcggcggcggcagcagaggcgccccccagcactaccccaagaccgccggcaacagcgagttcctgggcaagacccccggccagaacgcccagaagtggatccccgccagaagcaccagaagagacgacaacagcgccgccaacaacagcgccaacgagaaggagagacacgacgccatcttcagaaaggtgagaggcatcctgaacaagctgacccccgagaagttcgacaagctgtgcctggagctgctgaacgtgggcgtggagagcaagctgatcctgaagggcgtgatcctgctgatcgtggacaaggccctggaggagcccaagtacagcagcctgtacgcccagctgtgcctgagactggccgaggacgcccccaacttcgacggccccgccgccgagggccagcccggccagaagcagagcaccaccttcagaagactgctgatcagcaagctgcaggacgagttcgagaacagaaccagaaacgtggacgtgtacgacaagagagagaaccccctgctgcccgaggaggaggagcagagagccatcgccaagatcaagatgctgggcaacatcaagttcatcggcgagctgggcaagctggacctgatccacgagagcatcctgcacaagtgcatcaagaccctgctggagaagaagaagagagtgcagctgtag

SEQ ID NO: 33758 - DNA, 375 bp, Artificial Sequence
  derived and/or modified sequence
gtggagagcgccatcgccgagggcggcgccagcagattcagcgccagcagcggcggcggcggcagcagaggcgccccccagcactaccccaagaccgccggcaacagcgagttcctgggcaagacccccggccagaacgcccagaagtggatccccgccagaagcaccagaagagacgacaacagcgccgccaacaacagcgccaacgagaaggagagacacgacgccatcttcagaaaggtgagaggcatcctgaacaagctgacccccgagaagttcgacaagctgtgcctggagctgctgaacgtgggcgtggagagcaagctgatcctgaagggcgtgatcctgctgatcgtggacaaggccctggagtag

SEQ ID NO: 33759 - DNA, 339 bp, Artificial Sequence
  derived and/or modified sequence
gtggagagcgccatcgccgagggcggcgccagcagattcagcgccagcagcggcggcggcggcagcagaggcgccccccagcactaccccaagaccgccggcaacagcgagttcctgggcaagacccccggccagaacgcccagaagtggatccccgccagaagcaccagaagagacgacaacagcgccgccaacaacagcgccaacgagaaggagagacacgacgccatcttcagaaaggtgagaggcatcctgaacaagctgacccccgagaagttcgacaagctgtgcctggagctgctgaacgtgggcgtggagagcaagctgatcctgaagtag

SEQ ID NO: 33760 - DNA, 351 bp, Artificial Sequence
  derived and/or modified sequence
gtggagagcgccatcgccgagggcggcgccagcagattcagcgccagcagcggcggcggcggcagcagaggcgccccccagcactaccccaagaccgccggcaacagcgagttcctgggcaagacccccggccagaacgcccagaagtggatccccgccagaagcaccagaagagacgacaacagcgccgccaacaacagcgccaacgagaaggagagacacgacgccatcttcagaaaggtgagaggcatcctgaacaagctgacccccgagaagttcgacaagctgtgcctggagctgctgaacgtgggcgtggagagcaagctgatcctgaagggcgtgatcctgtag

SEQ ID NO: 33761 - DNA, 1335 bp, Artificial Sequence
  derived and/or modified sequence
gtggagagcgccatcgccgagggcggcgccagcagattcagcgccagcagcggcggcggcggcagcagaggcgccccccagcactaccccaagaccgccggcaacagcgagttcctgggcaagacccccggccagaacgcccagaagtggatccccgccagaagcaccagaagagacgacaacagcgccgccaacaacagcgccaacgagaaggagagacacgacgccatcttcagaaaggtgagaggcatcctgaacaagctgacccccgagaagttcgacaagctgtgcctggagctgctgaacgtgggcgtggagagcaagctgatcctgaagggcgtgatcctgctgatcgtggacaaggccctggaggagcccaagtacagcagcctgtacgcccagctgtgcctgagactggccgaggacgcccccaacttcgacggccccgccgccgagggccagcccggccagaagcagagcaccaccttcagaagactgctgatcagcaagctgcaggacgagttcgagaacagaaccagaaacgtggacgtgtacgacaagagagagaaccccctgctgcccgaggaggaggagcagagagccatcgccaagatcaagatgctgggcaacatcaagttcatcggcgagctgggcaagctggacctgatccacgagagcatcctgcacaagtgcatcaagaccctgctggagaagaagaagagagtgcagctgaaggacatgggcgaggacctggagtgcctgtgccagatcatgagaaccgtgggccccagactggaccacgagagagccaagagcctgatggaccagtacttcgccagaatgtgcagcctgatgctgagcaaggagctgcccgccagaatcagattcctgctgcaggacaccgtggagctgagagagcaccactgggtgcccagaaaggccttcctggacaacggccccaagaccatcaaccagatcagacaggacgccgtgaaggacctgggcgtgttcatccccgcccccatggcccagggcatgagaagcgacttcttcctggagggccccttcatgccccccagaatgaagatggacagagaccccctgggcggcctggccgacatgttcggccagatgcccggcagcggcatcggcaccggccccggcgtgatccaggacagattcagccccaccatgggcagacacagaagcaaccagctgttcaacggccacggcggccacatcatgccccccacccagagccagttcggcgagatgggcggcaagttcatgaagagccagatcagcctgagacccgcccagagcttcctgatgtag

SEQ ID NO: 33762 - DNA, 849 bp, Artificial Sequence
  derived and/or modified sequence
gtggagagcgccatcgccgagggcggcgccagcagattcagcgccagcagcggcggcggcggcagcagaggcgccccccagcactaccccaagaccgccggcaacagcgagttcctgggcaagacccccggccagaacgcccagaagtggatccccgccagaagcaccagaagagacgacaacagcgccgccaacaacagcgccaacgagaaggagagacacgacgccatcttcagaaaggtgagaggcatcctgaacaagctgacccccgagaagttcgacaagctgtgcctggagctgctgaacgtgggcgtggagagcaagctgatcctgaagggcgtgatcctgctgatcgtggacaaggccctggaggagcccaagtacagcagcctgtacgcccagctgtgcctgagactggccgaggacgcccccaacttcgacggccccgccgccgagggccagcccggccagaagcagagcaccaccttcagaagactgctgatcagcaagctgcaggacgagttcgagaacagaaccagaaacgtggacgtgtacgacaagagagagaaccccctgctgcccgaggaggaggagcagagagccatcgccaagatcaagatgctgggcaacatcaagttcatcggcgagctgggcaagctggacctgatccacgagagcatcctgcacaagtgcatcaagaccctgctggagaagaagaagagagtgcagctgaaggacatgggcgaggacctggagtgcctgtgccagatcatgagaaccgtgggccccagactggaccacgagagagccaagagcctgatggaccagtacttcgccagaatgtgctag

SEQ ID NO: 33763 - DNA, 393 bp, Artificial Sequence
  derived and/or modified sequence
gtggagagcgccatcgccgagggcggcgccagcagattcagcgccagcagcggcggcggcggcagcagaggcgccccccagcactaccccaagaccgccggcaacagcgagttcctgggcaagacccccggccagaacgcccagaagtggatccccgccagaagcaccagaagagacgacaacagcgccgccaacaacagcgccaacgagaaggagagacacgacgccatcttcagaaaggtgagaggcatcctgaacaagctgacccccgagaagttcgacaagctgtgcctggagctgctgaacgtgggcgtggagagcaagctgatcctgaagggcgtgatcctgctgatcgtggacaaggccctggaggagcccaagtacagcagctag

SEQ ID NO: 33764 - protein, 501 aa, Artificial Sequence
  derived and/or modified sequence
MMRNKDKSQEEDSSLHSNASSHSASEEASGSDSGSQSESEQGSDPGSGHGSESNSSSESSESQSESESESAGSKSQPVLPEAKEKPASKKERIADVKKMWEEYPDVYGVRRSNRSRQEPSRFNIKEEASSGSESGSPKRRGQRQLKKQEKWKQEPSEDEQEQGTSAESEPEQKKVKARRPVPRRTVPKPRVKKQPKTQRGKRKKQDSSDEDDDDDEAPKRQTRRRAAKNVSYKEDDDFETDSDDLIEMTGEGVDEQQDNSETIEKVLDSRLGKKGATGASTTVYAIEANGDPSGDFDTEKDEGEIQYLIKWKGWSYIHSTWESEESLQQQKVKGLKKLENFKKKEDEIKQWLGKVSPEDVEYFNCQQELASELNKQYQIVERVIAVKTSKSTLGQTDFPAHSRKPAPSNEPEYLCKWMGLPYSECSWEDEALIGKKFQNCIDSFHSRNNSKTIPTRECKALKQRPRFVALKKQPAYLGGENLELRDYQLEGLNWLAHSWCK

SEQ ID NO: 33765 - protein, 514 aa, Artificial Sequence
  derived and/or modified sequence
MAHKQREDYLNLSPCVFTWYRTFSQLAFDGEKLSHSASEEASGSDSGSQSESEQGSDPGSGHGSESNSSSESSESQSESESESAGSKSQPVLPEAKEKPASKKERIADVKKMWEEYPDVYGVRRSNRSRQEPSRFNIKEEASSGSESGSPKRRGQRQLKKQEKWKQEPSEDEQEQGTSAESEPEQKKVKARRPVPRRTVPKPRVKKQPKTQRGKRKKQDSSDEDDDDDEAPKRQTRRRAAKNVSYKEDDDFETDSDDLIEMTGEGVDEQQDNSETIEKVLDSRLGKKGATGASTTVYAIEANGDPSGDFDTEKDEGEIQYLIKWKGWSYIHSTWESEESLQQQKVKGLKKLENFKKKEDEIKQWLGKVSPEDVEYFNCQQELASELNKQYQIVERVIAVKTSKSTLGQTDFPAHSRKPAPSNEPEYLCKWMGLPYSECSWEDEALIGKKFQNCIDSFHSRNNSKTIPTRECKALKQRPRFVALKKQPAYLGGENLELRDYQLEGLNWLAHSWCK

SEQ ID NO: 33766 - DNA, 1506 bp, Artificial Sequence
  derived and/or modified sequence
atgatgcgcaacaaggataaaagtcaggaagaggactccagcctccatagcaacgctagctcgcattctgcatctgaggaagctagcggcagtgattctggatctcagagcgagtccgaacagggcagcgatccaggctcaggccacggatctgagagcaattcgtcttcagaatccagcgagtctcagagtgagagcgaaagcgaaagcgctggctctaaatcccagcccgtgctcccagaagcgaaggaaaaaccagcatctaagaaggagaggatcgctgacgtcaagaagatgtgggaggagtatccagacgtatatggagtaaggcggtcgaatcggagcagacaagaacctagccgcttcaatatcaaggaagaagcgtcaagcggctcggagtccggctccccaaaaagacggggtcaacggcagttaaaaaagcaggagaaatggaaacaggaacccagcgaagatgagcaggagcaaggcacatctgccgagagtgagccagagcaaaaaaaggtgaaagcacggagacccgtaccgcgccgcactgtacccaaaccccgtgtcaaaaagcagcccaagactcagcgaggcaaaaggaaaaaacaggacagcagtgacgaagacgatgatgacgatgaggcacctaagcgccagacccgacggagggctgccaagaacgtgtcctataaggaagatgacgactttgaaaccgattcggacgatcttattgagatgaccggcgaaggagtcgatgagcagcaggacaactctgaaacgattgaaaaggttctggatagtcgcctgggcaagaaaggcgctacgggcgcatccacaaccgtttacgccatagaagcgaatggagatccttcaggcgactttgatacagaaaaggacgagggggagattcagtatcttataaagtggaagggatggtcatatatacacagcacttgggaaagtgaagagtccttacagcagcagaaggtgaaggggctcaaaaaacttgaaaattttaagaaaaaggaagacgagattaagcagtggcttggtaaggtgtccccagaagacgtggaatacttcaactgccagcaggaacttgcctcggaactaaacaagcagtaccagatcgtcgaacgagtgatagccgtgaagacatcaaagagcacactcgggcagacagacttcccagcacactcaagaaaacctgctcccagcaacgagccagaatacctatgcaaatggatgggcttgccatatagtgaatgtagttgggaagatgaagctctgataggaaagaagtttcagaattgcatcgactccttccactcccgaaataacagtaagaccattcctactcgagagtgcaaggccctgaaacagcgaccgcgtttcgtggccctgaaaaaacagcccgcctaccttgggggagagaacctggaactaagggactatcagctggaaggcctcaactggctcgctcattcctggtgcaaatag

SEQ ID NO: 33767 - DNA, 1545 bp, Artificial Sequence
  derived and/or modified sequence
atggcccataagcagagagaggattacttgaatctgagcccctgtgttttcacctggtaccgtaccttctcacagcttgctttcgacggcgagaagctgtctcacagcgcatctgaggaggcaagcggaagtgactcagggagccaaagcgaatcagagcaggggtcggacccgggtagcggtcatggcagcgaaagcaacagctcttctgagagcagcgagtcgcagtccgaaagtgaatctgaatcggcaggtagcaagagccagcctgtgctgcccgaagcaaaggaaaagcctgcctctaaaaaagagcggatcgcggacgtgaaaaagatgtgggaggaataccccgacgtgtacggcgtgcggcggagtaaccgaagccggcaggagccaagcaggtttaacataaaggaggaggcttctagcggctctgaaagcgggtctcccaagcgtaggggccagagacagctgaagaagcaggagaagtggaagcaagaaccctccgaggatgagcaggaacaaggtacatcggcagaatctgaacctgagcagaagaaagttaaggctagacgcccagtcccgcgccgaacagtgcctaagcctagggttaagaaacagcccaagactcagcgggggaagcgtaagaaacaggactcaagcgacgaagacgatgatgacgacgaggcaccgaagaggcaaactaggcgcagggctgcgaagaatgtctcctataaggaagatgacgacttcgagacagacagtgacgacttgatagagatgactggcgagggcgtggacgaacaacaggacaattctgaaaccatcgaaaaagtgttagactcccgactgggtaagaagggcgccaccggggcttccacaaccgtctatgctattgaagccaatggagacccatcaggagattttgacacggagaaggatgaaggggagatacagtatttaatcaaatggaaaggctggtcatatatccactctacatgggagtcagaagaaagtctgcagcaacagaaggtcaaaggcttgaaaaagctggaaaactttaaaaagaaggaagatgagattaaacagtggctgggcaaggtgtcaccagaggacgtggagtacttcaactgtcagcaagagctggcaagtgagctcaacaaacagtatcaaatcgtcgagagggtgatcgctgtaaagacaagcaagagcacgcttggccagacagactttcccgcacacagccgaaaacctgcacccagtaatgaaccggagtatctgtgcaagtggatgggtttgccgtattccgagtgtagttgggaggacgaggctctcatcggcaaaaagttccagaattgtattgattcctttcactcaagaaacaacagtaaaacgatacctacccgagaatgcaaagcattgaagcagcgccctcgatttgtagctcttaagaagcagccagcgtacttgggcggtgagaatctcgaattacgcgattaccagctcgaaggcctaaattggctcgcccacagctggtgcaaatag

SEQ ID NO: 33768 - DNA, 552 bp, Artificial Sequence
  derived and/or modified sequence
atgatgcgaaacaaggacaagtcacaggaagaggatagctccttacacagcaacgcaagcagccactctgcctctgaagaggcctcaggtagtgattccggtagtcagtcagagagcgagcagggttcagatccaggatctggccatggatctgaaagcaattctagctcagaatcctccgagagccagtccgagagcgagtctgaatctgctggtagtaaatcgcaacccgtgctgcctgaagctaaagagaagccagcctcaaagaaagaacgaatcgccgatgtaaagaagatgtgggaggaatacccagatgtctatggcgttcggaggtcaaaccgatcccggcaggagcccagtcggttcaatatcaaggaggaagcctcaagcggatccgaatcagggtcaccaaagaggagggggcagcggcagcttaagaaacaggagaaatggaaacaggaaccatccgaggacgagcaggagcagggaaccagcgccgagtctgagccggagcagaagaaagtgaaggcaagaaggcctgtgccccggtag

SEQ ID NO: 33769 - DNA, 1506 bp, Artificial Sequence
  derived and/or modified sequence
atgatgaggaacaaggacaagagccaggaggaggacagcagcctgcacagcaatgccagcagccacagcgccagcgaggaggccagcggcagtgacagcggcagccagagcgagagcgagcagggcagtgaccccggcagcggccacggcagcgagagcaacagcagcagcgagagcagcgagagccagagcgagagcgagagcgagagcgctggcagcaagagccagcctgtgctgcctgaggccaaggagaagccagccagcaagaaggagagaattgctgatgtgaagaagatgtgggaggagtacccagatgtgtatggagtgcggcgcagcaacagaagccggcaggagcccagccgcttcaacatcaaggaggaggccagcagcggcagcgagagcggcagccccaagagaagaggccagaggcagctgaagaagcaggagaagtggaagcaggagcccagtgaagatgagcaggagcagggcaccagcgctgagagcgagcctgagcagaagaaggtgaaggcccggcggcctgtgcccaggagaacagtgcccaagccccgggtgaagaagcagcccaagacccagaggggcaagaggaagaagcaggacagcagtgatgaagatgatgatgatgatgaggcccccaagaggcagacccggcggcgggccgccaagaatgtgtcctacaaggaggatgatgactttgaaacagacagtgatgacctgattgagatgactggagagggcgtggatgagcagcaggacaacagcgagaccatcgagaaggtgctggacagccggctgggcaagaagggggccactggagccagcaccaccgtgtatgccatcgaggccaatggagaccccagcggggactttgacacagagaaggatgaaggagagatccagtacctgatcaagtggaagggctggagctacatccacagcacctgggagagcgaggagagcctgcagcagcagaaggtgaagggcctgaagaagctggagaacttcaagaagaaggaggatgagatcaagcagtggctgggcaaggtgtccccagaagatgtggagtacttcaactgccagcaggagctggccagcgagctgaacaagcagtaccagatcgtggagcgggtgattgctgtgaagaccagcaagagcaccctgggccagacagacttccctgcccacagcaggaagccagcccccagcaatgaacctgagtacctgtgcaagtggatgggcctgccctacagcgagtgctcctgggaggatgaggccctgattggcaagaagttccagaactgcatcgacagcttccacagcaggaacaacagcaagaccatccccacccgggagtgcaaggccctgaagcagaggcccaggtttgtggccctgaagaagcagcctgcctacctgggcggggagaacctggagctgcgggactaccagctggagggcctgaactggctggcccacagctggtgcaagtag

SEQ ID NO: 33770 - DNA, 1545 bp, Artificial Sequence
  derived and/or modified sequence
atggcccacaagcagcgggaggactacctgaacctgagcccctgtgtgttcacctggtaccgcaccttcagccagctggcctttgatggagagaagctgagccacagcgccagcgaggaggccagcggcagtgacagcggcagccagagcgagagcgagcagggcagtgaccccggcagcggccacggcagcgagagcaacagcagcagcgagagcagcgagagccagagcgagagcgagagcgagagcgctggcagcaagagccagcctgtgctgcctgaggccaaggagaagccagccagcaagaaggagagaattgctgatgtgaagaagatgtgggaggagtacccagatgtgtatggagtgagaagaagcaacagaagccggcaggagcccagccgcttcaacatcaaggaggaggccagcagcggcagcgagagcggcagccccaagaggcggggccagaggcagctgaagaagcaggagaagtggaagcaggagcccagtgaagatgagcaggagcagggcaccagcgctgagagcgagcctgagcagaagaaggtgaaggcccggcggcctgtgcccaggagaacagtgcccaagccccgggtgaagaagcagcccaagacccagaggggcaagaggaagaagcaggacagcagtgatgaagatgatgatgatgatgaggcccccaagaggcagaccaggagaagagctgccaagaatgtgtcctacaaggaggatgatgactttgaaacagacagtgatgacctgattgagatgaccggggagggcgtggatgagcagcaggacaacagcgagaccatcgagaaggtgctggacagccggctgggcaagaagggggccaccggggccagcaccaccgtgtatgccatcgaggccaacggggaccccagcggggactttgacacagagaaggatgaaggagagatccagtacctgatcaagtggaagggctggagctacatccacagcacctgggagagcgaggagagcctgcagcagcagaaggtgaagggcctgaagaagctggagaacttcaagaagaaggaggatgagatcaagcagtggctgggcaaggtgtccccagaagatgtggagtacttcaactgccagcaggagctggccagcgagctgaacaagcagtaccagatcgtggagcgggtgattgctgtgaagaccagcaagagcaccctgggccagacagacttccctgcccacagcaggaagccagcccccagcaatgaacctgagtacctgtgcaagtggatgggcctgccctacagtgaatgttcctgggaggatgaggccctgattggcaagaagttccagaactgcatcgacagcttccacagcaggaacaacagcaagaccatccccacccgggagtgcaaggccctgaagcagaggcccaggtttgtggccctgaagaagcagcctgcctacctgggcggggagaacctggagctgcgggactaccagctggagggcctgaactggctggcccacagctggtgcaagtag

SEQ ID NO: 33771 - DNA, 552 bp, Artificial Sequence
  derived and/or modified sequence
atgatgaggaacaaggacaagagccaggaggaggacagcagcctgcacagcaatgccagcagccacagcgccagcgaggaggccagcggcagtgacagcggcagccagagcgagagcgagcagggcagtgaccccggcagcggccacggcagcgagagcaacagcagcagcgagagcagcgagagccagagcgagagcgagagcgagagcgctggcagcaagagccagcctgtgctgcctgaggccaaggagaagccagccagcaagaaggagagaattgctgatgtgaagaagatgtgggaggagtacccagatgtgtatggagtgcggcgcagcaacagaagccggcaggagcccagccgcttcaacatcaaggaggaggccagcagcggcagcgagagcggcagccccaagagaagaggccagaggcagctgaagaagcaggagaagtggaagcaggagcccagtgaagatgagcaggagcagggcaccagcgctgagagcgagcctgagcagaagaaggtgaaggcccggcggcctgtgcccaggtag

SEQ ID NO: 33772 - DNA, 1506 bp, Artificial Sequence
  derived and/or modified sequence
atgatgcggaacaaggacaagagccaggaggaggacagcagcctgcacagtaacgcttcatctcatagcgccagcgaagaagccagcgggagtgacagcgggtcacagagtgagtctgagcagggaagtgaccccggctccggccacgggagcgagagtaacagtagctccgagagtagcgaatcccagtcagaaagtgaatcagaaagtgcgggctctaaaagtcaacccgtgcttccggaagccaaggagaagcccgcctcaaagaaagaaaggattgccgatgttaagaagatgtgggaagagtatccagacgtttatggagtgcggagatctaaccggtcccgccaggagccttcacgcttcaacatcaaagaggaagcctccagtggtagtgagagcggcagccccaagcgtcgcggccagcgccaactgaagaaacaggagaagtggaagcaggagcctagcgaggacgagcaggagcaggggaccagtgccgaatctgagcccgagcagaaaaaagttaaggcgaggcgtccagtgccaagaaggactgtaccgaagcctcgggtcaagaagcagcctaagactcaacgcggtaagcgcaaaaaacaggattccagcgatgaagatgatgatgatgacgaagcccccaaacgccagacaaggcgtagggctgctaagaatgtctcatacaaagaggatgacgactttgagaccgacagtgacgatctgatcgaaatgacaggcgagggtgtagatgaacagcaggataactctgagactattgaaaaggtgctggactctcggcttgggaaaaagggcgcaaccggcgctagtacaacagtgtacgccatagaggcaaatggtgacccctctggcgactttgacacggaaaaagatgagggtgagatacagtacctgataaaatggaaggggtggagttacattcacagcacatgggagagtgaagagagcttgcaacagcaaaaggtcaaaggactgaaaaaacttgagaacttcaagaaaaaggaagacgaaataaagcagtggttaggaaaggtgtcccctgaggatgtcgagtactttaattgccagcaggaactcgcctccgagttgaacaaacagtatcagatagtggaaagagtgatcgccgttaagacatctaagtccacccttgggcagactgactttcctgcccatagtagaaagcccgcaccctctaatgagcctgagtatctgtgtaagtggatggggcttccctactctgagtgcagttgggaagacgaagccctgatcgggaaaaaattccagaactgtattgattctttccatagccggaataacagcaaaaccattccaacccgcgagtgcaaagccttgaaacagaggcctaggttcgtggccttaaagaagcaacctgcctatctgggcggtgagaatcttgaactgagagattaccagcttgaaggtttgaactggctggcccatagctggtgtaagtag

SEQ ID NO: 33773 - DNA, 1545 bp, Artificial Sequence
  derived and/or modified sequence
atggcccacaagcagcgggaggactacctgaacctgagcccctgcgtttttacttggtaccggactttctctcagttggcctttgacggcgaaaaattgtcgcattctgcttctgaggaagcaagcggaagcgactccgggagtcagagcgagagtgaacagggtagcgatccaggttctggacacggcagcgagagcaattcctcgtctgagtcatctgaatcccagagtgagtccgaatctgagagcgccggctcgaagagccagcccgtgctgcccgaggccaaagagaagcctgcgtctaagaaggaaaggattgccgacgtgaagaagatgtgggaagagtatcctgatgtctacggcgtcagaaggagtaaccgatcccggcaggaaccatcgcgctttaacataaaagaggaggcctcctcgggtagcgagtcggggtcgcccaagaggaggggtcagcggcaattgaaaaaacaggaaaagtggaagcaagaacctagcgaggacgagcaagaacagggtactagcgctgagtccgagccagaacaaaaaaaagtgaaagcgaggcggccggttccccgaaggactgtgcctaaaccgcgcgtcaagaagcagcctaagacccaacgcggtaaaaggaagaaacaagattcttctgatgaagatgacgacgacgatgaagccccaaagagacagaccaggcggagagccgccaaaaacgtcagctacaaggaagacgacgattttgagaccgattctgatgacctgattgaaatgacaggagagggtgtagatgaacaacaggataattcagagaccattgaaaaggtactggacagccgcctcgggaagaaaggcgctaccggtgcatcaaccactgtgtacgccatcgaagcaaacggcgatccttcaggtgactttgacactgagaaggatgagggagagattcagtatctgatcaagtggaaaggctggagctacattcacagcacctgggagagcgaggaaagcctgcagcagcagaaggtcaaggggctaaaaaagctcgagaactttaagaagaaagaggacgagatcaagcagtggctcgggaaagtgtcgcccgaagatgtcgaatactttaactgtcaacaagagttagcctcagagctgaacaaacaataccagattgtagaacgggttatcgccgtgaaaacctctaagagcacattgggccagaccgattttccagcacattcaaggaaacctgctccttctaatgagcccgagtacctgtgcaagtggatggggctgccctattccgaatgctcttgggaggacgaagctctgatcggaaagaagttccagaactgcatcgacagctttcattcaaggaacaacagcaagaccattcccacccgggagtgtaaggccctaaagcaacggcccagatttgtcgcacttaaaaagcagcctgcctacctgggcggcgaaaatctggaactgagggattatcagctcgagggcctcaattggttagcccatagctggtgcaagtag

SEQ ID NO: 33774 - DNA, 552 bp, Artificial Sequence
  derived and/or modified sequence
atgatgcggaacaaggacaagagccaggaggaggacagcagcctgcacagtaatgcgagttcacattcagccagcgaggaggcgagtggatcagactctggttcacaaagcgaaagcgaacaagggtctgatccagggagtggccacggatccgaatctaattctagttcggagtctagtgagtcacaatccgagtcagagtctgagagcgcaggctctaagtctcagcccgtgctccctgaggccaaggagaaacctgcttccaaaaaagaacgcattgctgacgtgaagaaaatgtgggaagaatatcccgacgtctacggcgtgcgacggagcaacagatcccgacaagagcctagccgattcaatattaaagaggaggcctcctctgggagcgagagcggatccccgaagcggcggggccagaggcagctgaaaaaacaggaaaaatggaagcaagagccttccgaggacgagcaggaacaggggactagtgctgagtctgaaccggaacagaaaaaagtaaaagcaaggcgcccagtgcctagatag

SEQ ID NO: 33775 - DNA, 1506 bp, Artificial Sequence
  derived and/or modified sequence
atgatgcgcaacaaggataagtcccaggaggaagactcatcgctgcactcaaatgctagctctcattcggctagcgaggaagcaagcggcagtgactctggctcgcaatccgaaagcgaacagggatccgatcccggatcaggccatggctccgaatcaaatagtagttctgagtcctccgagagccagagcgaatcagaaagcgagtccgcagggagcaagtcccaacctgtgctacccgaagcgaaggagaaacccgcttccaagaaagaacgaatcgcagacgtaaaaaagatgtgggaggagtatccggacgtatacggggttcggagatcaaatcggtcaaggcaagagcctagccgcttcaacatcaaagaggaagcgtcctctggatccgagtctggatcccctaaacggcgtggccagcgacagctgaagaaacaagagaaatggaaacaggaaccatctgaggacgagcaggaacaaggtactagtgccgaatctgaaccagagcagaagaaggtgaaggccaggcggcctgtgcccaggagaaccgtgcccaaacctcgagttaagaagcagcctaagactcagagaggcaaacggaaaaagcaggatagctcagatgaggacgacgatgatgatgaggcccctaagaggcagacgagaaggcgagcagccaagaatgtctcctataaggaggatgatgacttcgaaaccgattctgatgatctgatagagatgaccggcgagggcgtagacgaacagcaagataatagcgaaaccatcgagaaagtgttagactcccgtctgggaaagaaaggcgctaccggtgcctctactactgtgtacgccattgaggcaaacggggaccccagtggtgactttgatactgagaaagacgagggcgagatccagtatcttatcaaatggaaggggtggagctatattcattccacctgggagagtgaagagagtcttcagcagcagaaagtcaagggcctgaagaaattggaaaactttaaaaagaaggaagacgagattaagcagtggctcgggaaggtaagccccgaggacgtggaatacttcaactgtcagcaggaactggccagtgagttgaataagcagtatcagatcgtggagcgggtaattgcagtcaaaacgtccaagagtacactgggccagaccgacttcccggcacatagtcggaaacctgcccctagtaacgaacctgagtacttgtgcaagtggatgggactgccttatagtgaatgttcatgggaggatgaagctctgatcggcaagaagttccagaattgcatcgattcctttcattcacgcaataactccaagactatacctaccagagagtgtaaggccctgaagcaaaggcccagattcgtagcactcaaaaagcaaccggcatacctgggcggtgagaatctggagctgagagattatcaattagaggggttaaattggctggctcattcctggtgcaagtag

SEQ ID NO: 33776 - DNA, 1545 bp, Artificial Sequence
  derived and/or modified sequence
atggctcacaagcagagggaagactacctgaatctctcaccctgcgtctttacctggtacaggacattttcccagctggcgtttgatggggagaagctgagtcactccgcatccgaggaagccagtggttccgactccggctcacaatccgagtccgagcagggctcggatccaggttccggacatgggtccgaaagcaacagctccagcgagagctccgagtcccagtcggagagcgagagtgagtctgctggcagcaaaagccagccagttctccccgaagcaaaggaaaagcctgcgtctaagaaggagcgaattgccgatgtgaagaagatgtgggaggagtatcctgacgtgtacggcgttagacgatcaaataggagccggcaagagcctagtcggtttaacattaaagaggaagcgagctccggatctgagtccgggtcaccgaaaaggagaggacagagacaactcaagaagcaggaaaagtggaaacaggagccaagcgaagacgagcaggaacagggcacctcggctgagagcgaacccgaacagaaaaaggtgaaagcgaggaggcctgtgccaaggcggactgtgccgaaaccgagggtcaagaaacagcccaaaactcagaggggcaagcgcaagaaacaagattcttcagacgaggacgatgatgatgacgaggcaccaaaacgacaaacccgtagacgagcagcaaaaaacgtgagctataaggaggatgatgatttcgagacagacagtgacgatcttatcgagatgaccggggagggcgttgacgaacagcaggataattccgaaaccattgagaaggtcctagattcaaggctgggcaaaaagggggcaacgggcgctagcactacagtttacgccattgaagcgaatggcgatcccagcggcgacttcgacactgagaaggatgagggagaaatccaatacctgattaagtggaagggttggtcgtatattcatagtacgtgggagagcgaagagtctctgcaacaacagaaagttaaaggcctcaagaagcttgaaaattttaagaagaaggaggacgaaattaaacagtggctgggcaaagtcagcccagaagacgtagagtatttcaattgtcagcaggagctcgctagtgaactgaacaaacaatatcagattgtggagcgggtgatcgctgtgaagactagtaaatctacactgggccaaaccgatttccctgcccacagccgcaagccagctcccagcaatgaaccggagtatctctgcaaatggatgggcttgccctacagcgagtgctcctgggaagacgaagccttgatcggaaaaaaattccaaaactgcattgacagtttccactcgcggaacaatagcaagaccattcccacaagggagtgcaaagcactaaaacaaaggccccgtttcgtcgcgttgaagaagcagcccgcttatcttgggggagagaaccttgagctcagggattaccagctcgaggggcttaactggctggcccactcctggtgcaagtag

SEQ ID NO: 33777 - DNA, 552 bp, Artificial Sequence
  derived and/or modified sequence
atgatgcgcaacaaggacaaatcccaagaagaggattcttccctgcattcaaatgcctcttcccattctgcatcagaggaggcttctgggtctgacagcggatcgcagagcgagtccgaacagggctccgaccccggttcgggccatggaagtgagtctaattcatcttcagagtcctcggagagccaaagtgagagcgagagtgagtcggccggatctaaaagccagccggtcctgcccgaagccaaagaaaaacctgctagcaagaaagagaggattgctgacgtgaaaaaaatgtgggaggagtatcccgatgtttatggggtccgcagatctaacagaagtcgccaggaaccaagcagatttaacatcaaggaggaggctagttcaggctctgagtcaggatcgcccaagcggaggggtcagcggcagctcaaaaagcaagaaaaatggaaacaggagccctcagaggatgaacaggagcagggcacaagtgcggaaagcgagccagagcagaagaaggtgaaggctcgacggccagttccacggtag

SEQ ID NO: 33778 - DNA, 2221 bp, Artificial Sequence
  derived and/or modified sequence
ggaggctctagatggcggctgtgccttagagagagcgcgctctgctccctgcctttgcctcactttacgcaactttccctaactttcgggcagcctcagggggcccccgtagccccctgcctttcctagggacttactggggtcgattcgaacctttttttgggagaaaagcagcttttaggagctttcttttcgtgccttgttggaaagaagcagccgtactgagagcccaggtcgttgttttttccagcttagaagccatggcgcacctccatttttgtgcgctctcctaatgaggttttttttctttcggacctgttttagtattaattattgctttatttttttgaccagttaacatatttgagggttattttatttatttttcgttttttaacggaggattttgcctttatttttaattatttgggatctgatatttttctactagtagataggactcttggtttggacatactacatggatcagtaaatacctgggcacaggacttcaaagcaaacacagattccccctcccccttaatatttaagaattaaaagatgatgagaaataaggacaaaagccaagaggaggacagttcgctacacagcaatgcatcgagtcactcagcctctgaagaagcttcgggttcagactcaggcagtcagtcggaaagtgagcagggaagtgatccaggaagtggacatggcagcgagtcgaacagcagctctgaatcttctgagagtcagtcggaatctgagagcgaatcagcaggttccaaatcccagccagtcctcccagaagccaaagagaagccagcctctaagaaggaacggatagctgatgtgaagaagatgtgggaagaatatcctgatgtttatggggtcaggcggtcaaaccgaagcagacaagaaccatcgcgatttaatattaaggaagaggcaagtagcgggtctgagagtgggagcccaaaaagaagaggccagaggcagctgaaaaaacaagaaaaatggaaacaggaaccctcagaagatgaacaggaacaaggcaccagtgcagagagtgagccagaacaaaaaaaagtaaaagccagaagacctgtccccagaagaacagtgcccaaacctcgtgttaaaaagcagccgaagactcagcgtggaaagagaaaaaagcaagattcttctgatgaggatgatgatgatgacgaagctcccaaaaggcagactcgtcgaagagcggctaaaaacgttagttacaaagaagatgatgactttgagactgactcagatgatctcattgaaatgactggagaaggagttgatgaacagcaagataatagtgaaactattgaaaaggtcttagattcaagactgggaaagaaaggagccactggagcatctactactgtatatgcgattgaagctaatggcgaccctagtggtgactttgacactgaaaaggatgaaggtgaaatccagtacctcatcaagtggaagggttggtcttacatccacagcacatgggagagtgaagaatccttacagcaacagaaagtgaagggcctaaaaaaactagagaacttcaagaaaaaagaggacgaaatcaaacaatggttagggaaagtttctcctgaagatgtagaatatttcaattgccaacaggagctggcttcagagttgaataaacagtatcagatagtagaaagagtaatagctgtgaagacaagtaaatctacattgggtcaaacagattttccagctcatagtcggaagccggcaccctcaaatgagcccgaatatctatgtaaatggatgggactcccctattcagagtgtagctgggaagatgaagccctcattggaaagaaattccagaattgcattgacagcttccacagtaggaacaactcaaaaaccatcccaacaagagaatgcaaggccctgaagcagagaccacgatttgtagctttaaagaaacaacctgcatatttaggaggggagaatctggaacttcgagattatcagctagaaggtctaaactggctagctcattcctggtgcaagtaggtagaaaaatatgagtgcaattttccttactgtttctggcttctttattgttagatgtcaagaattttttttttcttttttcacacccttattgtatctcaaccaagaaatctttatgctgcatattacagaaataaaagatgattgagagaaa

SEQ ID NO: 33779 - DNA, 2131 bp, Artificial Sequence
  derived and/or modified sequence
agggagccgcacgccgaggggaaaaggaagggaactctagttgggactttccggtgggcggcttctttcctggacgcgtttgctcctggcagtcttgtccgcccttgcctgtagcggtccgcaccctgtagtgtgttcttttgcccatttccgggaatggtttatcctctttgagaagcggctgcttttggagaaaaagtgcaggcactatttataaattttaaaggcactatttggaaatcttaaaatagaaaatttgcccagttttacattttcccttttcataccttagcgtcccttctccccgcccccgttcagtgtgaagagatgagtgggtttaattttgttacaattgaccaaaacgtttgagtgtcagaggcggatacttttattttagtgaaaacctcttgacgggtgttaacagctgtttaatacatggctcataaacaaagggaagattatttgaacttgtccccatgcgtttttacttggtaccgtacattttctcagttggcatttgatggagaaaaactcagtcactcagcctctgaagaagcttcgggttcagactcaggcagtcagtcggaaagtgagcagggaagtgatccaggaagtggacatggcagcgagtcgaacagcagctctgaatcttctgagagtcagtcggaatctgagagcgaatcagcaggttccaaatcccagccagtcctcccagaagccaaagagaagccagcctctaagaaggaacggatagctgatgtgaagaagatgtgggaagaatatcctgatgtttatggggtcaggcggtcaaaccgaagcagacaagaaccatcgcgatttaatattaaggaagaggcaagtagcgggtctgagagtgggagcccaaaaagaagaggccagaggcagctgaaaaaacaagaaaaatggaaacaggaaccctcagaagatgaacaggaacaaggcaccagtgcagagagtgagccagaacaaaaaaaagtaaaagccagaagacctgtccccagaagaacagtgcccaaacctcgtgttaaaaagcagccgaagactcagcgtggaaagagaaaaaagcaagattcttctgatgaggatgatgatgatgacgaagctcccaaaaggcagactcgtcgaagagcggctaaaaacgttagttacaaagaagatgatgactttgagactgactcagatgatctcattgaaatgactggagaaggagttgatgaacagcaagataatagtgaaactattgaaaaggtcttagattcaagactgggaaagaaaggagccactggagcatctactactgtatatgcgattgaagctaatggcgaccctagtggtgactttgacactgaaaaggatgaaggtgaaatccagtacctcatcaagtggaagggttggtcttacatccacagcacatgggagagtgaagaatccttacagcaacagaaagtgaagggcctaaaaaaactagagaacttcaagaaaaaagaggacgaaatcaaacaatggttagggaaagtttctcctgaagatgtagaatatttcaattgccaacaggagctggcttcagagttgaataaacagtatcagatagtagaaagagtaatagctgtgaagacaagtaaatctacattgggtcaaacagattttccagctcatagtcggaagccggcaccctcaaatgagcccgaatatctatgtaaatggatgggactcccctattcagagtgtagctgggaagatgaagccctcattggaaagaaattccagaattgcattgacagcttccacagtaggaacaactcaaaaaccatcccaacaagagaatgcaaggccctgaagcagagaccacgatttgtagctttaaagaaacaacctgcatatttaggaggggagaatctggaacttcgagattatcagctagaaggtctaaactggctagctcattcctggtgcaagtaggtagaaaaatatgagtgcaattttccttactgtttctggcttctttattgttagatgtcaagaattttttttttcttttttcacacccttattgtatctcaaccaagaaatctttatgctgcatattacagaaataaaagatgattgagag

SEQ ID NO: 33780 - DNA, 1095 bp, Artificial Sequence
  derived and/or modified sequence
ctcttctcgcactgcccctccgtggtcgggggccggctctcgccggcgggatgcgcctcggtgccctgggcccgagtcgtagggtcctggggtagggggcacgcggggccccgctgcagagcccgcgggcggcaggtgggcggggggcagcctcgtcgccgggactggatccgccgggaaaggggcggcgggtgaatgccggcgagagcccgaaggggatcgggcgtggagagcccctttctgtcctggtgacttaagagattaaaattaatttggttgctgttggttctgaacaaataatgagttcttttatttgaggtatgccattttgaagactgagacgttggagttttatcctagaggataaaggaaatctttgggaaagtcagtattttatatagcaaaaatatgaacctcaaactgaatcctctaaaggccccatacaatgaagtagacattggtggaaacatttataaatacctgggcacaggacttcaaagcaaacacagattccccctcccccttaatatttaagaattaaaagatgatgagaaataaggacaaaagccaagaggaggacagttcgctacacagcaatgcatcgagtcactcagcctctgaagaagcttcgggttcagactcaggcagtcagtcggaaagtgagcagggaagtgatccaggaagtggacatggcagcgagtcgaacagcagctctgaatcttctgagagtcagtcggaatctgagagcgaatcagcaggttccaaatcccagccagtcctcccagaagccaaagagaagccagcctctaagaaggaacggatagctgatgtgaagaagatgtgggaagaatatcctgatgtttatggggtcaggcggtcaaaccgaagcagacaagaaccatcgcgatttaatattaaggaagaggcaagtagcgggtctgagagtgggagcccaaaaagaagaggccagaggcagctgaaaaaacaagaaaaatggaaacaggaaccctcagaagatgaacaggaacaaggcaccagtgcagagagtgagccagaacaaaaaaaagtaaaagccagaagacctgtccccagaag

SEQ ID NO: 33781 - DNA, 1506 bp, Artificial Sequence
  derived and/or modified sequence
atgatgagaaacaaggacaagagccaggaggaggacagcagcctgcacagcaacgccagcagccacagcgccagcgaggaggccagcggcagcgacagcggcagccagagcgagagcgagcagggcagcgaccccggcagcggccacggcagcgagagcaacagcagcagcgagagcagcgagagccagagcgagagcgagagcgagagcgccggcagcaagagccagcccgtgctgcccgaggccaaggagaagcccgccagcaagaaggagagaatcgccgacgtgaagaagatgtgggaggagtaccccgacgtgtacggcgtgagaagaagcaacagaagcagacaggagcccagcagattcaacatcaaggaggaggccagcagcggcagcgagagcggcagccccaagagaagaggccagagacagctgaagaagcaggagaagtggaagcaggagcccagcgaggacgagcaggagcagggcaccagcgccgagagcgagcccgagcagaagaaggtgaaggccagaagacccgtgcccagaagaaccgtgcccaagcccagagtgaagaagcagcccaagacccagagaggcaagagaaagaagcaggacagcagcgacgaggacgacgacgacgacgaggcccccaagagacagaccagaagaagagccgccaagaacgtgagctacaaggaggacgacgacttcgagaccgacagcgacgacctgatcgagatgaccggcgagggcgtggacgagcagcaggacaacagcgagaccatcgagaaggtgctggacagcagactgggcaagaagggcgccaccggcgccagcaccaccgtgtacgccatcgaggccaacggcgaccccagcggcgacttcgacaccgagaaggacgagggcgagatccagtacctgatcaagtggaagggctggagctacatccacagcacctgggagagcgaggagagcctgcagcagcagaaggtgaagggcctgaagaagctggagaacttcaagaagaaggaggacgagatcaagcagtggctgggcaaggtgagccccgaggacgtggagtacttcaactgccagcaggagctggccagcgagctgaacaagcagtaccagatcgtggagagagtgatcgccgtgaagaccagcaagagcaccctgggccagaccgacttccccgcccacagcagaaagcccgcccccagcaacgagcccgagtacctgtgcaagtggatgggcctgccctacagcgagtgcagctgggaggacgaggccctgatcggcaagaagttccagaactgcatcgacagcttccacagcagaaacaacagcaagaccatccccaccagagagtgcaaggccctgaagcagagacccagattcgtggccctgaagaagcagcccgcctacctgggcggcgagaacctggagctgagagactaccagctggagggcctgaactggctggcccacagctggtgcaagtag

SEQ ID NO: 33782 - DNA, 1545 bp, Artificial Sequence
  derived and/or modified sequence
atggcccacaagcagagagaggactacctgaacctgagcccctgcgtgttcacctggtacagaaccttcagccagctggccttcgacggcgagaagctgagccacagcgccagcgaggaggccagcggcagcgacagcggcagccagagcgagagcgagcagggcagcgaccccggcagcggccacggcagcgagagcaacagcagcagcgagagcagcgagagccagagcgagagcgagagcgagagcgccggcagcaagagccagcccgtgctgcccgaggccaaggagaagcccgccagcaagaaggagagaatcgccgacgtgaagaagatgtgggaggagtaccccgacgtgtacggcgtgagaagaagcaacagaagcagacaggagcccagcagattcaacatcaaggaggaggccagcagcggcagcgagagcggcagccccaagagaagaggccagagacagctgaagaagcaggagaagtggaagcaggagcccagcgaggacgagcaggagcagggcaccagcgccgagagcgagcccgagcagaagaaggtgaaggccagaagacccgtgcccagaagaaccgtgcccaagcccagagtgaagaagcagcccaagacccagagaggcaagagaaagaagcaggacagcagcgacgaggacgacgacgacgacgaggcccccaagagacagaccagaagaagagccgccaagaacgtgagctacaaggaggacgacgacttcgagaccgacagcgacgacctgatcgagatgaccggcgagggcgtggacgagcagcaggacaacagcgagaccatcgagaaggtgctggacagcagactgggcaagaagggcgccaccggcgccagcaccaccgtgtacgccatcgaggccaacggcgaccccagcggcgacttcgacaccgagaaggacgagggcgagatccagtacctgatcaagtggaagggctggagctacatccacagcacctgggagagcgaggagagcctgcagcagcagaaggtgaagggcctgaagaagctggagaacttcaagaagaaggaggacgagatcaagcagtggctgggcaaggtgagccccgaggacgtggagtacttcaactgccagcaggagctggccagcgagctgaacaagcagtaccagatcgtggagagagtgatcgccgtgaagaccagcaagagcaccctgggccagaccgacttccccgcccacagcagaaagcccgcccccagcaacgagcccgagtacctgtgcaagtggatgggcctgccctacagcgagtgcagctgggaggacgaggccctgatcggcaagaagttccagaactgcatcgacagcttccacagcagaaacaacagcaagaccatccccaccagagagtgcaaggccctgaagcagagacccagattcgtggccctgaagaagcagcccgcctacctgggcggcgagaacctggagctgagagactaccagctggagggcctgaactggctggcccacagctggtgcaagtag

SEQ ID NO: 33783 - DNA, 552 bp, Artificial Sequence
  derived and/or modified sequence
atgatgagaaacaaggacaagagccaggaggaggacagcagcctgcacagcaacgccagcagccacagcgccagcgaggaggccagcggcagcgacagcggcagccagagcgagagcgagcagggcagcgaccccggcagcggccacggcagcgagagcaacagcagcagcgagagcagcgagagccagagcgagagcgagagcgagagcgccggcagcaagagccagcccgtgctgcccgaggccaaggagaagcccgccagcaagaaggagagaatcgccgacgtgaagaagatgtgggaggagtaccccgacgtgtacggcgtgagaagaagcaacagaagcagacaggagcccagcagattcaacatcaaggaggaggccagcagcggcagcgagagcggcagccccaagagaagaggccagagacagctgaagaagcaggagaagtggaagcaggagcccagcgaggacgagcaggagcagggcaccagcgccgagagcgagcccgagcagaagaaggtgaaggccagaagacccgtgcccagatag

SEQ ID NO: 33784 - protein, 743 aa, Artificial Sequence
  derived and/or modified sequence
MEAAAVTVTRSATRRRRRQLQGLAAPEAGTQEEQEDQEPRPRRRRPGRSIKDEEEETVFREVVSFSPDPLPVRYYDKDTTKPISFYLSSLEELLAWKPRLEDGFNVALEPLACRQPPLSSQRPRTLLCHDMMGGYLDDRFIQGSVVQTPYAFYHWQCIDVFVYFSHHTVTIPPVGWTNTAHRHGVCVLGTFITEWNEGGRLCEAFLAGDERSYQAVADRLVQITQFFRFDGWLINIENSLSLAAVGNMPPFLRYLTTQLHRQVPGGLVLWYDSVVQSGQLKWQDELNQHNRVFFDSCDGFFTNYNWREEHLERMLGQAGERRADVYVGVDVFARGNVVGGRFDTDKSLELIRKHGFSVALFAPGWVYECLEKKDFFQNQDKFWGRLERYLPTHSICSLPFVTSFCLGMGARRVCYGQEEAVGPWYHLSAQEIQPLFGEHRLGGDGRGWVRTHCCLEDAWHGGSSLLVRGVIPPEVGNVAVRLFSLQAPVPPKIYLSMVYKLEGPTDVTVALELTTGDAGSCHIGGISVLNAETSSRHSLRPLRVPPTKLARWVGRCGRQLSGGWVQHCYEVSLRGCLLLDLLVCFSRPPGSREEESFTCRLGEIQVVDAASLLAPLPQVQAVTISHIRWQPSASEREGPPALLQLSCTLHWSFLLSQVRCFRIHCWGGMSDDSPGRELPRPEMPMFLGLAFATQYRIVDLLVEAAGPGQDRRMEFLVEPVPKEGFRVPQAEWGRAVLLYSAPA

SEQ ID NO: 33785 - DNA, 2232 bp, Artificial Sequence
  derived and/or modified sequence
atggaggccgccgccgtgaccgtgaccagaagcgccaccagaagaagaagaagacagctgcagggcctggccgcccccgaggccggcacccaggaggagcaggaggaccaggagcccagacccagaagaagaagacccggcagaagcatcaaggacgaggaggaggagaccgtgttcagagaggtggtgagcttcagccccgaccccctgcccgtgagatactacgacaaggacaccaccaagcccatcagcttctacctgagcagcctggaggagctgctggcctggaagcccagactggaggacggcttcaacgtggccctggagcccctggcctgcagacagccccccctgagcagccagagacccagaaccctgctgtgccacgacatgatgggcggctacctggacgacagattcatccagggcagcgtggtgcagaccccctacgccttctaccactggcagtgcatcgacgtgttcgtgtacttcagccaccacaccgtgaccatcccccccgtgggctggaccaacaccgcccacagacacggcgtgtgcgtgctgggcaccttcatcaccgagtggaacgagggcggcagactgtgcgaggccttcctggccggcgacgagagaagctaccaggccgtggccgacagactggtgcagatcacccagttcttcagattcgacggctggctgatcaacatcgagaacagcctgagcctggccgccgtgggcaacatgccccccttcctgagatacctgaccacccagctgcacagacaggtgcccggcggcctggtgctgtggtacgacagcgtggtgcagagcggccagctgaagtggcaggacgagctgaaccagcacaacagagtgttcttcgacagctgcgacggcttcttcaccaactacaactggagagaggagcacctggagagaatgctgggccaggccggcgagagaagagccgacgtgtacgtgggcgtggacgtgttcgccagaggcaacgtggtgggcggcagattcgacaccgacaagagcctggagctgatcagaaagcacggcttcagcgtggccctgttcgcccccggctgggtgtacgagtgcctggagaagaaggacttcttccagaaccaggacaagttctggggcagactggagagatacctgcccacccacagcatctgcagcctgcccttcgtgaccagcttctgcctgggcatgggcgccagaagagtgtgctacggccaggaggaggccgtgggcccctggtaccacctgagcgcccaggagatccagcccctgttcggcgagcacagactgggcggcgacggcagaggctgggtgagaacccactgctgcctggaggacgcctggcacggcggcagcagcctgctggtgagaggcgtgatcccccccgaggtgggcaacgtggccgtgagactgttcagcctgcaggcccccgtgccccccaagatctacctgagcatggtgtacaagctggagggccccaccgacgtgaccgtggccctggagctgaccaccggcgacgccggcagctgccacatcggcggcatcagcgtgctgaacgccgagaccagcagcagacacagcctgagacccctgagagtgccccccaccaagctggccagatgggtgggcagatgcggcagacagctgagcggcggctgggtgcagcactgctacgaggtgagcctgagaggctgcctgctgctggacctgctggtgtgcttcagcagaccccccggcagcagagaggaggagagcttcacctgcagactgggcgagatccaggtggtggacgccgccagcctgctggcccccctgccccaggtgcaggccgtgaccatcagccacatcagatggcagcccagcgccagcgagagagagggcccccccgccctgctgcagctgagctgcaccctgcactggagcttcctgctgagccaggtgagatgcttcagaatccactgctggggcggcatgagcgacgacagccccggcagagagctgcccagacccgagatgcccatgttcctgggcctggccttcgccacccagtacagaatcgtggacctgctggtggaggccgccggccccggccaggacagaagaatggagttcctggtggagcccgtgcccaaggagggcttcagagtgccccaggccgagtggggcagagccgtgctgctgtacagcgcccccgcctag

SEQ ID NO: 33786 - DNA, 2232 bp, Artificial Sequence
  derived and/or modified sequence
atggaggccgccgctgtgactgtcacgaggagtgccactaggaggagaagacgccaactgcagggtctggccgctccagaagctggcactcaggaagaacaagaagaccaggaaccacgcccaaggcgcaggcgacctggacggagtatcaaagacgaggaggaggagacggtcttccgggaagtagtgtctttttctcccgatcctctgcccgtccgttattatgacaaggatacaaccaagcctatatccttttacctgtcgagtctggaagaattgctcgcctggaaaccccggctcgaagatggttttaatgtggccctagaacctctcgcatgcaggcagccccccctgagtagtcagcggccaagaacacttttatgccatgacatgatgggcggatacctggacgacagattcattcagggcagcgtcgttcagaccccttatgcgttctaccattggcagtgcattgatgtcttcgtttacttcagccatcacactgtgaccatccccccagtcggctggaccaataccgctcaccgtcacggggtttgtgtgttaggtacattcattacagagtggaacgaggggggaagattatgtgaggctttcctggctggtgatgaaagatcctaccaggcggtggctgacagattagtccagattacacagtttttccgttttgacgggtggctgatcaatatcgaaaattcactctctctggcagccgtaggaaacatgccacccttcctgaggtatctgacaacacagctacatcgccaggtgcctggtgggctcgtgttatggtacgactccgtggtccagtctgggcagcttaagtggcaggacgaattgaatcagcataatagggtcttctttgactcctgtgatggatttttcactaactacaattggcgggaagaacatttagaacggatgttaggccaggcaggtgagcggcgagctgacgtgtacgtgggtgtggacgtcttcgctagaggtaacgtcgttggcgggcgcttcgataccgataaaagcctcgaactgatccgaaaacacggattcagcgtagcactgtttgcacccgggtgggtctatgagtgcctggagaagaaagatttcttccagaatcaggacaagttctgggggaggctggaacgttacctgcctacccactccatctgcagtctgcccttcgtgacttcattctgtctgggcatgggcgcccggagggtctgctatggacaagaggaagccgtcggcccctggtatcatctatccgctcaggaaatacaaccgctattcggcgagcataggcttggcggggacgggagggggtgggttcgaactcattgctgtctggaagatgcgtggcatgggggttcttctcttctagtgcgcggtgtgataccacccgaggtgggcaatgtcgcagtgaggttgtttagcctgcaggcaccggtcccgcccaagatttacctgtccatggtatacaaattggagggtcctactgacgtcacggtggcactcgagcttaccacaggtgacgccgggtcatgccatatcggtgggatctcagttctgaacgcagagactagtagccgacactccctgagacctctccgcgtcccccctacaaaactggcccgctgggtggggcgctgcgggaggcagctctccggcgggtgggtacagcactgctacgaggtgagccttcggggctgcttgctattggatttgctggtctgcttctcccgtcccccgggaagcagagaagaggaatccttcacttgtaggctgggcgagatccaggttgtagacgccgcgtctctgctcgccccactgccacaggtccaagccgtgacaatcagccacatacgctggcagccctcagcatcagagagagagggaccaccagctctgctgcagttgtcctgcacattgcactggagctttctcttgtcccaggtgcgctgttttaggatccattgctggggcggtatgagtgacgacagccccgggcgcgagctgcctcgaccagagatgcctatgttccttggactcgccttcgcgacccagtaccgaatcgtcgatttgttggttgaagcagccggacccggtcaggatagacggatggagtttttagttgaaccagtgcccaaggaagggtttagagtgccacaggcggagtggggacgggccgtgctcttatattcagccccggcatag

SEQ ID NO: 33787 - DNA, 2232 bp, Artificial Sequence
  derived and/or modified sequence
atggaagctgctgcggttactgtgacgcggtctgccactcgcagacggcggcgccagctgcagggcttagctgccccagaagctggaacacaagaggaacaggaggatcaagagccgcgtccgcgccggcgccgaccagggcgaagtattaaggatgaagaagaggaaacagtcttcagagaggtggtctctttttcaccggatccactgcccgtgcgatattacgacaaggacaccactaagcctatatctttttatctctcctccttagaggaactgctcgcttggaagccacggcttgaggacggctttaatgtggccctcgagcccctggcctgcaggcagcctccattatctagtcagcgacctcgcactcttctgtgccatgatatgatgggtgggtaccttgacgataggtttatacagggcagtgtcgtgcagacgccctacgctttctatcattggcagtgtatagatgtgtttgtgtacttcagtcaccatactgtaaccatcccacctgtgggatggaccaataccgcccacagacatggagtgtgcgtcctgggaaccttcatcacggaatggaacgagggcgggagactatgtgaggccttcctcgcaggcgacgagagatcttaccaggcggtggctgataggctcgtgcagatcactcaattcttccgatttgatggttggttaattaacatcgaaaattcactgtccctggctgcagttggcaatatgccccccttcctgcgctacctgaccactcagctacatcgtcaggtccccgggggactcgtgctctggtatgattccgtggtgcagtcgggtcaacttaagtggcaggacgagctgaaccagcacaaccgtgtgttcttcgactcttgcgatggatttttcacgaactacaactggcgcgaggaacatcttgagcgcatgctgggccaggccggagaacggcgggctgacgtgtacgtcggcgtggatgtgtttgccagaggcaatgtggtgggggggaggttcgataccgataagtcactggagttgattagaaaacatggttttagcgttgccctgttcgctcccggatgggtgtacgaatgcctcgagaaaaaagattttttccagaaccaggataaattctggggcaggctcgaacgttacttgcccacgcactccatttgctccctgccattcgtgactagcttttgtctgggaatgggggctagaagagtatgctatggtcaggaggaagccgtcgggccctggtatcatctgagcgcccaagaaattcagccattgtttggtgaacaccgcctgggcggtgacggccgcggctgggtccgtacccactgctgcttggaagacgcctggcacggaggctctagcctcctggtgcgcggcgtgattccacctgaagtaggcaatgtggcagttagattgttcagcctccaagccccagtccctcctaagatttacctgtcaatggtgtacaagctggaaggacctacagacgtcaccgtggcactggagttaacaactggggatgccggaagctgccatatagggggtatttccgtcctgaacgctgaaacttcaagtcgccacagcctgcgacctctgcgtgtgcctcccacaaaactggccaggtgggtgggccggtgcgggcgccagctaagtgggggttgggtccagcattgttatgaggtttcgcttagaggctgtctgcttttggatctgctggtgtgcttcagcagacctcccggctctagagaggaggagtcattcacatgtcggcttggcgagatccaagtcgtcgacgctgcaagtctcctcgctcctctgcctcaggtccaggctgttaccatatctcacattcggtggcagccctctgccagtgaaagggaagggcctcccgctctgctgcagctgagctgcaccctacattggtccttccttctgagccaggtgagatgttttcgaatccactgttggggtggaatgtcagacgattcacctggtcgcgaactcccacggccagagatgcctatgtttctggggctggcctttgcgacacagtacagaatcgttgacctgctcgtggaagccgctgggccgggccaggaccggagaatggagtttttggtcgagcctgtcccgaaggaaggcttcagggtaccacaggctgagtgggggcgggcagttcttttgtactctgcccccgcttag

SEQ ID NO: 33788 - DNA, 2232 bp, Artificial Sequence
  derived and/or modified sequence
atggaggccgctgctgtgacagtgaccaggtctgccaccaggagaagaagacggcagctgcagggcctggccgcccctgaggccggcacccaggaggagcaggaggaccaggagccccggcccaggagaagaagacctggccgcagcatcaaggatgaggaggaggagaccgtcttccgggaggtggtgtccttctccccagaccccctgcctgtgcgctactatgacaaggacaccaccaagcccatctccttctacctgagcagcctggaggagctgctggcctggaagccccggctggaggatggcttcaacgtggccctggagcccctggcctgccggcagccccccctgagcagccagaggcccaggaccctgctgtgccacgacatgatgggcggctacctggatgaccgcttcatccagggctctgtggtgcagaccccctatgccttctaccactggcagtgcattgatgtgtttgtgtacttcagccaccacacagtgaccatcccccctgtgggctggaccaacacagcccacagacatggagtgtgtgtgctgggcaccttcatcacagagtggaatgaaggaggccgcctgtgtgaggccttcctggccggagatgagaggagctaccaggccgtggccgaccggctggtgcagatcacccagttcttccgctttgatggctggctgatcaacatcgagaacagcctgagcctggccgctgtgggcaacatgccacccttcctgcgctacctgaccacccagctgcaccggcaggtgcctgggggcctggtgctgtggtatgattctgtggtgcagagcggccagctgaagtggcaggatgagctgaaccagcacaacagagtcttctttgacagctgtgatggcttcttcaccaactacaactggagggaggagcacctggagaggatgctgggccaggccggggagaggagagcagatgtgtatgtgggcgtggatgtgtttgcccggggaaatgtggtgggcggccgctttgacacagacaagagcctggagctgatcaggaagcacggcttctctgtggccctgtttgcccctggctgggtgtatgagtgcctggagaagaaggacttcttccagaaccaggacaagttctggggccgcctggagcgctacctgcccacccacagcatctgcagcctgccctttgtgaccagcttctgcctgggcatgggcgccaggagagtgtgctacggccaggaggaggccgtgggcccctggtaccacctgagcgcccaggagatccagcccctgtttggagagcaccggctgggcggagatggccggggctgggtgaggacccactgctgcctggaggatgcctggcacggcggcagcagcctgctggtgcggggcgtcatccccccagaggtgggcaatgtggccgtgcggctcttcagcctgcaggcccctgtgccccccaagatctacctgtccatggtgtacaagctggagggccccacagatgtgacagtggccctggagctgaccactggagatgctggcagctgccacatcggcggcatctctgtgctgaatgctgagaccagcagccgccacagcctgcggcccctgcgggtgccccccaccaagctggcccgctgggtgggccgctgtggccggcagctgagcggcggctgggtgcagcactgctatgaggtgtccctgcggggctgcctgctgctggacctgctggtgtgcttcagccggcccccaggcagccgggaggaggagagcttcacctgccgcctgggggagatccaggtggtggatgctgccagcctgctggcccccctgccccaggtgcaggccgtgaccatcagccacatccgctggcagcccagcgccagcgagcgggagggccccccagccctgctgcagctgagctgcaccctgcactggagcttcctgctgagccaggtgcgctgcttccgcatccactgctggggcggcatgtctgatgacagccctggccgggagctgcccaggcctgagatgcccatgttcctgggcctggcctttgccacccagtacagaattgtggacctgctggtggaggccgccggccctggccaggacaggaggatggagttcctggtggagcctgtgcccaaggagggcttccgggtgccccaggccgagtggggccgggctgtgctgctgtacagcgccccagcctag

SEQ ID NO: 33789 - DNA, 2232 bp, Artificial Sequence
  derived and/or modified sequence
atggaggccgccgccgtgaccgtgacccggagcgccacccggcggcgacgcagacagctgcaaggacttgccgcccctgaggcaggaacccaggaagagcaggaggaccaagagcccagaccccggcggcgtcgtccagggaggtctataaaggacgaagaagaggaaaccgtgtttagggaagtcgtgtccttttcacctgacccactgcccgtgcggtattacgacaaagacacaactaaaccaatctcgttctatctctccagcctcgaagagctcctggcctggaagcctcgactcgaagacggttttaacgttgcactcgaacctttagcgtgtcgccagccaccgctgtctagccagcgcccccggactctgctctgtcatgatatgatgggcggctaccttgatgatagatttatacagggcagcgttgtgcagaccccatacgcattttatcactggcagtgtatcgacgtttttgtctacttcagtcaccacacagtgactattccccccgttggctggaccaatacggcgcataggcacggagtctgtgtactgggtacattcatcacagagtggaatgagggggggcgcttgtgtgaggctttcctggctggcgacgagaggtcgtatcaggccgtggcggaccgcctggtacaaattacacaatttttcagattcgacgggtggttgattaacatcgagaacagtctgagcctggcggccgtcggcaatatgccaccatttctgcgctaccttaccacccagcttcatcggcaggtacccggtggactggtgctttggtacgattccgttgtgcagagcggacagctgaaatggcaggatgagctcaatcagcacaaccgcgtcttctttgacagttgcgatggcttctttactaactataattggagagaggaacatctcgagagaatgctcgggcaggctggagagcggagggctgatgtttacgtaggggttgacgtctttgcccgtgggaatgttgtgggtgggaggttcgatactgacaagagccttgagttaatcagaaaacatgggtttagtgttgcactatttgctcctgggtgggtgtatgaatgcctggagaagaaggatttttttcaaaaccaagacaaattctgggggagactggaaagatatttacctacccactctatttgctccctgcccttcgtgacttccttttgtctcggtatgggggcccgtcgtgtatgctatggccaagaggaggccgtgggaccctggtatcacctgtcagcccaggagattcaaccgctattcggcgagcatcgcctgggaggcgatggccgcggatgggtacgtacacattgttgtctggaagacgcttggcatggagggtcaagccttctggtcaggggggtcatcccccccgaggttggcaatgtcgccgtcagactgttttccttacaggcccctgtgccccctaagatatatctatcaatggtatacaaactggagggcccaacagatgttactgtggccttggaactcaccacaggagacgcaggatcatgccacatcggcggcatctcagtgctgaacgcagaaacaagcagtaggcattccctccgccccttgcgggtgcctcccacaaaactcgcacgctgggtgggtcggtgtgggcggcagctgtcaggcgggtgggtgcaacactgttacgaagtgagtctgcggggctgtctgctgctcgatttgctcgtttgtttctccagaccacccggatctcgggaggaggaatcttttacttgtcgactcggtgagattcaggtggtagatgcagccagtctgttggcccccctgccccaagtgcaggccgtgacgataagccacattaggtggcagccatccgcctctgagcgtgaaggcccccccgcgttgctgcagctatcctgcacacttcattggtcttttctgttaagccaagtacgctgttttaggattcactgctgggggggcatgagcgatgactctcccggacgggaacttccccgcccagagatgcctatgtttctgggcctggcttttgccacccagtacaggattgtggatcttctggtcgaagctgctggccccggtcaggacaggaggatggaatttctcgtggaaccagtccccaaggagggattccgcgtgccccaggccgagtgggggagagccgtgttgctctactcagctccagcctag

SEQ ID NO: 33790 - DNA, 2232 bp, Artificial Sequence
  derived and/or modified sequence
atggaggccgccgccgtgaccgtgacccggagcgccacccggcggcgtcgcagacagcttcaggggttagcagcaccagaggctggcacccaggaggagcaggaggaccaggaaccgagacccagacggaggcgccccggcaggtccatcaaggacgaagaggaagaaacagtattccgggaggtcgtaagtttctcgcctgaccccctgccagtgcggtactatgataaagacaccactaaacctatcagcttttatctctccagtttggaggagctcttagcttggaagccacggctggaggacggattcaacgtcgccctcgagccactagcgtgccgccagccacccttgtcttcacagcgacctcgcaccctcctgtgtcatgacatgatgggtggataccttgatgatcgattcattcagggatctgttgtgcagacgccgtatgccttttaccattggcaatgcattgacgtgtttgtttacttttcgcaccatacagtgaccattccccccgtggggtggactaatactgcacaccggcatggcgtgtgtgtgctggggacattcatcaccgaatggaacgagggcggaagactatgtgaggcctttctggccggagatgagcgcagttatcaggccgtcgcagaccgtcttgttcagattacacagttctttcggttcgacggctggctcatcaacattgagaattccctttctctggctgctgtcggcaatatgccgccgtttctgagatatctcaccacccaactgcatagacaggtacccggcgggttggttctctggtatgactctgtggtacaaagcggacaactgaaatggcaggatgagctgaaccaacacaacagagtcttttttgatagttgtgacggtttcttcactaactacaactggagagaagagcatcttgagcgaatgcttggccaggccggcgagagaagggcagatgtgtatgttggggtcgacgtgtttgcgagaggcaacgttgtgggaggaaggttcgataccgataaatctctggagctcataaggaaacatggcttcagtgtcgcactcttcgctcctggttgggtttacgaatgcctggaaaagaaagattttttccagaatcaagacaagttctggggccgactggagcggtaccttccaacccattcaatttgctcgctccccttcgtgacatcattttgtctgggcatgggtgcgcgacgggtgtgctatggacaagaggaggccgtgggcccatggtaccatttaagtgcccaggaaattcagcccctcttcggggagcatcgactgggcggagacggacgtggttgggttagaacccattgttgcctcgaggacgcttggcacggcggatcttctctgttggtcaggggagtaatccccccagaagtagggaacgtagcagtccggttattcagcttacaagctcctgtaccccctaaaatctacctgtctatggtgtataaacttgaagggcccaccgacgtgaccgtggctctcgagctgaccacgggcgacgccggatcatgtcatatcggcggtatatccgtgctgaatgcagaaacgtcttcacgacactcactacgcccacttcgggtgccacccaccaaactggctcgatgggtcggcaggtgcggaagacaactgagcggcggatgggttcagcactgctacgaagtaagcctccgtggctgtttgctcctggatcttttagtttgtttttccagaccacccgggtccagggaagaagaatcattcacgtgccgactgggggaaattcaagtggtggacgctgccagcctgcttgcccccctccctcaggtgcaggcggtcactatcagccacatccgatggcaaccatcggcctctgaacgagaaggcccgcctgccctactgcagctctcgtgcacactccactggtcgttcttgctctcccaagtgaggtgctttcgcattcactgctgggggggaatgtctgatgacagtccagggagggagctgccacggcccgagatgcccatgttcttaggcctcgcattcgctacacagtacagaatcgtggatttattggtggaagccgcagggcctggtcaggatagacgcatggagttcttggtcgagcctgtccctaaggagggattcagggtgcctcaggctgagtggggtcgggctgtgttgctgtactcagcgccagcttag

SEQ ID NO: 33791 - DNA, 2232 bp, Artificial Sequence
  derived and/or modified sequence
atggaggcagccgctgtgacagtcactaggtctgccactaggcgcagacggagacaacttcagggcctcgctgcgcctgaggccggtacccaagaggaacaggaggaccaagaacctcgacctcgcaggaggagacccggacgcagtattaaggacgaagaagaggagacagtcttcagggaggtcgtcagtttctcaccagatcccctccctgtgcgttactacgataaagacacgaccaagccaattagcttttacctctcaagcctcgaggaacttctcgcctggaagcccagactcgaggatgggttcaacgtcgccctggagccactcgcctgccgccagcctccactcagttcgcagcggcctcggaccctcttatgccatgatatgatgggtggctacctggatgaccggttcattcagggctctgtggttcagaccccttacgccttttaccattggcagtgcatcgatgtttttgtatatttctctcatcacactgtgactatccctcctgtgggttggaccaacacagcccacaggcacggagtgtgcgtgctcggcacgttcattaccgagtggaatgaaggcggaaggttgtgcgaagccttcctagcaggtgacgagcggtcctaccaagccgtggctgataggctggtgcaaatcacacagtttttcagattcgatggatggctaattaatattgagaattcattaagcctggctgctgtcggaaacatgccccctttcctcagatacttgaccactcagctgcataggcaggtgccgggaggcctggtgctgtggtacgactctgtcgtgcagagcggccagcttaaatggcaggatgagttaaatcagcacaacagggttttcttcgatagctgcgatggtttctttaccaactataactggcgggaggaacatttggagagaatgctgggtcaagctggcgaacgcagagctgatgtgtatgtcggagttgatgtgtttgccaggggcaacgtggtggggggaaggtttgacacggacaagtcattggagctcatccgcaaacacggcttcagtgttgctctcttcgcacctggatgggtgtatgaatgtctggaaaagaaggacttcttccaaaatcaagacaaattctggggcaggctagagcgctatctaccaacccattccatctgcagtttacctttcgttacatccttttgtctgggcatgggcgcaaggagagtctgctacggccaggaggaggcagtaggcccttggtatcaccttagcgcccaggaaattcagcctctgtttggagagcatcggctcggaggagatggcagggggtgggttagaacccactgttgcttggaagacgcatggcatggtggttcctcgcttttggtgcgaggtgtgataccacctgaggtcgggaatgtggccgttaggctgttttcacttcaggcacccgtcccccctaaaatatacctctctatggtttataagttggaaggacccaccgacgtgacagtggcgctggaactgaccacaggggatgctggatcatgccatattggtgggatttcagtgctgaacgcagaaacttccagtagacactccctgagacctctgagagtgcctcccacaaaattagccaggtgggtcggcagatgcggcagacagttatccggtggatgggttcaacattgctatgaggtctccctgaggggttgccttctgctggacttgctcgtctgctttagcagaccacccggttcaagggaggaggaatcctttacatgtcgactcggcgagattcaggtggtcgatgccgctagcttactggcaccactgccccaggttcaggccgtaaccattagtcacattaggtggcagccatctgcatctgagcgggaggggccaccggctcttctacagcttagttgcacgctccactggagcttcctgctcagtcaggtgcgctgcttccgtattcactgctgggggggaatgtctgacgattctcccggaagagaactgcctaggcccgaaatgccaatgttcctgggactagccttcgccacgcagtatcgcatagtcgacctactggtcgaggcggcaggcccagggcaggatcgaaggatggagtttctcgtggagcctgtccccaaagaagggtttcgagtccctcaagcagagtggggcagagcagttctgttatattccgccccagcatag

SEQ ID NO: 33792 - DNA, 2232 bp, Artificial Sequence
  derived and/or modified sequence
atggaggccgctgctgtgacagttacacgctccgcgacccggagacgacgtcgccaactgcaaggtctagctgctcccgaggctggaacgcaagaagaacaagaagatcaagaaccgagacctcgaagacggagaccaggccgtagcatcaaggacgaggaggaggagacggtgtttagggaagtggtgagctttagtcccgaccctctccccgtgcgctattacgataaggacactaccaaacctattagtttttatctgagttctttggaggagctgttagcatggaagccacgactggaggacggttttaacgtggctctggaacccttggcctgcaggcaacctccactttccagtcagcgtccacgaacactgttgtgccacgatatgatgggcggatatctcgacgaccgctttatacagggatccgtagtgcagacaccttatgcgttctatcattggcaatgcatcgatgtctttgtttacttttctcaccataccgtgactattccgccagtgggatggactaacactgcacatcggcatggcgtgtgcgtgctgggcactttcattaccgagtggaacgaagggggtaggctctgtgaggcgttcctcgcaggcgatgagagatcctaccaagccgtcgccgacaggctggtgcagattacccaattcttccggtttgacggctggctgattaacatagaaaatagtctctctctcgctgccgtgggaaacatgcctccattccttaggtaccttaccacccagcttcaccgccaggtcccgggaggactagttctgtggtacgattctgttgtccagtcgggtcaactgaagtggcaggacgaactaaaccaacacaatagagtgttttttgacagttgcgatggattttttactaactacaattggagggaggagcatctcgaaagaatgcttgggcaggcaggtgaaaggagagcagatgtatatgtgggcgttgacgtgtttgctagaggcaacgttgtagggggacggttcgacacggacaagtccctggagttaatcagaaagcatggattcagcgtcgctcttttcgcgcctggttgggtatacgaatgcctggaaaaaaaggattttttccaaaaccaggacaagttctggggtagactggaaagatacctgccaacccactccatctgctctctccctttcgtgacctccttttgcctgggaatgggagccaggcgcgtgtgttatgggcaggaggaggctgttgggccatggtatcatctgtcagcccaggagatccagccgctcttcggggaacaccgcctgggaggagacggacggggttgggtcaggacccactgctgtcttgaagacgcatggcatgggggatcaagtctactggtcagaggcgtcatcccaccagaggtcggaaatgtggcagtgcggctgttcagccttcaagccccagtgcctccaaagatctatctgtccatggtctataagctcgaggggcctacagatgtgactgtggccttagaactgactactggggatgctggttcctgccatatcggagggatcagcgtattgaatgccgagacttcttcaaggcattcattgcggcctttgcgggtaccacccactaagctggccaggtgggttggtcgctgcggcagacaactctctggtggctgggtgcagcattgttatgaggttagcctgagaggctgtctcctgctggacctcttggtgtgtttcagtcgccctccaggttcccgagaagaagaaagctttacttgtaggctgggtgagattcaagtggttgatgccgcaagcttgctcgcaccactgccccaagtgcaggccgtcaccatttctcatatcagatggcagccttcagcctccgaacgcgagggacctcccgctctgctccagttgtcatgcacgctgcattggagctttttgttgtcacaagtgcgttgcttccgaatccattgttggggcggaatgtccgacgactcccctggacgagagctgcccaggcccgaaatgccgatgttcttaggcctcgcctttgcaacccagtaccgaatcgtggatctgctggtggaagctgccggacccggtcaggatagaagaatggaattcctcgtcgagcctgtgcccaaggaggggttccgggtcccacaggcggagtggggcagagctgtccttctctacagcgctcctgcttag

SEQ ID NO: 33793 - DNA, 2579 bp, Artificial Sequence
  derived and/or modified sequence
atggaggccgcggcggtgacggtcacccggtcggctacacggcggcggcggcggcagctgcaggggctggcggccccggaggcggggacgcaggaggagcaggaggatcaggagccgcggccgcggcggcggcggccgggaaggagcatcaaagatgaagaagaagagacagtctttcgagaggtggtcagtttttccccggaccccctgccagttagatattatgacaaggacaccaccaaaccaatcagcttttacttgtcttcgctggaggagctcttggcgtggaagccccgcttggaggatggctttaatgtggccctggagcccctggcgtgtcgccagccccctctgagcagccagaggccccggactttgttgtgtcatgacatgatgggcgggtacctggatgacaggttcattcagggctcggtggtgcagactccctatgctttctaccactggcagtgcatcgacgtctttgtgtacttcagccaccacaccgtcaccattcccccagtgggctggaccaacactgcccacaggcatggggtctgcgtgctggggactttcatcacggagtggaatgaagggggaaggctctgtgaagccttcctggccggggatgagcgctcgtaccaggcagtggctgaccggctggtccagatcactcagttttttcgttttgatggctggctgatcaacatcgagaactcgctgagtctggccgctgtggggaacatgcctcctttcctgcggtacctcaccacacagctgcaccggcaggtcccagggggcctggtgctctggtatgacagcgtggtgcaaagtgggcagctcaaatggcaagacgaactcaaccagcacaacagggtcttctttgattcctgcgacggcttcttcactaactataactggcgggaggagcacttggagcggatgctggggcaggctggggagcgccgggctgatgtgtacgtgggcgtggatgtgtttgctcgagggaacgtggtcggaggccgattcgacacagacaagtcgttggagctgatccgaaagcatggcttctccgtggctttgtttgcccccggctgggtgtatgagtgtctggagaagaaggatttcttccagaaccaggacaagttctggggccgactggagcgttatctgcccacacatagcatctgctccttgcctttcgtcacgtccttctgcctgggcatgggtgcacggagggtctgctatggccaggaagaggcggtagggccctggtaccacctgagcgcccaggagatccagcccttgtttggagaacacaggctgggaggggatggccggggctgggtgaggacgcactgctgcctggaggatgcctggcacggaggcagctccctgctcgtccggggtgtgatcccaccggaggttggaaatgtggctgtgaggttattttccctgcaggccccagtgccacccaagatttacctgtccatggtgtataagcttgaggggcccacggacgtcacagttgctttggagctgaccacaggggatgccggcagctgccacatcggtggcatctcagtgttgaacgcagaaacaagctcaagacacagcctccgacccctccgggtgccccccaccaagctggccagatgggtgggccgctgcggccggcagctgagtgggggctgggtccagcactgctacgaggtgagcctgcgtgggtgcctgctgctagacctcctcgtttgcttctcacggccgccgggtagtcgggaggaggagagcttcacctgtcggcttggagagatccaggtggtggacgctgccagcctgctggcccctctgccccaggtgcaggccgtcaccatctctcacatccgctggcagccatccgcctctgagcgggaggggccccctgctctgctccagctcagctgcaccctgcactggtccttcctcctctcacaagtccgttgcttccgaatccactgctggggagggatgagtgatgactctccgggcagggagctgccgaggccagagatgcccatgttcctggggttggcttttgccacccagtaccggatagtggacctgctggtggaagccgccgggcccggccaggatcgtcgcatggaatttctggtggagcctgtccccaaggaagggttccgggtacctcaggccgagtggggcagggcagttctgctttattcagcccctgcatgagcggatgctaaggccgggtggtctcctggcctcgggctgaggcctcttcccggctgtctgcccctggcctgcgctggacctgctaagtgcccacagtggcagcgaggtcccggtcccggggctggggtgggagaccccgggctgagtgctgtggctttctggtggggggcgatggaaacaggaaaccaagcagtgggatcgcagcgttggtcactgcgaggcgagtggcgggctttctgtttctgccttgtccctccccacggtacctggttcccaggtgaaaatgaaaggaggggagaagttgagaacagaacattccataaaggatatttcctaataggctgcaa

SEQ ID NO: 33794 - protein, 618 aa, Artificial Sequence
  derived and/or modified sequence
MAASPGSGSANPRKFSEKIALHTQRQAEETRAFEQLMTDLTLSRVQFQKLQQLRLTQYHGGSLPNVSQLRSSASEFQPSFHQADNVRGTRHHGLVERPSRNRFHPLHRRSGDKPGRQFDGSAFGANYSSQPLDESWPRQQPPWKDEKHPGFRLTSALNRTNSDSALHTSALSTKPQDPYGGGGQSAWPAPYMGFCDGENNGHGEVASFPGPLKEENLLNVPKPLPKQLWETKEIQSLSGRPRSCDVGGGNAFPHNGQNLGLSPFLGTLNTGGSLPDLTNLHYSTPLPASLDTTDHHFGSMSVGNSVNNIPAAMTHLGIRSSSGLQSSRSNPSIQATLNKTVLSSSLNNHPQTSVPNASALHPSLRLFSLSNPSLSTTNLSGPSRRRQPPVSPLTLSPGPEAHQGFSRQLSSTSPLAPYPTSQMVSSDRSQLSFLPTEAQAQVSPPPPYPAPQELTQPLLQQPRAPEAPAQQPQAASSLPQSDFQLLPAQGSSLTNFFPDVGFDQQSMRPGPAFPQQVPLVQQGSRELQDSFHLRPSPYSNCGSLPNTILPDSSTSLFKDLNSALAGLPEVSLNVDTPFPLEEELQIEPLSLDGLNMLSDSSMGLLDPSVEETFRADRL

SEQ ID NO: 33795 - protein, 582 aa, Artificial Sequence
  derived and/or modified sequence
MTDLTLSRVQFQKLQQLRLTQYHGGSLPNVSQLRSSASEFQPSFHQADNVRGTRHHGLVERPSRNRFHPLHRRSGDKPGRQFDGSAFGANYSSQPLDESWPRQQPPWKDEKHPGFRLTSALNRTNSDSALHTSALSTKPQDPYGGGGQSAWPAPYMGFCDGENNGHGEVASFPGPLKEENLLNVPKPLPKQLWETKEIQSLSGRPRSCDVGGGNAFPHNGQNLGLSPFLGTLNTGGSLPDLTNLHYSTPLPASLDTTDHHFGSMSVGNSVNNIPAAMTHLGIRSSSGLQSSRSNPSIQATLNKTVLSSSLNNHPQTSVPNASALHPSLRLFSLSNPSLSTTNLSGPSRRRQPPVSPLTLSPGPEAHQGFSRQLSSTSPLAPYPTSQMVSSDRSQLSFLPTEAQAQVSPPPPYPAPQELTQPLLQQPRAPEAPAQQPQAASSLPQSDFQLLPAQGSSLTNFFPDVGFDQQSMRPGPAFPQQVPLVQQGSRELQDSFHLRPSPYSNCGSLPNTILPDSSTSLFKDLNSALAGLPEVSLNVDTPFPLEEELQIEPLSLDGLNMLSDSSMGLLDPSVEETFRADRL

SEQ ID NO: 33796 - DNA, 1857 bp, Artificial Sequence
  derived and/or modified sequence
atggcagcgtcaccggggtccggatctgctaaccctaggaagttttctgagaagatcgccctgcacacgcaacggcaagcagaggagactagagcctttgaacagctcatgactgacctgacattgagtagggttcagttccagaaactccagcagctcaggctcacccagtatcacgggggctccctccccaacgttagccaattaagaagctcagccagcgaatttcagccctcctttcaccaagctgataacgttagaggaactcgccaccatggacttgtggagcggccctcgagaaacaggttccatccactgcatagacgctctggggacaaaccagggagacaatttgatgggtctgcctttggcgccaattattcttctcagccacttgacgagtcttggccgaggcagcagccaccatggaaggacgaaaagcacccggggttccggttaactagcgccctgaatagaaccaatagcgatagcgcactccacacgtcggcattgtcaacgaaacctcaggatccatacggaggtggtggacagtccgcctggcccgccccttacatgggcttctgtgacggggaaaataatggtcatggcgaggtggcctcttttccgggtcccctgaaggaggagaatctgctcaatgtacccaaacctctccccaagcagctgtgggagacgaaggaaatccagtccctctccgggaggccacggtcgtgtgacgtgggtggaggcaatgcgtttccccataatgggcagaacctgggactttcccccttcctcggaacgttaaacacgggggggagtctgcctgatcttacaaacctgcactatagcaccccgctccctgcttctctggacaccaccgaccaccatttcggcagcatgagcgtggggaatagcgtgaacaatatccctgccgctatgacccacctcggcattcggagcagcagcggtttacaatcttctcgctcaaacccgtctattcaggcaactctaaacaagaccgtactctcttccagcctgaataatcacccgcagaccagcgttccaaatgccagcgcacttcatccttccctccggctgttttcgctcagtaacccaagcctcagtacgactaacctgtccggccctagtcgcaggcgccagcctcctgtgtcgcccttgacccttagccccggcccggaagcacaccagggttttagccggcagttgagcagcacgtctccgctggccccatatccaacgagtcaaatggtgtcctctgatagatcccagttaagcttcctccccactgaagcccaggcgcaggtgtcccctccgcctccctatcctgcaccacaggagcttacccagcctctcctgcagcagccgagagctcccgaggcccctgctcagcagccacaggcagcgagctctttgccacagagtgactttcagttgctgccagcacaaggctcgtctctgacaaatttttttccggacgttgggtttgatcaacagagcatgcgtcccggccctgcctttccccaacaggtgccgctggtccaacaaggttctagggagctgcaagattcctttcacttaagacctagcccctacagtaactgtggctctctccctaataccatcctcccagattcctcaacaagcctgtttaaagacttgaattcggccctcgctggcttgccggaggtgtcactgaacgtcgatacacccttccccttggaagaggaactgcagattgagcctctgagccttgacggtttgaatatgctgtcggactctagcatgggactgctcgaccctagcgtggaggaaacattccgcgccgatagattgtag

SEQ ID NO: 33797 - DNA, 1749 bp, Artificial Sequence
  derived and/or modified sequence
atgacggacctgactctgagtcgcgtacagttccagaaattgcagcagctgcggctcactcagtatcatggcggaagcctgcccaatgtgagccaactgagatcaagcgcttccgagtttcaaccttcctttcatcaggccgataacgtgagaggcacgcgccaccacgggctggtggaacgtccgtcccggaatagatttcaccccctccatagaagatctggagataaaccaggtagacagtttgacggttcagctttcggcgccaactacagctctcagccgttggacgagtcttggccccggcagcagcctccctggaaggacgaaaaacatcctggctttcgcctgacaagcgccttaaatagaactaacagcgacagcgcactccacacttctgctctgagcaccaaaccacaggacccatacggtggaggaggacagtcagcttggccagccccctatatgggattttgcgatggcgagaataacggccacggggaagtcgcaagcttcccaggcccactgaaagaggagaatctgctcaatgtgcccaagcccctgccaaagcaattatgggagacaaaagagatccaaagcctgtctggtcgtccacgcagctgcgatgtgggaggtggtaacgccttcccccataatggacagaacctaggactgtccccttttctggggacgctgaataccggtggatcactgccagatcttacaaatctgcactacagcacacctctacctgcgtccctggacacgacggaccaccactttggctctatgtcagtgggaaattcagtgaacaacatccccgccgcaatgacacacctgggcatcagaagttcaagtggcctgcaaagctcacggagcaaccctagcatacaggcaaccctgaataaaacagtgctcagtagttctctaaataaccaccctcagacatcagtgccaaatgccagcgcactgcacccatcattgcgcttattttccctgtccaatcctagcttgtcaactacaaatctcagcgggccatccagacgtagacagccccctgtgtcccccctcaccctgtcccccggacccgaggctcaccagggattcagtaggcagttgtctagcacttcacccctagccccatacccgacaagtcagatggtatcatccgacaggtctcagctgtcattcttgcctactgaagcccaagcgcaagtctctcctcctcccccatatccagccccgcaggagctaacgcagcctctgcttcagcagccacgggccccagaagcaccagctcagcagccccaggcagcctccagcctcccacaaagcgactttcaattgctgccggcgcagggaagcagtctgacaaacttcttcccggacgtcggcttcgaccagcagtcgatgcggccgggaccagccttcccccaacaagtgcccctggtacaacagggtagcagggaactacaagactcttttcacctcaggccgtctccatattctaactgcggctccctgcctaatacaattctgccagacagttccactagtctgtttaaggatctcaacagcgccctcgctggactaccagaagtatcactcaacgtggatactccctttcccctcgaggaggaactgcagattgagcccttgagtcttgatggccttaatatgctgtctgactcaagcatggggctgctggatccatccgtggaggagaccttccgggctgatagactatag

SEQ ID NO: 33798 - DNA, 1857 bp, Artificial Sequence
  derived and/or modified sequence
atggccgccagccctggcagcggcagcgccaaccccaggaagttcagcgagaagatcgccctgcacacccagaggcaggccgaggagacccgggcctttgagcagctgatgacagacctgaccctgagccgggtgcagttccagaagctgcagcagctgcggctgacccagtaccatggaggcagcctgcccaacgtgtcccagctgcggagcagcgccagcgagttccagcccagcttccaccaggccgacaacgtgcggggcaccaggcaccacggcctggtggagcggcccagcaggaaccgcttccaccccctgcaccggcgcagcggggacaagccaggccggcagtttgatggcagcgcctttggagccaactacagcagccagcccctggatgagagctggccccggcagcagcccccctggaaggatgagaagcaccctggcttccggctgaccagcgccctgaacagaaccaacagcgacagcgccctgcacaccagcgccctgagcaccaagccccaggacccctatggaggcggcggccagagcgcctggccagccccctacatgggcttctgtgatggagagaacaacggccacggggaggtggccagcttccctggccccctgaaggaggagaacctgctgaatgtgcccaagcccctgcccaagcagctgtgggagaccaaggagatccagagcctgagcggccggcccaggagctgtgatgtgggcggcggcaatgccttcccccacaacggccagaacctgggcctgagccccttcctgggcaccctgaacacaggaggcagcctgcctgacctgaccaacctgcactacagcacccccctgcctgccagcctggacaccacagaccaccacttcggctccatgtctgtgggcaacagcgtgaacaacatcccagctgccatgacccacctgggcatccgcagcagcagcggcctgcagagcagccgcagcaaccccagcatccaggccaccctgaacaagacagtgctgagcagcagcctgaacaaccacccccagacctctgtgcccaatgccagcgccctgcaccccagcctgcggctcttcagcctgagcaaccccagcctgagcaccaccaacctgagcggccccagcagaagacggcagccccctgtgagccccctgaccctgagccctggccctgaggcccaccagggcttcagccggcagctgagcagcaccagccccctggccccctaccccaccagccagatggtgtccagtgacaggagccagctgtccttcctgcccacagaggcccaggcccaggtgagccccccaccaccctacccagccccccaggagctgacccagcccctgctgcagcagccccgggcccctgaggccccagcccagcagccccaggccgccagcagcctgccccagagcgacttccagctgctgcctgcccagggcagcagcctgaccaacttcttcccagatgtgggctttgaccagcagagcatgaggcctggccctgccttcccccagcaggtgcccctggtgcagcagggcagccgggagctgcaggacagcttccacctgcggcccagcccctacagcaactgtggcagcctgcccaacaccatcctgcctgacagcagcaccagcctcttcaaggacctgaacagcgccctggccggcctgcctgaggtgtccctgaatgtggacacccccttccccctggaggaggagctgcagatcgagcccctgagcctggatggcctgaacatgctgagtgacagctccatgggcctgctggaccccagcgtggaggagaccttccgggctgaccggctgtag

SEQ ID NO: 33799 - DNA, 1749 bp, Artificial Sequence
  derived and/or modified sequence
atgacagacctgaccctgagccgggtgcagttccagaagctgcagcagctgcggctgacccagtaccatggaggcagcctgcccaacgtgtcccagctgcggagcagcgccagcgagttccagcccagcttccaccaggccgacaacgtgcggggcaccaggcaccacggcctggtggagcggcccagcaggaaccgcttccaccccctgcaccggcgcagcggggacaagccaggccggcagtttgatggcagcgcctttggagccaactacagcagccagcccctggatgagagctggccccggcagcagcccccctggaaggatgagaagcaccctggcttccggctgaccagcgccctgaacagaaccaacagcgacagcgccctgcacaccagcgccctgagcaccaagccccaggacccctatggaggcggcggccagagcgcctggccagccccctacatgggcttctgtgatggagagaacaacggccacggggaggtggccagcttccctggccccctgaaggaggagaacctgctgaatgtgcccaagcccctgcccaagcagctgtgggagaccaaggagatccagagcctgagcggccggcccaggagctgtgatgtgggcggcggcaatgccttcccccacaacggccagaacctgggcctgagccccttcctgggcaccctgaacacaggaggcagcctgcctgacctgaccaacctgcactacagcacccccctgcctgccagcctggacaccacagaccaccacttcggctccatgtctgtgggcaacagcgtgaacaacatcccagctgccatgacccacctgggcatccgcagcagcagcggcctgcagagcagccgcagcaaccccagcatccaggccaccctgaacaagacagtgctgagcagcagcctgaacaaccacccccagacctctgtgcccaatgccagcgccctgcaccccagcctgcggctcttcagcctgagcaaccccagcctgagcaccaccaacctgagcggccccagcagaagacggcagccccctgtgagccccctgaccctgagccctggccctgaggcccaccagggcttcagccggcagctgagcagcaccagccccctggccccctaccccaccagccagatggtgtccagtgacaggagccagctgtccttcctgcccacagaggcccaggcccaggtgagccccccaccaccctacccagccccccaggagctgacccagcccctgctgcagcagccccgggcccctgaggccccagcccagcagccccaggccgccagcagcctgccccagagcgacttccagctgctgcctgcccagggcagcagcctgaccaacttcttcccagatgtgggctttgaccagcagagcatgaggcctggccctgccttcccccagcaggtgcccctggtgcagcagggcagccgggagctgcaggacagcttccacctgcggcccagcccctacagcaactgtggcagcctgcccaacaccatcctgcctgacagcagcaccagcctcttcaaggacctgaacagcgccctggccggcctgcctgaggtgtccctgaatgtggacacccccttccccctggaggaggagctgcagatcgagcccctgagcctggatggcctgaacatgctgagtgacagctccatgggcctgctggaccccagcgtggaggagaccttccgggctgaccggctgtag

SEQ ID NO: 33800 - DNA, 1857 bp, Artificial Sequence
  derived and/or modified sequence
atggccgccagccccggcagcggcagcgccaacccccggaagttcagtgagaaaatcgcgctgcacacccagcgccaagcagaagagacaagggcttttgagcagctgatgacagacttaactctgtcacgcgtgcagtttcaaaagctgcagcagctgaggctaacccagtaccacgggggctctctccccaacgtatcccagctgagatcatctgcctctgagttccaaccatctttccatcaggctgataatgtgagaggtactcgtcatcatgggttggtggagcgcccttccagaaatcgattccaccctctgcacaggagatcaggtgacaaacctggtaggcagttcgatggatctgccttcggtgctaattacagctcacagccattagatgagagctggcctcgtcagcaaccaccctggaaagacgaaaagcaccccggcttccggctgaccagtgccttgaatcgcacaaacagtgacagcgctttgcacacctcagccctgagtactaagcctcaggatccttatgggggcggcgggcagtcagcctggccagctccatacatgggattctgcgacggagaaaacaatgggcacggggaagttgcttcctttcccgggcctctcaaagaggagaacttgctcaacgtaccaaagccactgcccaaacagctgtgggagacgaaggaaattcagagcttaagcggacggccgagatcctgcgatgtggggggcgggaacgccttcccccacaatggccaaaatttaggactgtcgccctttctaggaacacttaatacgggaggttccttgcccgatctaactaacctccattacagcaccccactgcccgcaagccttgatacaactgatcatcattttgggtcaatgtcagtgggaaacagtgtgaacaacatccctgcggcaatgacacacctaggaattcgaagttcctctggtctccaatcctcgaggtctaacccctccattcaagctacgcttaataagacagtgctgagttccagtttaaacaaccacccacagacctcagtacccaacgctagcgcactgcaccccagcctcaggctgttttctctcagcaacccaagcctgtctacaaccaacctatcaggtcctagtcgcaggaggcaaccaccggtctctcctttaaccctgtcaccagggcctgaagcgcaccaaggttttagccgacagctatcctccacaagccccttggccccttacccaacctcccagatggtgagtagtgaccgcagccagctgtccttcctgccgacagaagctcaagcccaggtgtcacctccgcctccgtaccccgctccccaagagctgactcagcctctcctccagcagcctagggcgccagaggcaccggcacagcagcctcaagccgcttcttccttgcctcagtctgactttcagctacttccagcacaggggtctagcctgacgaacttttttcctgacgttggctttgatcagcagagcatgcgcccagggcccgcattccctcagcaggttccactggtgcagcagggctctagagaacttcaggacagctttcacctgaggccatccccctactctaactgcggcagcttgcctaacactatcttgcctgattcctccacctcactgttcaaggacctcaatagtgccctcgccggcctgcccgaggtaagcctgaatgtggataccccattccctctggaggaagaacttcaaattgagcccctgagtctcgatggcctaaacatgctgagtgattcaagcatggggctgttggatcctagcgtcgaagaaaccttcagggccgacaggctttag

SEQ ID NO: 33801 - DNA, 1749 bp, Artificial Sequence
  derived and/or modified sequence
atgaccgacctgaccctgagccgggtgcagttccagaagctgcagcaattgagactcactcagtaccacggtggttcattacctaatgttagccagctgcgaagttcagcctccgaatttcaaccttccttccaccaggccgacaacgtgcggggaactagacatcatggcttggtggaaaggccttcccggaatagatttcacccgctgcaccgcaggagtggggataaacccgggcgccaatttgacggctcagccttcggagcgaattacagcagtcagcctctggacgaaagttggccacgtcagcaacccccatggaaggacgaaaagcatccgggatttaggctgacaagcgcactgaacaggactaatagtgacagcgctctgcatacctcagccctgagtactaaaccacaggacccttacggaggaggcggccagagcgcctggcccgccccatacatgggtttttgcgacggagagaacaacggccacggagaagtcgcatccttcccaggaccactgaaagaggaaaatctcctcaatgtgcccaagccactccccaagcagctgtgggagaccaaagagatccagtctctttccggcaggcctcgctcttgcgatgtgggcggggggaatgcctttcctcataacgggcagaacctgggcctgtctccatttctggggaccttgaacactggcggatctttacccgacttaacgaatctgcactattccacccctctgcccgcttccctggataccacggatcatcatttcggatctatgtccgttgggaattcagtgaataatatcccagccgccatgacccaccttggaatcaggagcagctccggtttgcagagctcacgatccaacccatctatccaagctaccctaaacaaaaccgtcctgagtagctctttaaacaatcatcctcagacttcggtgcctaatgcaagtgccctgcatccctccttgaggcttttctctctctctaaccctagcctttcaaccactaacctgtccggcccatccagacgtcgacagccacctgtctcgcccttaaccctctctcccggtccagaagctcaccaaggtttctctcgacagctgagcagtacttctccactggcaccataccctacaagtcagatggtgagtagcgatcgttcacagctgtccttcttgcctactgaggcccaagctcaggtgagcccccctcctccataccccgcgcctcaggagctgacacagccgctacttcaacaacccagagcacccgaagcacccgcccagcagccgcaggcagcttcttccttaccacaatccgacttccagctcctgcctgcccagggaagtagcctgaccaattttttcccggacgtcggctttgaccagcaaagcatgcgaccaggccctgcgtttccgcaacaggtgccccttgttcagcaagggtcccgcgaattgcaagactctttccatcttaggccctctccttactcgaattgcgggagcctgcctaacacaattctacccgattcctccacatcacttttcaaagacctgaacagtgcgcttgccgggcttccggaggttagcctgaatgtggatacccctttcccactggaagaggagctgcagatcgaaccactgagcctggacgggctgaacatgctgtcggatagcagtatgggcttactggaccccagtgtggaggagacattcagagccgatcggctctag

SEQ ID NO: 33802 - DNA, 1857 bp, Artificial Sequence
  derived and/or modified sequence
atggccgctagcccaggtagcgggtccgctaaccctcgtaagttttccgagaaaattgccctgcacacacagaggcaggccgaggagacaagagcattcgagcagctgatgaccgatttgactttgtcgagggtgcagttccagaaactacaacagctgcgtttgacccagtatcacggagggtccctgcccaatgtgtcccagcttaggtcatctgcatctgaattccaaccctctttccaccaggccgataacgtaagaggcactcggcaccacggtctggtggaaaggccgagtcggaaccggtttcaccctctgcaccgaaggagtggagataaaccgggtcgccagtttgatggatctgcgttcggcgcaaactactcttctcagcctctggacgaatcctggccccgacagcagccaccatggaaggacgaaaagcatcccggatttcgacttacttccgccctgaacaggaccaactctgacagtgcgctacacacatctgccctctccacaaagccccaggacccatacggagggggagggcagtcagcctggccggctccttacatggggttctgtgatggggaaaataatggtcacggagaggtagcatcttttcccggacccctcaaggaggaaaatttactgaatgtccctaagcccttgcctaaacaactgtgggaaacaaaagaaattcagtctctctccggcagacctaggagctgtgacgtggggggaggtaacgcctttcctcacaacggtcagaacctgggcctctccccctttctcgggacacttaataccggtgggtctctgccagatctgactaacttgcactactccactcctctccctgctagtctggatacaaccgatcaccacttcgggagcatgagcgttggcaattcggttaacaatattcccgcagcgatgacccatctcggcattcggagtagctcaggactccaatctagcaggtccaaccctagcatacaggctacactcaacaaaactgtgctgtcctcatcactcaacaaccatccgcaaacgtccgtgccaaatgccagcgcactgcatcccagcctcagactgttttccttatctaatccgtctctatcaaccacaaacctgagcggccctagtaggcgccgacaacctccagtgtcccctctcactttgagcccaggaccagaagcccatcaaggattctctcggcaactcagctccacctctcccctggcaccataccctacatcacagatggtgtcttcagaccgatcacagttatcttttttaccgacagaggcccaggcccaggtgtcccctccccctccctatcccgcacctcaagagctgacccagccgcttctgcagcagccaagggctccagaagcacccgcacaacaacctcaggcggcaagtagccttccgcagagtgatttccaactgctccctgcccaagggtcatcgctgacaaatttttttcctgacgttggcttcgatcagcagtctatgcgccctggtccagctttcccacagcaggtgcccctggtgcagcaagggagcagggaattgcaagatagcttccacctgcgccctagcccttacagtaactgcggatcattgccaaatactattctaccagacagctcaaccagtttgttcaaggaccttaactccgcgctggccggtcttccggaggtctcgctgaacgttgacacacctttccccctcgaggaggagctccagatcgagcctctctccctggacggactgaatatgcttagtgattcatctatgggccttctggatccttccgtggaagagacatttagagccgatcggctgtag

SEQ ID NO: 33803 - DNA, 1749 bp, Artificial Sequence
  derived and/or modified sequence
atgaccgacctaactttatcgcgggtgcagtttcagaagcttcagcagctaagactgacccagtaccatgggggatctctccccaacgtgtcccaactgaggagcagcgcttccgagtttcagccatccttccatcaggcagataacgttcggggaacaaggcatcatggtctggtggaacgaccttcccgtaatcggtttcatcctctgcacagaaggagtggcgacaaaccgggtcgtcaattcgacggcagtgctttcggtgctaactactcttcccagccgctggatgaatcgtggccccgacagcaacccccttggaaagacgagaaacatcctggctttaggctgacgtccgctttgaaccggactaattctgatagtgccctgcacacgtctgccctttctacaaaaccccaggatccgtatgggggaggcggtcagagtgcgtggcccgctccctatatgggattttgtgacggggagaacaatggtcacggcgaggtggcctcctttccaggtcccctgaaagaggagaatctgcttaacgtgccaaagccactccccaaacagttgtgggaaaccaaggagattcagagtctgtcaggcagaccaagatcctgtgacgtcggtggcggtaatgcctttcctcacaacggtcagaatctgggcctgtcaccatttctgggcactctgaataccgggggatctctacccgatttgacaaatctacactactcaacaccgctacctgcctcactggatacaaccgatcaccatttcgggtctatgtctgtcgggaattctgtgaacaacatccccgcagccatgactcacttaggcattaggtcctcatcaggccttcagagcagtaggagcaacccttcgatacaggccacactgaacaaaacggtgttatcttctagtctgaacaatcatcctcagacaagtgtgcccaacgcgtctgccctgcatccctcattgagactgttttctctgtccaatccttccctcagcacaaccaacctgagcggacccagccgtagacggcagccgcctgtgagtcctttgaccttaagtcccggaccagaagcgcatcagggcttctcccggcagctgtcttccactagccctctcgccccttacccaactagccagatggtgtcatcagataggagtcaactgtccttcctgccaaccgaggcccaggcccaggtcagtccaccccctccttatcccgctccccaagagctgactcagcccttgctgcagcagcccagagctcccgaagccccagcacaacagcctcaggccgcatcctccctgccccagtccgacttccaactcttgcctgcccagggatccagtctcacgaattttttccccgatgtcggatttgaccaacagtccatgcgcccaggccctgcctttccacaacaggttccccttgtgcagcagggcagcagggaactgcaggattcatttcatcttaggccctccccttactccaactgtgggtcactgccaaataccatcctcccggatagctcaaccagcttatttaaggacctgaattctgcgctggctggactgcctgaggtatcactcaacgtcgacaccccattccccctggaggaggagctgcagattgagcctctgtctcttgacggtttaaacatgctgagtgattccagtatggggctgttggatccctctgtggaggaaaccttccgggcagacaggttatag

SEQ ID NO: 33804 - DNA, 5209 bp, Artificial Sequence
  derived and/or modified sequence
ctccggggccgcggcggctcctctgccgggtcgcgccggacgactggcttcgggcggcggccccggcggcctgtggacggacgggtgggccgaggtacaggccccacggccgccgtctcccgcttctgcccgcgcagagtccgcgccatggccgcctcgccgggctcgggcagcgccaacccgcggaagttcagtgagaagatcgcgctgcacacgcagagacaggccgaggagacgcgggccttcgagcagctcatgaccgacctcaccctgtcgcgggttcaatttcagaagcttcagcaactgcgccttacacagtaccatggaggatccttaccaaatgtgagccagctgcggagcagtgcgtcagagtttcagccgtcatttcaccaagctgataatgttcggggaacccgccatcacgggctggtggagaggccatccaggaaccgcttccaccccctccaccgaaggtctggggacaagccagggcgacaatttgatggtagtgcttttggagccaattattcctcacagcctctggatgagagttggccaaggcagcagcctccttggaaagacgaaaagcatcctgggttcaggctgacatctgcacttaacaggaccaattctgattctgctcttcacacgagtgctctgagtaccaagccccaggacccctatggaggagggggccagtcggcctggcctgccccatacatgggtttctgtgatggtgagaataatggacatggggaagtagcatctttccctggcccattgaaagaagagaatctgttaaatgttccgaagccactgccaaaacaactgtgggagaccaaggagattcagtccctgtcaggacgccctcgatcctgtgatgttggaggtggcaatgcttttccacataatggtcaaaacctaggcctctcacccttcttggggaccttgaacactggagggtcattgccagatctaaccaacctccactactcgacacccctgccagcctccctggacaccaccgaccaccactttggcagtatgagtgtggggaatagtgtgaacaacatcccagctgctatgacccacctgggtataagaagctcctctggtctccagagttctcggagtaacccctccatccaagccacgctcaataagactgtgctttcctcttccttaaataaccacccacagacatctgttcccaacgcatctgctcttcacccttcgctccgtctgttttcccttagcaacccatctctttccaccacaaacctgagcggcccgtctcggcgtcggcagcctcccgtcagccctctcacgctttctcctggccctgaagcacatcaaggtttcagcagacagctgtcttcaaccagcccactggccccatatcctacctcccagatggtgtcctcagaccgaagccaactttcctttctgcccacagaagctcaagcccaggtgtcgccgccacccccttaccctgcaccccaggagctcacccagcccctcctgcagcagccccgcgcccctgaggcccctgcccagcagccccaggcagcctcctcactgccacagtcagactttcagcttctcccggcccagggctcatctttgaccaacttcttcccagatgtgggttttgaccagcagtccatgaggccaggccctgcctttcctcaacaggtgcctctggtgcaacaaggttcccgagaactgcaggactcttttcatttgagaccaagcccgtattccaactgcgggagtctcccgaacaccatcctgccagactccagcaccagcctgttcaaagacctcaacagtgcgctggcaggcctgcctgaggtcagcctgaacgtggacactccatttccactggaagaggagctgcagattgaacccctgagcctggacggactcaacatgttaagtgactccagcatgggcctgctggacccctctgttgaagagacgtttcgagctgacagactgtgaacagaaggcagtggaacagaagaatgtttttctgcaacagccaaaatagaatggaatagaatgaagccagctgataccacgggctttcgttatcttgacatagaaggaagcaatgccacggctccagggtttcagatgagatcccatctcagacactgtggcttcctccagatcacacagctttgtactgcctctcccgcctgtggccaaagtcgtgttgcagcaggcaggctgcttggagcttcccatgaactggaaagctcacctccactgcatctttttactggccatccagtcagccgatgtgtaagagtaggaaatactgtgtcactggaggcctccgtagcattgtgtagtgtgctcagaaccactgatctccgtccgcaccgaaggcgggcccggagtgggaggctcggcctggggcggcggcaccggagagggcacctcgatgcctgctctgacctgacccagagggcgaggccctccagcgggggacattcccaggctgagtggaccccacggctctctcccacgcctggattacgacatgaagtttttaccacaagcccgagggcaggcttgagttaggcagactgaaggctaattttcattttctcccagctggtttctgctgcttcagaaaagtacaccttttccttatggaccagaggaagaggaagaccattttatcagtcactgaaaagagtcccctggcactgatgagcctgaagagaactgtgctcctcctcgggggctggggaaggaagacagggactgcaggtgtctcatactcagtggcctccagacaaactccagacaagcacagacctccccactaagagcagccagagggagctggtgaggccctaaccccacccaccgagcaactgagcttccccatccctccccagagctgtgtctctgtgggctgggagtctaatgtcacccccctagaccgtaagctccttgagggcagggacagtgccttatcattgttgaacccgtagcacctaacacgtgcgtggcagcacagtcgtgtgctggagtgagtgctgcagaaccgtgcgtgcagcgcatgatgaatgagtgcgtccgccatgccgtaaggcaggctcacctgtagctatccccttccctgccagatcttctcagagctttagcttttctagcactcgtgcctatggtgaagcatgcactttaatatgcttttaacactaggtgaccaaatcacagtgaagccgggcactgcattctccttgggctgtgctccacgcgggtgggtgggagctgtcttctgagtacatccggaagggctgagcaggtgagtgccctgagcatcctggctgggccccacccaggaagatcttccttctcagatccacgtttggctctaaattgcttcaagtagagattcattctttgaggttgaaaaaatagtttatagtaaaacgaaggcctaattcatggaagcatcattagtcatcaataccttctcataaaatagatgggccagatttccaccaccgcctgcctcctctaacttgggtgatgccagtaggtttgaagggggcagagcactgcagggggaggggggggtctaggctgtgagaggacagggtggagaggaggagaaccctgaaggagagacggaagatgccaggacctttgcttggacagccattgcccttccaggagaccctggagtgtactgagggttgctggactgttccacccagaggagcaaggctgtacaatgagggtctgaatctggcacacctgtcccttatgtaaaaggagtcgtggtcacaagaccctgggctggttagcctctcccgacctcattccatttctatcttctgaccttgcctctcatctttaaaataaccctcatggggtgcccctccaccttcctctggaatccaagtattcctgtttcacatttgccccaaatctttgctgtggaattgggaaatcaaaccagagtcctcctcgcctgatttccagctcaggaagggcctgctggcctgccctgttcccagttacactttcagatccctttgtgctcaagatctcagagggggtggctttttgttaaagagccttcagtcgcaatgctacccagcaccccatgtgccaaaagaaaccagctcctgtgtcaaagggcttccaaacctgatctcactctcaacaggcgatggtgctgatgtttcaagaattgtgtttttataaaacagaggtctcagcatagtcactcttcacatagtgccttacccatgggtatcgtcatatccgggtcccagttcagtttgtctgcacagcagccaccctgcctggcaacagagaccccaagacctacacagtgaaccctactgccccaaaggcgttctccaggtgacttgtgaaaacagacctccggggaagtgatttattgggggtgtacactgggggcaatatggtttagcactgaattcaatttgtccttaggtctatgagtgagtccgatcttttcttgtgaaaggttttgggcatcgtacaacccactctgcctagaaggtgtggaggactcaccacgggcagggtcgccctggcccacagcacgtgagcctgcactcactgcggcctttgtaacaaaaccagttgtggtcctcagcatttgaagcagctgcatacttcagagtaaactatttttcattatttagttttgtcacaagaaatcgaccattgtactactctcacttacagcagttaaacagcatagaactaaaaacctgtctgcatttccattttttctttctgtatggttgtgggttttaggacatagggggttaggagaaggggtttcttgatcatgtcatgaattctcctttgtcctgtttctcctgtttcatttctcctccgcctgctgtatattacctgagctggtgttgtatcttcaagtccatatgcgtatttgcagacctttcctgttcccactcttgttggctcttctgatttatgcacagatggttcccagcatgtgtccagtgcttcatggatgggaccatcccagcaactaatcagacttcctgccagtgtcctaacccccagggcaccctgttcaaccatatttaaaaattggaatttgtataaagttgcttccaagttttataatgcatcattttacatcttttgtaattaaaagcatcacaatgaggttgtctctgca

SEQ ID NO: 33805 - DNA, 5195 bp, Artificial Sequence
  derived and/or modified sequence
ctccggggccgcggcggctcctctgccgggtcgcgccggacgactggcttcgggcggcggccccggcggcctgtggacggacgggtgggccgaggtacaggccccacggccgccgtctcccgcttctgcccgcgcagagtccgcgccatggccgcctcgccgggctcgggcagcgccaacccgcggaagttcagtgagaagatcgcgctgcacacgcagagacaggccgaggagacgcgggccttcgagcagctcatgaccgacctcaccctgtcgcgggttcaatttcagaagcttcagcaactgcgccttacacagtaccatggaggatccttaccaaatgtgagccagctgcggagcagtgcgtcagagtttcagccgtcatttcaccaagctgataatgttcggggaacccgccatcacgggctggtggagaggccatccaggaaccgcttccaccccctccaccgaaggtctggggacaagccagggcgacaatttgatggtagtgcttttggagccaattattcctcacagcctctggatgagagttggccaaggcagcagcctccttggaaagacgaaaagcatcctgggttcaggctgacatctgcacttaacaggaccaattctgattctgctcttcacacgagtgctctgagtaccaagccccaggacccctatggaggagggggccagtcggcctggcctgccccatacatgggtttctgtgatggtgagaataatggacatggggaagtagcatctttccctggcccattgaaagaagagaatctgttaaatgttccgaagccactgccaaaacaactgtgggagaccaaggagattcagtccctgtcaggacgccctcgatcctgtgatgttggaggtggcaatgcttttccacataatggtcaaaacctaggcctctcacccttcttggggaccttgaacactggagggtcattgccagatctaaccaacctccactactcgacacccctgccagcctccctggacaccaccgaccaccactttggcagtatgagtgtggggaatagtgtgaacaacatcccagctgctatgacccacctgggtataagaagctcctctggtctccagagttctcggagtaacccctccatccaagccacgctcaataagactgtgctttcctcttccttaaataaccacccacagacatctgttcccaacgcatctgctcttcacccttcgctccgtctgttttcccttagcaacccatctctttccaccacaaacctgagcggcccgtctcggcgtcggcagcctcccgtcagccctctcacgctttctcctggccctgaagcacatcaaggtttcagcagacagctgtcttcaaccagcccactggccccatatcctacctcccagatggtgtcctcagaccgaagccaactttcctttctgcccacagaagctcaagcccaggtgtcgccgccacccccttaccctgcaccccaggagctcacccagcccctcctgcagcagccccgcgcccctgaggcccctgcccagcagccccaggcagcctcctcactgccacagtcagactttcagcttctcccggcccagggctcatctttgaccaacttcttcccagatgtgggttttgaccagcagtccatgaggccaggccctgcctttcctcaacaggtgcctctggtgcaacaaggttcccgagaactgcaggactcttttcatttgagaccaagcccgtattccaactgcgggagtctcccgaacaccatcctgccagactccagcaccagcctgttcaaagacctcaacagtgcgctggcaggcctgcctgaggtcagcctgaacgtggacactccatttccactggaagaggagctgcagattgaacccctgagcctggacggactcaacatgttaagtgactccagcatgggcctgctggacccctctgttgaagagacgtttcgagctgacagactgtgaacagaaggcagtggaacagaagaatgtttttctgcaacagccaaaatagaatggaatagaatgaagccagctgataccacgggctttcgttatcttgacatagaaggaagcaatgccacggctccagggtttcagatgagatcccatctcagacactgtggcttcctccagatcacacagctttgtactgcctctcccgcctgtggccaaagtcgtgttgcagcaggcaggctgcttggagcttcccatgaactggaaagctcacctccactgcatctttttactggccatccagtcagccgatgtgtaagagtaggaaatactgtgtcactggaggcctccgtagcattgtgtagtgtgctcagaaccactgatctccgtccgcaccgaaggcgggcccggagtgggaggctcggcctggggcggcggcaccggagagggcacctcgatgcctgctctgacctgacccagagggcgaggccctccagcgggggacattcccaggctgagtggaccccacggctctctcccacgcctggattacgacatgaagtttttaccacaagcccgagggcaggcttgagttaggcagactgaaggctaattttcattttctcccagctggtttctgctgcttcagaaaagtacaccttttccttatggaccagaggaagaggaagaccattttatcagtcactgaaaagagtcccctggcactgatgagcctgaagagaactgtgctcctcctcgggggctggggaaggaagacagggactgcaggtgtctcatactcagtggcctccagacaaactccagacaagcacagacctccccactaagagcagccagagggagctggtgaggccctaaccccacccaccgagcaactgagcttccccatccctccccagagctgtgtctctgtgggctgggagtctaatgtcacccccctagaccgtaagctccttgagggcagggacagtgccttatcattgttgaacccgtagcacctaacacgtgcgtggcagcacagtcgtgtgctggagtgagtgctgcagaaccgtgcgtgcagcgcatgatgaatgagtgcgtccgccatgccgtaaggcaggctcacctgtagctatccccttccctgccagatcttctcagagctttagcttttctagcactcgtgcctatggtgaagcatgcactttaatatgcttttaacactaggtgaccaaatcacagtgaagccgggcactgcattctccttgggctgtgctccacgcgggtgggtgggagctgtcttctgagtacatccggaagggctgagcaggtgagtgccctgagcatcctggctgggccccacccaggaagatcttccttctcagatccacgtttggctctaaattgcttcaagtagagattcattctttgaggttgaaaaaatagtttatagtaaaacgaaggcctaattcatggaagcatcattagtcatcaataccttctcataaaatagatgggccagatttccaccaccgcctgcctcctctaacttgggtgatgccagtaggtttgaagggggcagagcactgcagggggaggggggggtctaggctgtgagaggacagggtggagaggaggagaaccctgaaggagagacggaagatgccaggacctttgcttggacagccattgcccttccaggagaccctggagtgtactgagggttgctggactgttccacccagaggagcaaggctgtacaatgagggtctgaatctggcacacctgtcccttatgtaaaaggagtcgtggtcacaagaccctgggctggttagcctctcccgacctcattccatttctatcttctgaccttgcctctcatctttaaaataaccctcatggggtgcccctccaccttcctctggaatccaagtattcctgtttcacatttgccccaaatctttgctgtggaattgggaaatcaaaccagagtcctcctcgcctgatttccagctcaggaagggcctgctggcctgccctgttcccagttacactttcagatccctttgtgctcaagatctcagagggggtggctttttgttaaagagccttcagtcgcaatgctacccagcaccccatgtgccaaaagaaaccagctcctgtgtcaaagggcttccaaacctgatctcactctcaacaggcgatggtgctgatgtttcaagaattgtgtttttataaaacagaggtctcagcatagtcactcttcacatagtgccttacccatgggtatcgtcatatccgggtcccagttcagtttgtctgcacagcagccaccctgcctggcaacagagaccccaagacctacacagtgaaccctactgccccaaaggcgttctccaggtgacttgtgaaaacagacctccggggaagtgatttattgggggtgtacactgggggcaatatggtttagcactgaattcaatttgtccttaggtctatgagtgagtccgatcttttcttgtgaaaggttttgggcatcgtacaacccactctgcctagaaggtgtggaggactcaccacgggcagggtcgccctggcccacagcacgtgagcctgcactcactgcggcctttgtaacaaaaccagttgtggtcctcagcatttgaagcagctgcatacttcagagtaaactatttttcattatttagttttgtcacaagaaatcgaccattgtactactctcacttacagcagttaaacagcatagaactaaaaacctgtctgcatttccattttttctttctgtatggttgtgggttttaggacatagggggttaggagaaggggtttcttgatcatgtcatgaattctcctttgtcctgtttctcctgtttcatttctcctccgcctgctgtatattacctgagctggtgttgtatcttcaagtccatatgcgtatttgcagacctttcctgttcccactcttgttggctcttctgatttatgcacagatggttcccagcatgtgtccagtgcttcatggatgggaccatcccagcaactaatcagacttcctgccagtgtcctaacccccagggcaccctgttcaaccatatttaaaaattggaatttgtataaagttgcttccaagttttataatgcatcattttacatcttttgtaattaaaagcatcacaatg

SEQ ID NO: 33806 - DNA, 1857 bp, Artificial Sequence
  derived and/or modified sequence
atggccgccagccccggcagcggcagcgccaaccccagaaagttcagcgagaagatcgccctgcacacccagagacaggccgaggagaccagagccttcgagcagctgatgaccgacctgaccctgagcagagtgcagttccagaagctgcagcagctgagactgacccagtaccacggcggcagcctgcccaacgtgagccagctgagaagcagcgccagcgagttccagcccagcttccaccaggccgacaacgtgagaggcaccagacaccacggcctggtggagagacccagcagaaacagattccaccccctgcacagaagaagcggcgacaagcccggcagacagttcgacggcagcgccttcggcgccaactacagcagccagcccctggacgagagctggcccagacagcagcccccctggaaggacgagaagcaccccggcttcagactgaccagcgccctgaacagaaccaacagcgacagcgccctgcacaccagcgccctgagcaccaagccccaggacccctacggcggcggcggccagagcgcctggcccgccccctacatgggcttctgcgacggcgagaacaacggccacggcgaggtggccagcttccccggccccctgaaggaggagaacctgctgaacgtgcccaagcccctgcccaagcagctgtgggagaccaaggagatccagagcctgagcggcagacccagaagctgcgacgtgggcggcggcaacgccttcccccacaacggccagaacctgggcctgagccccttcctgggcaccctgaacaccggcggcagcctgcccgacctgaccaacctgcactacagcacccccctgcccgccagcctggacaccaccgaccaccacttcggcagcatgagcgtgggcaacagcgtgaacaacatccccgccgccatgacccacctgggcatcagaagcagcagcggcctgcagagcagcagaagcaaccccagcatccaggccaccctgaacaagaccgtgctgagcagcagcctgaacaaccacccccagaccagcgtgcccaacgccagcgccctgcaccccagcctgagactgttcagcctgagcaaccccagcctgagcaccaccaacctgagcggccccagcagaagaagacagccccccgtgagccccctgaccctgagccccggccccgaggcccaccagggcttcagcagacagctgagcagcaccagccccctggccccctaccccaccagccagatggtgagcagcgacagaagccagctgagcttcctgcccaccgaggcccaggcccaggtgagccccccccccccctaccccgccccccaggagctgacccagcccctgctgcagcagcccagagcccccgaggcccccgcccagcagccccaggccgccagcagcctgccccagagcgacttccagctgctgcccgcccagggcagcagcctgaccaacttcttccccgacgtgggcttcgaccagcagagcatgagacccggccccgccttcccccagcaggtgcccctggtgcagcagggcagcagagagctgcaggacagcttccacctgagacccagcccctacagcaactgcggcagcctgcccaacaccatcctgcccgacagcagcaccagcctgttcaaggacctgaacagcgccctggccggcctgcccgaggtgagcctgaacgtggacacccccttccccctggaggaggagctgcagatcgagcccctgagcctggacggcctgaacatgctgagcgacagcagcatgggcctgctggaccccagcgtggaggagaccttcagagccgacagactgtag

SEQ ID NO: 33807 - DNA, 1749 bp, Artificial Sequence
  derived and/or modified sequence
atgaccgacctgaccctgagcagagtgcagttccagaagctgcagcagctgagactgacccagtaccacggcggcagcctgcccaacgtgagccagctgagaagcagcgccagcgagttccagcccagcttccaccaggccgacaacgtgagaggcaccagacaccacggcctggtggagagacccagcagaaacagattccaccccctgcacagaagaagcggcgacaagcccggcagacagttcgacggcagcgccttcggcgccaactacagcagccagcccctggacgagagctggcccagacagcagcccccctggaaggacgagaagcaccccggcttcagactgaccagcgccctgaacagaaccaacagcgacagcgccctgcacaccagcgccctgagcaccaagccccaggacccctacggcggcggcggccagagcgcctggcccgccccctacatgggcttctgcgacggcgagaacaacggccacggcgaggtggccagcttccccggccccctgaaggaggagaacctgctgaacgtgcccaagcccctgcccaagcagctgtgggagaccaaggagatccagagcctgagcggcagacccagaagctgcgacgtgggcggcggcaacgccttcccccacaacggccagaacctgggcctgagccccttcctgggcaccctgaacaccggcggcagcctgcccgacctgaccaacctgcactacagcacccccctgcccgccagcctggacaccaccgaccaccacttcggcagcatgagcgtgggcaacagcgtgaacaacatccccgccgccatgacccacctgggcatcagaagcagcagcggcctgcagagcagcagaagcaaccccagcatccaggccaccctgaacaagaccgtgctgagcagcagcctgaacaaccacccccagaccagcgtgcccaacgccagcgccctgcaccccagcctgagactgttcagcctgagcaaccccagcctgagcaccaccaacctgagcggccccagcagaagaagacagccccccgtgagccccctgaccctgagccccggccccgaggcccaccagggcttcagcagacagctgagcagcaccagccccctggccccctaccccaccagccagatggtgagcagcgacagaagccagctgagcttcctgcccaccgaggcccaggcccaggtgagccccccccccccctaccccgccccccaggagctgacccagcccctgctgcagcagcccagagcccccgaggcccccgcccagcagccccaggccgccagcagcctgccccagagcgacttccagctgctgcccgcccagggcagcagcctgaccaacttcttccccgacgtgggcttcgaccagcagagcatgagacccggccccgccttcccccagcaggtgcccctggtgcagcagggcagcagagagctgcaggacagcttccacctgagacccagcccctacagcaactgcggcagcctgcccaacaccatcctgcccgacagcagcaccagcctgttcaaggacctgaacagcgccctggccggcctgcccgaggtgagcctgaacgtggacacccccttccccctggaggaggagctgcagatcgagcccctgagcctggacggcctgaacatgctgagcgacagcagcatgggcctgctggaccccagcgtggaggagaccttcagagccgacagactgtag

SEQ ID NO: 33808 - protein, 717 aa, Artificial Sequence
  derived and/or modified sequence
MFRITNIEFLPEYRQKESREFLSVSRTVQQVINLVYTTSAFSKFYEQSVVADVSNNKGGLLVHFWIVFVMPRAKGHIFCEDCVAAILKDSIQTSIINRTSVGSLQGLAVDMDSVVLNDKGCSQYFYAEHLSLHYPLEISAASGRLMCHFKLVAIVGYLIRLSIKSIQIEADNCVTDSLTIYDSLLPIRSSILYRICEPTRTLMSFVSTNNLMLVTFKSPHIRRLSGIRAYFEVIPEQKCENTVLVKDITGFEGKISSPYYPSYYPPKCKCTWKFQTSLSTLGIALKFYNYSITKKSMKGCEHGWWEINEHMYCGSYMDHQTIFRVPSPLVHIQLQCSSRLSDKPLLAEYGSYNISQPCPVGSFRCSSGLCVPQAQRCDGVNDCFDESDELFCVSPQPACNTSSFRQHGPLICDGFRDCENGRDEQNCTQSIPCNNRTFKCGNDICFRKQNAKCDGTVDCPDGSDEEGCTCSRSSSALHRIIGGTDTLEGGWPWQVSLHFVGSAYCGASVISREWLLSAAHCFHGNRLSDPTPWTAHLGMYVQGNAKFVSPVRRIVVHEYYNSQTFDYDIALLQLSIAWPETLKQLIQPICIPPTGQRVRSGEKCWVTGWGRRHEADNKGSLVLQQAEVELIDQTLCVSTYGIITSRMLCAGIMSGKRDACKGDSGGPLSCRRKSDGKWILTGIVSWGHGSGRPNFPGVYTRVSNFVPWIHKYVPSLL

SEQ ID NO: 33809 - DNA, 2154 bp, Artificial Sequence
  derived and/or modified sequence
atgttcagaatcaccaacatcgagttcctgcccgagtacagacagaaggagagcagagagttcctgagcgtgagcagaaccgtgcagcaggtgatcaacctggtgtacaccaccagcgccttcagcaagttctacgagcagagcgtggtggccgacgtgagcaacaacaagggcggcctgctggtgcacttctggatcgtgttcgtgatgcccagagccaagggccacatcttctgcgaggactgcgtggccgccatcctgaaggacagcatccagaccagcatcatcaacagaaccagcgtgggcagcctgcagggcctggccgtggacatggacagcgtggtgctgaacgacaagggctgcagccagtacttctacgccgagcacctgagcctgcactaccccctggagatcagcgccgccagcggcagactgatgtgccacttcaagctggtggccatcgtgggctacctgatcagactgagcatcaagagcatccagatcgaggccgacaactgcgtgaccgacagcctgaccatctacgacagcctgctgcccatcagaagcagcatcctgtacagaatctgcgagcccaccagaaccctgatgagcttcgtgagcaccaacaacctgatgctggtgaccttcaagagcccccacatcagaagactgagcggcatcagagcctacttcgaggtgatccccgagcagaagtgcgagaacaccgtgctggtgaaggacatcaccggcttcgagggcaagatcagcagcccctactaccccagctactacccccccaagtgcaagtgcacctggaagttccagaccagcctgagcaccctgggcatcgccctgaagttctacaactacagcatcaccaagaagagcatgaagggctgcgagcacggctggtgggagatcaacgagcacatgtactgcggcagctacatggaccaccagaccatcttcagagtgcccagccccctggtgcacatccagctgcagtgcagcagcagactgagcgacaagcccctgctggccgagtacggcagctacaacatcagccagccctgccccgtgggcagcttcagatgcagcagcggcctgtgcgtgccccaggcccagagatgcgacggcgtgaacgactgcttcgacgagagcgacgagctgttctgcgtgagcccccagcccgcctgcaacaccagcagcttcagacagcacggccccctgatctgcgacggcttcagagactgcgagaacggcagagacgagcagaactgcacccagagcatcccctgcaacaacagaaccttcaagtgcggcaacgacatctgcttcagaaagcagaacgccaagtgcgacggcaccgtggactgccccgacggcagcgacgaggagggctgcacctgcagcagaagcagcagcgccctgcacagaatcatcggcggcaccgacaccctggagggcggctggccctggcaggtgagcctgcacttcgtgggcagcgcctactgcggcgccagcgtgatcagcagagagtggctgctgagcgccgcccactgcttccacggcaacagactgagcgaccccaccccctggaccgcccacctgggcatgtacgtgcagggcaacgccaagttcgtgagccccgtgagaagaatcgtggtgcacgagtactacaacagccagaccttcgactacgacatcgccctgctgcagctgagcatcgcctggcccgagaccctgaagcagctgatccagcccatctgcatcccccccaccggccagagagtgagaagcggcgagaagtgctgggtgaccggctggggcagaagacacgaggccgacaacaagggcagcctggtgctgcagcaggccgaggtggagctgatcgaccagaccctgtgcgtgagcacctacggcatcatcaccagcagaatgctgtgcgccggcatcatgagcggcaagagagacgcctgcaagggcgacagcggcggccccctgagctgcagaagaaagagcgacggcaagtggatcctgaccggcatcgtgagctggggccacggcagcggcagacccaacttccccggcgtgtacaccagagtgagcaacttcgtgccctggatccacaagtacgtgcccagcctgctgtag

SEQ ID NO: 33810 - DNA, 2154 bp, Artificial Sequence
  derived and/or modified sequence
atgttccggattaccaacatcgaatttctgccagaataccggcagaaagaatctcgcgaattcctctctgttagccggaccgtgcagcaggttataaatctcgtgtatacaaccagcgctttcagcaaattctacgagcagagcgtggtggccgatgtgagtaacaacaaaggcggactgctagtgcacttctggatagtcttcgtgatgccaagggcaaaaggacacattttttgtgaggactgtgtggctgcaatactcaaggattccatacagacatcgataatcaaccggacctctgtgggatcactccagggactggccgtggatatggatagtgtggtgctgaacgataaagggtgctctcaatacttttacgcagagcatctgagccttcactaccctctggagatttctgctgcctctgggagactgatgtgccactttaagctggtggcgatcgtgggctatctgattagactgtctatcaagtcaatacagattgaagcagacaactgtgtcactgactctctgacaatatacgattcgctcctacctattagatcaagcatcttgtaccggatttgtgagcctacccgcacgttgatgtctttcgtgagtactaataatctgatgctggtgacttttaagtccccccatattcgcagactgtccggcatcagagcttacttcgaggtgatcccggagcagaagtgtgaaaatacagtcctagtcaaggacatcactggattcgagggtaagatctcatcgccttactatccgtcctactatcccccaaaatgtaagtgcacctggaagttccaaacaagtttatctactctgggtattgcactgaagttctataattactccatcacgaagaaaagcatgaaagggtgtgagcacggctggtgggagatcaatgaacacatgtattgtggctcatacatggatcaccaaacaatctttcgcgttccttcccctctggtccacatccagctacagtgcagttcccggcttagcgacaagcccctcctcgcggaatacggctcctataacatcagtcagccctgtccagttggaagttttagatgcagctcaggtctgtgcgtcccccaagcccaacggtgtgatggtgtaaatgactgctttgatgagtcagatgagctcttctgtgtgagtccccagcctgcatgcaatacctccagcttccgtcaacacgggccccttatctgtgatgggtttcgtgattgcgaaaatggccgtgatgaacagaactgcacgcaaagtatcccttgcaacaacaggacatttaagtgtggcaacgacatttgtttcagaaaacagaatgcaaagtgcgacggaactgtggactgtccagacggcagcgacgaggaaggttgcacctgttctcgaagctctagtgccctgcaccggatcattggaggtaccgacacactggaaggcgggtggccatggcaagtttccctgcactttgtgggcagtgcctattgcggcgctagcgtcatttcacgtgaatggctgctgagcgccgcccactgcttccacggaaaccggcttagcgacccaaccccttggacagcccaccttggtatgtatgtgcaaggtaatgcaaagttcgtgtccccagtgagacgaatcgtcgtgcacgaatattacaactcacagacctttgactacgatattgcattactccaattgtcgatcgcttggcctgagacccttaagcagttaatccagccaatctgtatccccccgacaggacaacgcgtaaggagcggcgagaagtgctgggtgaccggctggggcaggagacacgaggctgataacaaagggtcgctagtgctgcaacaggcggaggtggagctgatagaccaaaccctgtgcgtgagcacatacggcatcattacctcccgaatgctttgcgcaggaattatgagcggaaagagagacgcatgcaaaggcgacagcggaggaccactctcttgcaggcggaaaagcgatgggaaatggatacttacaggaatcgtctcctggggccacggatccgggaggccaaacttccccggcgtttacacccgcgtcagtaacttcgtaccatggatacacaagtacgttccgtcactcttgtag

SEQ ID NO: 33811 - DNA, 2154 bp, Artificial Sequence
  derived and/or modified sequence
atgttccgcatcaccaacatcgagttcctgcctgagtaccggcagaaggagagccgggagttcctgtctgtgtccaggacagtgcagcaggtgatcaacctggtgtacaccaccagcgccttcagcaagttctatgagcagagcgtggtggctgatgtgagcaacaacaagggcggcctgctggtgcacttctggatcgtgtttgtgatgccccgggccaagggccacatcttctgtgaggactgtgtggccgccatcctgaaggacagcatccagaccagcatcatcaacagaacatctgtgggcagcctgcagggcctggccgtggacatggattctgtggtgctgaatgacaagggctgcagccagtacttctatgcagagcacctgagcctgcactaccccctggagatctctgctgccagcggccgcctgatgtgccacttcaagctggtggccatcgtgggctacctgatccggctgagcatcaagagcatccagatcgaggccgacaactgtgtgacagacagcctgaccatctatgacagcctgctgcccatccgcagcagcatcctgtaccgcatctgtgagcccaccaggaccctgatgagctttgtgtccaccaacaacctgatgctggtgaccttcaagagcccccacatccggcggctgagcggcatccgggcctactttgaagtcatccctgagcagaagtgtgagaacacagtgctggtgaaggacatcactggatttgagggcaagatcagcagcccctactaccccagctactacccacccaagtgcaagtgcacctggaagttccagaccagcctgagcaccctgggcatcgccctgaagttctacaactacagcatcaccaagaagtccatgaagggctgtgagcacggctggtgggagatcaatgagcacatgtactgcggcagctacatggaccaccagaccatcttccgggtgcccagccccctggtgcacatccagctgcagtgcagcagccggctgagtgacaagcccctgctggccgagtatggcagctacaacatcagccagccctgccctgtgggcagcttccgctgcagcagcggcctgtgtgtgccccaggcccagagatgtgatggagtgaatgactgctttgatgaaagtgatgagctgttctgtgtgagcccccagcctgcctgcaacaccagcagcttccggcagcacggccccctcatctgtgatggcttccgggactgtgaaaatggaagagatgagcagaactgcacccagagcatcccctgcaacaacagaaccttcaagtgtggaaatgacatctgcttcaggaagcagaatgccaagtgtgatggcaccgtggactgcccagatggcagtgatgaggagggctgcacctgcagccgcagcagcagcgccctgcaccgcatcattggaggaacagacaccctggagggcggctggccctggcaggtgtccctgcactttgtgggcagcgcctactgtggggccagcgtcatcagccgggagtggctgctgtctgctgcccactgcttccacggcaaccggctgagtgaccccaccccctggacagcccacctgggcatgtatgtgcagggcaatgccaagtttgtgtcccctgtgcggcgcatcgtggtgcatgagtactacaacagccagacctttgattatgacatcgccctgctgcagctgagcatcgcctggccagagaccctgaagcagctgatccagcccatctgcatcccccccaccggccagagggtgcgcagcggggagaagtgctgggtgacaggctggggcagaagacatgaagctgacaacaagggcagcctggtgctgcagcaggccgaggtggagctgattgaccagaccctgtgtgtgtccacctacggcatcatcaccagcaggatgctgtgtgccggcatcatgtctgggaagagagatgcctgcaagggggacagcggcggccccctgagctgcaggaggaagagtgatggcaagtggatcctgactggaattgtgtcctggggccacggcagcggccggcccaacttccctggggtgtacaccagggtgagcaactttgtgccctggatccacaagtatgtgcccagcctgctgtag

SEQ ID NO: 33812 - DNA, 2154 bp, Artificial Sequence
  derived and/or modified sequence
atgttccggatcaccaacatcgagttcctgcccgagtaccggcagaaggaatccagagaatttctgagcgttagccgcactgtacagcaggtaatcaacctggtatatactacctctgccttcagcaagttttacgaacaatccgttgttgctgatgtcagcaataataagggcggccttttggttcatttctggattgtgttcgtaatgccacgagcaaagggccatatattctgtgaggactgtgtagccgcgatccttaaggactcaatccagacatctattatcaacaggacgagtgtaggttcgctacagggactggccgtagatatggattccgtggtcctgaacgacaagggatgttcccagtatttttacgccgaacacctgagccttcactaccccttagagatcagtgctgctagtggtaggctgatgtgccactttaaacttgtagcgatagtgggatacctcattagacttagtataaagtccattcagatcgaagcagataactgcgtgaccgatagcctcacaatctacgactccctgttacctatccgtagcagtatcctttaccgaatttgcgaacccactagaacccttatgtcctttgtgtcgactaataatctgatgcttgtcaccttcaagtccccgcatataaggaggttaagcggcattcgggcttacttcgaagtcattcctgagcagaaatgcgaaaatacagtcttggtgaaagatatcacaggctttgaggggaaaattagcagcccctattaccccagttactatccgccaaagtgcaaatgtacatggaagttccagacctcactgtccactttggggatcgccctcaaattttataactactccatcactaaaaagtcgatgaagggatgcgaacatggatggtgggagataaatgaacacatgtattgcggtagttatatggatcaccagactatcttcagggtgccttcccccttagtacacatacagctccagtgttcaagtcgcttgtctgataaacctttgttggcagaatacggaagctataacatcagccagccctgccctgtgggatcattccggtgctcttctggcctgtgcgttcctcaggcccaacgctgtgatggggttaacgattgctttgatgagtccgacgagctgttctgcgtcagccctcagccagcgtgcaacactagcagctttcggcagcacggcccacttatttgtgatgggtttcgggactgtgagaacgggagggacgagcagaactgtacccagtccatcccatgcaacaataggacatttaagtgcgggaacgatatctgttttcgaaagcaaaatgccaagtgcgacggtactgtcgattgccctgacggcagcgatgaagagggctgtacatgcagcaggtcctccagcgccctgcaccggataataggaggcaccgatactctggagggaggatggccttggcaggttagccttcactttgtggggagcgcctactgcggggccagcgtcattagcagggagtggctgctatccgccgcccattgttttcacggcaaccgtctaagcgatcccaccccctggaccgcacacctcggtatgtacgtgcagggcaatgctaagttcgtgagcccagtccgcagaattgtggtgcacgagtactataatagccagacatttgactacgatatagcgctattgcaactgtcaatcgcatggcccgagaccttaaaacagctgatccaacctatctgcattcctcctaccgggcagcgagttcgatcaggggaaaagtgttgggttacaggctggggtagaaggcacgaagcagataataaaggttctctggtgcttcaacaagctgaggttgaattgatcgaccaaacactgtgtgtctctacctatgggattattacatctagaatgctgtgtgcgggcattatgtcaggcaaaagggacgcctgcaaaggcgacagtggtgggccattaagttgccgcaggaaatccgacggaaaatggatactcactggaatcgtctcctgggggcacggcagtgggcgccccaattttccaggggtgtacactcgcgtctctaacttcgtaccatggattcacaaatacgttcccagcctattgtag

SEQ ID NO: 33813 - DNA, 2154 bp, Artificial Sequence
  derived and/or modified sequence
atgtttcgtattaccaatatcgaattcctccccgagtacagacaaaaggaaagcagggagtttttaagtgtcagtcggactgtacagcaggttattaacctcgtttacacaacgtccgcgttttcaaagttttatgagcaaagcgtcgtggctgatgtttccaacaataaaggaggtctgctggtccatttttggattgtgttcgttatgccaagggccaaagggcacattttctgtgaagactgcgtggccgctatccttaaggactccatccaaacctctatcatcaacagaacgagcgtagggtcgttacagggactggcagttgacatggactccgtggtgcttaacgacaaggggtgctcgcaatatttttatgcggagcatctctctctccactaccccctggaaatcagtgcagcttcagggaggctaatgtgccattttaagctggtggcgatagtcggctacctgatccgtttatcaattaagtcaatccaaatagaggccgacaactgcgtgactgactccctcacaatctacgactctctcttaccaatccgatcgagtatcctctaccggatttgcgagccgaccagaaccctgatgagcttcgtctcaaccaacaacctgatgttggtaaccttcaagagcccgcatatccggagactgagcggaattcgggcttatttcgaggttattcccgagcagaagtgcgagaacaccgtgctggtaaaggatatcaccggtttcgagggaaaaatctcatccccttactatcctagctactaccctcccaagtgtaagtgtacatggaaattccagacgtcattaagcacattgggcatcgccctgaaattttataattattctattacgaagaagagtatgaaagggtgtgaacatggctggtgggaaataaatgaacatatgtattgcgggagttacatggaccatcagacaatcttcagagtgccctccccactggttcatatacagttacagtgttccagccggctttccgataaaccgctgctggccgaatacgggagctataacataagtcagccgtgtccagtcggatccttcaggtgttccagtgggctttgcgtcccccaagcccagaggtgtgacggagtgaacgattgttttgacgagtcggacgagctgttctgcgtatcccctcaacccgcatgcaacacctctagcttcagacagcatggccctctgatatgtgatggttttcgagactgcgaaaacggtcgcgacgaacagaattgcacccagagtatcccgtgtaacaatcggacctttaagtgtgggaacgacatttgcttccggaaacagaacgccaagtgcgacggcactgtcgactgccccgatggcagtgacgaggaaggctgcacttgctcgagatcctctagcgccctgcaccggatcatcggagggacggatactctggagggcggatggccctggcaggtctctctgcacttcgtgggatctgcatattgcggcgcttcagtgatatcaagggagtggctgttgagcgccgcacattgttttcacggcaacagactctctgatcctaccccttggactgcccatctcggaatgtacgtacagggcaacgccaagtttgtaagccccgtgagacggatcgtggtgcatgagtattataactcgcagacattcgactacgatatcgcgcttttacagctgagcatcgcttggccagaaacacttaagcaattaattcagcccatatgtattccacctactggccaaagggtgcgctcgggcgagaagtgctgggtcaccggatggggccgtcggcacgaggcggacaacaaagggtcgttggtgttgcagcaagccgaggtagagctcatagaccagacgttgtgcgtcagcacatatgggatcatcacatcccgcatgctctgcgcgggaattatgtcaggcaaacgtgatgcctgcaagggggatagtgggggacccctctcatgtcgccgaaagagtgacggaaaatggattctcactggaatcgtgtcctggggccacggatcagggcgtcccaactttcccggagtgtacactagggtgagcaattttgttccttggatccataagtatgtacccagtttgctttag

SEQ ID NO: 33814 - protein, 1410 aa, Artificial Sequence
  derived and/or modified sequence
MDIYDTQTLGVVVFGGFMVVSAIGIFLVSTFSMKETSYEEALANQRKEMAKTHHQKVEKKKKEKTVEKKGKTKKKEEKPNGKIPDHDPAPNVTVLLREPVRAPAVAVAPTPVQPPIIVAPVATVPAMPQEKLASSPKDKKKKEKKVAKVEPAVSSVVNSIQVLTSKAAILETAPKEVPMVVVPPVGAKGNTPATGTTQGKKAEGTQNQSKKAEGAPNQGRKAEGTPNQGKKTEGTPNQGKKAEGTPNQGKKAEGTPNQGKKAEGAQNQGKKVDTTPNQGKKVEGAPTQGRKAEGAQNQAKKVEGAQNQGKKAEGAQNQGKKGEGAQNQGKKAEGAQNQGKKAEGAQNQGKKAEGAQNQGKKAEGAQNQGKKAEGAQNQGKKSEGAQNQGKKVEGAQNQGKKAEGAQNQGKKAEGAQNQGKKAEGAQNQGKKAEGAQNQGKKAEGAQNQGKKAEGAQNQGKKAEGAQNQGKKVEGAQNQGKKAEGAQNQGKKAEGAQNQGKKAEGAQNQGQKGEGAQNQGKKTEGAQGKKAERSPNQGKKGEGAPIQGKKADSVANQGTKVEGITNQGKKAEGSPSEGKKAEGSPNQGKKADAAANQGKKTESASVQGRNTDVAQSPEAPKQEAPAKKKSGSKKKGEPGPPDADGPLYLPYKTLVSTVGSMVFNEGEAQRLIEILSEKAGIIQDTWHKATQKGDPVAILKRQLEEKEKLLATEQEDAAVAKSKLRELNKEMAAEKAKAAAGEAKVKKQLVAREQEITAVQARMQASYREHVKEVQQLQGKIRTLQEQLENGPNTQLARLQQENSILRDALNQATSQVESKQNAELAKLRQELSKVSKELVEKSEAVRQDEQQRKALEAKAAAFEKQVLQLQASHRESEEALQKRLDEVSRELCHTQSSHASLRADAEKAQEQQQQMAELHSKLQSSEAEVRSKCEELSGLHGQLQEARAENSQLTERIRSIEALLEAGQARDAQDVQASQAEADQQQTRLKELESQVSGLEKEAIELREAVEQQKVKNNDLREKNWKAMEALATAEQACKEKLLSLTQAKEESEKQLCLIEAQTMEALLALLPELSVLAQQNYTEWLQDLKEKGPTLLKHPPAPAEPSSDLASKLREAEETQSTLQAECDQYRSILAETEGMLRDLQKSVEEEEQVWRAKVGAAEEELQKSRVTVKHLEEIVEKLKGELESSDQVREHTSHLEAELEKHMAAASAECQNYAKEVAGLRQLLLESQSQLDAAKSEAQKQSDELALVRQQLSEMKSHVEDGDIAGAPASSPEAPPAEQDPVQLKTQLEWTEAILEDEQTQRQKLTAEFEEAQTSACRLQEELEKLRTAGPLESSETEEASQLKERLEKEKKLTSDLGRAATRLQELLKTTQEQLAREKDTVKKLQEQLEKAEDGSSSKEGTSV

SEQ ID NO: 33815 - protein, 977 aa, Artificial Sequence
  derived and/or modified sequence
MDIYDTQTLGVVVFGGFMVVSAIGIFLVSTFSMKETSYEEALANQRKEMAKTHHQKVEKKKKEKTVEKKGKTKKKEEKPNGKIPDHDPAPNVTVLLREPVRAPAVAVAPTPVQPPIIVAPVATVPAMPQEKLASSPKDKKKKEKKVAKVEPAVSSVVNSIQVLTSKAAILETAPKEGRNTDVAQSPEAPKQEAPAKKKSGSKKKGPPDADGPLYLPYKTLVSTVGSMVFNEGEAQRLIEILSEKAGIIQDTWHKATQKGDPVAILKRQLEEKEKLLATEQEDAAVAKSKLRELNKEMAAEKAKAAAGEAKVKKQLVAREQEITAVQARMQASYREHVKEVQQLQGKIRTLQEQLENGPNTQLARLQQENSILRDALNQATSQVESKQNAELAKLRQELSKVSKELVEKSEAVRQDEQQRKALEAKAAAFEKQVLQLQASHRESEEALQKRLDEVSRELCHTQSSHASLRADAEKAQEQQQQMAELHSKLQSSEAEVRSKCEELSGLHGQLQEARAENSQLTERIRSIEALLEAGQARDAQDVQASQAEADQQQTRLKELESQVSGLEKEAIELREAVEQQKVKNNDLREKNWKAMEALATAEQACKEKLLSLTQAKEESEKQLCLIEAQTMEALLALLPELSVLAQQNYTEWLQDLKEKGPTLLKHPPAPAEPSSDLASKLREAEETQSTLQAECDQYRSILAETEGMLRDLQKSVEEEEQVWRAKVGAAEEELQKSRVTVKHLEEIVEKLKGELESSDQVREHTSHLEAELEKHMAAASAECQNYAKEVAGLRQLLLESQSQLDAAKSEAQKQSDELALVRQQLSEMKSHVEDGDIAGAPASSPEAPPAEQDPVQLKTQLEWTEAILEDEQTQRQKLTAEFEEAQTSACRLQEELEKLRTAGPLESSETEEASQLKERLEKEKKLTSDLGRAATRLQELLKTTQEQLAREKDTVKKLQEQLEKAEDGSSSKEGTSV

SEQ ID NO: 33816 - protein, 300 aa, Artificial Sequence
  derived and/or modified sequence
MDIYDTQTLGVVVFGGFMVVSAIGIFLVSTFSMKETSYEEALANQRKEMAKTHHQKVEKKKKEKTVEKKGKTKKKEEKPNGKIPDHDPAPNVTVLLREPVRAPAVAVAPTPVQPPIIVAPVATVPAMPQEKLASSPKDKKKKEKKVAKVEPAVSSVVNSIQVLTSKAAILETAPKEVPMVVVPPVGAKGNTPATGTTQGKKAEGTQNQSKKAEGAPNQGRKAEGTPNQGKKTEGTPNQGKKAEGTPNQGKKAEGTPNQGKKAEGAQNQGKKVDTTPNQGKKVEGAPTQGRKAEGAQNQAK

SEQ ID NO: 33817 - protein, 751 aa, Artificial Sequence
  derived and/or modified sequence
MVFNEGEAQRLIEILSEKAGIIQDTWHKATQKGDPVAILKRQLEEKEKLLATEQEDAAVAKSKLRELNKEMAAEKAKAAAGEAKVKKQLVAREQEITAVQARMQASYREHVKEVQQLQGKIRTLQEQLENGPNTQLARLQQENSILRDALNQATSQVESKQNAELAKLRQELSKVSKELVEKSEAVRQDEQQRKALEAKAAAFEKQVLQLQASHRESEEALQKRLDEVSRELCHTQSSHASLRADAEKAQEQQQQMAELHSKLQSSEAEVRSKCEELSGLHGQLQEARAENSQLTERIRSIEALLEAGQARDAQDVQASQAEADQQQTRLKELESQVSGLEKEAIELREAVEQQKVKNNDLREKNWKAMEALATAEQACKEKLLSLTQAKEESEKQLCLIEAQTMEALLALLPELSVLAQQNYTEWLQDLKEKGPTLLKHPPAPAEPSSDLASKLREAEETQSTLQAECDQYRSILAETEGMLRDLQKSVEEEEQVWRAKVGAAEEELQKSRVTVKHLEEIVEKLKGELESSDQVREHTSHLEAELEKHMAAASAECQNYAKEVAGLRQLLLESQSQLDAAKSEAQKQSDELALVRQQLSEMKSHVEDGDIAGAPASSPEAPPAEQDPVQLKTQLEWTEAILEDEQTQRQKLTAEFEEAQTSACRLQEELEKLRTAGPLESSETEEASQLKERLEKEKKLTSDLGRAATRLQELLKTTQEQLAREKDTVKKLQEQLEKAEDGSSSKEGTSV

SEQ ID NO: 33818 - DNA, 4233 bp, Artificial Sequence
  derived and/or modified sequence
atggacatttacgacacccaaactcttggtgttgtggtgttcggaggattcatggtggtgagcgccattggaatatttctggtgagcacattctcaatgaaagagacctcttatgaggaggcactagccaaccagcgcaaggagatggctaagactcatcaccagaaggtcgaaaagaagaagaaggagaaaaccgtggagaagaagggaaagaccaaaaagaaggaggagaagcccaacggtaaaattcctgatcatgaccccgcacctaacgttaccgttctgttgagggagccagttagggcacctgctgtcgccgtagcacccaccccagtccagcctccaattattgtggctccggtggccacagtcccagcaatgccacaggaaaaactcgcttcaagccctaaggataaaaaaaagaaggagaagaaggtagcaaaagttgaaccagcagtcagttccgtggtgaattcaatccaggtacttactagtaaagccgccatccttgagaccgctccaaaagaagtgcccatggtcgtcgtccccccagtgggcgcaaaggggaacactcccgctactgggaccacgcaggggaagaaggcggaagggactcagaatcagtccaaaaaagccgaaggagctcctaatcaaggcaggaaagcagaggggacaccaaaccagggaaaaaagactgaaggaactccaaatcagggcaagaaggcagaggggacaccaaatcaaggtaaaaaggctgagggcactcccaatcagggaaagaaggctgagggagcccagaatcaaggcaagaaggttgatactacccccaatcagggaaagaaggtggagggcgcccccacacaggggcgcaaggccgagggcgcacagaatcaggctaagaaggtggaaggggcacaaaaccagggcaagaaggcggagggtgcgcaaaatcaaggcaagaaaggggaaggagcccagaatcagggcaagaaagcagaaggggcccagaatcaagggaagaaggccgagggtgctcagaatcagggcaagaaggctgaaggggctcaaaatcagggcaaaaaagccgagggtgcccagaatcagggaaagaaagctgagggagcacagaatcaggggaaaaaaagcgagggagctcaaaatcaggggaaaaaggttgaaggcgcgcagaatcaggggaagaaggccgagggggcccagaaccaggggaagaaagccgagggcgcgcagaaccagggaaaaaaggccgaaggcgcacagaaccagggcaaaaaggccgaaggtgcacaaaatcaaggaaagaaggccgaaggggctcagaatcaggggaaaaaagccgagggagcacagaaccaaggaaaaaaagccgagggcgctcagaatcagggtaagaaagtggagggcgctcagaaccaggggaagaaggccgagggagctcagaatcaggggaagaaggccgagggcgcacaaaaccagggaaaaaaagcagagggtgcgcaaaatcagggacagaaaggtgaaggggctcaaaaccagggcaagaaaaccgagggggctcagggtaagaaggcagagcgttcgcccaatcagggaaagaagggggaaggggccccaatccaggggaaaaaagccgactcagtggccaatcagggcactaaagtggaaggcatcacgaaccagggaaagaaggctgagggctctcccagcgaaggcaagaaagcagagggctcacctaatcaaggcaaaaaggccgatgccgccgcaaaccaaggcaaaaagacagagagcgcaagcgttcaaggtcggaacactgacgtcgcacagtcgcccgaggcccccaaacaggaggcacccgctaagaaaaaatcaggatcaaaaaaaaaaggggagcccggccccccagatgctgatggccccctgtatctcccgtacaaaactcttgtgagcactgtgggcagcatggtatttaatgagggtgaagctcaaagactgatagaaattttgtccgaaaaggccggcatcatccaagatacctggcataaggctacacaaaagggagatcctgtggctatcttgaagcgccagctcgaagaaaaagaaaaactgctggccacagaacaggaggacgccgcagtcgccaaaagcaagctccgagaactcaacaaggaaatggcggcggaaaaggccaaagcagccgcaggagaagccaaggtgaaaaagcagctggttgccagagaacaggagatcactgccgtgcaggctcgtatgcaggcatcttatcgggagcacgtcaaagaggtgcagcagctgcagggcaagattagaaccctgcaggaacaattagaaaatggtcccaatacccagctggcccgcctccagcaggagaactccatcctccgcgatgccctcaatcaggccacaagccaggtggagagtaagcagaatgctgagctggcaaaattacgccaggaactgagtaaggtgagcaaggagctggtggagaaatctgaagccgtgaggcaggacgaacagcaaaggaaggccctggaggctaaggcagcagctttcgagaagcaggtcctgcagctacaggcgtctcacagggaaagcgaggaagccttacagaagagactggatgaggtgtcccgagaactgtgtcacacgcaaagcagccatgcttcattgcgggcagacgcagaaaaagcccaggaacagcagcaacagatggccgaactgcacagcaaacttcagagctccgaagcggaagtacggagtaaatgtgaagagctgtccggtcttcacggtcagctccaggaggcacgggctgagaattcacagcttaccgagagaatccggtcaattgaggccttactggaggctggccaggccagagacgcccaggatgtgcaggccagtcaggccgaagccgaccagcaacaaactcggctcaaagagctggaatctcaggtgagtgggctcgaaaaagaagccattgaacttcgtgaagccgtcgagcagcagaaggttaagaacaatgatctgcgcgaaaagaactggaaggccatggaggccctggccaccgcggagcaagcctgcaaggaaaaactgctgtccctgacccaagcaaaagaggaaagtgagaaacagctgtgcctgatcgaagcgcagactatggaggctctgcttgctttgttgccagagctgagtgtgctggctcagcagaattacacggagtggcttcaggatctcaaggaaaaaggtccgactcttctgaagcatccccctgcccctgcagagccttccagcgaccttgcctccaagttgcgagaagccgaggagactcaatcaactctccaggcggagtgcgaccagtacagaagcattctagccgagacggagggtatgctcagagacctgcagaagtcagtcgaggaggaagagcaggtgtggcgggctaaagtgggtgcagcagaagaagagctgcagaaatctcgggtgaccgttaagcatctcgaggagatcgtcgagaaattaaagggggagcttgagagcagcgaccaagtccgagagcatactagccacctcgaagcagagctggagaagcacatggccgccgcctccgccgagtgccagaactatgccaaagaagtggccggcctaagacaacttctcctagagagtcagtcacagctggatgccgcgaagagtgaggctcaaaaacaatccgacgagctggcactcgtcagacagcagctgtcagaaatgaaaagccatgtcgaagacggggatatcgcaggagcgccggccagcagtccggaggctcctccagcagagcaggaccccgtgcagctcaagacccagctggagtggaccgaggcgatcctcgaggatgagcagacacaacggcagaagttgactgctgaatttgaagaagcacagacgagcgcctgcagattgcaggaagagctcgaaaaattaagaacggccggacccctcgaatcatcagagacggaggaagcatcccagttgaaggaacggctggagaaagaaaagaaacttactagtgacctcggccgagccgctactaggctacaggaacttctgaaaaccacacaagagcaattggccagagaaaaagacactgtgaagaagctccaggaacagttggagaaggccgaggatggaagttcttctaaggaggggactagcgtgtag

SEQ ID NO: 33819 - DNA, 2934 bp, Artificial Sequence
  derived and/or modified sequence
atggatatttacgacacacagaccctgggcgtcgtggtgttcggcggatttatggtcgtaagtgcaatcggcattttcctggtctccaccttcagtatgaaagaaacaagctatgaagaggcccttgcaaaccaaagaaaggagatggccaagacgcaccatcagaaagtggagaaaaagaagaaggagaagaccgtggaaaaaaaaggcaagactaagaagaaggaagagaaaccaaatggcaagataccggatcatgaccccgccccgaacgtcactgttctgctgcgcgagcccgtgagagcacctgcagtcgctgttgcccccactcctgtgcagccacctatcatcgtggcgcccgtggctaccgtccccgccatgccccaggagaagctggcgagtagccccaaggataagaagaagaaagagaaaaaagtcgccaaggtggaaccagcggtgtcatcggtggttaattccattcaggtgctcacgtccaaggccgcgattctggagacagcccccaaggagggtagaaataccgacgtggcccagtcccccgaagctcccaaacaggaagccccggctaagaagaaatcaggcagtaagaagaagggcccacctgacgccgacggccccctgtacctaccatataaaactctcgtgtcaacggtgggtagtatggtgtttaacgaaggcgaagcacagcgccttatcgagatcctgagtgagaaagccggtatcatccaggacacttggcataaggccacacagaaaggagatccagtcgccatccttaaacggcaacttgaggagaaagagaaacttctggctactgagcaggaggatgcagcagtggcaaaaagtaagctacgggagttgaataaggaaatggccgccgaaaaagcaaaggccgccgccggagaggccaaagtgaagaagcagctcgtggcgagggagcaggagattaccgctgtgcaagcacgcatgcaggcctcctatcgggagcatgttaaagaggtgcaacaattacagggaaagattcggacccttcaggaacagctagagaacggccccaatacccaactggcaaggcttcagcaggaaaatagcatcctccgtgacgccctgaaccaagccacaagccaggtcgagagtaaacaaaatgctgagttagccaaactacgccaggaactgtctaaagtctcaaaggaattggtcgagaagtcagaggcggtgcggcaggatgaacagcagcgaaaagcactcgaagctaaagcagcagcttttgagaagcaggttcttcagttgcaggcatcccaccgcgaaagtgaggaggctttgcaaaagaggctggatgaggtctcgcgtgaactctgccatacacagtcctcccacgcatctctcagagccgacgccgagaaagcccaggagcaacagcagcagatggcagagctgcatagtaaactgcagtcaagcgaggcggaggtccggtctaagtgtgaggagctgtccgggctacatggtcagttgcaggaagcccgcgccgaaaactctcagctgaccgagaggataagaagtatcgaagctctgctggaagcaggacaggcgcgggacgcacaggacgtgcaggcgtctcaagcggaggcggatcagcaacaaacccgcctgaaagaattagagtcccaagtgagcggactggaaaaggaggcgatcgaacttagggaggcagtagaacagcaaaaagtcaaaaacaatgacctaagggagaagaattggaaggcaatggaggcactcgccaccgccgaacaggcgtgtaaagaaaagctgctgtctctgacccaggcaaaagaagagagcgagaagcagctgtgcctaatcgaggcccaaacgatggaagctcttctcgcactcctgcctgagctgtctgtgcttgctcagcaaaactacacagaatggctccaggatctcaaagagaagggaccaaccctgcttaagcatcctcccgcacctgccgagccaagctctgatttagcctcaaagttgagagaagcggaagagacccaaagcactctgcaggccgagtgcgatcaatataggagtatcctagctgagaccgaggggatgctgagagatctccaaaagagcgtcgaagaggaggagcaggtctggcgggccaaggtaggtgcagccgaagaagagttgcagaaatcaagggttacggtaaagcacctcgaggagatcgtggaaaagctgaagggagaactggagtcctcggaccaggtcagggagcatacttctcatctggaggccgagctggagaagcatatggccgccgcttcagctgaatgccagaattatgccaaggaggtggcaggtctgaggcagctactgctcgaaagccagtcacaactggatgcagcgaaatccgaagcgcagaaacagagtgatgaattggcgctggtcaggcagcagctgtccgagatgaagagtcacgttgaggacggcgatatcgcaggcgcccctgcttcatctcccgaggctccacccgcagagcaggatcccgttcagttaaaaacccagttggaatggacagaggcgatcttggaggatgaacagacccaacgtcagaagctaaccgcagaattcgaagaagcccaaacaagtgcatgccggcttcaggaggagctggagaaattgaggaccgccggcccgttagagtctagcgaaactgaagaagccagtcagctgaaggaaagactcgagaaagagaaaaaattgacttccgacctcggccgcgcggcgactcgcctgcaggagctgctaaagacaacacaagagcagctcgctcgagagaaggacacagtgaaaaaactgcaggaacagttggagaaagccgaggacgggtcttcgagtaaggaggggaccagcgtttag

SEQ ID NO: 33820 - DNA, 2934 bp, Artificial Sequence
  derived and/or modified sequence
atggacatttacgatacccaaacactcggggtggtggtattcgggggcttcatggtagtgtccgccatcggtattttcctggtgtcaacgttctctatgaaggaaacttcatacgaagaagccctggccaatcagcggaaggagatggctaaaacccaccaccagaaggtcgagaagaaaaaaaaggaaaagaccgtcgaaaaaaagggtaagaccaaaaaaaaagaggagaagcctaacggcaagatacctgaccacgacccagcccccaacgtgaccgtgctactgcgggagccagtaagggcgccagctgttgccgtggcccctacgcccgtgcagccacctataatcgttgcccccgtggccacagtgcccgccatgccccaagagaagttggcctcctcccccaaggacaagaaaaaaaaagagaaaaaggtggcaaaggttgagcctgccgtgtcaagcgtggttaacagtattcaagtgctcaccagcaaggccgctatccttgagacagctcctaaggaaggaagaaacaccgacgtggcccagagtcctgaggctcccaagcaggaggcacccgctaagaagaagagcggctccaagaaaaaaggaccaccagacgcagatggacccctgtacttgccatacaaaaccctcgtgagcaccgtggggtccatggtgttcaatgagggtgaagctcagcgtctgatcgagatcctgtctgagaaggcgggtatcatccaggatacctggcacaaggccacgcagaagggcgatcccgtagcgatcttgaagaggcagctcgaggagaaagagaagttgctggcgacagaacaggaggatgcagccgttgctaagagtaagttgcgcgaactcaacaaggaaatggcagccgaaaaggctaaagctgccgcaggagaggcaaaggttaaaaaacagctggttgctagggaacaggaaatcaccgcggtgcaggccaggatgcaagcgagttatagagagcatgtgaaggaagtgcaacaacttcaagggaagatccgcactctgcaggaacagctggagaatggtcccaacacccagctggcaaggctccagcaggaaaattccattctacgggatgcgctcaatcaagccacatcccaggtggaatccaagcagaatgccgagctagccaaattaagacaggaactttcaaaggtgtctaaggagcttgtggaaaaatcagaagctgtcaggcaggatgaacaacagcgtaaggctcttgaggctaaggcggccgcgtttgagaagcaggtgctgcagctgcaagcttcacatagagaaagcgaggaggccttgcagaaaaggctggacgaggtctccagagagctgtgtcacactcagagctctcacgcatctctgcgtgcagacgccgagaaagcacaggagcagcagcagcagatggctgagctccatagcaaactacagtccagcgaggcagaagtgcggagtaaatgtgaagaattaagcggacttcatggacagctgcaggaagcgagggccgagaactcgcagcttacagagaggattaggagtatcgaggctcttctggaggctgggcaggcccgtgacgcacaagacgtccaggcctcccaggctgaggctgaccagcaacaaacacgtctaaaagagctggagtcacaagtgtcaggactagaaaaggaagccatcgaactgagagaggcagtcgagcagcagaaagtgaaaaataatgacctcagagagaagaattggaaggctatggaggcccttgccactgccgaacaagcctgtaaagaaaaactgctgtctctcacccaggccaaagaggaatctgagaaacagctgtgcctgatagaagcccagacaatggaggccctcctcgccctgttgcccgaattgtccgtgctggcccagcaaaactatacggaatggttacaggatctgaaagaaaaagggcccaccttgctcaagcatccacccgctccagctgagcctagtagcgatcttgcaagcaaactgcgcgaagccgaggaaacccagtcaactctgcaggccgaatgcgaccagtacaggtcgatcctggctgaaaccgagggcatgcttcgggaccttcagaagtccgtggaggaagaggaacaagtctggcgtgccaaggttggggccgccgaagaggagcttcagaagtccagggtcacggtgaagcatctggaggagatagtagagaaactgaaaggtgagttggagagtagcgaccaggtccgcgagcacacgtcacatctggaggccgagctggaaaaacatatggcagcagcctctgcggaatgtcagaactatgccaaggaagtcgccggcctccgccagttgctgctggagagtcagtcccaactggatgcagctaagtcagaggcacagaaacaatccgatgaactggccttggtaaggcagcagctgtctgagatgaaatcccatgtggaggatggagacatcgcaggggctccggcttcctcgccagaggctccaccagctgagcaggaccccgttcagctcaaaactcagcttgagtggacggaggccatactcgaagacgaacaaactcaaaggcagaagctaacagccgagttcgaggaggcccagacctccgcttgcagactccaggaggagctggaaaaactaagaacagccgggccactggagtcatccgagaccgaagaggcttcacagctaaaggaaagactggagaaggaaaagaagctgacttcagacctgggcagggcggcaacccgcttacaggagctgttaaagacaacccaggaacagctggccagagagaaagacacagttaagaaactgcaagaacagctcgagaaggcagaggacggcagtagctccaaggaagggacgagtgtgtag

SEQ ID NO: 33821 - DNA, 4233 bp, Artificial Sequence
  derived and/or modified sequence
atggacatctacgatacccagacactcggagtggtcgtgtttgggggattcatggtggtctcagcaattgggatattcctcgtgagtacgttctctatgaaggagacgtcttacgaggaggctcttgcaaatcagcggaaggagatggctaagacccatcaccaaaaagttgagaaaaaaaaaaaggagaagactgttgaaaaaaaggggaagacaaagaaaaaggaggaaaagccgaacggaaaaatccccgaccacgacccagcccctaatgtgacagttctgctgagagagcccgtgcgggcacccgcagtggccgttgcgccgaccccggtacagcccccgatcatagtggcgcctgtagctactgtgccagccatgcctcaggagaagctggctagttcacccaaagacaaaaagaaaaaggagaaaaaagtcgcaaaagttgaacctgctgtctcgtctgtggtgaactcaatccaggtcctgacaagtaaagctgccattctggaaaccgcccctaaagaagtacctatggtggtggtgcctccagttggggccaagggaaacacacctgctaccggtacaactcaaggcaagaaagcagagggaacacagaaccagtcaaagaaggccgaaggcgcacctaaccaaggccgcaaagcagagggtactcccaaccaaggcaaaaagacggaaggcacacctaaccagggcaagaaagccgagggaacacctaatcagggaaagaaggccgaagggacccccaatcagggcaagaaggctgagggcgctcagaatcagggcaaaaaggtcgatacaacgccaaaccagggcaagaaagtcgagggcgcacctacccaagggcgaaaagcagaaggagctcagaatcaagccaagaaagttgaaggggcgcagaatcaaggcaagaaagctgaaggcgcacaaaatcagggcaaaaaaggagagggcgcacaaaaccaaggtaagaaggctgagggtgcccagaaccagggcaaaaaagccgaaggggctcaaaatcaggggaaaaaggccgaaggggcccagaatcaaggcaagaaagcagagggtgctcagaaccagggcaagaaggctgagggagcccagaatcagggtaagaagtcggagggcgcccaaaatcagggcaaaaaggtagagggagcgcagaaccagggaaagaaagctgaaggcgcccagaaccagggaaaaaaggccgagggagctcagaatcagggaaaaaaggcagaaggtgctcagaaccaggggaagaaggcagaaggcgcacaaaaccaaggcaagaaggccgagggagcgcagaatcagggcaagaaggcggagggtgctcagaaccaggggaagaaagctgaaggcgcacagaaccaggggaagaaagtggaaggtgcgcaaaatcaaggcaaaaaggcagaaggtgcccagaaccaaggcaagaaagcagagggggcccagaatcagggaaagaaggccgaaggtgcgcaaaaccaaggacagaaaggcgagggggcacaaaatcaaggaaagaagactgaaggtgctcaagggaagaaggcggagcgcagccctaatcagggcaagaagggcgaaggagccccgattcaaggtaaaaaggccgatagcgtcgcgaatcagggcactaaggtcgaggggataactaaccagggcaaaaaggctgagggctcaccatctgaaggcaagaaagcggagggaagtcccaaccaggggaaaaaagccgatgcggcagccaatcagggaaagaagacggaaagcgcatcagtccagggacggaataccgatgtagcacagagcccagaagcaccaaaacaggaggcccccgcgaagaagaagtctggctcgaaaaaaaagggagagcccggccccccagatgctgatgggccactgtatctgccctataagacactagtgagtactgtcggaagtatggtattcaacgaaggagaggcgcaacgcctgatcgagattctctccgaaaaggcagggataatccaagatacatggcataaggccacccagaagggggatcctgtggccatcttaaagagacagctcgaggagaaggaaaagctcctggcgaccgagcaggaggacgcagctgtggctaagtctaaactcagagaactgaacaaagagatggctgctgaaaaggccaaggccgcagctggagaggcaaaggtgaaaaagcagcttgttgcacgggagcaagaaattaccgccgtgcaagcaaggatgcaggcatcatatagggaacatgtgaaggaagtgcagcagttgcagggtaaaatccggactttgcaggagcaactcgaaaacggacctaacacgcaacttgctcgactgcagcaggagaactcaatactaagggatgcactgaaccaagctacatcccaggttgagtcaaagcaaaatgctgaactcgccaaattgagacaagaactgtcaaaggtgtccaaggagctggttgagaaatccgaggctgtccggcaggacgaacagcaacgtaaagctctggaagccaaagctgcagcctttgagaagcaagtgcttcagctccaagcttcccatcgcgagtcagaggaagctctccaaaaacgtctggacgaggtaagccgggagctttgccacacacagtcgtctcatgcctctcttcgggcagacgctgagaaagctcaggagcagcaacagcaaatggccgaactgcattcaaaattgcagagtagcgaggcagaggtcaggtctaagtgtgaggagctgtctggacttcacggccagctccaggaggcaagagcggaaaactcacagctgactgaacggatacggtctattgaggctttgctggaagctgggcaagcgcgggacgcccaggacgtgcaggccagccaggcagaggccgatcagcaacagacacggctcaaggagcttgagagtcaggtctcaggactggaaaaggaggcgatcgagctccgagaagcagtggaacaacagaaggtcaaaaataacgatcttcgagagaagaattggaaggccatggaagccctcgcgacggctgagcaggcctgtaaggagaaacttctgagcctaacccaagccaaggaggaatctgagaaacagttgtgcctgatcgaggcgcagaccatggaggccttactggcactccttccagaactctctgtgcttgcacaacaaaattataccgagtggcttcaggacctgaaagagaaaggacctaccttgttgaagcacccaccggcacccgctgagcccagttctgatctcgccagcaaactgcgggaggctgaggagactcagtctactctgcaggccgaatgtgaccagtaccggagtattctcgccgagaccgaaggcatgctcagggaccttcagaagagtgtcgaggaagaagagcaggtgtggcgggcgaaggtcggagccgctgaggaagagttgcagaagtcccgtgtgacagtgaaacacttagaagagatcgtcgagaaattgaagggcgagttggaatcgtctgaccaggtgcgggagcacacctcacatctcgaagccgagctggaaaaacacatggctgcagctagcgccgagtgtcaaaactatgctaaagaggttgccgggttgcgccagctgctgctagagagtcaatctcagctggatgccgcaaagtccgaggcacaaaagcagagcgatgaactggcgcttgtgaggcagcagctgtcagagatgaagtcccacgtggaggacggcgacatagccggagctcccgcatcttcccctgaggccccacccgccgagcaggatcctgtgcagcttaagacgcagttggagtggaccgaggcgattctcgaagacgagcagacgcaacgacagaaactgactgccgagtttgaagaggctcagacaagcgcgtgccggcttcaggaggaactcgagaagcttcgaaccgctggccccctggaaagctccgaaacggaggaagcttctcagctgaaggagcgactggagaaagaaaaaaaactcacctctgatctgggaagagccgctacgaggctccaggagctgttaaagactacccaggagcagttggcccgagagaaggatactgtgaaaaagctgcaagaacagctggaaaaggctgaggatggttcgtcgtccaaggagggcactagcgtgtag

SEQ ID NO: 33822 - DNA, 903 bp, Artificial Sequence
  derived and/or modified sequence
atggacatctacgatacccagaccctgggtgtggtagtttttggcggcttcatggttgtgtcagccatcggtatcttcctggtgtctacgtttagcatgaaggagacttcttacgaggaagctctagccaatcaaaggaaggagatggctaagacccaccaccagaaggttgagaaaaaaaaaaaggaaaaaaccgtagagaaaaagggcaaaactaaaaagaaggaagagaagccaaacgggaaaattcctgatcacgaccccgcccctaacgttactgtcttgctccgagaaccggtgagggcccccgcagtggcggtggcccccacccccgtgcaacctcccatcatcgtggcccctgtggctacagtgccagctatgccacaggagaagctagcctcctcacctaaagacaagaaaaagaaagagaaaaaagtagccaaggtcgaaccagccgttagcagtgttgtgaatagcatccaggtgcttacgtctaaggcagcaattctcgagaccgcgccaaaggaggtacccatggtagtcgtgccccctgtgggtgccaagggaaatacacccgccaccgggactactcaaggaaaaaaagctgaaggcacacagaaccagtccaaaaaggccgagggagctcccaatcaggggcgcaaagccgaaggaactccgaaccagggtaaaaagacagagggaacacctaatcagggaaaaaaagccgaggggactccaaaccaaggaaagaaggccgagggcactccaaaccagggaaaaaaagccgagggcgcccagaaccaaggcaagaaggtcgacacgaccccaaatcaagggaagaaggtggagggcgcccccacacagggaaggaaggcagaaggagcccagaaccaagccaaatag

SEQ ID NO: 33823 - DNA, 2256 bp, Artificial Sequence
  derived and/or modified sequence
atggtctttaacgaaggcgaagcccagagactgatagagatactgagcgagaaggccggaattattcaggatacatggcataaagccacccagaagggggaccctgtggcaattctgaagaggcagctcgaggagaaggagaaactcctcgctacagagcaagaggatgctgccgtcgcaaaatcaaagctgagggagctgaacaaggagatggcagccgaaaaggccaaggccgccgctggtgaggcaaaagtcaaaaaacagctggttgcacgcgagcaggagattactgctgtccaggctagaatgcaggcttcttacagggaacacgtgaaagaggttcagcagcttcagggtaaaattcggacactacaagaacagcttgaaaatggccctaacacacagttggcgcgcctgcagcaggaaaattctattctgagggatgccctcaaccaggctacaagccaagtcgaatccaaacaaaatgccgaactcgctaagctgcgtcaggagcttagcaaagtgagtaaagaactggtagagaagtccgaggcagttcgacaagacgagcagcagcgcaaggccctggaggcaaaggcggctgcgtttgagaaacaggtcctgcagctccaggcatctcatcgtgaatccgaagaagcattgcaaaaacggctcgatgaggtgtcacgagaactgtgccacacccagtccagtcacgcatctctgagagccgacgccgagaaagctcaggagcagcagcagcaaatggcggaactgcacagcaaactccagtcgagcgaggcagaggtacgctccaagtgcgaggagctctctggtttgcacggacaactgcaggaggctcgggctgaaaacagccagctaactgagagaatccggtccattgaggctcttttggaggccggccaggcccgtgacgctcaggatgtacaggcgtctcaggcagaggccgaccagcagcaaactaggcttaaagaactggagagtcaagtgtcagggctcgagaaggaagccatcgaactcagagaggccgtggaacagcagaaggtgaagaataacgacctgcgcgagaaaaactggaaggccatggaggctttagctactgcagaacaggcctgtaaggagaagttgctctctctgacccaagccaaggaggaatcagaaaagcagttatgcttgatcgaggcccagacaatggaagcactcctggcactcttgcctgagttatctgtcctggcacagcagaattatacggagtggttgcaagatttgaaggaaaaggggccaactctcctgaaacatccacccgccccagctgagccatcttccgatctcgcctctaagcttagggaagccgaagagactcagagcaccctgcaggcagaatgcgatcaatatcgctccatcctggccgagaccgaaggcatgttgcgggatctccagaagtcagtggaggaggaggagcaggtgtggcgagcaaaagtgggcgccgccgaggaggagcttcagaaatctcgtgttacagtcaagcatctggaggaaattgtcgaaaaattgaagggggagctggaatcttcagatcaggtcagggagcacacttcacacctggaggcggagctggagaagcatatggctgccgcgagtgccgagtgccaaaattatgcgaaggaggtggccggtctcagacaactcctactcgagtctcagtctcaactggatgccgctaaatctgaggctcagaagcagagtgatgaactggctcttgtccggcagcagctttccgagatgaaatcccacgtggaagacggcgacatcgcaggagccccagcgagctcccccgaagcaccccctgctgagcaggatcctgtccagctgaaaacccagctggagtggactgaggccatcctggaagacgagcaaacccaacgccaaaaactaacggctgaattcgaggaggcccagactagcgcttgccggctgcaggaggagcttgagaagcttcgaaccgccggcccgctcgaatcaagtgaaaccgaagaggcctcacagctcaaggaacgccttgagaaagaaaaaaaactaacctcggacctcggaagggctgcaaccagactccaggagctcctgaaaactacacaggagcaattggccagggagaaggataccgtgaaaaaattgcaggagcagctggagaaagccgaagatggatcttcaagcaaggaggggacatcagtgtag

SEQ ID NO: 33824 - DNA, 4233 bp, Artificial Sequence
  derived and/or modified sequence
atggacatctatgacacccagaccctgggcgtggtggtgtttggaggcttcatggtggtgtctgccatcggcatcttcctggtgtccaccttctccatgaaggagaccagctatgaggaggccctggccaaccagaggaaggagatggccaagacccaccaccagaaggtggagaagaagaagaaggagaagacagtggagaagaagggcaagaccaagaagaaggaggagaagcccaacgggaagatcccagaccatgaccctgccccaaatgtgacagtgctgctgcgggagcctgtgcgggccccagctgtggccgtggcccccacccctgtgcagccccccatcatcgtggcccctgtggccaccgtgcctgccatgccccaggagaagctggccagcagccccaaggacaagaagaagaaggagaagaaggtggccaaggtggagcctgctgtgtcctctgtggtgaacagcatccaggtgctgaccagcaaggccgccatcctggagacagcccccaaggaggtgcccatggtggtggtgccccctgtgggcgccaagggcaacaccccagccaccggcaccacccagggcaagaaggccgagggcacccagaaccagagcaagaaggccgagggcgcccccaaccagggcaggaaggccgagggcacccccaaccagggcaagaagacagagggcacccccaaccagggcaagaaggccgagggcacccccaaccagggcaagaaggccgagggcacccccaaccagggcaagaaggccgagggcgcccagaaccagggcaagaaggtggacaccacccccaaccagggcaagaaggtggagggcgcccccacccagggcaggaaggccgagggcgcccagaaccaggccaagaaggtggagggcgcccagaaccagggcaagaaggccgagggcgcccagaaccagggcaagaagggggagggcgcccagaaccagggcaagaaggccgagggcgcccagaaccagggcaagaaggccgagggcgcccagaaccagggcaagaaggccgagggcgcccagaaccagggcaagaaggccgagggcgcccagaaccagggcaagaaggccgagggcgcccagaaccagggcaagaagtctgagggcgcccagaaccagggcaagaaggtggagggcgcccagaaccagggcaagaaggccgagggcgcccagaaccagggcaagaaggccgagggcgcccagaaccagggcaagaaggccgagggcgcccagaaccagggcaagaaggccgagggcgcccagaaccagggcaagaaggccgagggcgcccagaaccagggcaagaaggccgagggcgcccagaaccagggcaagaaggccgagggcgcccagaaccagggcaagaaggtggagggcgcccagaaccagggcaagaaggccgagggcgcccagaaccagggcaagaaggccgagggcgcccagaaccagggcaagaaggccgagggcgcccagaaccagggccagaagggggagggcgcccagaaccagggcaagaagacagagggcgcccagggcaagaaggccgagaggagccccaaccagggcaagaagggggagggcgcccccatccagggcaagaaggctgacagcgtggccaaccagggcaccaaggtggagggcatcaccaaccagggcaagaaggccgagggcagccccagcgagggcaagaaggccgagggcagccccaaccagggcaagaaggcagatgctgctgccaaccagggcaagaagacagagagcgcctctgtgcagggcaggaacacagatgtggcccagagccctgaggcccccaagcaggaggccccagccaagaagaagagcggcagcaagaagaagggggagcccggccccccagatgctgatggccccctgtacctgccctacaagaccctggtgtccacagtgggctccatggtgttcaatgaaggagaggcccagaggctgattgagatcctgtctgagaaggccggcatcatccaggacacctggcacaaggccacccagaagggggaccctgtggccatcctgaagaggcagctggaggagaaggagaagctgctggccacagagcaggaggatgctgctgtggccaagagcaagctgcgggagctgaacaaggagatggctgctgagaaggccaaggctgctgctggggaggccaaggtgaagaagcagctggtggcccgggagcaggagatcacagctgtgcaggccaggatgcaggccagctaccgggagcacgtgaaggaggtgcagcagctgcagggcaagatccgcaccctgcaggagcagctggagaatggccccaacacccagctggcccggctgcagcaggagaacagcatcctgagagatgccctgaaccaggccaccagccaggtggagagcaagcagaatgctgagctggccaagctgcggcaggagctgagcaaggtgtccaaggagctggtggagaagtctgaggccgtgcggcaggatgagcagcagaggaaggccctggaggccaaggccgccgcctttgagaagcaggtgctgcagctgcaggccagccaccgggagagcgaggaggccctgcagaagaggctggatgaggtgtcccgggagctgtgccacacccagagcagccacgccagcctgcgggcagatgctgagaaggcccaggagcagcagcagcagatggccgagctgcacagcaagctgcagagcagcgaggccgaggtgcgcagcaaatgtgaggagctgagcggcctgcacggccagctgcaggaggcccgggcagagaacagccagctgacagagcgcatccgcagcattgaggccctgctggaggccggccaggccagagatgcccaggatgtgcaggccagccaggccgaggccgaccagcagcagacccggctgaaggagctggagagccaggtgtctggcctggagaaggaggccatcgagctgcgggaggccgtggagcagcagaaggtgaagaacaatgacctgcgggagaagaactggaaggccatggaggccctggccacagctgagcaggcctgcaaggagaagctgctgagcctgacccaggccaaggaggagagcgagaagcagctgtgcctgattgaggcccagaccatggaggccctgctggccctgctgcctgagctgtctgtgctggcccagcagaactacacagagtggctgcaggacctgaaggagaagggccccaccctgctgaagcaccccccagccccagctgagcccagcagtgacctggccagcaagctgcgggaggccgaggagacccagagcaccctgcaggctgaatgtgaccagtaccgcagcatcctggccgagacagagggcatgctgcgggacctgcagaagtctgtggaggaggaggagcaggtgtggagggccaaggtgggcgctgctgaggaggagctgcagaagagccgggtgacagtgaagcacctggaggagatcgtggagaagctgaagggggagctggagagcagtgaccaggtgcgggagcacaccagccacctggaggccgagctggagaagcacatggctgctgccagcgctgagtgccagaactatgccaaggaggtggccggcctgcggcagctgctgctggagagccagagccagctggatgctgccaagtctgaggcccagaagcagagtgatgagctggccctggtgcggcagcagctgtctgagatgaagagccacgtggaggatggagacattgctggggccccagccagcagccctgaggcccctcctgctgagcaggaccctgtgcagctgaagacccagctggagtggacagaggccatcctggaggatgagcagacccagaggcagaagctgacagctgagtttgaggaggcccagaccagcgcctgccgcctgcaggaggagctggagaagctgaggacagctggccccctggagagcagcgagacagaggaggccagccagctgaaggagcggctggagaaggagaagaagctgaccagtgacctgggccgggccgccacccggctgcaggagctgctgaagaccacccaggagcagctggcccgggagaaggacacagtgaagaagctgcaggagcagctggagaaggcagaagatggcagcagcagcaaggagggcacctctgtgtag

SEQ ID NO: 33825 - DNA, 2934 bp, Artificial Sequence
  derived and/or modified sequence
atggacatctatgacacccagaccctgggcgtggtggtgtttggaggcttcatggtggtgtctgccatcggcatcttcctggtgtccaccttctccatgaaggagaccagctatgaggaggccctggccaaccagaggaaggagatggccaagacccaccaccagaaggtggagaagaagaagaaggagaagacagtggagaagaagggcaagaccaagaagaaggaggagaagcccaacgggaagatcccagaccatgaccctgccccaaatgtgacagtgctgctgcgggagcctgtgcgggccccagctgtggccgtggcccccacccctgtgcagccccccatcatcgtggcccctgtggccaccgtgcctgccatgccccaggagaagctggccagcagccccaaggacaagaagaagaaggagaagaaggtggccaaggtggagcctgctgtgtcctctgtggtgaacagcatccaggtgctgaccagcaaggccgccatcctggagacagcccccaaggagggcaggaacacagatgtggcccagagccctgaggcccccaagcaggaggccccagccaagaagaagagcggcagcaagaagaagggccccccagatgctgatggccccctgtacctgccctacaagaccctggtgtccacagtgggctccatggtgttcaatgaaggagaggcccagaggctcatcgagatcctgtctgagaaggccggcatcatccaggacacctggcacaaggccacccagaagggggaccctgtggccatcctgaagaggcagctggaggagaaggagaagctgctggccacagagcaggaggatgctgctgtggccaagagcaagctgcgggagctgaacaaggagatggctgctgagaaggccaaggctgctgctggggaggccaaggtgaagaagcagctggtggcccgggagcaggagatcacagctgtgcaggccaggatgcaggccagctaccgggagcacgtgaaggaggtgcagcagctgcagggcaagatccgcaccctgcaggagcagctggagaatggccccaacacccagctggcccggctgcagcaggagaacagcatcctgagagatgccctgaaccaggccaccagccaggtggagagcaagcagaatgctgagctggccaagctgcggcaggagctgagcaaggtgtccaaggagctggtggagaagtctgaggccgtgcggcaggatgagcagcagaggaaggccctggaggccaaggctgctgcctttgagaagcaggtgctgcagctgcaggccagccaccgggagagcgaggaggccctgcagaagaggctggatgaggtgtcccgggagctgtgccacacccagagcagccacgccagcctgcgggcagatgctgagaaggcccaggagcagcagcagcagatggccgagctgcacagcaagctgcagagcagcgaggccgaggtgcgcagcaaatgtgaggagctgagcggcctgcacggccagctgcaggaggcccgggcagagaacagccagctgacagagcgcatccgcagcattgaggccctgctggaggccggccaggccagagatgcccaggatgtgcaggccagccaggccgaggccgaccagcagcagacccggctgaaggagctggagagccaggtgtctggcctggagaaggaggccatcgagctgcgggaggccgtggagcagcagaaggtgaagaacaatgacctgcgggagaagaactggaaggccatggaggccctggccacagctgagcaggcctgcaaggagaagctgctgagcctgacccaggccaaggaggagagcgagaagcagctgtgcctgattgaggcccagaccatggaggccctgctggccctgctgcctgagctgtctgtgctggcccagcagaactacacagagtggctgcaggacctgaaggagaagggccccaccctgctgaagcaccccccagccccagctgagcccagcagtgacctggccagcaagctgcgggaggccgaggagacccagagcaccctgcaggccgagtgtgaccagtaccgcagcatcctggccgagacagagggcatgctgcgggacctgcagaagtctgtggaggaggaggagcaggtgtggagggccaaggtgggcgctgctgaggaggagctgcagaagagccgggtgacagtgaagcacctggaggagatcgtggagaagctgaagggggagctggagagcagtgaccaggtgcgggagcacaccagccacctggaggccgagctggagaagcacatggccgccgccagcgctgagtgccagaactatgccaaggaggtggccggcctgcggcagctgctgctggagagccagagccagctggatgctgccaagtctgaggcccagaagcagagtgatgagctggccctggtgcggcagcagctgtctgagatgaagagccacgtggaggatggagacattgctggggccccagccagcagccctgaggcccccccagctgagcaggaccctgtgcagctgaagacccagctggagtggacagaggccatcctggaggatgagcagacccagaggcagaagctgacagctgagtttgaggaggcccagaccagcgcctgccgcctgcaggaggagctggagaagctgaggacagctggccccctggagagcagcgagacagaggaggccagccagctgaaggagcggctggagaaggagaagaagctgaccagtgacctgggccgggccgccacccggctgcaggagctgctgaagaccacccaggagcagctggcccgggagaaggacacagtgaagaagctgcaggagcagctggagaaggccgaggatggcagcagcagcaaggagggcacctctgtgtag

SEQ ID NO: 33826 - DNA, 903 bp, Artificial Sequence
  derived and/or modified sequence
atggacatctatgacacccagaccctgggcgtggtggtgtttggaggcttcatggtggtgtctgccatcggcatcttcctggtgtccaccttctccatgaaggagaccagctatgaggaggccctggccaaccagaggaaggagatggccaagacccaccaccagaaggtggagaagaagaagaaggagaagacagtggagaagaagggcaagaccaagaagaaggaggagaagcccaacgggaagatcccagaccatgaccctgccccaaatgtgacagtgctgctgcgggagcctgtgcgggccccagctgtggccgtggcccccacccctgtgcagccccccatcatcgtggcccctgtggccaccgtgcctgccatgccccaggagaagctggccagcagccccaaggacaagaagaagaaggagaagaaggtggccaaggtggagcctgctgtgtcctctgtggtgaacagcatccaggtgctgaccagcaaggccgccatcctggagacagcccccaaggaggtgcccatggtggtggtgccccctgtgggcgccaagggcaacaccccagccaccggcaccacccagggcaagaaggccgagggcacccagaaccagagcaagaaggccgagggcgcccccaaccagggcaggaaggccgagggcacccccaaccagggcaagaagacagagggcacccccaaccagggcaagaaggccgagggcacccccaaccagggcaagaaggccgagggcacccccaaccagggcaagaaggccgagggcgcccagaaccagggcaagaaggtggacaccacccccaaccagggcaagaaggtggagggcgcccccacccagggcaggaaggccgagggcgcccagaaccaggccaagtag

SEQ ID NO: 33827 - DNA, 2256 bp, Artificial Sequence
  derived and/or modified sequence
atggtgttcaatgaaggagaggcccagaggctcatcgagatcctgtctgagaaggccggcatcatccaggacacctggcacaaggccacccagaagggggaccctgtggccatcctgaagaggcagctggaggagaaggagaagctgctggccacagagcaggaggatgctgctgtggccaagagcaagctgcgggagctgaacaaggagatggctgctgagaaggccaaggctgctgctggggaggccaaggtgaagaagcagctggtggcccgggagcaggagatcacagctgtgcaggccaggatgcaggccagctaccgggagcacgtgaaggaggtgcagcagctgcagggcaagatccgcaccctgcaggagcagctggagaatggccccaacacccagctggcccggctgcagcaggagaacagcatcctgagagatgccctgaaccaggccaccagccaggtggagagcaagcagaatgctgagctggccaagctgcggcaggagctgagcaaggtgtccaaggagctggtggagaagtctgaggccgtgcggcaggatgagcagcagaggaaggccctggaggccaaggctgctgcctttgagaagcaggtgctgcagctgcaggccagccaccgggagagcgaggaggccctgcagaagaggctggatgaggtgtcccgggagctgtgccacacccagagcagccacgccagcctgcgggcagatgctgagaaggcccaggagcagcagcagcagatggccgagctgcacagcaagctgcagagcagcgaggccgaggtgcgcagcaaatgtgaggagctgagcggcctgcacggccagctgcaggaggcccgggcagagaacagccagctgacagagcgcatccgcagcattgaggccctgctggaggccggccaggccagagatgcccaggatgtgcaggccagccaggccgaggccgaccagcagcagacccggctgaaggagctggagagccaggtgtctggcctggagaaggaggccatcgagctgcgggaggccgtggagcagcagaaggtgaagaacaatgacctgcgggagaagaactggaaggccatggaggccctggccacagctgagcaggcctgcaaggagaagctgctgagcctgacccaggccaaggaggagagcgagaagcagctgtgcctgattgaggcccagaccatggaggccctgctggccctgctgcctgagctgtctgtgctggcccagcagaactacacagagtggctgcaggacctgaaggagaagggccccaccctgctgaagcaccccccagccccagctgagcccagcagtgacctggccagcaagctgcgggaggccgaggagacccagagcaccctgcaggccgagtgtgaccagtaccgcagcatcctggccgagacagagggcatgctgcgggacctgcagaagtctgtggaggaggaggagcaggtgtggagggccaaggtgggcgctgctgaggaggagctgcagaagagccgggtgacagtgaagcacctggaggagatcgtggagaagctgaagggggagctggagagcagtgaccaggtgcgggagcacaccagccacctggaggccgagctggagaagcacatggccgccgccagcgctgagtgccagaactatgccaaggaggtggccggcctgcggcagctgctgctggagagccagagccagctggatgctgccaagtctgaggcccagaagcagagtgatgagctggccctggtgcggcagcagctgtctgagatgaagagccacgtggaggatggagacattgctggggccccagccagcagccctgaggcccccccagctgagcaggaccctgtgcagctgaagacccagctggagtggacagaggccatcctggaggatgagcagacccagaggcagaagctgacagctgagtttgaggaggcccagaccagcgcctgccgcctgcaggaggagctggagaagctgaggacagctggccccctggagagcagcgagacagaggaggccagccagctgaaggagcggctggagaaggagaagaagctgaccagtgacctgggccgggccgccacccggctgcaggagctgctgaagaccacccaggagcagctggcccgggagaaggacacagtgaagaagctgcaggagcagctggagaaggccgaggatggcagcagcagcaaggagggcacctctgtgtag

SEQ ID NO: 33828 - DNA, 4233 bp, Artificial Sequence
  derived and/or modified sequence
atggacatctacgacacccagaccctgggcgtggtggtgttcggcggattcatggtcgtgtccgccataggcattttcctcgtgagcactttctccatgaaggagacgtcttatgaagaggccctcgccaatcagcgtaaggaaatggcaaagacacatcaccagaaggtagagaaaaagaaaaaagaaaagactgtcgagaagaagggtaaaactaaaaagaaagaagaaaaacctaatggaaaaatacctgatcacgacccagcccctaatgtaacggtattgctgagggagccagtgcgagctcctgcagtggccgtagccccgacccccgttcaaccccctattatcgtggcaccggtggccaccgtacctgcaatgcctcaggagaaactggctagctctcctaaagacaagaaaaaaaaagagaagaaggttgccaaggtagaaccggctgtgtcgtcagtagtaaattctatccaagtgctgacttccaaggccgccattttagaaactgcccctaaggaagtcccaatggtagtggtgccccccgtgggagccaagggaaatactcctgctacaggaactactcagggaaaaaaggccgagggaactcagaaccagtcgaagaaagccgagggcgctccaaatcagggtagaaaggctgagggcacccccaatcagggcaagaagacggaaggaacacctaaccaaggcaagaaagccgagggcaccccgaaccagggaaagaaagctgagggaaccccgaaccagggcaagaaggcggagggcgcccagaatcagggaaagaaggttgacaccactccaaatcagggtaagaaagtggaaggggcacctacacagggcagaaaagcagaaggcgcccagaatcaggccaagaaagttgagggcgcccagaatcaagggaaaaaggccgagggcgcacagaaccaaggaaaaaaaggcgagggtgcccagaatcagggtaaaaaggctgagggcgcccagaaccaagggaagaaggcggagggcgcccagaaccagggtaaaaaagccgaaggcgcccagaatcaaggcaagaaagccgagggtgcacagaaccagggcaaaaaggccgaaggcgctcaaaaccaaggcaagaaaagcgaaggcgcacagaaccagggtaagaaagtggagggagcccagaaccagggtaaaaaagccgaaggagcccaaaatcagggtaagaaagctgaaggcgctcagaatcagggcaaaaaagccgagggggcccagaatcaggggaaaaaagctgaaggggcgcaaaatcagggaaaaaaagccgagggcgcccagaaccagggaaagaaggcagagggtgcacagaatcagggcaagaaggctgaaggagcacagaaccagggtaagaaagtggaaggagctcagaaccaggggaagaaagccgaaggggcacagaaccaaggaaagaaagccgaaggggcccaaaaccagggaaagaaggccgagggtgcgcagaaccagggccagaagggcgagggtgcccagaaccagggtaaaaagaccgagggcgctcagggaaagaaggccgaacgttcccccaaccaaggcaagaaaggggaaggtgcccctattcaggggaaaaaggccgattcggttgcgaatcaaggtacaaaagtcgagggaatcaccaatcaggggaagaaggcggagggatcgccaagcgaaggcaaaaaggccgagggctctccaaatcaggggaagaaagcagacgctgcggctaaccagggaaaaaaaacagaatctgcttcggtccaaggtagaaatacggacgttgcccagagccccgaggcccccaagcaggaggctcctgctaagaaaaagtctggatctaaaaagaaaggcgaaccggggccgcccgatgccgacggtccactctaccttccatacaagacgttggtgtccaccgtgggaagcatggtgtttaatgaaggagaagcccagcgcctcatcgaaatactgtctgagaaagcaggcatcatacaagacacttggcacaaggccacccagaagggtgaccctgtagccatcctgaagcggcagttagaggagaaagagaagcttctggcgacggagcaggaagatgcagctgtggctaagtctaaactccgcgaactgaacaaggaaatggcagccgaaaaagccaaggctgccgcaggcgaagcaaaagttaagaaacagctcgtggctagggagcaggagataactgccgtgcaggcccggatgcaggcctcctatcgagagcatgtcaaggaggtgcagcaactgcagggtaagattaggactcttcaggaacaactggagaatggacccaatacccagctggcccgactccaacaggaaaattctattcttcgggacgccttgaatcaggcaacatctcaggtcgaatccaagcagaatgcagaactagccaagctccgtcaggagttatctaaggtatcgaaggaactggttgaaaagtccgaggcggtccggcaggacgagcagcaaaggaaagcgctcgaggctaaggccgccgctttcgaaaagcaagttctacagctgcaggcttcacaccgagaatccgaagaggccctgcagaaacgtctggacgaagtgagcagggaactctgtcatactcagtcatcacatgccagcctccgggctgacgccgaaaaggcccaggaacagcagcagcaaatggcggagctgcactccaaactgcagtctagtgaagctgaagtcagatctaaatgcgaggagctttcagggctccatggtcagctgcaggaggcccgggccgagaactctcagcttacagagcgcatccgcagtatcgaagcactcctggaggccggccaggcccgggacgcccaggacgtacaagccagtcaagcagaagcagatcagcagcagacccgactgaaagaactggaatcccaagtaagcggcctagagaaggaagccattgaactgcgcgaggctgtggagcagcagaaagtcaagaataatgatcttcgggagaagaactggaaggcgatggaggcattggctactgctgaacaggcttgtaaggaaaagctcctgagcctcacacaggctaaggaggagtccgaaaagcaactctgcttgatcgaggcacaaactatggaggccctgctggctcttctgccagagctttccgtcttggcccagcagaattacacagaatggctacaggatttaaaggaaaagggacccactcttctcaagcatcctcctgctcccgctgagccgtcatctgatttagcctccaaactgcgagaagccgaggagacccagtctacactgcaggccgagtgcgaccagtataggagcattctggccgagactgaggggatgctgagggacctccagaagtcagtggaagaggaagagcaggtttggagagctaaggtgggtgccgctgaggaggagctacagaagagtcgggtgaccgttaaacatcttgaggagatcgtggagaagctgaaaggggagctggaaagttctgatcaggtcagggagcacacatcacacttggaagcagaacttgagaagcacatggccgctgcttctgcagaatgccagaactacgcaaaagaagttgctgggctgagacagcttctcttggaatcccagagtcagctcgacgcggccaaaagcgaagcccagaagcagtccgacgaactagctctggtgcgtcagcagctgtcagagatgaagtcccacgtggaggacggtgatatagcgggcgctccggcctcttcccccgaagctcctcctgccgaacaggaccctgtgcaactcaagactcagctggaatggacggaagcaattttggaagatgagcaaacccagagacagaaacttacggcggagttcgaggaggcacagactagcgcctgccggcttcaggaagagctggagaagctccgcactgctggacctttagaaagctccgaaacagaggaggcctcccaactgaaggagcgtctggagaaagagaaaaagctcacatctgatctcgggagagccgccacacgcctgcaggagcttcttaagaccactcaagagcagttagctcgagagaaagatacagtgaagaagttacaggaacagcttgagaaggctgaggatggatcttcttccaaggaagggacttctgtttag

SEQ ID NO: 33829 - DNA, 2934 bp, Artificial Sequence
  derived and/or modified sequence
atggacatctacgacacccagaccctgggcgtggtggtgttcggcggcttcatggttgtaagcgcaatcgggatctttctggtttccaccttcagcatgaaggagaccagctacgaggaggcactggccaaccagcggaaagagatggctaagacccaccatcaaaaggtcgagaagaaaaagaaagagaagaccgttgagaagaagggaaaaacgaagaaaaaagaggaaaaaccaaacgggaagatacccgatcacgacccggcgccgaatgtgactgtgctgctccgcgaacccgtgcgcgccccagccgtcgccgtggctccaactccagttcaaccccccatcatagtcgcccccgtggccacagtgccggcgatgcctcaggaaaaactcgcatctagcccaaaggacaaaaagaaaaaagaaaaaaaggtggccaaggtagagcctgctgtctctagcgtggtaaatagcattcaggtcctcacctcgaaagccgccatcctggagactgccccaaaggagggaaggaatacagacgtggcgcaatcacctgaagcgccaaagcaagaggctcccgctaaaaaaaagtcgggcagtaagaaaaaagggccacctgatgctgacgggccattgtatcttccttataagactctggtttctacagtggggtctatggtcttcaacgagggcgaggcgcagagactgatcgaaatcttgagtgagaaggcaggtataattcaggatacatggcacaaggcaacccagaagggggatcccgtggcaatcttaaaacgccagcttgaggagaaggagaagctcctggctacagagcaagaggatgccgccgttgctaagtccaaacttagggaattaaacaaggagatggcagctgaaaaagctaaggcagccgccggtgaagcgaaggtgaagaaacaactggttgcccgcgagcaagagatcaccgctgtccaggccaggatgcaggccagctacagggagcatgtaaaagaggtgcagcagttgcaaggaaagattagaacactccaagaacagctggagaacgggcccaacacacagctggcgcggttgcagcaagaaaacagcattctgcgcgatgcattgaaccaggctaccagccaggtggagtctaaacagaacgccgagcttgcaaaactcagacaggagttatctaaagtaagcaaagaactggtcgagaaatccgaagctgttcggcaggatgagcagcagcggaaagctctcgaggccaaggccgctgccttcgaaaaacaggtcctgcagctacaggcttcacaccgagagagcgaggaggcactacagaagcgcctcgacgaggtgagcagagagctgtgccatacgcagagctcccatgccagcctcagggccgatgcagagaaggcacaagaacaacagcagcagatggcagaattgcacagtaaactgcagtcctctgaggcagaggtccgctctaagtgcgaagaattgagtggactgcacggccagcttcaggaagcacgcgcagaaaattctcaacttactgaaagaattaggagcattgaggcgctgctcgaagcaggacaggcccgcgacgctcaggacgtccaggcctctcaggccgaggcagaccagcagcagacaagattaaaagagttagaatcccaggtttccgggctggagaaggaagctattgagctgcgggaggctgtggaacaacaaaaggtgaaaaacaacgatttaagagagaaaaattggaaggctatggaggcattagctacagccgaacaggcctgcaaagaaaaactcctaagcctgacacaggccaaagaggagagcgaaaagcaactgtgtctgatcgaggctcagaccatggaagccttactagcactccttcctgaactctccgttcttgctcagcagaactacactgagtggctccaggatctgaaagagaaggggccaacgctattgaagcaccccccagcacctgccgaacctagtagcgaccttgccagcaaactccgtgaagctgaagagacccagtcgactcttcaggcggagtgtgaccagtatcggtctatactcgcagagactgagggaatgctccgtgaccttcagaaatcggtggaagaagaagaacaggtttggcgggcgaaagtcggagcagctgaggaagagctgcagaaatcgagagtaaccgtgaagcacctggaagagattgtggagaagctgaagggcgaattggaaagtagtgaccaggtgcgcgagcacacctcccatttggaggccgagttggagaagcacatggctgctgcttccgctgagtgccaaaactatgccaaagaggtcgccgggctccgacaactgctgctggagagccagtcccaactggacgctgccaaatctgaggcccagaagcagtcagacgaattggccctggtgcgacagcaactgagtgagatgaagtcccatgtcgaggatggcgatatcgccggggctccagcctccagccctgaagcccctccagccgagcaggatccagtacaactgaaaacccagttagagtggaccgaagcaatcttggaggatgagcaaacccagaggcagaagttgacggcagaatttgaagaagcccagacttccgcttgccgtttgcaagaagaactggagaagctgcgcacggccggtcccttagagtcgtccgagactgaggaagcgtctcagcttaaggagagactggaaaaagagaagaaactgacaagcgaccttggtcgcgccgctacaagattgcaggaactgctgaaaacgacccaggaacagctggctcgggaaaaagacaccgtgaagaagctgcaggagcaactggagaaagcagaagacggcagctcttcaaaagaaggcaccagcgtatag

SEQ ID NO: 33830 - DNA, 2934 bp, Artificial Sequence
  derived and/or modified sequence
atggacatctacgacacccagaccctgggcgtggtggtgttcggcggctttatggtggtgtctgccatcggaatctttctcgtgagcactttctctatgaaggagacgagctacgaagaggccttagccaaccagagaaaggagatggccaaaacgcatcaccagaaggtcgaaaagaaaaaaaaggaaaagacggtggagaagaagggcaagactaagaaaaaggaggagaagcctaatggtaaaatccctgatcatgatcccgctcccaacgtgactgtgctccttcgtgagcccgtgcgcgctcctgcagtggccgtagcccctacaccagtccagccgccaattatcgtggcaccagttgccactgtacctgccatgccacaggagaagctcgccagtagcccgaaagataagaaaaagaaggagaagaaggtcgcaaaggttgaacctgccgtctctagtgtcgtgaacagcattcaagtcttgacttcgaaagctgcaatactggaaaccgcgcccaaagaaggtcgcaacacggacgtcgcccagagtcccgaggcccctaagcaggaagcccctgccaaaaagaaatctggtagtaagaaaaagggtcccccagacgcggacggaccactgtacttgccctacaagacgctagtgagcactgtgggatctatggtgttcaacgagggagaggctcagagattaatcgaaatcctttctgagaaggccgggatcatacaggacacgtggcacaaagcaacccaaaaaggtgatccagtcgccatcttaaagcgccaactggaggagaaagagaagcttctggccactgagcaggaggacgccgcagtggctaaaagcaagctaagagagttaaataaagaaatggctgctgaaaaggccaaagcagcagcaggtgaagctaaggtgaagaaacagctggtcgcaagggaacaagagatcaccgctgttcaggcccgcatgcaggccagctaccgcgaacatgtgaaagaagtccagcagctgcagggaaaaatccgaactctgcaggaacagctcgaaaatggtcccaacactcaactggccagactgcagcaggaaaactctatcctccgtgacgcgctcaatcaggccacttctcaggtcgagtccaagcagaatgccgagctggcaaaactgcgccaggaattgagcaaggtgtctaaggagctggtcgagaagtcagaagctgtgcgccaagacgagcaacaaaggaaggccctcgaggccaaggcagcagcattcgagaagcaggtcttacagcttcaggcctcacaccgggaatcagaggaagccctgcagaaacgtttggatgaggtttccagagagctgtgccatacccagtcaagccacgcttcgttgcgggctgacgcagagaaagcccaggaacagcagcagcagatggcagaactacatagcaagttgcagagctccgaagcagaagtcaggagcaaatgtgaagaactgtccggtcttcatggtcaactgcaggaagcccgagcagagaattcacaactgaccgaacggatcaggtcaattgaggcgcttttggaggccggccaggcgagggatgcgcaggatgtgcaggccagtcaggcagaggctgatcagcagcagacccgtctgaaagaacttgagtcacaggtctccggtctggagaaagaagccattgagctgagagaggctgtggaacaacaaaaggtgaaaaataatgacttgcgggagaagaactggaaggcgatggaagcacttgccaccgccgagcaggcctgcaaagagaagttgctgtccctcacacaggcaaaggaagaaagcgaaaagcagctatgcctgatcgaggcccagacaatggaagctctactcgctctcctgcccgagctcagcgtgttggcccagcagaattataccgagtggctccaggatctgaaagagaaaggaccaactctgctcaaacacccgccggcgccagcagaaccatcgagcgacctcgcatccaagctgcgggaggcggaggagactcagtccacactgcaggctgagtgtgatcagtaccgatccatattagccgagaccgagggaatgctcagggacctgcagaagtcagtcgaggaagaggagcaagtttggcgcgccaaagtgggagccgccgaggaggaactacagaaatccagggtcaccgtgaaacatttggaagagatcgtcgaaaaactaaagggagagttggagtcatcagaccaagtcagagagcacaccagccacctcgaagccgagctcgagaaacacatggccgcagccagcgccgagtgtcagaactacgccaaagaggtcgccggattgcgacagttacttctggaaagccagtcacagttggacgccgctaagagcgaggcccaaaaacagtcagatgagttagctctcgtcagacagcagctgtccgaaatgaaaagtcacgtcgaggacggcgacatcgctggcgcgccagcctcttccccggaagcccctccagccgaacaggatccagtccagctgaaaacgcaactggagtggacagaagccatcctcgaagacgagcaaacccagcgccagaagctgaccgccgagtttgaggaagctcagacatctgcctgcaggttgcaagaggaactcgaaaagttacgcacggcagggccgctcgagtcatcagaaactgaagaagcctcccagttgaaggaacgcctcgaaaaagaaaaaaagctgaccagcgacctgggtcgcgccgcaacgcgactccaagaactgctgaagactacccaggagcaactggcacgagaaaaggataccgtcaaaaagttgcaggaacagctggagaaggcggaggatggaagcagcagtaaagaaggcacgagcgtgtag

SEQ ID NO: 33831 - DNA, 4233 bp, Artificial Sequence
  derived and/or modified sequence
atggacatctacgacacccagaccctgggcgtggtggtgttcggcggctttatggtggtgtcagcaatagggatctttctggtcagcacttttagtatgaaggaaacaagctacgaggaagccctcgccaaccagaggaaagagatggctaagacgcatcaccagaaggtcgagaaaaagaaaaaggaaaagacggtcgaaaagaagggcaagacaaaaaaaaaggaggagaaacccaacggaaagatcccggaccatgacccagcccccaacgtgaccgtgctgctgcgagaaccagtgagagcgcccgctgtggccgtggctccaactcccgtccagccacccatcatcgttgctccagttgccaccgtaccggcaatgccccaggagaagttggcctctagccctaaggacaagaaaaagaaagaaaagaaagtggccaaggtggaacctgccgtttcttctgtggtgaacagcatacaggtgctaacctccaaagccgccattcttgagacggcacctaaagaagtgcccatggtggttgtcccacccgtcggtgccaaaggcaatacccctgcgactggcactacccagggcaagaaagcagaagggactcagaatcagtccaagaaagccgaaggggcgccaaatcaggggaggaaggcagagggtactccaaatcagggaaagaaaacagaggggactccaaaccaaggaaagaaggccgagggcacacctaaccagggaaaaaaagccgaaggtacccctaaccaaggtaagaaggctgagggtgcacagaaccaaggaaaaaaggtcgatacaacgcccaatcagggcaaaaaagtcgaaggagcccccacccaggggcgcaaggctgagggggcacaaaatcaggccaagaaggtcgaaggcgctcagaatcagggcaaaaaagctgagggcgctcaaaaccaaggcaaaaaaggagagggcgcgcagaatcaggggaagaaggccgagggcgcgcagaatcagggcaaaaaggccgaaggggcacaaaatcaggggaagaaagcggagggtgcacagaaccagggcaagaaggcggagggggcccagaaccaaggaaagaaagccgagggcgctcaaaaccagggcaagaaaagcgaaggggcacagaatcaagggaaaaaagtcgaaggagcccagaaccagggcaagaaagccgagggggcacagaaccaggggaagaaggcagagggggctcagaaccagggtaaaaaggctgagggcgcccagaaccaggggaagaaggccgagggggcacagaatcagggaaagaaggccgaaggagcccaaaatcaaggtaagaaggccgaaggcgcccagaatcaaggcaaaaaggctgagggcgctcaaaatcagggtaaaaaggtagaaggagcgcagaaccagggaaagaaagccgagggcgcacagaaccaaggcaagaaagcagaaggagctcaaaaccaggggaagaaggcagagggtgcgcaaaaccaaggccagaagggtgaaggggcccaaaaccagggaaagaagacggagggtgctcagggcaagaaagctgagcgtagccctaaccagggtaagaaaggtgagggtgctcccatccagggaaagaaagctgactctgtggccaatcaaggtaccaaggtggagggaatcacaaatcaggggaaaaaggccgaaggatccccaagtgaggggaagaaagcggagggctcgcccaatcagggcaaaaaagcagatgcggctgcaaatcaggggaagaagactgagagcgcctcagttcagggcaggaatacagatgtggcgcagtcgcctgaggcccctaagcaagaagcccctgccaaaaagaagtctggcagcaagaagaaaggggaacctgggccccccgacgcagacggcccactctacctcccatacaagacactggtatctaccgtcggtagcatggtgttcaatgaaggcgaggcacagcgcctcatcgaaatcttgagtgagaaagccggaatcatccaagacacatggcacaaggccactcagaagggggacccagtggccatcttaaaaaggcagttagaagagaaggagaaactgctcgccacggagcaggaggacgctgccgtggcaaaatcgaagctgcgcgagcttaataaagaaatggccgcggaaaaggctaaggcggcggcaggcgaagctaaggtaaagaaacagctggtggcccgtgaacaggaaattacggccgtccaagcccgcatgcaggcttcctatagagagcatgtgaaggaggtgcagcagttgcagggcaagatccggactctgcaagagcagctggagaacgggcccaacacacagctggctcggttgcaacaagagaattctatactgcgcgacgccctgaaccaggccacctcccaggtggaatcaaagcagaacgcggaacttgccaaacttagacaggagctgtcgaaggtgtcgaaagaactcgtcgaaaaatccgaggctgttaggcaggatgagcagcagaggaaagccctcgaggcaaaagcggcggccttcgaaaaacaggtgcttcaactccaggcatcccaccgtgagagcgaggaagccttgcagaagcgcttggatgaggttagccgagagctctgtcatacacaatcaagtcacgcgtctttacgcgccgacgccgaaaaggcacaagaacagcaacagcagatggccgaactccactccaagctgcagtcttccgaggccgaagtgagatcaaaatgtgaagaactgtcggggctgcacgggcagctgcaagaggcgagagccgagaactctcagctgaccgagcgaatccgctcaatcgaggccctgttggaagcagggcaagctcgggatgcgcaggatgttcaggctagtcaagcggaggctgatcaacagcagactagactcaaagaactggagtcccaggtttctggactagaaaaggaggcgatcgagctcagggaggccgttgagcaacagaaggtgaaaaacaacgatcttagggaaaaaaattggaaagccatggaggcgttagctacagctgaacaggcatgtaaagagaagcttctgagtctcacccaggctaaggaagaaagcgaaaagcagctgtgcttgatagaggcccaaacgatggaggctctgctggcgctgcttcccgaactctcggtgctcgcccaacaaaactacacagagtggctgcaggatttgaaagaaaagggacctactctcctcaaacacccaccagctccggctgagccttcttcagatttggcctctaaattaagggaagctgaggaaacgcagtctacgctgcaggccgaatgcgatcagtacagaagtatcctcgccgagacggagggaatgcttcgggacctgcagaagagtgttgaggaagaggaacaagtgtggcgtgccaaggtgggagccgctgaggaagagctgcagaagtcacgggtgactgtgaagcatctggaggagatcgtggaaaaactgaagggcgagttggagagctcagaccaggtcagggagcatacctctcacctcgaggctgagctggaaaagcatatggccgctgcaagcgcagagtgtcagaattatgcaaaagaggtggctgggcttagacagctcctgctagaaagccagagtcaattggatgcagccaagtcagaagctcagaaacaaagtgacgagctggctctcgttagacagcaactgtccgaaatgaaatcacatgttgaagacggggacatcgccggggcacctgctagcagccccgaggctcccccagccgagcaggacccagttcaactgaagactcagctagaatggaccgaagctattttggaagatgagcagacacagagacagaagcttacagcggagtttgaagaagctcagacaagcgcatgccgattacaagaagaacttgaaaagttgcggactgcgggccctctggaaagcagcgagacggaagaagcctcgcaactgaaagagaggctcgaaaaagaaaaaaagctgacctcagacctgggccgggccgccacacgtctccaagagctgctgaaaactacacaagaacagcttgcacgggagaaggacaccgtaaagaagctgcaggaacaactggagaaggccgaagatggttcctcctcgaaagagggaactagcgtgtag

SEQ ID NO: 33832 - DNA, 903 bp, Artificial Sequence
  derived and/or modified sequence
atggacatctacgacacccagaccctgggcgtggtggtgttcggcggattcatggtggtttccgccataggcatctttttggtgtcaaccttttcaatgaaggagacttcttatgaggaggcccttgccaatcagaggaaagagatggctaaaacacatcatcaaaaggtagagaaaaaaaagaaagagaaaactgtcgaaaaaaaaggcaagacgaagaagaaggaggaaaagcctaacgggaagattcccgaccacgacccggcaccaaatgttacagttctcctccgcgagccagtgcgggctcctgccgtggctgtcgccccaacaccggtacaacctcctatcatagtggcccctgtagccaccgtccctgccatgccccaagaaaagttggctagttctcccaaagataagaaaaagaaggaaaagaaagtggccaaggtcgaaccagctgttagcagtgtcgtgaacagtatccaggtcctgaccagtaaagccgcaattctggaaactgcgcccaaggaagtcccgatggtggtggtgccccccgtgggagccaagggcaatactcctgccaccggaacaacccaggggaagaaggccgaggggacacaaaaccagagcaagaaagccgaaggggcacctaaccagggtagaaaagctgaaggcactcctaaccaggggaagaaaaccgaaggcactccaaaccaagggaagaaggcggaaggcacaccgaatcagggcaaaaaggcagaaggcacgccaaaccagggcaaaaaggctgaaggcgctcagaaccaaggaaagaaggtggacactaccccgaatcagggcaaaaaagtggaaggcgctcctacccagggacgcaaagcggagggcgctcaaaatcaggccaagtag

SEQ ID NO: 33833 - DNA, 2256 bp, Artificial Sequence
  derived and/or modified sequence
atggtgttcaacgagggcgaggcccagcggctgatcgagatcctgtctgagaaggcgggaattattcaggatacttggcataaggcaactcagaaaggcgatcctgttgccatactgaagagacaactggaagagaaggagaagctattagccacagagcaagaagatgccgctgtagcaaagagtaaacttagagaactcaacaaggaaatggctgccgagaaagccaaggcagctgcgggggaagctaaggtgaaaaagcagctagtggccagagagcaagaaataaccgctgtacaggcgaggatgcaggcatcctaccgcgaacatgttaaggaggtacagcagttacagggcaagatccgcacactccaggaacagctagagaatggccccaacacgcagctggccaggctgcaacaggagaatagcatcctgagagatgccctaaatcaggcaacctctcaggtggagtccaaacagaatgcagagctggccaaactgaggcaggagctttcaaaagttagcaaagagctggtcgaaaagagcgaagccgtgcgccaggatgagcagcagaggaaggctttggaggcgaaagcagcggcctttgagaaacaagttctccagctccaggcaagccacagagagtcagaagaagccctgcaaaagcggttagatgaagtctcacgcgagctttgtcacacccagtccagtcatgcatccctccgcgcagacgccgagaaagcccaggaacagcagcagcaaatggccgaactccattcaaagctccagagctcagaagccgaagtgcgctccaagtgtgaggaattgagcgggctgcatggacagctgcaggaagcgcgggccgagaactcacagttgacagagcggattcgttctatcgaggctttgctggaggcaggccaagctagagatgcgcaggacgtgcaggcctctcaggccgaagccgatcagcagcagactaggctgaaggagctggaatcgcaagtgtcgggtctggagaaagaagcgattgagctcagagaggccgtcgaacaacagaaggtcaagaacaacgacttgagggagaagaactggaaagctatggaagctctcgctacggctgagcaggcctgcaaggagaagctgctgagtctaacccaagctaaagaagaaagtgagaagcaactttgcctgattgaagctcagactatggaagctctactggcactactgcctgagctgagcgttttggcccaacagaattataccgagtggctgcaggacctaaaagagaagggtcccaccctgcttaagcatccacctgcgcctgcggaaccgtcgagtgacctggccagtaagctaagagaggccgaggagactcagtctacacttcaggccgagtgcgatcaatacagatcaatactggccgagaccgaagggatgctccgcgacctgcagaaatccgtggaagaggaagagcaggtttggcgtgccaaggtgggagccgcagaagaggaactacaaaagtccagagtgacggtgaaacacctcgaagagatcgtggaaaaacttaaaggtgaactggaatctagcgaccaggtgagggaacataccagtcatctagaagccgagttggaaaagcatatggccgcagccagcgccgagtgccagaactacgctaaggaagtggcaggcctccggcagctgctattggagagtcagagccagcttgacgctgctaagagcgaggctcagaagcaatctgacgaactggctctggtgaggcagcaacttagcgagatgaagtcccacgtcgaggacggagacatcgcgggggccccagcctcaagccctgaagcaccacccgcagagcaggatcctgttcaactgaagactcagctggaatggacagaagctatcctggaagatgagcagacacaacgccagaagctgactgccgagttcgaggaggcacagacatctgcctgccggttacaggaagagctggaaaagcttcgtaccgcaggaccccttgaaagctctgagacggaagaggcaagccagctgaaggagcggctcgaaaaggagaagaagttgacctccgaccttgggagagccgcaacaaggctccaggaactgttaaagacaactcaagagcagttagctagggagaaagatacagtgaagaagctgcaggagcagctggaaaaggccgaagacgggtccagttctaaggagggaacatcagtttag

SEQ ID NO: 33834 - DNA, 4233 bp, Artificial Sequence
  derived and/or modified sequence
atggacatctacgacacgcagactctgggcgttgtggttttcggaggattcatggttgtgtcagcgattggaattttcctcgttagcaccttttctatgaaagagacttcttacgaggaagctctggcaaatcagaggaaggagatggccaaaacccaccaccagaaggtggagaagaaaaaaaaggagaagacagtggaaaagaaggggaagactaagaagaaggaagagaaacctaacgggaaaatcccagaccacgatcccgctcccaatgtcaccgtcctgttgagagagcccgtacgggcacctgccgtcgccgttgcacctaccccggtgcagccacctataatcgtggctccggtggccaccgttcccgcaatgccacaggagaagcttgcttccagtccgaaagataaaaaaaaaaaggagaaaaaggtcgcgaaagtcgagcctgcagtctcaagcgtggttaatagcatacaagtgctcacctccaaggccgctatcctggagacggcccctaaagaggtacccatggtggtagtcccccctgttggcgctaaaggaaacactccagccacgggaaccactcagggtaagaaggctgagggaacgcagaaccagagcaagaaggcagagggcgcacctaatcagggtagaaaagccgagggcacccctaaccaggggaagaaaacagagggcactccaaatcaggggaagaaggccgagggcacacctaatcagggaaagaaggccgaaggcacaccaaatcaagggaagaaggctgagggcgctcagaaccaggggaaaaaggtcgacacaacacccaaccagggtaaaaaagtcgagggcgctccgactcagggccgaaaggctgagggcgctcaaaaccaggctaagaaggtggagggtgcacagaatcagggtaaaaaggccgagggggcacagaaccagggtaagaaaggcgaaggagctcaaaatcaaggcaaaaaggccgaaggcgcacaaaaccaggggaaaaaggccgagggagctcaaaaccagggcaaaaaggcagaaggggcacagaatcaggggaagaaggccgagggggctcagaatcaagggaaaaaggcagagggcgcacagaaccagggcaaaaagtccgaaggagctcaaaatcagggtaagaaggtggagggcgctcaaaaccaaggaaaaaaggccgagggcgcacaaaatcaggggaagaaggccgaaggggctcagaaccaaggcaaaaaggctgaaggagcgcagaaccaagggaagaaagctgagggagctcagaaccaggggaagaaggctgagggcgctcagaatcaggggaaaaaagccgaaggcgctcagaaccagggaaagaaagctgagggggcacagaatcaaggcaaaaaggtggagggggcacaaaatcaaggcaaaaaggctgagggcgctcaaaaccagggcaaaaaagctgagggtgcacaaaatcaaggcaaaaaggctgaaggcgctcagaatcaaggccaaaaaggtgaaggggctcaaaaccagggcaaaaagactgagggagctcagggcaagaaagccgagcgtagtcctaatcaaggtaagaagggagagggagcgcctatccaaggtaagaaagcggatagtgtggccaatcagggcaccaaggtcgagggcatcaccaaccaggggaagaaggcggagggaagcccttctgagggcaaaaaagccgaaggatcaccaaaccaggggaagaaagcggacgcggctgcgaatcaaggtaagaaaaccgagtctgcatcagttcaagggagaaacacagacgttgcccaaagccctgaggcccctaagcaggaagcccctgctaaaaaaaaaagcggcagcaagaagaagggggaacccggtcctccagacgcggacggtcctttgtatctcccttacaaaaccttagtgtccacagtgggtagcatggtttttaacgagggcgaggctcagagactaattgaaatccttagcgagaaggctgggattatccaggatacatggcataaagctacccaaaagggcgacccggttgccattctgaaacgacagctggaagagaaggagaagttgctggctaccgagcaggaggacgcagccgtcgccaaaagtaaactacgagagcttaacaaggagatggcggctgagaaagctaaagccgcagccggtgaggctaaggtgaagaaacaactagtcgctagagagcaggagatcactgccgtacaggcacgtatgcaagccagctaccgggaacacgtaaaagaggtgcaacagctgcagggaaagatacggacattacaagagcaactggagaacggcccaaacacccagttagcgaggctgcagcaggaaaattctattctccgtgacgcactcaaccaggctacatcccaagtggagtctaagcagaatgccgagctggccaaactgagacaagagctcagcaaagtgtccaaggagttggtggaaaaaagcgaagctgtccgacaggacgaacaacaacgcaaagccctcgaagcaaaggccgcagccttcgagaagcaggtgttgcagcttcaggcatcccacagggaatccgaagaagcattgcagaagagattagatgaagtttcccgcgagctgtgtcatacgcaatcctcccatgccagcttgcgggctgacgcagagaaagcccaggagcaacaacagcaaatggctgaactgcactccaagcttcagagttcagaagctgaggtgcggtccaagtgtgaggaactgtctggattgcatggccagctccaggaagcccgagccgagaatagccagttgacagaacgaataaggtcgatagaagccctactcgaggcagggcaagcccgagatgcccaagacgtacaggcctctcaggcggaggccgaccagcagcaaaccagactcaaagagctggagagccaggtgagcggcctcgagaaggaggccattgagctgagagaagctgtggaacagcagaaggtgaagaacaatgatctacgcgagaaaaattggaaggccatggaagcgctggcgacagcagaacaagcatgtaaggagaagctgctaagcctgacacaagctaaggaggagtctgaaaagcagttgtgtttgatcgaagcacaaaccatggaagcattgctggccctcctgcctgagctatctgtgctggcacagcagaactacaccgaatggcttcaggatttaaaggagaagggcccaacacttctcaagcacccccctgcaccagcagagccttcttccgatctggcctccaagttaagagaggctgaggaaacccaatctacactccaggcagagtgtgatcagtacaggtcaatactcgcagagaccgaaggcatgctgagggacctgcagaaaagtgttgaggaggaggagcaggtatggcgagccaaagtcggggcagctgaagaagagctccagaaaagccgagtcacagtgaagcacttggaagaaatcgtcgagaagttaaagggcgagttagaaagcagcgaccaggtcagggagcacactagccatttggaggcagagctggagaaacatatggccgcagcctcagctgagtgccagaactacgcaaaggaagtggcaggcctaagacagcttctgttagaatcgcagagtcaactcgacgccgcaaaatctgaagcacagaaacagtctgacgagctggctctggtgcgtcagcagctttctgagatgaagtcccatgtcgaggatggtgatattgccggagcacccgcaagttcccccgaggcgcctccggcagaacaggatccagttcagctcaagactcagcttgagtggaccgaggcgattttggaggatgaacaaactcagcgtcagaagttgacggcggaattcgaggaggcccagacttccgcatgccggctccaggaggagctggagaagctgaggacagcaggaccactggaaagcagcgaaacagaggaggcctctcagctgaaagagcggctggagaaagagaagaagctgacctcagacttaggacgcgcagccacccgtctgcaggagctgctgaagaccactcaagaacagctggcgcgtgagaaagatactgtgaagaagttgcaggagcagctcgagaaggcagaagatggctcctcttccaaagaagggaccagcgtgtag

SEQ ID NO: 33835 - DNA, 2934 bp, Artificial Sequence
  derived and/or modified sequence
atggatatctatgatacacaaaccctgggggtagtggttttcggcggtttcatggtcgtttcagcaatcggtatatttctcgtatccaccttcagcatgaaggagacatcctacgaggaagcccttgcgaatcagaggaaggagatggccaagacacaccatcagaaggttgaaaaaaagaagaaagagaaaaccgttgaaaagaaggggaagacaaaaaaaaaggaggaaaagccgaatgggaagatacctgaccacgacccagctccaaatgtaactgtgctgctccgggaaccagtgcgggctccagcagttgccgtcgctcccacaccagtgcaacctccaattattgtggcgccagtggccacggttcctgccatgccacaggagaagcttgcgtctagccccaaagacaaaaaaaagaaggaaaagaaggttgcaaaggtcgagccagccgtgagctcagtggtcaactctatccaggtgttgactagtaaagctgcaatcctggagactgcaccaaaagagggtaggaatactgacgttgcccagagccccgaagcacccaaacaggaagccccagcgaagaagaagagcggtagcaaaaagaaaggtccaccagacgctgatggccctctgtacctgccatacaagacgctagtgagcaccgtcggaagcatggtgttcaatgaaggcgaggcacagcgcctgatagaaatacttagtgaaaaggccggtataatccaggacacatggcataaagccacacagaaaggggacccagttgctatactcaagaggcagctggaagaaaaggagaagctcctcgccactgagcaggaagacgccgctgttgcaaagtccaaactcagagaactcaacaaagagatggccgcagaaaaagcaaaagctgccgcaggagaggcaaaagtgaagaaacaactggttgcccgagagcaagaaatcactgctgttcaggcaaggatgcaggccagctatagggaacatgtcaaggaagtgcagcagctgcagggcaaaatccgaacactgcaggaacaactggaaaacggacccaatacccagctggccagactgcagcaggagaattcaatcctaagagatgccctaaatcaggccactagccaagttgagagcaaacagaatgcagaactcgcaaaactgcgccaagaattgtccaaagtgtccaaggaactcgttgaaaaatccgaagccgtccgacaggacgagcagcagaggaaggctctcgaagctaaagcagctgcgtttgaaaagcaggtactgcaactgcaggcctctcatcgcgagtccgaggaggccctccagaagcgcctggatgaggtcagtagagagttgtgtcacacacaatcctcacacgcctccctgagagcagacgccgagaaggcccaggagcagcagcaacagatggccgaactgcactccaagcttcagagtagcgaagctgaggtgcgttctaaatgcgaagaattatccggactccatgggcagcttcaggaagccagagccgaaaatagtcagctgactgagaggatacgaagtatcgaggccctacttgaagccggtcaggctagggacgcccaagatgtgcaggcttctcaggctgaggcagatcagcaacagactcgtctcaaagagcttgaaagtcaagtgagcggactcgaaaaggaagccatcgagttaagggaggctgttgagcagcagaaggtgaagaataacgacctgcgcgagaagaattggaaagccatggaggccctggctactgccgaacaggcctgtaaagaaaaactgttgagtctgactcaggcaaaagaagagtcagaaaaacaactctgcctgatagaggctcagacgatggaagctctgctggccttactgcccgaattgagcgttttggcccagcagaactatacagagtggttacaggatctcaaagaaaagggcccaacgttgcttaagcaccctccggctccagccgagccaagttccgatttggccagcaaattacgtgaggccgaggaaactcagagcactctacaggccgaatgcgaccagtacagaagcatcttggctgaaacagaaggcatgctgagggacctccagaaatcggttgaagaggaggagcaagtgtggcgcgcaaaagtgggcgcagctgaggaggagctgcagaaaagccgtgttacggtcaagcacttggaagagattgtagagaagctgaaaggggagttggaaagctcggatcaggtccgcgagcacacctcacatctggaagcagagctcgagaagcacatggcggcagcctctgctgaatgccaaaattatgccaaggaagtcgccggtctgagacaactcctgctggagagccagtcccagctggacgcggctaaaagcgaagcccagaaacagtcagacgagctcgctctggtgagacagcaattatccgaaatgaaaagccacgtggaagacggggacatagctggagctccggcttcaagcccggaggcgcctccagcagagcaggaccctgtccagttgaaaacccagctagagtggaccgaggccatactggaagacgaacaaactcagcgacaaaagcttacggcggagttcgaagaggcccagaccagcgcttgtagactgcaagaggagttggaaaagctgagaacagccggacctctagaatcaagcgaaactgaggaagcgagccagctgaaggaacgactggagaaagaaaagaagctgacatcggatctgggcagagccgctacaagattgcaagaacttctgaagacaacccaagagcaattggcaagagaaaaagataccgtgaaaaagctgcaagaacaactggagaaggccgaggatgggagctctagcaaagaagggacctctgtgtag

SEQ ID NO: 33836 - DNA, 2934 bp, Artificial Sequence
  derived and/or modified sequence
atggatatctatgatacacagaccctcggggtagtagtattcggcggatttatggttgtgtctgccatcggaattttcctggtgagtactttctctatgaaggagacatcgtatgaagaggccctggccaatcaacggaaagaaatggccaaaactcaccatcagaaggtggaaaagaagaaaaaagagaagaccgtggagaagaaaggcaagacaaagaagaaggaggaaaaaccaaatgggaaaatacccgatcacgatcccgctcccaacgtgactgtgctgcttcgtgagcctgttcgggcacccgctgttgctgtggcaccgacacccgttcaacctcctataatagtcgctcctgtggcaactgttcctgctatgcctcaggaaaagctcgccagttcccccaaagacaagaaaaagaaagaaaaaaaggtcgccaaggtcgagccagccgtgagctcggtggtgaactccatccaggtgttgacttccaaggctgcaatcctcgaaacggccccaaaagagggcagaaacacagatgttgctcagtcccctgaagctccaaaacaggaggctccagcaaagaaaaagagtggttcaaaaaagaagggcccacccgacgcagacgggcctttgtatttgccatataaaacactcgtttccacagtcggatccatggtcttcaacgaaggggaggctcagaggctgattgaaatcctcagcgagaaagccggaatcattcaggatacgtggcataaggccacccagaaaggcgatccagttgccatccttaagagacagcttgaagagaaggaaaagctgctggccaccgaacaggaggatgcagccgtggctaagtcaaagcttcgggagctgaacaaggagatggctgccgaaaaggcaaaagcggcagcaggggaggcaaaagtgaaaaaacaactggtggcgagggagcaggagattactgcagtacaagcacgcatgcaagcctcctacagagagcacgtgaaagaggtgcaacagcttcagggaaagattcgcaccctccaggagcagctcgagaatggtccaaacacccaactcgcaagactgcagcaggagaactcaattctgagggatgcactgaatcaggcgacttcgcaggtagaatccaaacagaacgccgaactggccaaactgaggcaggaacttagcaaagttagcaaggagttggtggaaaagagcgaagccgtgcgccaggatgagcaacaacgaaaggctctggaggcaaaagctgcagctttcgaaaagcaggtgctgcagctgcaagcttctcatcgcgagtcggaggaggctttgcaaaaaagattagacgaggtgtctcgcgaactgtgccatactcagagttcacacgcctccttacgggcagacgcggaaaaagctcaggagcaacagcagcaaatggctgaacttcatagcaagctgcagagttcggaagcagaggtgcgtagcaaatgtgaggaattgagtgggctgcacggacaactgcaggaagccagagcagagaactcacaactcaccgagcggatacgtagtatcgaagcactcctagaggcgggtcaggcaagagatgcccaggacgtgcaggcctcccaggccgaggccgaccagcaacagacacggcttaaggaattagaatcacaggtgtccggattagaaaaagaagcgatagagttgcgggaggctgtggaacagcaaaaggtgaagaataatgatctgagggagaagaactggaaggccatggaagccttagcgacggccgagcaggcgtgtaaggaaaagctattgtccctgacgcaggcgaaagaggaatcagagaaacaactctgcctaattgaggctcagacaatggaggcactgctggccctgctgccagaactgagcgtgctcgcgcagcagaattacactgaatggctgcaggacctgaaggaaaagggacccaccctgctgaagcatccacccgctcctgccgagccttccagcgatctggcctctaagctgagggaagccgaagagacccagtccaccctccaggcagaatgtgatcagtatcggtcaattctggccgagaccgaaggaatgcttagagacctgcagaaaagcgtagaagaagaggagcaggtgtggagggcaaaagtcggagctgccgaggaggaactgcagaaatccagggttaccgttaagcatctggaggagatcgtggaaaaactgaaaggggaactggagtcgagcgatcaagtgcgggaacacaccagccacctagaggccgaactggagaagcatatggccgctgcttccgccgagtgccagaactacgcgaaagaggtagcaggcctcagacagctactattagagagtcaatctcaactggacgcagctaagtcggaggctcaaaaacagagcgacgaactggcactggtgcgacagcagttaagcgaaatgaaaagccatgtagaggacggggacattgccggtgctcccgcatccagcccagaggcccctcccgctgagcaggacccagttcagctgaaaacccaactggaatggacagaggcgatcttggaggacgagcagacccaacgccaaaaactgacagccgagttcgaggaagctcagaccagcgcgtgtcgccttcaggaagaactggagaagctgcgaaccgccggacctctggagtccagcgagaccgaagaggcctcccagcttaaagagagactagaaaaagaaaaaaaactgacatccgatctcggcagagccgctacacgcctacaggagcttcttaaaaccacacaggaacaactggctcgggaaaaagatactgtcaagaagctccaggagcagctcgaaaaagccgaggacggctcaagctccaaagagggtacatcggtgtag

SEQ ID NO: 33837 - DNA, 4233 bp, Artificial Sequence
  derived and/or modified sequence
atggacatctacgacacgcagacccttggagtggtggttttcggtgggttcatggtcgttagtgctataggaatttttttggtgtcaaccttctccatgaaagagacatcttacgaagaagcactggcaaaccagagaaaggaaatggccaagacacatcatcaaaaggtcgagaagaaaaagaaagaaaagaccgtagagaagaaaggcaaaacaaagaagaaagaagaaaaacccaatggcaagatcccagatcatgatccagcacctaacgttacagtgttactccgggagcccgtcagagcacccgctgtggcagtagctcccacacccgtgcagcctccaataatcgtggcacccgtggctactgtgcctgcgatgccacaagagaagttggcatcttcaccaaaggacaagaaaaaaaaggaaaaaaaggttgccaaggtcgagccggctgtgtcaagcgttgtaaactccattcaggtgttaacgagcaaggccgctatcctcgaaacggcacccaaagaagtgcccatggttgtggttcctccagtcggggctaaggggaatacacccgctaccggcacgacacaaggaaaaaaggcagaaggcacacagaatcagagcaaaaaggcagaaggggcacccaaccaggggaggaaggctgagggaactcccaatcaaggaaagaaaaccgagggcacgcccaatcagggaaaaaaggcagagggaaccccaaaccagggtaagaaagctgaaggtacacctaaccaagggaaaaaggccgaaggggctcagaaccagggcaaaaaagtggatactacccccaaccaaggcaaaaaagtggagggtgcccctacccagggccgaaaggctgagggcgcacagaatcaggctaaaaaggttgagggcgctcaaaaccaggggaagaaagccgagggcgctcagaatcagggcaaaaagggagaaggtgcccaaaaccaaggcaagaaggccgaaggggcacagaaccagggaaaaaaagccgagggcgctcaaaaccagggtaagaaggcagagggggcacaaaaccaaggcaaaaaggctgaaggggctcagaaccaaggaaaaaaagctgagggagcccaaaatcagggaaagaaatcagagggcgctcagaaccagggtaagaaagtggagggtgcccaaaaccagggaaagaaggccgagggtgctcaaaaccaaggaaaaaaagcagagggcgctcaaaaccaggggaaaaaggccgagggcgcacagaaccaggggaagaaagctgagggcgctcagaatcagggcaaaaaggcagagggtgctcagaatcaggggaagaaggccgagggggcacagaaccaaggcaaaaaagctgaaggcgcacagaaccagggcaagaaggttgagggggcacaaaaccagggcaagaaagccgaaggcgcacagaaccagggaaagaaagccgaaggagcccagaatcaggggaaaaaggccgaaggtgcacagaatcaggggcagaaaggagaaggggcacagaaccagggcaagaaaaccgaaggggctcagggaaagaaggcagaacgtagccctaatcagggtaaaaaaggcgaaggggcaccaattcagggaaagaaagcggactctgtcgcaaaccagggaaccaaggtggagggaataaccaaccaggggaagaaggcagaagggagtccctccgagggaaaaaaggctgaagggtcccctaaccagggaaaaaaagcggatgctgccgctaaccaaggaaaaaaaacagaatcagctagcgtccagggaagaaacacagatgtcgcccaaagtcccgaagcgcctaaacaggaggcaccggcaaaaaagaagagtgggtcgaaaaagaagggtgagccgggacctccggatgccgatggccctctgtatctgccttataagactctggtgagtaccgtgggatcaatggttttcaacgaaggggaggcccagcgcctgatcgaaatactgagtgaaaaagctgggatcatccaagatacgtggcacaaggctactcagaagggcgatcccgtagcaatcctgaaaagacagctcgaagagaaggagaagctgctggccactgaacaggaggacgctgctgtcgccaaaagtaaactacgtgagcttaataaggagatggcagccgaaaaagccaaagccgcagcgggagaagctaaggttaagaagcagcttgtggctcgggaacaggagataaccgcggtccaagcgaggatgcaggcgtcttaccgagagcacgtaaaggaggttcaacagctgcagggtaagatcaggactctccaagaacagctggagaacggtccaaatacccaactagcaagattgcagcaggagaattccatcctcagggacgcactaaaccaggctacaagccaggtggagagcaagcagaatgccgagctggcgaagctgcggcaagaattgtctaaagtctcaaaagagcttgtggaaaaatcagaagctgttcggcaggatgagcagcagcgaaaggcactcgaggcaaaagctgctgcttttgaaaaacaggttctacaactgcaagcctcacacagggagagcgaagaagcgttgcagaagaggcttgatgaagtctcaagagagctttgtcatacgcagtccagtcacgcctccctcagggccgacgcggagaaggctcaggagcaacagcaacagatggcggagctacactctaagctgcagtcctcggaagctgaggtgaggtctaagtgcgaagagctgagtgggctccacgggcagctccaggaggcaagggctgagaatagccagctcactgagcgcattaggagcatagaggctctgctcgaggccggacaagcacgggatgctcaggacgttcaggcttcacaggccgaggccgaccagcagcagactagattaaaggagctcgaatcccaagtgagcggattggaaaaagaagccattgaactcagggaagctgtggaacagcagaaagtaaaaaacaatgacctgagagagaagaattggaaagcaatggaagccctggccaccgctgagcaggcatgtaaagagaagctcctatccctcacgcaggcaaaagaggagtctgaaaagcaactctgtctgatcgaggcacagactatggaagcactcctcgccctgctgcctgagttgtcagtgttggcgcaacaaaattatacagaatggctccaagacctaaaggaaaaaggcccaacactgcttaagcacccacccgcacccgcagagccttctagcgacctagcatcgaagctccgagaggccgaagagactcaatctacattgcaagccgagtgtgaccaataccggtcaattcttgccgagaccgaaggaatgctgagagatttgcagaagtcagtggaggaagaagagcaagtatggcgcgctaaagtcggagccgctgaagaggagctgcagaaatctcgggtaactgtaaagcatctggaagaaatcgtcgagaagctcaaaggcgagcttgaatcttccgaccaggtgcgcgaacacacctctcatctggaagctgagctagagaaacatatggcggctgcttccgcagagtgccagaattatgccaaggaagttgccggacttagacagttactcttggagtctcaaagccagctggacgcagctaagagcgaggcccagaagcagtctgatgagcttgcactggtgcgacagcagctttctgagatgaagtcccatgtggaggacggcgatatagcaggcgctcctgcatctagtccagaagctcctccagctgagcaagatccggtgcagctgaagacccagctagagtggacagaggctatccttgaagatgaacagacacagaggcagaagctcactgcggaattcgaggaagctcagacatcagcgtgtaggctacaagaggagctcgagaagttacggacagctggcccactggaatcctcagagactgaggaagccagccagctcaaagagaggttggagaaggagaagaagctgacatcagacctagggagagccgctacacgactgcaggagctactaaaaacaactcaagagcagctagccagggaaaaagacacggtaaaaaagctccaagagcagctggaaaaggctgaagatggttctagcagcaaggaggggacatccgtttag

SEQ ID NO: 33838 - DNA, 903 bp, Artificial Sequence
  derived and/or modified sequence
atggacatttatgatacacaaactttgggcgtggttgtattcggaggctttatggttgtatccgctattggtatctttcttgtttctacgttcagcatgaaggagacgtcctacgaggaggctcttgctaaccaacgcaaagagatggcaaaaacacaccaccagaaggttgagaagaagaaaaaggagaaaacggtggagaaaaaaggcaaaaccaaaaagaaggaggaaaaacccaatggaaaaatcccagatcatgacccggcacctaacgtgaccgtgcttctacgggaacctgtgagagccccagctgtggcagtggccccaacccctgtgcagcctccaatcattgttgccccagtcgctacagtccccgcaatgccacaggaaaagctggcgagcagtccaaaggacaaaaaaaagaaagaaaagaaagtggccaaggtggaaccagccgtctcgtcagtggtgaactctattcaagtgctgacctcaaaagctgccatcctggaaaccgccccaaaggaagttcctatggttgtggttcccccagtaggcgctaaaggtaacaccccggctactggaaccacacaaggtaagaaggccgagggaacccagaatcaatctaaaaaagcggagggcgcacccaatcaaggtaggaaagcagagggcactcccaatcaaggcaagaagacagagggaacccccaatcagggcaaaaaggccgagggcaccccgaatcaggggaagaaggctgaaggcacgccgaaccagggtaaaaaggctgaaggggctcagaaccaaggcaaaaaggtagatactacccccaatcagggcaagaaggtggagggtgcgcctacacagggtaggaaggcggagggggctcagaatcaggccaaatag

SEQ ID NO: 33839 - DNA, 2256 bp, Artificial Sequence
  derived and/or modified sequence
atggtgtttaacgaaggcgaggcccagcggcttattgaaattttgtccgagaaggctgggatcatccaggatacatggcacaaggccactcaaaagggtgacccggtggctatcttgaaacggcagctcgaagagaaggaaaaactgctcgccaccgaacaggaggacgcggcagtggcaaagtccaagctgagagagcttaataaggagatggcggctgaaaaagctaaggcagctgccggagaagccaaggtgaagaagcagctcgtggctcgtgaacaagaaatcacagcagtgcaggctcgtatgcaggcgagttaccgggagcacgtcaaggaggtacaacaactgcagggcaagatcaggacactccaggagcagttggagaacggaccaaacactcagcttgccaggctgcagcaggaaaactctatattgagagacgctctcaatcaggcaaccagccaggtggaaagtaaacagaacgcagaactggccaagctaagacaggaactgtccaaagtgagcaaagaactggtcgaaaagtctgaagccgtgagacaagatgaacagcagagaaaagcgctggaggctaaagccgcagcattcgaaaagcaagtactgcaactgcaggcctcccatcgtgaatcagaggaggccctccaaaagcgcctcgacgaagtgtccagggaattgtgtcacacccagtctagccatgcctctctgagagccgacgctgagaaggcccaggaacaacagcaacagatggccgaactccattcgaagctccagtcctctgaggctgaggtgagaagtaagtgcgaagagctttctgggctacatggacagctccaggaggcaagagctgagaactcccagctcactgaacgcatccgtagcatcgaggccctgttagaggctgggcaggcaagggacgcacaggatgttcaggccagccaagcggaagccgatcaacagcagacccgtctgaaggagctcgagtcgcaggtctcgggtctggagaaggaagcaatcgagttaagggaggccgtcgagcagcagaaagtgaaaaataacgatctgcgagagaagaattggaaagccatggaggcgctggccacggcagaacaggcttgtaaggagaagttattgtcactgactcaagccaaggaggagtctgagaagcagttgtgtctcatcgaggcccaaaccatggaggcattacttgcactactgccggaactcagcgtactggcccagcaaaattacactgagtggctgcaagaccttaaagaaaaaggccctactctgctgaagcacccccctgctccagccgagccttcttctgaccttgcttcaaaattaagggaggcggaagagacccagtcaactctccaagccgagtgcgatcagtaccgctccattctggccgagactgaaggaatgcttagagatctgcagaaaagcgtcgaggaggaagagcaggtctggcgtgcaaaggtcggcgcagccgaagaggaactgcagaagtcacgggtaactgttaagcacctggaagaaattgtagaaaagctgaagggcgaactggagtcttctgatcaggtgcgggaacatacttctcacctcgaagccgaactggagaaacatatggctgctgcaagcgcagagtgtcaaaattatgccaaagaagtagcgggtctccgtcagctcctcttggagagtcagagccagttagacgcagctaagtccgaggctcaaaagcagagcgacgagctggcgctcgtcaggcaacagctgagtgaaatgaagtctcacgtagaggacggtgatatcgccggagccccagcttcgagccccgaagccccacctgccgagcaggacccagtacagcttaaaacacagttggagtggaccgaagccatattggaggatgaacaaactcagcgccagaagttgaccgcggaattcgaagaggcccagacatcggcctgtcggcttcaggaagagctggagaaactaagaactgccggtcccctggaatcttccgagaccgaggaggcgtctcaattgaaagagcggctggagaaggagaaaaaactgacttctgatctcgggcgtgctgctaccagactccaagagctactcaaaaccactcaagagcagctcgccagagagaaggatactgttaagaagctgcaggagcagcttgaaaaagctgaggatgggtcgtccagcaaggaaggtacttccgtctag

SEQ ID NO: 33840 - DNA, 4737 bp, Artificial Sequence
  derived and/or modified sequence
atggatatttacgacactcaaaccttgggggttgtggtctttggaggattcatggttgtttctgccattggcatcttcctggtgtcgactttctccatgaaggaaacgtcatatgaagaagccctagccaaccagcgcaaggagatggcgaaaactcaccaccagaaagtcgagaagaaaaagaaggagaaaacagtggagaagaaaggaaagaccaagaaaaaggaagagaaacctaatgggaagatacctgatcatgatccagcccccaatgtgactgtcctccttcgagaaccagtgcgggctcctgctgtggctgtggctccaaccccagtgcagccccccattatcgttgctcctgtcgccacagttccagccatgccccaggagaagctggcctcctcccccaaggacaaaaagaagaaggagaaaaaagtggcaaaagtggaaccagctgtcagctctgtagtgaattccatccaggttctcacttcgaaggctgccatcttggaaactgctcccaaggaggtgccgatggtggtggtgcccccagtgggtgccaagggcaacacaccagccactggcactactcagggcaaaaaggcggaggggactcagaatcaaagcaaaaaggctgaaggagccccaaaccagggcagaaaggcagagggaaccccaaaccagggcaaaaagacagagggaaccccaaaccaagggaaaaaggcagagggaaccccaaaccaaggcaaaaaggcagaaggaaccccaaaccaaggcaaaaaggcggagggggcccagaaccagggtaaaaaggtagatacaaccccaaaccaggggaaaaaggtggagggggccccaacccagggcagaaaggccgagggggctcagaaccaggccaaaaaggtagaaggggcccagaaccagggcaaaaaggcagagggggcccagaatcagggcaaaaagggagagggggcccagaaccagggcaagaaggccgagggggcccagaatcagggcaagaaggccgagggggcccagaatcagggcaagaaggccgagggggcccagaatcagggcaagaaggccgagggggcccagaatcagggcaagaaggctgagggggctcagaaccagggcaaaaagtccgagggggctcagaaccagggcaaaaaagtagaaggggcccagaaccagggcaagaaggctgagggtgcccagaaccagggcaaaaaggccgagggggcccagaatcagggcaaaaaggccgagggggcccagaaccagggcaagaaggccgagggggcccagaaccagggcaagaaggccgagggggcccagaaccagggcaagaaggccgagggggcccagaaccagggcaagaaggccgagggtgctcagaaccagggcaaaaaagtagaaggggcccagaaccagggcaagaaggctgagggggcccagaaccagggcaagaaggccgagggggctcagaaccagggcaaaaaggccgagggagcccagaaccagggccaaaaaggagagggagcccagaatcagggtaaaaagacagaaggggctcagggcaaaaaggcagaaaggagtcccaaccaaggcaaaaaaggagagggagctcccatccagggcaaaaaggcagattcggttgctaatcagggcacaaaggtagagggtattacaaaccaggggaaaaaagcagaagggtcccccagtgaaggcaaaaaggcagaagggtcccccaaccaaggcaaaaaggcagacgcagctgccaatcagggtaaaaagacagagtcagcttctgtccagggcagaaatacagatgtggcccagagcccagaggcaccaaagcaagaggctcctgccaagaagaagtctggttcaaagaaaaaaggtgagcctgggcccccagatgccgacggccctctctacctcccctacaagacgctggtctccacggttgggagcatggtgttcaacgagggcgaggcccagcggctcatcgagatcctgtctgagaaggctggcatcattcaggacacctggcacaaggccactcagaagggtgaccctgtggcgattctgaaacgccagctggaagagaaggaaaaactgctggccacagaacaggaagatgcggctgtcgccaagagcaaactgagggagctcaacaaggagatggcagcagaaaaggccaaagcagcagccggggaggccaaagtgaaaaagcagctggtggcccgggagcaggagatcacggctgtgcaggcacgcatgcaggccagctaccgggagcacgtgaaggaggtgcagcagctgcagggcaagatccggactcttcaggagcagctggagaatggccccaacacgcagctggcccgcctgcagcaggagaactccatcctgcgggatgccttgaaccaggccacgagccaggtggagagcaagcagaacgcagagctggccaagcttcggcaggagctcagcaaggtcagcaaagagctggtggagaagtcagaggctgtgcggcaagatgagcagcagcggaaagctctggaagccaaggcagctgccttcgagaagcaggtcctgcagctgcaggcgtcccacagggagagtgaggaggccctgcagaagcgcctggacgaggtcagccgggagctgtgccacacgcagagcagccacgccagcctccgggcggatgccgagaaggcccaggagcaacagcagcagatggccgagctgcacagcaagttacagtcctccgaggcggaggtgcgcagcaaatgcgaggagctgagtggcctccacgggcagctccaggaggccagggcggagaactcccagctcacagagagaatccgttccattgaggccctgctggaggcgggccaggcgcgggatgcccaggacgtccaggccagccaggcggaggctgaccagcagcagactcgcctcaaggagctggagtcccaggtgtcgggtctggagaaggaggccatcgagctcagggaggccgtcgagcagcagaaagtgaagaacaatgacctccgggagaagaactggaaggccatggaggcactggccacggccgagcaggcctgcaaggagaagctgctctccctgacccaggccaaggaggaatcggagaagcagctctgtctgattgaggcgcagaccatggaggccctgctggctctgctcccagaactctctgtcttggcacaacagaattacaccgagtggctgcaggatctcaaagagaaaggccccacgctgctgaagcacccgccagctcccgcggagccctcctcggacctggcctccaagttgagggaggccgaggagacgcagagcacactgcaggccgagtgtgaccagtaccgcagcatcctggcggagacggagggcatgctcagagacctgcagaagagcgtggaggaggaggagcaggtgtggagggccaaggtgggcgccgcagaggaggagctccagaagtcccgggtcacagtgaagcatctcgaagagattgtagagaagctaaaaggagaacttgaaagttcggaccaggtgagggagcacacgtcgcatttggaggcagagctggaaaagcacatggcggccgccagcgccgagtgccagaactacgccaaggaggtggcagggctgaggcaacttctcctagaatctcaatctcagctcgatgccgccaagagcgaagcccagaaacagagcgatgagcttgccctggtcaggcagcagttgagtgaaatgaagagccacgtagaggatggtgacatagctggggccccagcttcctccccagaggcgcccccagccgagcaggaccccgttcagctgaagacgcagctggagtggacagaagccatcctggaggatgagcagacacagcggcagaagctcacggccgagtttgaggaggctcagacctcggcatgtcggttacaagaagaattggagaagctccgcacagccggccccctagagtcttcagaaacagaggaggcctcacagctgaaggagagactagaaaaagagaagaagttaacaagtgacctggggcgcgccgccacgagactgcaggagcttctgaagacgacccaggagcagctggcaagggagaaggacacggtgaagaagctgcaggaacagctggaaaaggcagaggacggcagcagctcaaaggagggcacctctgtctgagtttcctctttggaaaaagaagttactgttcaacttaccaaaatgccttacacattccttacaaataaaccaaccaacctacacagcgttatccaggcccaacttccggtagctccgagagaagccatgagagacaagtctcttagagccacagaagtagaccttccagagccccagtttgtaaatgaacctgtgtcacatttgataaacactatcctgggcgcagccccgggccaccgccgagtgacgccaaagccctggttgactctgacagccccgtgggtgtgtgggaggccgggcgctctggggtctgtctgtcagtgcaatcgtttagtgttttttcagtggggcggggcgggaagcgggtgggaccgggcagccagttctcaaaggctgtggggccgactggaggccacagcccctcacccctagacgttgccaaccagaactgacgtgtgacctcctgggtgttgatgccattaaaaccaacgttggtgcccggtg

SEQ ID NO: 33841 - DNA, 3727 bp, Artificial Sequence
  derived and/or modified sequence
gaaggcaggaggcggcgatcccggcggagggggccgttcgccagctctgaggcagaaagtgccacgactccacacgcgcgcacgcagccagcgagcggccggagcggacggcagacggggcgggcggcgtcagggtcgcagcgtctacagctgctcgggggcggtttcttggcggaggcttggccggctcctctctcccggctccgcggcggctgcgaaggcggcggctcctgccctctcgctttccctctcgcgtctctggctgcaggtgaaaggaaagcaagccaggatggatatttacgacactcaaaccttgggggttgtggtctttggaggattcatggttgtttctgccattggcatcttcctggtgtcgactttctccatgaaggaaacgtcatatgaagaagccctagccaaccagcgcaaggagatggcgaaaactcaccaccagaaagtcgagaagaaaaagaaggagaaaacagtggagaagaaaggaaagaccaagaaaaaggaagagaaacctaatgggaagatacctgatcatgatccagcccccaatgtgactgtcctccttcgagaaccagtgcgggctcctgctgtggctgtggctccaaccccagtgcagccccccattatcgttgctcctgtcgccacagttccagccatgccccaggagaagctggcctcctcccccaaggacaaaaagaagaaggagaaaaaagtggcaaaagtggaaccagctgtcagctctgtagtgaattccatccaggttctcacttcgaaggctgccatcttggaaactgctcccaaggagggcagaaatacagatgtggcccagagcccagaggcaccaaagcaagaggctcctgccaagaagaagtctggttcaaagaaaaaagggcccccagatgccgacggccctctctacctcccctacaagacgctggtctccacggttgggagcatggtgttcaacgagggcgaggcccagcggctcatcgagatcctgtctgagaaggctggcatcattcaggacacctggcacaaggccactcagaagggtgaccctgtggcgattctgaaacgccagctggaagagaaggaaaaactgctggccacagaacaggaagatgcggctgtcgccaagagcaaactgagggagctcaacaaggagatggcagcagaaaaggccaaagcagcagccggggaggccaaagtgaaaaagcagctggtggcccgggagcaggagatcacggctgtgcaggcacgcatgcaggccagctaccgggagcacgtgaaggaggtgcagcagctgcagggcaagatccggactcttcaggagcagctggagaatggccccaacacgcagctggcccgcctgcagcaggagaactccatcctgcgggatgccttgaaccaggccacgagccaggtggagagcaagcagaacgcagagctggccaagcttcggcaggagctcagcaaggtcagcaaagagctggtggagaagtcagaggctgtgcggcaagatgagcagcagcggaaagctctggaagccaaggcagctgccttcgagaagcaggtcctgcagctgcaggcgtcccacagggagagtgaggaggccctgcagaagcgcctggacgaggtcagccgggagctgtgccacacgcagagcagccacgccagcctccgggcggatgccgagaaggcccaggagcaacagcagcagatggccgagctgcacagcaagttacagtcctccgaggcggaggtgcgcagcaaatgcgaggagctgagtggcctccacgggcagctccaggaggccagggcggagaactcccagctcacagagagaatccgttccattgaggccctgctggaggcgggccaggcgcgggatgcccaggacgtccaggccagccaggcggaggctgaccagcagcagactcgcctcaaggagctggagtcccaggtgtcgggtctggagaaggaggccatcgagctcagggaggccgtcgagcagcagaaagtgaagaacaatgacctccgggagaagaactggaaggccatggaggcactggccacggccgagcaggcctgcaaggagaagctgctctccctgacccaggccaaggaggaatcggagaagcagctctgtctgattgaggcgcagaccatggaggccctgctggctctgctcccagaactctctgtcttggcacaacagaattacaccgagtggctgcaggatctcaaagagaaaggccccacgctgctgaagcacccgccagctcccgcggagccctcctcggacctggcctccaagttgagggaggccgaggagacgcagagcacactgcaggccgagtgtgaccagtaccgcagcatcctggcggagacggagggcatgctcagagacctgcagaagagcgtggaggaggaggagcaggtgtggagggccaaggtgggcgccgcagaggaggagctccagaagtcccgggtcacagtgaagcatctcgaagagattgtagagaagctaaaaggagaacttgaaagttcggaccaggtgagggagcacacgtcgcatttggaggcagagctggaaaagcacatggcggccgccagcgccgagtgccagaactacgccaaggaggtggcagggctgaggcaacttctcctagaatctcaatctcagctcgatgccgccaagagcgaagcccagaaacagagcgatgagcttgccctggtcaggcagcagttgagtgaaatgaagagccacgtagaggatggtgacatagctggggccccagcttcctccccagaggcgcccccagccgagcaggaccccgttcagctgaagacgcagctggagtggacagaagccatcctggaggatgagcagacacagcggcagaagctcacggccgagtttgaggaggctcagacctcggcatgtcggttacaagaagaattggagaagctccgcacagccggccccctagagtcttcagaaacagaggaggcctcacagctgaaggagagactagaaaaagagaagaagttaacaagtgacctggggcgcgccgccacgagactgcaggagcttctgaagacgacccaggagcagctggcaagggagaaggacacggtgaagaagctgcaggaacagctggaaaaggcagaggacggcagcagctcaaaggagggcacctctgtctgagtttcctctttggaaaaagaagttactgttcaacttaccaaaatgccttacacattccttacaaataaaccaaccaacctacacagcgttatccaggcccaacttccggtagctccgagagaagccatgagagacaagtctcttagagccacagaagtagaccttccagagccccagtttgtaaatgaacctgtgtcacatttgataaacactatcctgggcgcagccccgggccaccgccgagtgacgccaaagccctggttgactctgacagccccgtgggtgtgtgggaggccgggcgctctggggtctgtctgtcagtgcaatcgtttagtgttttttcagtggggcggggcgggaagcgggtgggaccgggcagccagttctcaaaggctgtggggccgactggaggccacagcccctcacccctagacgttgccaaccagaactgacgtgtgacctcctgggtgttgatgccattaaaaccaacgttggtgcccggtg

SEQ ID NO: 33842 - DNA, 3792 bp, Artificial Sequence
  derived and/or modified sequence
cggcgatcccggcggagggggccgttcgccagctctgaggcagaaagtgccacgactccacacgcgcgcacgcagccagcgagcggccggagcggacggcagacggggcgggcggcgtcagggtcgcagcgtctacagctgctcgggggcggtttcttggcggaggcttggccggctcctctctcccggctccgcggcggctgcgaaggcggcggctcctgccctctcgctttccctctcgcgtctctggctgcagaaagaagcttccggttctgaggtcctggaggtgccatttccctctctgttgaagcaaaggccggggcagacctcctagtgaaaggaaagcaagccaggatggatatttacgacactcaaaccttgggggttgtggtctttggaggattcatggttgtttctgccattggcatcttcctggtgtcgactttctccatgaaggaaacgtcatatgaagaagccctagccaaccagcgcaaggagatggcgaaaactcaccaccagaaagtcgagaagaaaaagaaggagaaaacagtggagaagaaaggaaagaccaagaaaaaggaagagaaacctaatgggaagatacctgatcatgatccagcccccaatgtgactgtcctccttcgagaaccagtgcgggctcctgctgtggctgtggctccaaccccagtgcagccccccattatcgttgctcctgtcgccacagttccagccatgccccaggagaagctggcctcctcccccaaggacaaaaagaagaaggagaaaaaagtggcaaaagtggaaccagctgtcagctctgtagtgaattccatccaggttctcacttcgaaggctgccatcttggaaactgctcccaaggagggcagaaatacagatgtggcccagagcccagaggcaccaaagcaagaggctcctgccaagaagaagtctggttcaaagaaaaaagggcccccagatgccgacggccctctctacctcccctacaagacgctggtctccacggttgggagcatggtgttcaacgagggcgaggcccagcggctcatcgagatcctgtctgagaaggctggcatcattcaggacacctggcacaaggccactcagaagggtgaccctgtggcgattctgaaacgccagctggaagagaaggaaaaactgctggccacagaacaggaagatgcggctgtcgccaagagcaaactgagggagctcaacaaggagatggcagcagaaaaggccaaagcagcagccggggaggccaaagtgaaaaagcagctggtggcccgggagcaggagatcacggctgtgcaggcacgcatgcaggccagctaccgggagcacgtgaaggaggtgcagcagctgcagggcaagatccggactcttcaggagcagctggagaatggccccaacacgcagctggcccgcctgcagcaggagaactccatcctgcgggatgccttgaaccaggccacgagccaggtggagagcaagcagaacgcagagctggccaagcttcggcaggagctcagcaaggtcagcaaagagctggtggagaagtcagaggctgtgcggcaagatgagcagcagcggaaagctctggaagccaaggcagctgccttcgagaagcaggtcctgcagctgcaggcgtcccacagggagagtgaggaggccctgcagaagcgcctggacgaggtcagccgggagctgtgccacacgcagagcagccacgccagcctccgggcggatgccgagaaggcccaggagcaacagcagcagatggccgagctgcacagcaagttacagtcctccgaggcggaggtgcgcagcaaatgcgaggagctgagtggcctccacgggcagctccaggaggccagggcggagaactcccagctcacagagagaatccgttccattgaggccctgctggaggcgggccaggcgcgggatgcccaggacgtccaggccagccaggcggaggctgaccagcagcagactcgcctcaaggagctggagtcccaggtgtcgggtctggagaaggaggccatcgagctcagggaggccgtcgagcagcagaaagtgaagaacaatgacctccgggagaagaactggaaggccatggaggcactggccacggccgagcaggcctgcaaggagaagctgctctccctgacccaggccaaggaggaatcggagaagcagctctgtctgattgaggcgcagaccatggaggccctgctggctctgctcccagaactctctgtcttggcacaacagaattacaccgagtggctgcaggatctcaaagagaaaggccccacgctgctgaagcacccgccagctcccgcggagccctcctcggacctggcctccaagttgagggaggccgaggagacgcagagcacactgcaggccgagtgtgaccagtaccgcagcatcctggcggagacggagggcatgctcagagacctgcagaagagcgtggaggaggaggagcaggtgtggagggccaaggtgggcgccgcagaggaggagctccagaagtcccgggtcacagtgaagcatctcgaagagattgtagagaagctaaaaggagaacttgaaagttcggaccaggtgagggagcacacgtcgcatttggaggcagagctggaaaagcacatggcggccgccagcgccgagtgccagaactacgccaaggaggtggcagggctgaggcaacttctcctagaatctcaatctcagctcgatgccgccaagagcgaagcccagaaacagagcgatgagcttgccctggtcaggcagcagttgagtgaaatgaagagccacgtagaggatggtgacatagctggggccccagcttcctccccagaggcgcccccagccgagcaggaccccgttcagctgaagacgcagctggagtggacagaagccatcctggaggatgagcagacacagcggcagaagctcacggccgagtttgaggaggctcagacctcggcatgtcggttacaagaagaattggagaagctccgcacagccggccccctagagtcttcagaaacagaggaggcctcacagctgaaggagagactagaaaaagagaagaagttaacaagtgacctggggcgcgccgccacgagactgcaggagcttctgaagacgacccaggagcagctggcaagggagaaggacacggtgaagaagctgcaggaacagctggaaaaggcagaggacggcagcagctcaaaggagggcacctctgtctgagtttcctctttggaaaaagaagttactgttcaacttaccaaaatgccttacacattccttacaaataaaccaaccaacctacacagcgttatccaggcccaacttccggtagctccgagagaagccatgagagacaagtctcttagagccacagaagtagaccttccagagccccagtttgtaaatgaacctgtgtcacatttgataaacactatcctgggcgcagccccgggccaccgccgagtgacgccaaagccctggttgactctgacagccccgtgggtgtgtgggaggccgggcgctctggggtctgtctgtcagtgcaatcgtttagtgttttttcagtggggcggggcgggaagcgggtgggaccgggcagccagttctcaaaggctgtggggccgactggaggccacagcccctcacccctagacgttgccaaccagaactgacgtgtgacctcctgggtgttgatgccattaaaaccaacgttggtgcccggtg

SEQ ID NO: 33843 - DNA, 5041 bp, Artificial Sequence
  derived and/or modified sequence
cacgactccacacgcgcgcacgcagccagcgagcggccggagcggacggcagacggggcgggcggcgtcagggtcgcagcgtctacagctgctcgggggcggtttcttggcggaggcttggccggctcctctctcccggctccgcggcggctgcgaaggcggcggctcctgccctctcgctttccctctcgcgtctctggctgcagaaagaagcttccggttctgaggtcctggaggtgccatttccctctctgttgaagcaaaggccggggcagacctcctagtgaaaggaaagcaagccaggatggatatttacgacactcaaaccttgggggttgtggtctttggaggattcatggttgtttctgccattggcatcttcctggtgtcgactttctccatgaaggaaacgtcatatgaagaagccctagccaaccagcgcaaggagatggcgaaaactcaccaccagaaagtcgagaagaaaaagaaggagaaaacagtggagaagaaaggaaagaccaagaaaaaggaagagaaacctaatgggaagatacctgatcatgatccagcccccaatgtgactgtcctccttcgagaaccagtgcgggctcctgctgtggctgtggctccaaccccagtgcagccccccattatcgttgctcctgtcgccacagttccagccatgccccaggagaagctggcctcctcccccaaggacaaaaagaagaaggagaaaaaagtggcaaaagtggaaccagctgtcagctctgtagtgaattccatccaggttctcacttcgaaggctgccatcttggaaactgctcccaaggaggtgccgatggtggtggtgcccccagtgggtgccaagggcaacacaccagccactggcactactcagggcaaaaaggcggaggggactcagaatcaaagcaaaaaggctgaaggagccccaaaccagggcagaaaggcagagggaaccccaaaccagggcaaaaagacagagggaaccccaaaccaagggaaaaaggcagagggaaccccaaaccaaggcaaaaaggcagaaggaaccccaaaccaaggcaaaaaggcggagggggcccagaaccagggtaaaaaggtagatacaaccccaaaccaggggaaaaaggtggagggggccccaacccagggcagaaaggccgagggggctcagaaccaggccaaaaaggtagaaggggcccagaaccagggcaaaaaggcagagggggcccagaatcagggcaaaaagggagagggggcccagaaccagggcaagaaggccgagggggcccagaatcagggcaagaaggccgagggggcccagaatcagggcaagaaggccgagggggcccagaatcagggcaagaaggccgagggggcccagaatcagggcaagaaggctgagggggctcagaaccagggcaaaaagtccgagggggctcagaaccagggcaaaaaagtagaaggggcccagaaccagggcaagaaggctgagggtgcccagaaccagggcaaaaaggccgagggggcccagaatcagggcaaaaaggccgagggggcccagaaccagggcaagaaggccgagggggcccagaaccagggcaagaaggccgagggggcccagaaccagggcaagaaggccgagggggcccagaaccagggcaagaaggccgagggtgctcagaaccagggcaaaaaagtagaaggggcccagaaccagggcaagaaggctgagggggcccagaaccagggcaagaaggccgagggggctcagaaccagggcaaaaaggccgagggagcccagaaccagggccaaaaaggagagggagcccagaatcagggtaaaaagacagaaggggctcagggcaaaaaggcagaaaggagtcccaaccaaggcaaaaaaggagagggagctcccatccagggcaaaaaggcagattcggttgctaatcagggcacaaaggtagagggtattacaaaccaggggaaaaaagcagaagggtcccccagtgaaggcaaaaaggcagaagggtcccccaaccaaggcaaaaaggcagacgcagctgccaatcagggtaaaaagacagagtcagcttctgtccagggcagaaatacagatgtggcccagagcccagaggcaccaaagcaagaggctcctgccaagaagaagtctggttcaaagaaaaaaggtgagcctgggcccccagatgccgacggccctctctacctcccctacaagacgctggtctccacggttgggagcatggtgttcaacgagggcgaggcccagcggctcatcgagatcctgtctgagaaggctggcatcattcaggacacctggcacaaggccactcagaagggtgaccctgtggcgattctgaaacgccagctggaagagaaggaaaaactgctggccacagaacaggaagatgcggctgtcgccaagagcaaactgagggagctcaacaaggagatggcagcagaaaaggccaaagcagcagccggggaggccaaagtgaaaaagcagctggtggcccgggagcaggagatcacggctgtgcaggcacgcatgcaggccagctaccgggagcacgtgaaggaggtgcagcagctgcagggcaagatccggactcttcaggagcagctggagaatggccccaacacgcagctggcccgcctgcagcaggagaactccatcctgcgggatgccttgaaccaggccacgagccaggtggagagcaagcagaacgcagagctggccaagcttcggcaggagctcagcaaggtcagcaaagagctggtggagaagtcagaggctgtgcggcaagatgagcagcagcggaaagctctggaagccaaggcagctgccttcgagaagcaggtcctgcagctgcaggcgtcccacagggagagtgaggaggccctgcagaagcgcctggacgaggtcagccgggagctgtgccacacgcagagcagccacgccagcctccgggcggatgccgagaaggcccaggagcaacagcagcagatggccgagctgcacagcaagttacagtcctccgaggcggaggtgcgcagcaaatgcgaggagctgagtggcctccacgggcagctccaggaggccagggcggagaactcccagctcacagagagaatccgttccattgaggccctgctggaggcgggccaggcgcgggatgcccaggacgtccaggccagccaggcggaggctgaccagcagcagactcgcctcaaggagctggagtcccaggtgtcgggtctggagaaggaggccatcgagctcagggaggccgtcgagcagcagaaagtgaagaacaatgacctccgggagaagaactggaaggccatggaggcactggccacggccgagcaggcctgcaaggagaagctgctctccctgacccaggccaaggaggaatcggagaagcagctctgtctgattgaggcgcagaccatggaggccctgctggctctgctcccagaactctctgtcttggcacaacagaattacaccgagtggctgcaggatctcaaagagaaaggccccacgctgctgaagcacccgccagctcccgcggagccctcctcggacctggcctccaagttgagggaggccgaggagacgcagagcacactgcaggccgagtgtgaccagtaccgcagcatcctggcggagacggagggcatgctcagagacctgcagaagagcgtggaggaggaggagcaggtgtggagggccaaggtgggcgccgcagaggaggagctccagaagtcccgggtcacagtgaagcatctcgaagagattgtagagaagctaaaaggagaacttgaaagttcggaccaggtgagggagcacacgtcgcatttggaggcagagctggaaaagcacatggcggccgccagcgccgagtgccagaactacgccaaggaggtggcagggctgaggcaacttctcctagaatctcaatctcagctcgatgccgccaagagcgaagcccagaaacagagcgatgagcttgccctggtcaggcagcagttgagtgaaatgaagagccacgtagaggatggtgacatagctggggccccagcttcctccccagaggcgcccccagccgagcaggaccccgttcagctgaagacgcagctggagtggacagaagccatcctggaggatgagcagacacagcggcagaagctcacggccgagtttgaggaggctcagacctcggcatgtcggttacaagaagaattggagaagctccgcacagccggccccctagagtcttcagaaacagaggaggcctcacagctgaaggagagactagaaaaagagaagaagttaacaagtgacctggggcgcgccgccacgagactgcaggagcttctgaagacgacccaggagcagctggcaagggagaaggacacggtgaagaagctgcaggaacagctggaaaaggcagaggacggcagcagctcaaaggagggcacctctgtctgagtttcctctttggaaaaagaagttactgttcaacttaccaaaatgccttacacattccttacaaataaaccaaccaacctacacagcgttatccaggcccaacttccggtagctccgagagaagccatgagagacaagtctcttagagccacagaagtagaccttccagagccccagtttgtaaatgaacctgtgtcacatttgataaacactatcctgggcgcagccccgggccaccgccgagtgacgccaaagccctggttgactctgacagccccgtgggtgtgtgggaggccgggcgctctggggtctgtctgtcagtgcaatcgtttagtgttttttcagtggggcggggcgggaagcgggtgggaccgggcagccagttctcaaaggctgtggggccgactggaggccacagcccctcacccctagacgttgccaaccagaactgacgtgtgacctcctgggtgttgatgccattaaaaccaacgttggtgcccggtg

SEQ ID NO: 33844 - DNA, 1191 bp, Artificial Sequence
  derived and/or modified sequence
gaaggcaggaggcggcgatcccggcggagggggccgttcgccagctctgaggcagaaagtgccacgactccacacgcgcgcacgcagccagcgagcggccggagcggacggcagacggggcgggcggcgtcagggtcgcagcgtctacagctgctcgggggcggtttcttggcggaggcttggccggctcctctctcccggctccgcggcggctgcgaaggcggcggctcctgccctctcgctttccctctcgcgtctctggctgcaggtgaaaggaaagcaagccaggatggatatttacgacactcaaaccttgggggttgtggtctttggaggattcatggttgtttctgccattggcatcttcctggtgtcgactttctccatgaaggaaacgtcatatgaagaagccctagccaaccagcgcaaggagatggcgaaaactcaccaccagaaagtcgagaagaaaaagaaggagaaaacagtggagaagaaaggaaagaccaagaaaaaggaagagaaacctaatgggaagatacctgatcatgatccagcccccaatgtgactgtcctccttcgagaaccagtgcgggctcctgctgtggctgtggctccaaccccagtgcagccccccattatcgttgctcctgtcgccacagttccagccatgccccaggagaagctggcctcctcccccaaggacaaaaagaagaaggagaaaaaagtggcaaaagtggaaccagctgtcagctctgtagtgaattccatccaggttctcacttcgaaggctgccatcttggaaactgctcccaaggaggtgccgatggtggtggtgcccccagtgggtgccaagggcaacacaccagccactggcactactcagggcaaaaaggcggaggggactcagaatcaaagcaaaaaggctgaaggagccccaaaccagggcagaaaggcagagggaaccccaaaccagggcaaaaagacagagggaaccccaaaccaagggaaaaaggcagagggaaccccaaaccaaggcaaaaaggcagaaggaaccccaaaccaaggcaaaaaggcggagggggcccagaaccagggtaaaaaggtagatacaaccccaaaccaggggaaaaaggtggagggggccccaacccagggcagaaaggccgagggggctcagaaccaggccaaaaa

SEQ ID NO: 33845 - DNA, 2485 bp, Artificial Sequence
  derived and/or modified sequence
ctctcgctttccctctcgcgtctctggctgcagaaagaagcttccggttctgaggtcctggaggtgccatttccctctctgttgaagcaaaggccggggcagacctcctaggcccccagatgccgacggccctctctacctcccctacaagacgctggtctccacggttgggagcatggtgttcaacgagggcgaggcccagcggctcatcgagatcctgtctgagaaggctggcatcattcaggacacctggcacaaggccactcagaagggtgaccctgtggcgattctgaaacgccagctggaagagaaggaaaaactgctggccacagaacaggaagatgcggctgtcgccaagagcaaactgagggagctcaacaaggagatggcagcagaaaaggccaaagcagcagccggggaggccaaagtgaaaaagcagctggtggcccgggagcaggagatcacggctgtgcaggcacgcatgcaggccagctaccgggagcacgtgaaggaggtgcagcagctgcagggcaagatccggactcttcaggagcagctggagaatggccccaacacgcagctggcccgcctgcagcaggagaactccatcctgcgggatgccttgaaccaggccacgagccaggtggagagcaagcagaacgcagagctggccaagcttcggcaggagctcagcaaggtcagcaaagagctggtggagaagtcagaggctgtgcggcaagatgagcagcagcggaaagctctggaagccaaggcagctgccttcgagaagcaggtcctgcagctgcaggcgtcccacagggagagtgaggaggccctgcagaagcgcctggacgaggtcagccgggagctgtgccacacgcagagcagccacgccagcctccgggcggatgccgagaaggcccaggagcaacagcagcagatggccgagctgcacagcaagttacagtcctccgaggcggaggtgcgcagcaaatgcgaggagctgagtggcctccacgggcagctccaggaggccagggcggagaactcccagctcacagagagaatccgttccattgaggccctgctggaggcgggccaggcgcgggatgcccaggacgtccaggccagccaggcggaggctgaccagcagcagactcgcctcaaggagctggagtcccaggtgtcgggtctggagaaggaggccatcgagctcagggaggccgtcgagcagcagaaagtgaagaacaatgacctccgggagaagaactggaaggccatggaggcactggccacggccgagcaggcctgcaaggagaagctgctctccctgacccaggccaaggaggaatcggagaagcagctctgtctgattgaggcgcagaccatggaggccctgctggctctgctcccagaactctctgtcttggcacaacagaattacaccgagtggctgcaggatctcaaagagaaaggccccacgctgctgaagcacccgccagctcccgcggagccctcctcggacctggcctccaagttgagggaggccgaggagacgcagagcacactgcaggccgagtgtgaccagtaccgcagcatcctggcggagacggagggcatgctcagagacctgcagaagagcgtggaggaggaggagcaggtgtggagggccaaggtgggcgccgcagaggaggagctccagaagtcccgggtcacagtgaagcatctcgaagagattgtagagaagctaaaaggagaacttgaaagttcggaccaggtgagggagcacacgtcgcatttggaggcagagctggaaaagcacatggcggccgccagcgccgagtgccagaactacgccaaggaggtggcagggctgaggcaacttctcctagaatctcaatctcagctcgatgccgccaagagcgaagcccagaaacagagcgatgagcttgccctggtcaggcagcagttgagtgaaatgaagagccacgtagaggatggtgacatagctggggccccagcttcctccccagaggcgcccccagccgagcaggaccccgttcagctgaagacgcagctggagtggacagaagccatcctggaggatgagcagacacagcggcagaagctcacggccgagtttgaggaggctcagacctcggcatgtcggttacaagaagaattggagaagctccgcacagccggccccctagagtcttcagaaacagaggaggcctcacagctgaaggagagactagaaaaagagaagaagttaacaagtgacctggggcgcgccgccacgagactgcaggagcttctgaagacgacccaggagcagctggcaagggagaaggacacggtgaagaagctgcaggaacagctggaaaaggcagaggacggcagcagctcaaaggagggcacctctgtctgagtttcctctttggaaaaagaagttactgttcaacttaccaaaatgccttacaca

SEQ ID NO: 33846 - DNA, 4233 bp, Artificial Sequence
  derived and/or modified sequence
atggacatctacgacacccagaccctgggcgtggtggtgttcggcggcttcatggtggtgagcgccatcggcatcttcctggtgagcaccttcagcatgaaggagaccagctacgaggaggccctggccaaccagagaaaggagatggccaagacccaccaccagaaggtggagaagaagaagaaggagaagaccgtggagaagaagggcaagaccaagaagaaggaggagaagcccaacggcaagatccccgaccacgaccccgcccccaacgtgaccgtgctgctgagagagcccgtgagagcccccgccgtggccgtggcccccacccccgtgcagccccccatcatcgtggcccccgtggccaccgtgcccgccatgccccaggagaagctggccagcagccccaaggacaagaagaagaaggagaagaaggtggccaaggtggagcccgccgtgagcagcgtggtgaacagcatccaggtgctgaccagcaaggccgccatcctggagaccgcccccaaggaggtgcccatggtggtggtgccccccgtgggcgccaagggcaacacccccgccaccggcaccacccagggcaagaaggccgagggcacccagaaccagagcaagaaggccgagggcgcccccaaccagggcagaaaggccgagggcacccccaaccagggcaagaagaccgagggcacccccaaccagggcaagaaggccgagggcacccccaaccagggcaagaaggccgagggcacccccaaccagggcaagaaggccgagggcgcccagaaccagggcaagaaggtggacaccacccccaaccagggcaagaaggtggagggcgcccccacccagggcagaaaggccgagggcgcccagaaccaggccaagaaggtggagggcgcccagaaccagggcaagaaggccgagggcgcccagaaccagggcaagaagggcgagggcgcccagaaccagggcaagaaggccgagggcgcccagaaccagggcaagaaggccgagggcgcccagaaccagggcaagaaggccgagggcgcccagaaccagggcaagaaggccgagggcgcccagaaccagggcaagaaggccgagggcgcccagaaccagggcaagaagagcgagggcgcccagaaccagggcaagaaggtggagggcgcccagaaccagggcaagaaggccgagggcgcccagaaccagggcaagaaggccgagggcgcccagaaccagggcaagaaggccgagggcgcccagaaccagggcaagaaggccgagggcgcccagaaccagggcaagaaggccgagggcgcccagaaccagggcaagaaggccgagggcgcccagaaccagggcaagaaggccgagggcgcccagaaccagggcaagaaggtggagggcgcccagaaccagggcaagaaggccgagggcgcccagaaccagggcaagaaggccgagggcgcccagaaccagggcaagaaggccgagggcgcccagaaccagggccagaagggcgagggcgcccagaaccagggcaagaagaccgagggcgcccagggcaagaaggccgagagaagccccaaccagggcaagaagggcgagggcgcccccatccagggcaagaaggccgacagcgtggccaaccagggcaccaaggtggagggcatcaccaaccagggcaagaaggccgagggcagccccagcgagggcaagaaggccgagggcagccccaaccagggcaagaaggccgacgccgccgccaaccagggcaagaagaccgagagcgccagcgtgcagggcagaaacaccgacgtggcccagagccccgaggcccccaagcaggaggcccccgccaagaagaagagcggcagcaagaagaagggcgagcccggcccccccgacgccgacggccccctgtacctgccctacaagaccctggtgagcaccgtgggcagcatggtgttcaacgagggcgaggcccagagactgatcgagatcctgagcgagaaggccggcatcatccaggacacctggcacaaggccacccagaagggcgaccccgtggccatcctgaagagacagctggaggagaaggagaagctgctggccaccgagcaggaggacgccgccgtggccaagagcaagctgagagagctgaacaaggagatggccgccgagaaggccaaggccgccgccggcgaggccaaggtgaagaagcagctggtggccagagagcaggagatcaccgccgtgcaggccagaatgcaggccagctacagagagcacgtgaaggaggtgcagcagctgcagggcaagatcagaaccctgcaggagcagctggagaacggccccaacacccagctggccagactgcagcaggagaacagcatcctgagagacgccctgaaccaggccaccagccaggtggagagcaagcagaacgccgagctggccaagctgagacaggagctgagcaaggtgagcaaggagctggtggagaagagcgaggccgtgagacaggacgagcagcagagaaaggccctggaggccaaggccgccgccttcgagaagcaggtgctgcagctgcaggccagccacagagagagcgaggaggccctgcagaagagactggacgaggtgagcagagagctgtgccacacccagagcagccacgccagcctgagagccgacgccgagaaggcccaggagcagcagcagcagatggccgagctgcacagcaagctgcagagcagcgaggccgaggtgagaagcaagtgcgaggagctgagcggcctgcacggccagctgcaggaggccagagccgagaacagccagctgaccgagagaatcagaagcatcgaggccctgctggaggccggccaggccagagacgcccaggacgtgcaggccagccaggccgaggccgaccagcagcagaccagactgaaggagctggagagccaggtgagcggcctggagaaggaggccatcgagctgagagaggccgtggagcagcagaaggtgaagaacaacgacctgagagagaagaactggaaggccatggaggccctggccaccgccgagcaggcctgcaaggagaagctgctgagcctgacccaggccaaggaggagagcgagaagcagctgtgcctgatcgaggcccagaccatggaggccctgctggccctgctgcccgagctgagcgtgctggcccagcagaactacaccgagtggctgcaggacctgaaggagaagggccccaccctgctgaagcacccccccgcccccgccgagcccagcagcgacctggccagcaagctgagagaggccgaggagacccagagcaccctgcaggccgagtgcgaccagtacagaagcatcctggccgagaccgagggcatgctgagagacctgcagaagagcgtggaggaggaggagcaggtgtggagagccaaggtgggcgccgccgaggaggagctgcagaagagcagagtgaccgtgaagcacctggaggagatcgtggagaagctgaagggcgagctggagagcagcgaccaggtgagagagcacaccagccacctggaggccgagctggagaagcacatggccgccgccagcgccgagtgccagaactacgccaaggaggtggccggcctgagacagctgctgctggagagccagagccagctggacgccgccaagagcgaggcccagaagcagagcgacgagctggccctggtgagacagcagctgagcgagatgaagagccacgtggaggacggcgacatcgccggcgcccccgccagcagccccgaggccccccccgccgagcaggaccccgtgcagctgaagacccagctggagtggaccgaggccatcctggaggacgagcagacccagagacagaagctgaccgccgagttcgaggaggcccagaccagcgcctgcagactgcaggaggagctggagaagctgagaaccgccggccccctggagagcagcgagaccgaggaggccagccagctgaaggagagactggagaaggagaagaagctgaccagcgacctgggcagagccgccaccagactgcaggagctgctgaagaccacccaggagcagctggccagagagaaggacaccgtgaagaagctgcaggagcagctggagaaggccgaggacggcagcagcagcaaggagggcaccagcgtgtag

SEQ ID NO: 33847 - DNA, 2934 bp, Artificial Sequence
  derived and/or modified sequence
atggacatctacgacacccagaccctgggcgtggtggtgttcggcggcttcatggtggtgagcgccatcggcatcttcctggtgagcaccttcagcatgaaggagaccagctacgaggaggccctggccaaccagagaaaggagatggccaagacccaccaccagaaggtggagaagaagaagaaggagaagaccgtggagaagaagggcaagaccaagaagaaggaggagaagcccaacggcaagatccccgaccacgaccccgcccccaacgtgaccgtgctgctgagagagcccgtgagagcccccgccgtggccgtggcccccacccccgtgcagccccccatcatcgtggcccccgtggccaccgtgcccgccatgccccaggagaagctggccagcagccccaaggacaagaagaagaaggagaagaaggtggccaaggtggagcccgccgtgagcagcgtggtgaacagcatccaggtgctgaccagcaaggccgccatcctggagaccgcccccaaggagggcagaaacaccgacgtggcccagagccccgaggcccccaagcaggaggcccccgccaagaagaagagcggcagcaagaagaagggcccccccgacgccgacggccccctgtacctgccctacaagaccctggtgagcaccgtgggcagcatggtgttcaacgagggcgaggcccagagactgatcgagatcctgagcgagaaggccggcatcatccaggacacctggcacaaggccacccagaagggcgaccccgtggccatcctgaagagacagctggaggagaaggagaagctgctggccaccgagcaggaggacgccgccgtggccaagagcaagctgagagagctgaacaaggagatggccgccgagaaggccaaggccgccgccggcgaggccaaggtgaagaagcagctggtggccagagagcaggagatcaccgccgtgcaggccagaatgcaggccagctacagagagcacgtgaaggaggtgcagcagctgcagggcaagatcagaaccctgcaggagcagctggagaacggccccaacacccagctggccagactgcagcaggagaacagcatcctgagagacgccctgaaccaggccaccagccaggtggagagcaagcagaacgccgagctggccaagctgagacaggagctgagcaaggtgagcaaggagctggtggagaagagcgaggccgtgagacaggacgagcagcagagaaaggccctggaggccaaggccgccgccttcgagaagcaggtgctgcagctgcaggccagccacagagagagcgaggaggccctgcagaagagactggacgaggtgagcagagagctgtgccacacccagagcagccacgccagcctgagagccgacgccgagaaggcccaggagcagcagcagcagatggccgagctgcacagcaagctgcagagcagcgaggccgaggtgagaagcaagtgcgaggagctgagcggcctgcacggccagctgcaggaggccagagccgagaacagccagctgaccgagagaatcagaagcatcgaggccctgctggaggccggccaggccagagacgcccaggacgtgcaggccagccaggccgaggccgaccagcagcagaccagactgaaggagctggagagccaggtgagcggcctggagaaggaggccatcgagctgagagaggccgtggagcagcagaaggtgaagaacaacgacctgagagagaagaactggaaggccatggaggccctggccaccgccgagcaggcctgcaaggagaagctgctgagcctgacccaggccaaggaggagagcgagaagcagctgtgcctgatcgaggcccagaccatggaggccctgctggccctgctgcccgagctgagcgtgctggcccagcagaactacaccgagtggctgcaggacctgaaggagaagggccccaccctgctgaagcacccccccgcccccgccgagcccagcagcgacctggccagcaagctgagagaggccgaggagacccagagcaccctgcaggccgagtgcgaccagtacagaagcatcctggccgagaccgagggcatgctgagagacctgcagaagagcgtggaggaggaggagcaggtgtggagagccaaggtgggcgccgccgaggaggagctgcagaagagcagagtgaccgtgaagcacctggaggagatcgtggagaagctgaagggcgagctggagagcagcgaccaggtgagagagcacaccagccacctggaggccgagctggagaagcacatggccgccgccagcgccgagtgccagaactacgccaaggaggtggccggcctgagacagctgctgctggagagccagagccagctggacgccgccaagagcgaggcccagaagcagagcgacgagctggccctggtgagacagcagctgagcgagatgaagagccacgtggaggacggcgacatcgccggcgcccccgccagcagccccgaggccccccccgccgagcaggaccccgtgcagctgaagacccagctggagtggaccgaggccatcctggaggacgagcagacccagagacagaagctgaccgccgagttcgaggaggcccagaccagcgcctgcagactgcaggaggagctggagaagctgagaaccgccggccccctggagagcagcgagaccgaggaggccagccagctgaaggagagactggagaaggagaagaagctgaccagcgacctgggcagagccgccaccagactgcaggagctgctgaagaccacccaggagcagctggccagagagaaggacaccgtgaagaagctgcaggagcagctggagaaggccgaggacggcagcagcagcaaggagggcaccagcgtgtag

SEQ ID NO: 33848 - DNA, 903 bp, Artificial Sequence
  derived and/or modified sequence
atggacatctacgacacccagaccctgggcgtggtggtgttcggcggcttcatggtggtgagcgccatcggcatcttcctggtgagcaccttcagcatgaaggagaccagctacgaggaggccctggccaaccagagaaaggagatggccaagacccaccaccagaaggtggagaagaagaagaaggagaagaccgtggagaagaagggcaagaccaagaagaaggaggagaagcccaacggcaagatccccgaccacgaccccgcccccaacgtgaccgtgctgctgagagagcccgtgagagcccccgccgtggccgtggcccccacccccgtgcagccccccatcatcgtggcccccgtggccaccgtgcccgccatgccccaggagaagctggccagcagccccaaggacaagaagaagaaggagaagaaggtggccaaggtggagcccgccgtgagcagcgtggtgaacagcatccaggtgctgaccagcaaggccgccatcctggagaccgcccccaaggaggtgcccatggtggtggtgccccccgtgggcgccaagggcaacacccccgccaccggcaccacccagggcaagaaggccgagggcacccagaaccagagcaagaaggccgagggcgcccccaaccagggcagaaaggccgagggcacccccaaccagggcaagaagaccgagggcacccccaaccagggcaagaaggccgagggcacccccaaccagggcaagaaggccgagggcacccccaaccagggcaagaaggccgagggcgcccagaaccagggcaagaaggtggacaccacccccaaccagggcaagaaggtggagggcgcccccacccagggcagaaaggccgagggcgcccagaaccaggccaagtag

SEQ ID NO: 33849 - DNA, 2256 bp, Artificial Sequence
  derived and/or modified sequence
atggtgttcaacgagggcgaggcccagagactgatcgagatcctgagcgagaaggccggcatcatccaggacacctggcacaaggccacccagaagggcgaccccgtggccatcctgaagagacagctggaggagaaggagaagctgctggccaccgagcaggaggacgccgccgtggccaagagcaagctgagagagctgaacaaggagatggccgccgagaaggccaaggccgccgccggcgaggccaaggtgaagaagcagctggtggccagagagcaggagatcaccgccgtgcaggccagaatgcaggccagctacagagagcacgtgaaggaggtgcagcagctgcagggcaagatcagaaccctgcaggagcagctggagaacggccccaacacccagctggccagactgcagcaggagaacagcatcctgagagacgccctgaaccaggccaccagccaggtggagagcaagcagaacgccgagctggccaagctgagacaggagctgagcaaggtgagcaaggagctggtggagaagagcgaggccgtgagacaggacgagcagcagagaaaggccctggaggccaaggccgccgccttcgagaagcaggtgctgcagctgcaggccagccacagagagagcgaggaggccctgcagaagagactggacgaggtgagcagagagctgtgccacacccagagcagccacgccagcctgagagccgacgccgagaaggcccaggagcagcagcagcagatggccgagctgcacagcaagctgcagagcagcgaggccgaggtgagaagcaagtgcgaggagctgagcggcctgcacggccagctgcaggaggccagagccgagaacagccagctgaccgagagaatcagaagcatcgaggccctgctggaggccggccaggccagagacgcccaggacgtgcaggccagccaggccgaggccgaccagcagcagaccagactgaaggagctggagagccaggtgagcggcctggagaaggaggccatcgagctgagagaggccgtggagcagcagaaggtgaagaacaacgacctgagagagaagaactggaaggccatggaggccctggccaccgccgagcaggcctgcaaggagaagctgctgagcctgacccaggccaaggaggagagcgagaagcagctgtgcctgatcgaggcccagaccatggaggccctgctggccctgctgcccgagctgagcgtgctggcccagcagaactacaccgagtggctgcaggacctgaaggagaagggccccaccctgctgaagcacccccccgcccccgccgagcccagcagcgacctggccagcaagctgagagaggccgaggagacccagagcaccctgcaggccgagtgcgaccagtacagaagcatcctggccgagaccgagggcatgctgagagacctgcagaagagcgtggaggaggaggagcaggtgtggagagccaaggtgggcgccgccgaggaggagctgcagaagagcagagtgaccgtgaagcacctggaggagatcgtggagaagctgaagggcgagctggagagcagcgaccaggtgagagagcacaccagccacctggaggccgagctggagaagcacatggccgccgccagcgccgagtgccagaactacgccaaggaggtggccggcctgagacagctgctgctggagagccagagccagctggacgccgccaagagcgaggcccagaagcagagcgacgagctggccctggtgagacagcagctgagcgagatgaagagccacgtggaggacggcgacatcgccggcgcccccgccagcagccccgaggccccccccgccgagcaggaccccgtgcagctgaagacccagctggagtggaccgaggccatcctggaggacgagcagacccagagacagaagctgaccgccgagttcgaggaggcccagaccagcgcctgcagactgcaggaggagctggagaagctgagaaccgccggccccctggagagcagcgagaccgaggaggccagccagctgaaggagagactggagaaggagaagaagctgaccagcgacctgggcagagccgccaccagactgcaggagctgctgaagaccacccaggagcagctggccagagagaaggacaccgtgaagaagctgcaggagcagctggagaaggccgaggacggcagcagcagcaaggagggcaccagcgtgtag

SEQ ID NO: 33850 - protein, 376 aa, Artificial Sequence
  derived and/or modified sequence
MLLLFLLFEGLCCPGENTAAPQALQSYHLAAEEQLSFRMLQTSSFANHSWAHSEGSGWLGDLQTHGWDTVLGTIRFLKPWSHGNFSKQELKNLQSLFQLYFHSFIQIVQASAGQFQLEYPFEIQILAGCRMNAPQIFLNMAYQGSDFLSFQGISWEPSPGAGIRAQNICKVLNRYLDIKEILQSLLGHTCPRFLAGLMEAGESELKRKVKPEAWLSCGPSPGPGRLQLVCHVSGFYPKPVWVMWMRGEQEQRGTQRGDVLPNADETWYLRATLDVAAGEAAGLSCRVKHSSLGGHDLIIHWGGYSIFLILICLTVIVTLVILVVVDSRLKKQSPVFLMGANTQDTKNSRHQFCLAQVSWIKNRVLKKWKTRLNQLW

SEQ ID NO: 33851 - DNA, 1131 bp, Artificial Sequence
  derived and/or modified sequence
atgttactcctttttttgctctttgaaggactgtgttgtccgggcgagaacacagccgcaccacaggcgttacaatcataccacctggcggccgaggaacagctctcttttcggatgctgcagacgagctcattcgctaaccactcgtgggcccacagcgaggggtccggctggctgggagacctgcaaacgcacgggtgggacacagtcttgggcacgattcggtttctgaagccgtggtcacacggcaacttctccaagcaagagctgaaaaacctgcagtccctgttccagctgtacttccacagtttcatccagatagttcaggcgtccgccggccagttccagctcgagtaccccttcgagattcaaatcctcgccggatgccggatgaacgccccccagatctttctgaacatggcataccagggctccgatttcctcagtttccagggcatttcatgggagccctcaccaggagcgggaatcagggcacagaacatctgtaaagtgctcaatcgctacttggacataaaagaaattctgcagtcactgctaggccacacctgcccacgtttcttggctggcctcatggaggccggcgagtcggaactgaagagaaaagtgaagcccgaagcctggctgagttgtggaccctctccaggccctggacgactgcagctggtttgtcacgtaagtggcttttaccccaagccagtgtgggtcatgtggatgaggggagagcaggaacagcgggggacacagcggggagatgtgctacccaacgcagacgaaacatggtacttacgcgccacattggatgtagctgcgggggaagcagccgggctgagctgtcgcgtgaagcacagcagcctggggggccacgatctcatcatacactggggcggatattctatatttctcattctgatctgcctgactgttatcgtgaccctggttatcttggtcgtggtcgacagccgcctaaaaaaacagtcccccgtcttcctgatgggggcaaatactcaggatactaaaaattctcggcaccaattttgtttggcccaggttagctggataaaaaatcgggtgttgaagaagtggaaaacaagactgaaccaactctggtag

SEQ ID NO: 33852 - DNA, 1023 bp, Artificial Sequence
  derived and/or modified sequence
atgattaaaagcagggtaaaacgctatcgaagaaggcgtggctctcagagagcccctcaagccctgcagagctatcatcttgccgctgaggaacagttaagcttccggatgctccagacttcatcctttgctaaccacagctgggctcatagtgagggaagtggctggttgggcgatctgcagacccatggttgggatacagttctcgggactataaggtttcttaaaccatggtctcacggaaacttctccaagcaggaactcaagaacctccagagtctgtttcaactctatttccactctttcatccagatcgtgcaagccagtgccggccagtttcagctggagtacccgtttgaaattcagatcctcgcaggctgccgtatgaacgcaccccagatttttctcaatatggcttaccaggggtccgactttctttcctttcaaggtatatcatgggagcctagtccgggtgcagggatccgggcccagaacatctgtaaagtcctgaataggtaccttgatatcaaggagatactccagtccctgctgggacatacctgtccccggttcctggctgggcttatggaggcaggcgagtctgagctgaagcgaaaggtcaagccagaggcttggctgtcctgcggaccctccccaggccccggccggctgcagctcgtgtgccatgtttctggcttctatcccaagccggtgtgggtgatgtggatgcgtggggaacaggagcagaggggcacccagaggggggacgttcttccaaatgctgatgagacttggtacctgcgcgcaactctggatgttgccgcaggtgaggcagcagggttgtcttgcagggtgaagcattcatccctcggcggtcacgaccttattattcactggggcgagaagcagctgcgcctgtgttgggaaattatgaaaattgccttggggctcctgagtgtagggctccgtaaatgggttgggatgctgggcacccgacgggtcaagctaggacaaagtaagtag

SEQ ID NO: 33853 - DNA, 1131 bp, Artificial Sequence
  derived and/or modified sequence
atgctgctgctcttcctgctgtttgagggcctgtgctgccctggagagaacacagctgccccccaggccctgcagagctaccacctggccgctgaggagcagctgtccttcaggatgctgcagaccagcagctttgccaaccacagctgggcccacagcgagggcagcggctggctgggggacctgcagacccacggctgggacacagtgctgggcaccatccgcttcctgaagccctggagccacggcaacttcagcaagcaggagctgaagaacctgcagagcctcttccagctgtacttccacagcttcatccagatcgtgcaggccagcgctggccagttccagctggagtacccctttgagatccagatcctggccggctgcaggatgaatgccccccagatcttcctgaacatggcctaccagggcagtgacttcctgtccttccagggcatctcctgggagcccagccctggagctggcatccgggcccagaacatctgcaaggtgctgaaccgctacctggacatcaaggagatcctgcagagcctgctgggccacacctgcccccgcttcctggccggcctgatggaggccggggagagcgagctgaagaggaaggtgaagccagaggcctggctgagctgtggccccagccctggccctggccgcctgcagctggtgtgccacgtgtctggcttctaccccaagcctgtgtgggtgatgtggatgagaggagagcaggagcagaggggcacccagagaggagatgtgctgcccaatgctgatgagacctggtacctgcgggccaccctggatgtggccgccggggaggccgccggcctgagctgccgggtgaagcacagcagcctgggcggccatgacctgatcatccactggggcggctacagcatcttcctgatcctgatctgcctgaccgtcatcgtgaccctggtgatcctggtggtggtggacagccggctgaagaagcagagccctgtgttcctgatgggcgccaacacccaggacaccaagaacagccgccaccagttctgcctggcccaggtgtcctggatcaagaacagagtgctgaagaagtggaagacccggctgaaccagctgtggtag

SEQ ID NO: 33854 - DNA, 1023 bp, Artificial Sequence
  derived and/or modified sequence
atgatcaagagccgggtgaagcgctacagaagaagaagaggcagccagagggccccccaggccctgcagagctaccacctggccgctgaggagcagctgtccttcaggatgctgcagaccagcagctttgccaaccacagctgggcccacagcgagggcagcggctggctgggggacctgcagacccacggctgggacacagtgctgggcaccatccgcttcctgaagccctggagccacggcaacttcagcaagcaggagctgaagaacctgcagagcctcttccagctgtacttccacagcttcatccagatcgtgcaggccagcgctggccagttccagctggagtacccctttgagatccagatcctggccggctgcaggatgaatgccccccagatcttcctgaacatggcctaccagggcagtgacttcctgtccttccagggcatctcctgggagcccagccctggagctggcatccgggcccagaacatctgcaaggtgctgaaccgctacctggacatcaaggagatcctgcagagcctgctgggccacacctgcccccgcttcctggccggcctgatggaggccggggagagcgagctgaagaggaaggtgaagccagaggcctggctgagctgtggccccagccctggccctggccgcctgcagctggtgtgccacgtgtctggcttctaccccaagcctgtgtgggtgatgtggatgagaggagagcaggagcagaggggcacccagagaggagatgtgctgcccaatgctgatgagacctggtacctgcgggccaccctggatgtggccgccggggaggccgccggcctgagctgccgggtgaagcacagcagcctgggcggccatgacctgatcatccactggggcgagaagcagctgcggctgtgctgggagatcatgaagatcgccctgggcctgctgtctgtgggcctgaggaagtgggtgggcatgctgggcacccggcgggtgaagctgggccagagcaagtag

SEQ ID NO: 33855 - DNA, 1131 bp, Artificial Sequence
  derived and/or modified sequence
atgctgctgctgttcctgctgttcgagggcctgtgctgccccggcgaaaacaccgcggctcctcaggcactgcagtcttaccacctggcagccgaagagcagttgtcgttccggatgcttcagacatcttcattcgcgaatcactcatgggcccacagcgaaggctcaggctggcttggagatttgcagacccatgggtgggacaccgtgcttgggacgatcagattcctcaaaccatggagccacggaaacttttctaaacaggaactgaaaaacttgcagtccctgtttcagttatattttcacagcttcatacaaatagtgcaggcatccgctgggcagttccagcttgagtaccctttcgaaattcagatattggccggatgcaggatgaatgcccctcagattttcttgaacatggcctaccaggggagcgactttctttcctttcagggtatttcttgggaaccctcccccggagctggcatccgggcgcaaaatatctgtaaggtattgaaccgctacctggacatcaaggagatcctgcaaagtcttctgggccatacgtgcccaagatttctggctggtctgatggaagcaggcgaatctgagttgaaaaggaaggtgaagccagaggcttggctgagttgcggccctagtcccgggcccggaagattgcagttagtctgtcacgtctccggcttctacccaaaaccagtgtgggtgatgtggatgcggggagagcaggagcagaggggcacccagcgcggtgatgttttgcctaatgccgatgagacgtggtaccttagggccaccctggatgtcgcagctggggaggccgcaggcttatcatgtcgggtgaaacacagctcgctaggcgggcacgatttaatcatccattggggcggatacagcatatttctgattttaatctgtctgactgtgatcgtgacactggtcattctggtggtcgtggattcgcgcctgaagaagcagtccccggtgttcctgatgggggcgaacacacaggacacaaagaacagccgtcaccagttttgcctggcacaggtttcctggatcaaaaaccgagtattaaagaagtggaaaacaagattaaaccagttgtggtag

SEQ ID NO: 33856 - DNA, 1023 bp, Artificial Sequence
  derived and/or modified sequence
atgatcaagagccgggtgaagcggtaccggcggcggcggggcagccagagggcccctcaggccttgcagtcatatcacctggcagctgaggagcagctgtcctttagaatgctgcaaacttctagcttcgccaaccatagctgggcacactcggagggttctggctggctcggagacctccagacccacggctgggatacggtgctcggcacaatccggttcctgaaaccttggtcacatggcaatttttccaaacaagagctgaaaaacctgcagagcctgttccagctatattttcactcatttattcagattgtgcaagcttctgctggccagttccaactggagtacccgtttgaaattcaaatcctggcaggatgccggatgaacgcccctcagattttcctgaacatggcctatcagggctctgattttctcagtttccaaggcatttcctgggagccttcccccggtgctgggatccgtgcgcagaatatttgtaaagtcctcaaccgataccttgatattaaagaaatactgcagagcctgcttggtcacacatgccctagatttctcgctggactgatggaggcaggagaaagtgaattgaagaggaaggttaagcccgaagcatggttgtcatgtggaccaagtcccgggcctggtcggctgcagctggtttgccacgttagcggcttttaccccaagccggtctgggttatgtggatgcgaggagaacaagagcagaggggaacccaacgcggagacgtgttgccgaacgctgatgagacttggtacctcagagcaacattggatgtggccgccggagaagctgcagggctcagctgtcgtgtgaaacattcatcactgggcgggcatgatctgataatccactggggtgaaaagcagctgagactgtgttgggagattatgaagatagcactagggctcctgtcagtggggcttagaaaatgggttggcatgctcggaacaaggcgcgtaaagctcggccaatccaaatag

SEQ ID NO: 33857 - DNA, 1131 bp, Artificial Sequence
  derived and/or modified sequence
atgcttctgctgtttttgttattcgagggtctgtgttgtcctggtgaaaataccgctgccccacaagcattgcagagttaccacctggcggcagaggagcaactgagcttccgcatgctgcagacctcctcatttgcaaatcattcttgggcccacagcgaagggtctggctggcttggagatctccagacacatggctgggatactgtcctgggaaccattcgatttctcaagccgtggtcacacggaaatttctccaaacaggagctgaaaaatcttcagagtctgtttcaactgtacttccattccttcatacagatcgtgcaggcctctgccggacagtttcaattggaatacccattcgaaatccaaatattagccggttgccggatgaacgcccctcagatttttctgaacatggcctatcagggctccgacttcctgtcattccaaggaatcagctgggagccttcaccaggtgctggcattcgggcacagaacatctgtaaggtgctaaatcggtatctggatatcaaggaaattctgcaaagtctcctgggccacacgtgcccgcgattcctcgccggactcatggaggccggagagtctgagctgaaaaggaaagttaagcctgaggcctggctcagttgtggcccatcacccggtcccggaaggttgcagctggtgtgtcatgtatcaggcttttaccccaaaccagtgtgggtaatgtggatgcgcggtgagcaggaacagcgcggtactcagagaggtgatgtactgccaaacgcagatgaaacatggtatctgagagcaaccctggacgtagctgctggcgaggccgcaggtctctcttgcagggtgaagcatagcagtctgggcggtcacgatttgataatccactgggggggttattcaatctttctcattctcatctgccttacagtgatcgtgaccctggttattttggtcgtagtcgacagcagactgaagaagcagtctccagtctttttgatgggcgcaaacacgcaggataccaagaacagccgacaccaattttgtctggctcaggtgtcatggataaagaacagggtcctcaagaaatggaagacacggttgaatcagctgtggtag

SEQ ID NO: 33858 - DNA, 1023 bp, Artificial Sequence
  derived and/or modified sequence
atgatcaaaagcagagtgaaaaggtaccgccgaagacgtggttcccagagagctccccaggcccttcagtcttaccatctggctgctgaggaacagctctccttccgcatgcttcagactagctcctttgccaaccacagctgggctcattcggagggatcaggatggcttggggatctccagacacatggttgggatacagtcctggggacaattagatttctcaagccatggagtcacggcaattttagtaagcaggagctgaaaaacttgcaatcattgtttcagctgtacttccatagcttcatccagattgtgcaggcgagcgcgggacagtttcagcttgagtatccctttgagatccagatactggctggctgcagaatgaacgcaccacagatctttctcaacatggcatatcagggatctgatttcttatccttccaaggcatctcctgggaaccctcacccggtgccggaatccgggcacaaaacatctgcaaggtgctgaaccgttatctggatattaaagagattctgcagtctttgctggggcatacatgccctaggtttcttgcgggactgatggaggcaggggaatccgagctgaagcggaaagtcaaacctgaggcttggctgagctgcggtcctagtcctggacctggcaggcttcagttagtctgccacgtgagcgggttctacccaaagcctgtgtgggtcatgtggatgcgtggggagcaggaacagcgtgggacccagcgcggagatgtcctacccaatgctgatgaaacatggtacctgcgggcaacattagacgtggccgcaggggaagctgctgggctgtcctgtagggtgaagcatagtagcttggggggacacgacctgataatccattggggggaaaagcagctacggttgtgctgggaaatcatgaagatcgccctgggactgctgtctgtgggactgcgcaaatgggtgggtatgctgggcaccagaagggtcaaattgggccagagtaaatag

SEQ ID NO: 33859 - DNA, 1727 bp, Artificial Sequence
  derived and/or modified sequence
atgctgctcctgttcctcctcttcgagggtctctgctgtcctggggaaaatacagcagctccccaggctctacaatcctatcatctagcagcagaggagcagctgtccttccgcatgctccaaacttcctcctttgccaaccacagctgggcacacagtgagggctcaggatggctgggtgacctgcagactcatggctgggacactgtcttgggcaccatccgctttctgaagccctggtcccatggaaacttcagcaagcaggagctgaaaaacttacagtcactgttccagttatacttccatagttttatccagatagtgcaagcttctgctggtcaatttcagcttgaataccccttcgagatccagatattagctggctgtagaatgaatgccccacaaatcttcttaaatatggcatatcaagggtcagatttcctgagtttccaaggaatttcctgggagccatctccaggagcagggatccgggcccagaacatctgtaaagtgctcaatcgctacctagatattaaggaaatactgcaaagccttcttggtcacacctgccctcgatttctagcggggctcatggaagcaggggagtcagaactgaaacggaaagtgaagccagaggcctggctgtcctgtggccccagtcctggccctggccgtctgcagcttgtgtgccatgtctcaggattctacccaaagcccgtgtgggtgatgtggatgcggggtgagcaggagcagcggggcactcagcgaggggacgtcctgcctaatgctgacgagacatggtatctccgagcaaccctggatgtggcggctggggaggcagctggcctgtcctgtcgggtgaaacacagcagtctagggggccatgatctaatcatccattggggtggatattccatctttctcatcctgatctgtttgactgtgatagttaccctggtcatattggttgtagttgactcacggttaaaaaaacagagccctgtctttctcatgggagccaacactcaggacaccaagaattcaagacatcagttctgcttggcacaagtatcgtggatcaaaaacagagtattgaagaagtggaagacacgcctaaaccaactctggtgacatttgctttaccttatacataaaatccttgtctgcatcttcttaaacaccgtccatgtcccataagggaagcatgcttttatttaaacagtttatactagcaaagatactgacccctttaggaatactttttccccatcttccagagattttttttttcctgctttggctacatatccatcattgtttatttttgaaactataatccagatacttctttttcatggattcccgagatcacccaattgatagctcttctgtactccccaaattgaactgatcttcacaagcacattcatctcttcctactctgaacagtagttatttaggtttttgctctttttttttttttaatctcagttgcttgaaagtaggatttaggtatttgtgtctgtattcatgaccaaaaatcttatctgaattcagggccagcttcataagcatgtgacctgtgcagacacatggaatcgtatgctctgcaagaacccatgctagatttaatgctctgctgttgtcatcttggaatccttagtcattttcaaacaagagatattgtattttcatttttcactgaccccacaaattatatagctgat

SEQ ID NO: 33860 - DNA, 936 bp, Artificial Sequence
  derived and/or modified sequence
tgtctcaggattctacccaaagcccgtgtgggtgatgtggatgcggggtgagcaggagcagcggggcactcagcgaggggacgtcctgcctaatgctgacgagacatggtggatattccatctttctcatcctgatctgtttgactgtgatagttaccctggtcatattggttgtagttgactcacggttaaaaaaacagagccctgtctttctcatgggagccaacactcaggacaccaagaattcaagacatcagttctgcttggcacaagtatcgtggatcaaaaacagagtattgaagaagtggaagacacgcctaaaccaactctggtgacatttgctttaccttatacataaaatccttgtctgcatcttcttaaacaccgtccatgtcccataagggaagcatgcttttatttaaacagtttatactagcaaagatactgacccctttaggaatactttttccccatcttccagagattttttttttcctgctttggctacatatccatcattgtttatttttgaaactataatccagatacttctttttcatggattcccgagatcacccaattgatagctcttctgtactccccaaattgaactgatcttcacaagcacattcatctcttcctactctgaacagtagttatttaggtttttgctctttttttttttttaatctcagttgcttgaaagtaggatttaggtatttgtgtctgtattcatgaccaaaaatcttatctgaattcagggccagcttcataagcatgtgacctgtgcagacacatggaatcgtatgctctgcaagaacccatgctagatttaatgctctgctgttgtcatcttggaatccttagtcattttcaaacaagagatattgtattttcatttttcactgaccccacaaattatatagctgattcagt

SEQ ID NO: 33861 - DNA, 1504 bp, Artificial Sequence
  derived and/or modified sequence
gtcttctgatcatgatcaagagcagagtgaagagatacaggcggaggagaggatcacagagagctccccaggctctacaatcctatcatctagcagcagaggagcagctgtccttccgcatgctccaaacttcctcctttgccaaccacagctgggcacacagtgagggctcaggatggctgggtgacctgcagactcatggctgggacactgtcttgggcaccatccgctttctgaagccctggtcccatggaaacttcagcaagcaggagctgaaaaacttacagtcactgttccagttatacttccatagttttatccagatagtgcaagcttctgctggtcaatttcagcttgaataccccttcgagatccagatattagctggctgtagaatgaatgccccacaaatcttcttaaatatggcatatcaagggtcagatttcctgagtttccaaggaatttcctgggagccatctccaggagcagggatccgggcccagaacatctgtaaagtgctcaatcgctacctagatattaaggaaatactgcaaagccttcttggtcacacctgccctcgatttctagcggggctcatggaagcaggggagtcagaactgaaacggaaagtgaagccagaggcctggctgtcctgtggccccagtcctggccctggccgtctgcagcttgtgtgccatgtctcaggattctacccaaagcccgtgtgggtgatgtggatgcggggtgagcaggagcagcggggcactcagcgaggggacgtcctgcctaatgctgacgagacatggtatctccgagcaaccctggatgtggcggctggggaggcagctggcctgtcctgtcgggtgaaacacagcagtctagggggccatgatctaatcatccattggggtgagaaacagctgaggctctgctgggaaataatgaaaatagccctggggcttttgagtgtggggctgaggaaatgggtaggaatgctaggtacaagaagggtaaaactgggacaatcaaaataaagaaggatagagtatgacagtagttaaattttaagaaaatggaagtagagaattagacatactaacagaaaaaggaggaggaactagtgatttagtgggagagggttgggaggagatcacagacaaaggatcaggaggaattgaaatgagggctttggaaaacccagatgaaaattctaggaaggtcccacccttgtgaaatgggaaatctcagcttggtggaatagagtattttagggttggtattcttattctatccccaaccaggtggatattccatctttctcatcctgatctgtttgactgtgatagttaccctggtcatattggttgtagttgactcacggttaaaaaaacagaggtgagctttttcttgttctttgtttcttcagcctgtaatcaattcattcctttttcctctatcttctttttttttttctctgcctttcccctttatttcctttctttga

SEQ ID NO: 33862 - DNA, 1131 bp, Artificial Sequence
  derived and/or modified sequence
atgctgctgctgttcctgctgttcgagggcctgtgctgccccggcgagaacaccgccgccccccaggccctgcagagctaccacctggccgccgaggagcagctgagcttcagaatgctgcagaccagcagcttcgccaaccacagctgggcccacagcgagggcagcggctggctgggcgacctgcagacccacggctgggacaccgtgctgggcaccatcagattcctgaagccctggagccacggcaacttcagcaagcaggagctgaagaacctgcagagcctgttccagctgtacttccacagcttcatccagatcgtgcaggccagcgccggccagttccagctggagtaccccttcgagatccagatcctggccggctgcagaatgaacgccccccagatcttcctgaacatggcctaccagggcagcgacttcctgagcttccagggcatcagctgggagcccagccccggcgccggcatcagagcccagaacatctgcaaggtgctgaacagatacctggacatcaaggagatcctgcagagcctgctgggccacacctgccccagattcctggccggcctgatggaggccggcgagagcgagctgaagagaaaggtgaagcccgaggcctggctgagctgcggccccagccccggccccggcagactgcagctggtgtgccacgtgagcggcttctaccccaagcccgtgtgggtgatgtggatgagaggcgagcaggagcagagaggcacccagagaggcgacgtgctgcccaacgccgacgagacctggtacctgagagccaccctggacgtggccgccggcgaggccgccggcctgagctgcagagtgaagcacagcagcctgggcggccacgacctgatcatccactggggcggctacagcatcttcctgatcctgatctgcctgaccgtgatcgtgaccctggtgatcctggtggtggtggacagcagactgaagaagcagagccccgtgttcctgatgggcgccaacacccaggacaccaagaacagcagacaccagttctgcctggcccaggtgagctggatcaagaacagagtgctgaagaagtggaagaccagactgaaccagctgtggtag

SEQ ID NO: 33863 - DNA, 1023 bp, Artificial Sequence
  derived and/or modified sequence
atgatcaagagcagagtgaagagatacagaagaagaagaggcagccagagagccccccaggccctgcagagctaccacctggccgccgaggagcagctgagcttcagaatgctgcagaccagcagcttcgccaaccacagctgggcccacagcgagggcagcggctggctgggcgacctgcagacccacggctgggacaccgtgctgggcaccatcagattcctgaagccctggagccacggcaacttcagcaagcaggagctgaagaacctgcagagcctgttccagctgtacttccacagcttcatccagatcgtgcaggccagcgccggccagttccagctggagtaccccttcgagatccagatcctggccggctgcagaatgaacgccccccagatcttcctgaacatggcctaccagggcagcgacttcctgagcttccagggcatcagctgggagcccagccccggcgccggcatcagagcccagaacatctgcaaggtgctgaacagatacctggacatcaaggagatcctgcagagcctgctgggccacacctgccccagattcctggccggcctgatggaggccggcgagagcgagctgaagagaaaggtgaagcccgaggcctggctgagctgcggccccagccccggccccggcagactgcagctggtgtgccacgtgagcggcttctaccccaagcccgtgtgggtgatgtggatgagaggcgagcaggagcagagaggcacccagagaggcgacgtgctgcccaacgccgacgagacctggtacctgagagccaccctggacgtggccgccggcgaggccgccggcctgagctgcagagtgaagcacagcagcctgggcggccacgacctgatcatccactggggcgagaagcagctgagactgtgctgggagatcatgaagatcgccctgggcctgctgagcgtgggcctgagaaagtgggtgggcatgctgggcaccagaagagtgaagctgggccagagcaagtag

SEQ ID NO: 33864 - protein, 321 aa, Artificial Sequence
  derived and/or modified sequence
MLLLFLLFEGLCCPGENTAAPQALQSYHLAAEEQLSFRMLQTSSFANHSWAHSEGSGWLGDLQTHGWDTVLGTIRFLKPWSHGNFSKQELKNLQSLFQLYFHSFIQIVQASAGQFQLEYPFEIQILAGCRMNAPQIFLNMAYQGSDFLSFQGISWEPSPGAGIRAQNICKVLNRYLDIKEILQSLLGHTCPRFLAGLMEAGESELKRKVKPEAWLSCGPSPGPGRLQLVCHVSGFYPKPVWVMWMRGGYSIFLILICLTVIVTLVILVVVDSRLKKQSPVFLMGANTQDTKNSRHQFCLAQVSWIKNRVLKKWKTRLNQLW

SEQ ID NO: 33865 - DNA, 966 bp, Artificial Sequence
  derived and/or modified sequence
atgcttttgctttttctgctttttgaagggctatgctgtcccggggagaacacagccgcgcctcaagctctccagagttaccatctggccgctgaggaacaactttctttcagaatgcttcagacctcatcattcgcgaaccatagttgggctcatagcgagggttcaggctggctaggggacctgcagacacacggttgggataccgtcctggggaccatcaggtttctgaaaccttggagccatggcaatttcagcaagcaggagctgaagaacctgcagtccttgttccagctgtacttccacagctttattcagatcgtccaggctagcgctggacagttccaactcgagtacccctttgaaattcagattctggcggggtgcaggatgaatgctccgcagatttttttaaatatggcctatcaggggtccgatttcctcagttttcaaggaatatcatgggagccgagtcccggggccggaatccgagcccagaatatctgcaaagtgctgaatcggtatctcgacataaaggagatcctgcaatctctattaggtcatacatgtcctcggttcttggcagggctgatggaggcaggagaaagcgaactgaagagaaaagtaaaaccagaagcctggttgagttgcggtccatcccctgggcccggtcgcctacaattggtgtgtcacgtcagtggcttctatccaaagcccgtatgggtaatgtggatgcggggcggttacagtatcttcctcatacttatctgcttgaccgtcatcgtcacactcgttatccttgtagtcgttgactccaggttgaagaagcagagtccagtattcctgatgggcgccaacacgcaggacaccaaaaacagccggcaccagttctgtttagcacaggtctcctggatcaaaaatagggttttgaaaaagtggaaaactcggctgaatcaattatggtag

SEQ ID NO: 33866 - DNA, 966 bp, Artificial Sequence
  derived and/or modified sequence
atgctgctgctcttcctgctgtttgagggcctgtgctgccctggagagaacacagctgccccccaggccctgcagagctaccacctggccgctgaggagcagctgtccttcaggatgctgcagaccagcagctttgccaaccacagctgggcccacagcgagggcagcggctggctgggggacctgcagacccacggctgggacacagtgctgggcaccatccgcttcctgaagccctggagccacggcaacttcagcaagcaggagctgaagaacctgcagagcctcttccagctgtacttccacagcttcatccagatcgtgcaggccagcgctggccagttccagctggagtacccctttgagatccagatcctggccggctgcaggatgaatgccccccagatcttcctgaacatggcctaccagggcagtgacttcctgtccttccagggcatctcctgggagcccagccctggagctggcatccgggcccagaacatctgcaaggtgctgaaccgctacctggacatcaaggagatcctgcagagcctgctgggccacacctgcccccgcttcctggccggcctgatggaggccggggagagcgagctgaagaggaaggtgaagccagaggcctggctgagctgtggccccagccctggccctggccgcctgcagctggtgtgccacgtgtctggcttctaccccaagcctgtgtgggtgatgtggatgagaggaggctacagcatcttcctgatcctgatctgcctgactgtgattgtgaccctggtgatcctggtggtggtggacagccggctgaagaagcagagccctgtgttcctgatgggcgccaacacccaggacaccaagaacagccgccaccagttctgcctggcccaggtgtcctggatcaagaacagagtgctgaagaagtggaagacccggctgaaccagctgtggtag

SEQ ID NO: 33867 - DNA, 966 bp, Artificial Sequence
  derived and/or modified sequence
atgctgctgctgttcctgctgttcgagggcctgtgctgccccggcgaaaacaccgccgctcctcaggctctgcaaagctaccatctggcagcagaggagcagttaagctttcggatgcttcagacttcgagcttcgctaatcactcctgggcccacagtgaagggtccggatggttgggagatcttcagacgcacggatgggatacggtgttaggcacaattaggttcctgaaaccctggtctcacggaaacttcagtaaacaagagttaaaaaacctgcaaagcttgttccaattatacttccacagcttcatccagattgtacaagcaagcgctggacaattccagcttgagtatccgtttgagatccagatactggccggttgcaggatgaatgcccctcagatttttcttaacatggcttaccaagggtctgattttttgagtttccagggcatctcctgggagcccagccctggcgccggaatcagagcccagaacatatgtaaggtgctgaatcggtacctagatattaaggaaatactgcaatcccttctggggcatacttgcccaagatttcttgccggtctgatggaggccggggaaagcgagctgaagcgcaaggtgaaacctgaagcgtggttgtcctgcggcccttcacccggtcctgggagactccagctagtgtgtcacgtcagtgggttctacccgaaacccgtatgggtcatgtggatgcgaggcgggtactccatctttctgatcctcatctgcctgacagtgattgttaccctagtgatcctggtcgtcgttgattcacgactcaaaaaacagagcccagtttttttgatgggagccaacactcaggacacaaagaattctcggcaccagttctgtttggctcaggtttcttggatcaaaaacagagttctgaaaaaatggaagaccagacttaatcagctgtggtag

SEQ ID NO: 33868 - DNA, 966 bp, Artificial Sequence
  derived and/or modified sequence
atgctgcttttatttctgctgttcgaaggactctgctgcccgggtgaaaacaccgccgcaccacaggctctgcaatcgtatcatctggctgctgaggaacaattaagcttccgaatgctgcaaacctcctcctttgcaaaccactcctgggcgcattccgaaggatccggctggttaggcgacctccagacacacgggtgggacactgtgctggggaccatacgattcttaaaaccatggtctcacggaaattttagtaagcaagaactcaagaacctgcagagcctgtttcagctctattttcactccttcatacagatagttcaggcaagcgccggtcagtttcaattggagtaccctttcgaaattcagattctggctgggtgtcgaatgaatgcaccccagatctttttgaatatggcttaccagggaagcgactttctgtcctttcagggcatcagttgggagcccagcccgggagcgggtattcgggcacaaaacatctgtaaagttttgaaccggtacctcgatatcaaagagatcctgcaaagtctgctaggccacacctgtcccaggttcctcgccggactcatggaggctggcgaatctgagctgaagcgtaaggtgaaaccagaagcctggttgagttgtggcccttcacccggacccggacggctccaattagtttgtcacgtttccggcttctatccaaaacccgtttgggtaatgtggatgaggggcggatactccatcttcctaatactgatctgcctgactgtgatcgtcacacttgtaattctcgtggttgtggatagtaggctgaagaagcagtcacctgtgttccttatgggggctaatacccaggacacaaagaacagccgtcaccaattctgcctggctcaagtttcctggattaagaaccgtgtgctgaaaaagtggaaaacacgattgaatcaattatggtag

SEQ ID NO: 33869 - DNA, 1678 bp, Artificial Sequence
  derived and/or modified sequence
gggtgtggagaggggtactgatatctgaattattagggcaggtgtcctgccaaggaatccctcctttaacagagcttcaatgctgctcctgttcctcctcttcgagggtctctgctgtcctggggaaaatacagcagctccccaggctctacaatcctatcatctagcagcagaggagcagctgtccttccgcatgctccaaacttcctcctttgccaaccacagctgggcacacagtgagggctcaggatggctgggtgacctgcagactcatggctgggacactgtcttgggcaccatccgctttctgaagccctggtcccatggaaacttcagcaagcaggagctgaaaaacttacagtcactgttccagttatacttccatagttttatccagatagtgcaagcttctgctggtcaatttcagcttgaataccccttcgagatccagatattagctggctgtagaatgaatgccccacaaatcttcttaaatatggcatatcaagggtcagatttcctgagtttccaaggaatttcctgggagccatctccaggagcagggatccgggcccagaacatctgtaaagtgctcaatcgctacctagatattaaggaaatactgcaaagccttcttggtcacacctgccctcgatttctagcggggctcatggaagcaggggagtcagaactgaaacggaaagtgaagccagaggcctggctgtcctgtggccccagtcctggccctggccgtctgcagcttgtgtgccatgtctcaggattctacccaaagcccgtgtgggtgatgtggatgcggggtggatattccatctttctcatcctgatctgtttgactgtgatagttaccctggtcatattggttgtagttgactcacggttaaaaaaacagagccctgtctttctcatgggagccaacactcaggacaccaagaattcaagacatcagttctgcttggcacaagtatcgtggatcaaaaacagagtattgaagaagtggaagacacgcctaaaccaactctggtgacatttgctttaccttatacataaaatccttgtctgcatcttcttaaacaccgtccatgtcccataagggaagcatgcttttatttaaacagtttatactagcaaagatactgacccctttaggaatactttttccccatcttccagagattttttttttcctgctttggctacatatccatcattgtttatttttgaaactataatccagatacttctttttcatggattcccgagatcacccaattgatagctcttctgtactccccaaattgaactgatcttcacaagcacattcatctcttcctactctgaacagtagttatttaggtttttgctctttttttttttttaatctcagttgcttgaaagtaggatttaggtatttgtgtctgtattcatgaccaaaaatcttatctgaattcagggccagcttcataagcatgtgacctgtgcagacacatggaatcgtatgctctgcaagaacccatgctagatttaatgctctgctgttgtcatcttggaatccttagtcattttcaaacaagagatattgtattttcatttttcactgaccccacaaattatatagctgattcagtgtgaatgtaatatttctcaataaatgctgact

SEQ ID NO: 33870 - DNA, 966 bp, Artificial Sequence
  derived and/or modified sequence
atgctgctgctgttcctgctgttcgagggcctgtgctgccccggcgagaacaccgccgccccccaggccctgcagagctaccacctggccgccgaggagcagctgagcttcagaatgctgcagaccagcagcttcgccaaccacagctgggcccacagcgagggcagcggctggctgggcgacctgcagacccacggctgggacaccgtgctgggcaccatcagattcctgaagccctggagccacggcaacttcagcaagcaggagctgaagaacctgcagagcctgttccagctgtacttccacagcttcatccagatcgtgcaggccagcgccggccagttccagctggagtaccccttcgagatccagatcctggccggctgcagaatgaacgccccccagatcttcctgaacatggcctaccagggcagcgacttcctgagcttccagggcatcagctgggagcccagccccggcgccggcatcagagcccagaacatctgcaaggtgctgaacagatacctggacatcaaggagatcctgcagagcctgctgggccacacctgccccagattcctggccggcctgatggaggccggcgagagcgagctgaagagaaaggtgaagcccgaggcctggctgagctgcggccccagccccggccccggcagactgcagctggtgtgccacgtgagcggcttctaccccaagcccgtgtgggtgatgtggatgagaggcggctacagcatcttcctgatcctgatctgcctgaccgtgatcgtgaccctggtgatcctggtggtggtggacagcagactgaagaagcagagccccgtgttcctgatgggcgccaacacccaggacaccaagaacagcagacaccagttctgcctggcccaggtgagctggatcaagaacagagtgctgaagaagtggaagaccagactgaaccagctgtggtag

SEQ ID NO: 33871 - protein, 187 aa, Artificial Sequence
  derived and/or modified sequence
MLLLFLLFEGLCCPGENTAVKPEAWLSCGPSPGPGRLQLVCHVSGFYPKPVWVMWMRGEQEQRGTQRGDVLPNADETWYLRATLDVAAGEAAGLSCRVKHSSLGGHDLIIHWGGYSIFLILICLTVIVTLVILVVVDSRLKKQSPVFLMGANTQDTKNSRHQFCLAQVSWIKNRVLKKWKTRLNQLW

SEQ ID NO: 33872 - DNA, 564 bp, Artificial Sequence
  derived and/or modified sequence
atgctgctcttatttctcctattcgaagggctctgttgccctggtgagaacacggcagtcaaacccgaagcgtggctgagctgcggacccagtccgggccccgggaggctgcagctagtctgccacgtgtctgggttttaccccaaacctgtctgggtgatgtggatgcgtggggaacaggaacaacgagggactcaacgtggagatgtgctgcctaatgccgacgaaacctggtacctccgtgccacactcgatgtggcagcaggtgaggctgccggactgtcttgccgcgtgaagcattcttctcttggcggccatgacctgataatacactggggcggctactcaattttcttgatcctcatctgcttgacagtaattgtgaccctggtcatacttgttgttgttgactctcgtcttaaaaagcagagtcccgtgtttctcatgggcgcaaacacccaggacactaagaacagccgccaccagttctgtctggcccaagtcagttggatcaagaaccgggttttgaagaagtggaagaccagattaaaccaattgtggtag

SEQ ID NO: 33873 - DNA, 564 bp, Artificial Sequence
  derived and/or modified sequence
atgctgctgctcttcctgctgtttgagggcctgtgctgccctggagagaacacagctgtgaagccagaggcctggctgagctgtggccccagccctggccctggccgcctgcagctggtgtgccacgtgtctggcttctaccccaagcctgtgtgggtgatgtggatgagaggagagcaggagcagaggggcacccagagaggagatgtgctgcccaatgctgatgagacctggtacctgcgggccaccctggatgtggccgccggggaggccgccggcctgagctgccgggtgaagcacagcagcctgggcggccatgacctgatcatccactggggcggctacagcatcttcctgatcctgatctgcctgactgtgattgtgaccctggtgatcctggtggtggtggacagccggctgaagaagcagagccctgtgttcctgatgggcgccaacacccaggacaccaagaacagccgccaccagttctgcctggcccaggtgtcctggatcaagaacagagtgctgaagaagtggaagacccggctgaaccagctgtggtag

SEQ ID NO: 33874 - DNA, 564 bp, Artificial Sequence
  derived and/or modified sequence
atgctgctgctgttcctgctgttcgagggcctgtgctgccccggcgagaatactgcggtaaaaccagaggcatggttatcctgcggacccagccccggacccggaaggctgcaactcgtctgccacgtgagtggcttttaccccaagcctgtgtgggtgatgtggatgcgcggtgaacaggagcagagaggaacccagagaggcgacgtcctgcccaatgccgacgagacatggtacctgcgcgcaaccctggatgttgctgctggcgaggccgccgggctgtcatgtcgggtcaaacactcttcattaggaggtcacgacttgataatccattggggggggtactctattttccttattctaatctgtcttactgtaatagtgacgttggtgatcctcgtggtcgtggattctaggctgaagaagcaatctccagttttccttatgggcgccaatacccaggacacaaaaaacagcagacaccaattctgtctcgcacaggtcagctggattaagaaccgggtcctcaagaagtggaaaacccggctgaaccagctttggtag

SEQ ID NO: 33875 - DNA, 564 bp, Artificial Sequence
  derived and/or modified sequence
atgctactgctgttccttctttttgaaggcctctgttgtcccggagagaacactgcagtcaagcccgaggcctggcttagttgtggcccaagcccaggtcccggaagactccagctggtgtgtcatgtctctggtttctacccaaaacctgtttgggttatgtggatgcgcggagaacaggagcagagaggaactcagagaggtgacgtgctgcctaatgccgatgaaacatggtacctaagagcaacactggatgtcgctgctggcgaggcggctggattgtcttgccgtgtgaagcactcatccctcggaggccacgatctgatcatccattggggaggttacagcatattcttgatcttgatttgcctgacagtgatcgtgacattggtgatattagtcgttgtggactctagactgaagaaacagagtcccgtctttctcatgggggcaaatacgcaagacacaaagaacagcaggcatcaattttgccttgcacaggtgagctggatcaagaaccgcgtgctgaaaaaatggaagacacgcctgaatcagctatggtag

SEQ ID NO: 33876 - DNA, 1271 bp, Artificial Sequence
  derived and/or modified sequence
agggaagtcagacgagagtgcaagagggtgtggagaggggtactgatatctgaattattagggcaggtgtcctgccaaggaatccctcctttaacagagcttcaatgctgctcctgttcctcctcttcgagggtctctgctgtcctggggaaaatacagcagtgaagccagaggcctggctgtcctgtggccccagtcctggccctggccgtctgcagcttgtgtgccatgtctcaggattctacccaaagcccgtgtgggtgatgtggatgcggggtgagcaggagcagcggggcactcagcgaggggacgtcctgcctaatgctgacgagacatggtatctccgagcaaccctggatgtggcggctggggaggcagctggcctgtcctgtcgggtgaaacacagcagtctagggggccatgatctaatcatccattggggtggatattccatctttctcatcctgatctgtttgactgtgatagttaccctggtcatattggttgtagttgactcacggttaaaaaaacagagccctgtctttctcatgggagccaacactcaggacaccaagaattcaagacatcagttctgcttggcacaagtatcgtggatcaaaaacagagtattgaagaagtggaagacacgcctaaaccaactctggtgacatttgctttaccttatacataaaatccttgtctgcatcttcttaaacaccgtccatgtcccataagggaagcatgcttttatttaaacagtttatactagcaaagatactgacccctttaggaatactttttccccatcttccagagattttttttttcctgctttggctacatatccatcattgtttatttttgaaactataatccagatacttctttttcatggattcccgagatcacccaattgatagctcttctgtactccccaaattgaactgatcttcacaagcacattcatctcttcctactctgaacagtagttatttaggtttttgctctttttttttttttaatctcagttgcttgaaagtaggatttaggtatttgtgtctgtattcatgaccaaaaatcttatctgaattcagggccagcttcataagcatgtgacctgtgcagacacatggaatcgtatgctctgcaagaacccatgctagatttaatgctctgctgttgtcatcttggaatccttagtcattttcaaacaagagatattgtattttcatttttcactgaccccacaaattatatagctgattcagtgt

SEQ ID NO: 33877 - DNA, 564 bp, Artificial Sequence
  derived and/or modified sequence
atgctgctgctgttcctgctgttcgagggcctgtgctgccccggcgagaacaccgccgtgaagcccgaggcctggctgagctgcggccccagccccggccccggcagactgcagctggtgtgccacgtgagcggcttctaccccaagcccgtgtgggtgatgtggatgagaggcgagcaggagcagagaggcacccagagaggcgacgtgctgcccaacgccgacgagacctggtacctgagagccaccctggacgtggccgccggcgaggccgccggcctgagctgcagagtgaagcacagcagcctgggcggccacgacctgatcatccactggggcggctacagcatcttcctgatcctgatctgcctgaccgtgatcgtgaccctggtgatcctggtggtggtggacagcagactgaagaagcagagccccgtgttcctgatgggcgccaacacccaggacaccaagaacagcagacaccagttctgcctggcccaggtgagctggatcaagaacagagtgctgaagaagtggaagaccagactgaaccagctgtggtag

SEQ ID NO: 33878 - protein, 101 aa, Artificial Sequence
  derived and/or modified sequence
MLLLFLLFEGLCCPGENTAVKPEAWLSCGPSPGPGRLQLVCHVSGFYPKPVWVMWMRGEQEQRGTQRGDVLPNADETWWIFHLSHPDLFDCDSYPGHIGCS

SEQ ID NO: 33879 - DNA, 180 bp, Artificial Sequence
  derived and/or modified sequence
atggcctccgagggacttgccggagcgttggcttccgtgttggccggacaggggagcagcgtccactcttgcgattcagcacctgcaggggagccacccgctcctagagcaggttgcggcaggacttgcgctacctggtgttggccatgcagcagcgctagccgtatgaggtgttactag

SEQ ID NO: 33880 - DNA, 183 bp, Artificial Sequence
  derived and/or modified sequence
taagtctccgggttctatcccaaaccagtgtgggtgatgtggatgcggggtgaacaggagcagagagggacccaaaggggcgacgtgttgcccaacgcagatgaaacgtggtggatcttccatttgtcgcatccagacctattcgactgtgatagctaccctggacacatcggctgtagctag

SEQ ID NO: 33881 - DNA, 306 bp, Artificial Sequence
  derived and/or modified sequence
atgcttctcttgttcctactctttgaaggcctgtgctgccctggtgaaaatacagccgtgaagccagaggcttggctgagctgcggcccgtcacctgggcccggccgtttacagttggtctgccacgttagtggattctatcctaagcctgtgtgggtcatgtggatgagaggagagcaggagcaacgggggactcagcggggagacgtcctgcctaacgcagacgagacatggtggatatttcacctctcccaccccgatttgttcgattgtgactcctatccaggccacattgggtgctcgtag

SEQ ID NO: 33882 - DNA, 183 bp, Artificial Sequence
  derived and/or modified sequence
tgagtgtctggcttctaccccaagcctgtgtgggtgatgtggatgagaggagagcaggagcagaggggcacccagagaggagatgtgctgcccaatgctgatgagacctggtggatcttccacctgagccacccagacctgtttgactgtgacagctacccaggccacatcggctgcagctag

SEQ ID NO: 33883 - DNA, 306 bp, Artificial Sequence
  derived and/or modified sequence
atgctgctgctcttcctgctgtttgagggcctgtgctgccctggagagaacacagctgtgaagccagaggcctggctgagctgtggccccagccctggccctggccgcctgcagctggtgtgccacgtgtctggcttctaccccaagcctgtgtgggtgatgtggatgagaggagagcaggagcagaggggcacccagagaggagatgtgctgcccaatgctgatgagacctggtggatcttccacctgagccacccagacctgtttgactgtgacagctacccaggccacatcggctgcagctag

SEQ ID NO: 33884 - DNA, 183 bp, Artificial Sequence
  derived and/or modified sequence
tgagtgagcggcttctaccccaagcccgtgtgggtgatgtggatgagaggggaacaggagcagcggggaacccagcgcggcgacgtactgcctaacgccgatgaaacctggtggatcttccaccttagtcatccagacttgttcgactgtgattcttacccggggcatataggatgctcctag

SEQ ID NO: 33885 - DNA, 306 bp, Artificial Sequence
  derived and/or modified sequence
atgctgctgctgttcctgctgttcgagggcctgtgctgccccggcgaaaacacggccgttaagccagaagcatggttgtcttgcgggccatccccgggccctggacgactgcagttggtgtgtcatgtgtcaggattctaccctaaaccagtgtgggtgatgtggatgcgcggcgagcaggagcagagggggactcagcgaggagacgtgttgccaaacgccgacgaaacctggtggatatttcatttgtctcacccagatctcttcgattgcgactcataccccggtcatattggctgtagctag

SEQ ID NO: 33886 - DNA, 183 bp, Artificial Sequence
  derived and/or modified sequence
tgagtgtcaggattctatcctaagcccgtatgggttatgtggatgagaggcgagcaagagcaaagaggcacccagcggggtgatgtgcttcctaatgcggatgaaacttggtggatattccacctcagccacccagatctgtttgactgtgattcgtacccaggccatatcgggtgttcatag

SEQ ID NO: 33887 - DNA, 306 bp, Artificial Sequence
  derived and/or modified sequence
atgcttttgcttttcctactgtttgaagggctttgctgccctggtgagaataccgctgtcaaaccggaggcttggttgtcctgcggtccgtctcccggacctggcaggctgcagcttgtttgccacgtgagtgggttctatcctaaacctgtgtgggttatgtggatgagaggtgaacaggagcaacggggtacacagcgcggagatgtattaccaaatgcggacgaaacatggtggatttttcatctcagtcaccccgatctgttcgactgtgactcctaccctggacacatcgggtgttcctag

SEQ ID NO: 33888 - DNA, 183 bp, Artificial Sequence
  derived and/or modified sequence
tgagtgagcggcttctaccccaagcccgtgtgggtgatgtggatgagaggcgagcaggagcagagaggcacccagagaggcgacgtgctgcccaacgccgacgagacctggtggatcttccacctgagccaccccgacctgttcgactgcgacagctaccccggccacatcggctgcagctag

SEQ ID NO: 33889 - DNA, 306 bp, Artificial Sequence
  derived and/or modified sequence
atgctgctgctgttcctgctgttcgagggcctgtgctgccccggcgagaacaccgccgtgaagcccgaggcctggctgagctgcggccccagccccggccccggcagactgcagctggtgtgccacgtgagcggcttctaccccaagcccgtgtgggtgatgtggatgagaggcgagcaggagcagagaggcacccagagaggcgacgtgctgcccaacgccgacgagacctggtggatcttccacctgagccaccccgacctgttcgactgcgacagctaccccggccacatcggctgcagctag

SEQ ID NO: 33890 - protein, 472 aa, Artificial Sequence
  derived and/or modified sequence
MNMPQSLGNQPLPPEPPSLGTPAEGPGTTSPPEHCWPVRPTLRNELDTFSVHFYIFFGPSVALPPERPAVFAMRLLPVLDSGGVLSLELQLNASSVRQENVTVFGCLTHEVPLSLGDAAVTCSKESLAGFLLSVSATTRVARLRIPFPQTGTWFLALRSLCGVGPRFVRCRNATAEVRMRTFLSPCVDDCGPYGQCKLLRTHNYLYAACECKAGWRGWGCTDSADALTYGFQLLSTLLLCLSNLMFLPPVVLAIRSRYVLEAAVYTFTMFFSTFYHACDQPGIVVFCIMDYDVLQFCDFLGSLMSVWVTVIAMARLQPVVKQVLYLLGAMLLSMALQLDRHGLWNLLGPSLFALGILATAWTVRSVRRRHCYPPTWRRWLFYLCPGSLIAGSAVLLYAFVETRDNYFYIHSIWHMLIAGSVGFLLPPRAKTDHGVPSGARARGCGYQLCINEQEELGLVGPGGATVSSICAS

SEQ ID NO: 33891 - DNA, 1419 bp, Artificial Sequence
  derived and/or modified sequence
atgaacatgccccagagcctgggcaaccagcccctgccccccgagccccccagcctgggcacccccgccgagggccccggcaccaccagcccccccgagcactgctggcccgtgagacccaccctgagaaacgagctggacaccttcagcgtgcacttctacatcttcttcggccccagcgtggccctgccccccgagagacccgccgtgttcgccatgagactgctgcccgtgctggacagcggcggcgtgctgagcctggagctgcagctgaacgccagcagcgtgagacaggagaacgtgaccgtgttcggctgcctgacccacgaggtgcccctgagcctgggcgacgccgccgtgacctgcagcaaggagagcctggccggcttcctgctgagcgtgagcgccaccaccagagtggccagactgagaatccccttcccccagaccggcacctggttcctggccctgagaagcctgtgcggcgtgggccccagattcgtgagatgcagaaacgccaccgccgaggtgagaatgagaaccttcctgagcccctgcgtggacgactgcggcccctacggccagtgcaagctgctgagaacccacaactacctgtacgccgcctgcgagtgcaaggccggctggagaggctggggctgcaccgacagcgccgacgccctgacctacggcttccagctgctgagcaccctgctgctgtgcctgagcaacctgatgttcctgccccccgtggtgctggccatcagaagcagatacgtgctggaggccgccgtgtacaccttcaccatgttcttcagcaccttctaccacgcctgcgaccagcccggcatcgtggtgttctgcatcatggactacgacgtgctgcagttctgcgacttcctgggcagcctgatgagcgtgtgggtgaccgtgatcgccatggccagactgcagcccgtggtgaagcaggtgctgtacctgctgggcgccatgctgctgagcatggccctgcagctggacagacacggcctgtggaacctgctgggccccagcctgttcgccctgggcatcctggccaccgcctggaccgtgagaagcgtgagaagaagacactgctacccccccacctggagaagatggctgttctacctgtgccccggcagcctgatcgccggcagcgccgtgctgctgtacgccttcgtggagaccagagacaactacttctacatccacagcatctggcacatgctgatcgccggcagcgtgggcttcctgctgccccccagagccaagaccgaccacggcgtgcccagcggcgccagagccagaggctgcggctaccagctgtgcatcaacgagcaggaggagctgggcctggtgggccccggcggcgccaccgtgagcagcatctgcgccagctag

SEQ ID NO: 33892 - DNA, 1419 bp, Artificial Sequence
  derived and/or modified sequence
atgaacatgccgcagtcactcggaaaccagcctctacccccagagccacccagcttaggaacacccgctgaggggcccggtaccacatcccctcctgagcactgttggcccgtgcgacccaccctgcgcaacgagctagacacttttagcgtgcatttttacattttctttggcccttccgtggcgctccctcctgagcgacccgcggtattcgccatgaggttgttaccggtactggactccggcggagtactgtcactggagctgcagttaaatgcttccagcgtgagacaggagaatgtgacagttttcggttgtctcacacatgaagtccctctctcactgggcgacgcagcagttacctgctcaaaggagagtttggccgggtttctgttgagcgttagcgctaccacccgagttgctcgcctaagaattcccttcccgcagacaggaacatggtttttagcgctgcggtcactgtgcggagtggggccccgcttcgtgagatgccggaatgctacagccgaagttaggatgcgcaccttcttgtccccttgtgtggacgattgtggaccctatggccagtgcaagctgctccggacacataactacctctacgctgcgtgtgagtgcaaagccgggtggagaggctggggatgcaccgactcggcagatgccctcacatatggttttcagctgctctccacactcctgctgtgtctgtctaatctgatgttcttaccacctgtggtcctggccatccgcagtaggtatgttctggaggcggccgtgtacaccttcaccatgttcttttctacgttctaccacgcctgcgaccagcctggcatcgtcgtgttttgcataatggactatgatgtcctgcaattttgcgattttctcggtagcttgatgtctgtctgggtcactgtcatagccatggctaggctgcaaccagtggtgaagcaagtgctgtatctcctcggtgctatgctgctttccatggcactacaattggacagacacgggctgtggaacctactgggacctagcttattcgcgctcggcatccttgcaaccgcctggacagtacgctctgttagaaggagacactgctacccgcctacttggcggcgctggctgttctatctttgccccggaagtttgattgcagggagtgccgtactgctgtatgcgttcgtcgaaactcgggataattatttttatattcattctatctggcatatgctgattgctggctcggtcggttttctgctgccaccacgtgccaaaaccgatcacggcgtgccttcaggagctcgagccagaggctgtggctaccaactttgcatcaacgagcaagaagaactagggctagtcggaccaggtggcgcgacggtcagttccatctgcgcctcatag

SEQ ID NO: 33893 - DNA, 1419 bp, Artificial Sequence
  derived and/or modified sequence
atgaacatgcctcagtctttgggcaaccaacccctgccgccggaacccccctccctaggcactccagcagaagggcctgggacaacctccccgcccgagcactgttggccagtgcgacctactctgaggaacgagctggacactttctctgtgcacttttacatatttttcggtccaagcgtcgcactccctcccgagaggccagccgtgtttgccatgagacttctgcctgtgctagattccggcggagtgctttctctcgagctgcagctgaacgcctcttctgtgcgtcaagagaacgtcaccgtgttcggatgcctgacccatgaggtgcccctgtcactcggagacgcggcggtgacctgttctaaggagtctttagcaggctttcttttgtccgtgtccgccacaactagagttgctcgacttagaatacccttcccgcagacaggaacatggtttctggcgctcaggagcttgtgtggcgtaggcccacgctttgtgcgctgccgaaatgctactgcggaagtccggatgcgtaccttcctctctccgtgtgttgacgattgtggcccttatgggcaatgcaagctactgagaactcataactacctgtacgcagcttgcgaatgtaaggcaggctggagaggctgggggtgtaccgactctgctgacgcccttacttatggctttcaattactgtctactctattgttatgcctcagcaacttgatgttcctgcccccagtggttctggctattcgatcccggtacgtcctagaggctgctgtgtatacttttactatgttcttcagcaccttctaccatgcctgcgaccagcctggcattgtcgttttttgcattatggactatgacgtgcttcaattctgcgactttctgggcagtttaatgagcgtgtgggtcacagtgatcgccatggctcggcttcaacccgtggtaaagcaggtcctgtacctcctgggggcaatgttgcttagtatggcacttcagctcgatcggcatggcctgtggaatctgcttgggccatccctctttgccctgggcattctcgcaacagcttggactgtacggtctgtgcggagacggcattgctatcccccaacatggcggaggtggctcttctacctgtgtccgggttcacttatcgcaggatcagctgttttgctttacgctttcgtggagacgcgggataattatttctacattcactctatttggcatatgctgattgcgggatccgtgggttttctcctcccgccgcgggctaagacagaccacggagtgccatcaggagccagagctcggggatgcggataccagctctgtatcaacgaacaggaggagctaggcttggtggggcctggcggtgcgacggtgtcaagcatttgcgctagttag

SEQ ID NO: 33894 - DNA, 1419 bp, Artificial Sequence
  derived and/or modified sequence
atgaacatgccccagagcctgggcaaccagcccctgcccccagagccccccagcctgggcaccccagctgagggccctggcaccaccagccccccagagcactgctggcctgtgcggcccaccctgagaaatgagctggacaccttctctgtgcacttctacatcttcttcggccccagcgtggccctgcccccagagaggcctgctgtgtttgccatgaggctgctgcctgtgctggacagcggaggagtgctgagcctggagctgcagctgaatgccagctctgtgcggcaggagaatgtgacagtgtttggctgcctgacccatgaggtgcccctgagcctgggagatgctgctgtgacctgcagcaaggagagcctggccggcttcctgctgtctgtgtctgccaccaccagggtggcccggctgcgcatccccttcccccagacaggcacctggttcctggccctgcggagcctgtgtggggtgggccccaggtttgtgcgctgcagaaatgccacagctgaggtgaggatgaggaccttcctgagcccctgtgtggatgactgtggcccctacggccagtgcaagctgctgcggacccacaactacctgtatgctgcctgtgagtgcaaggccggctggaggggctggggctgcacagattctgcagatgccctgacctacggcttccagctgctgagcaccctgctgctgtgcctgagcaacctgatgttcctgccccctgtggtgctggccatccgcagccgctacgtgctggaggccgctgtgtacaccttcaccatgttcttcagcaccttctaccacgcctgtgaccagcccggcatcgtggtgttctgcatcatggactatgatgtgctgcagttctgtgacttcctgggcagcctgatgtctgtgtgggtgacagtgattgccatggcccggctgcagcctgtggtgaagcaggtgctgtacctgctgggcgccatgctgctgtccatggccctgcagctggacagacatggcctgtggaacctgctgggccccagcctgtttgccctgggcatcctggccacagcctggacagtgcgctctgtgagaagaagacactgctacccacccacctggaggcgctggctgttctacctgtgccccggcagcctgattgctggcagcgctgtgctgctgtatgcctttgtggagacccgggacaactacttctacatccacagcatctggcacatgctgattgctggctctgtgggcttcctgctgcccccccgggccaagacagaccatggagtgcccagcggggcccgggcccggggctgcggctaccagctgtgcatcaatgagcaggaggagctgggcctggtgggccctggaggagccaccgtgagcagcatctgtgccagctag

SEQ ID NO: 33895 - DNA, 1419 bp, Artificial Sequence
  derived and/or modified sequence
atgaacatgccccagagcctgggcaaccagcccctgccccccgagccaccaagcctgggcaccccagccgaggggcccggcactacgtccccccctgaacattgctggcccgtgcgccccactctccgtaacgagttagacacgttcagcgtgcatttctacattttttttggcccctctgtcgccctcccaccggaacgccccgcggtctttgctatgcggcttctccccgttttggattcaggcggggttctctcccttgagttgcagctcaacgcatcctctgtgaggcaggaaaacgtgacagtttttggatgtttgacacatgaagtgccactcagcctaggtgatgctgccgtaacttgcagtaaggaatcactggccgggttcctgctatccgtgtctgccacaacacgcgtcgcccgcctgcgcatcccgtttccccaaacagggacgtggtttctggcgcttaggagtctgtgcggcgttgggccccggttcgtgaggtgccgcaatgcaaccgcagaagtgaggatgcgaacttttctttctccttgcgtggatgattgcgggccttatggccagtgcaaattattgcggacacataactatctgtacgccgcctgtgaatgcaaggccgggtggagggggtgggggtgcacagatagcgccgacgcgctaacttacgggtttcaactgctctccactctattgctgtgcttgtcgaacctgatgttcctgcctcctgtggtactagctatcaggtctaggtatgtcctagaggccgcagtctatacctttactatgtttttttccacgttttaccacgcgtgtgaccagcccggcatcgtggtgttttgtataatggattacgacgttttacagttctgcgattttctcgggtcactgatgagtgtgtgggtgactgtgattgcaatggcccggctgcagcctgttgtgaagcaggttctatacctcctgggcgcaatgcttttgagcatggcactccagttggaccgccacgggctgtggaatctcctgggtccctcgctattcgcactgggaattctggctaccgcctggaccgtacgcagtgtccggagacgccattgttacccacccacatggcgtcggtggttgttctacctgtgccctgggagcttgatcgcagggtcagccgttttactctatgcctttgtggagacccgagacaactacttttacatacacagtatatggcacatgttgatagctggatctgtgggcttcctgttgccacctagagccaagacagatcacggcgtccccagcggagcaagggcacgcggctgtggctaccagctttgcataaatgagcaggaagaattgggcttggtggggcctggaggcgccaccgtctctagcatctgcgccagctag

SEQ ID NO: 33896 - DNA, 1419 bp, Artificial Sequence
  derived and/or modified sequence
atgaacatgccccagagcctgggcaaccagcccctgccccccgagccccccagtctcggcacgccagccgagggccctggcacaacgtccccaccagagcactgctggcctgttaggcccaccttgcgcaacgagttggataccttttccgtgcacttttacatcttcttcggccctagtgtggctcttccccccgaacggcccgctgtgttcgctatgcggctcttgccagtgctggacagcgggggggtgctgtccctcgagctgcaactgaacgcgagttcagttaggcaggagaatgtgacagtttttggctgtctaacgcatgaggtacctctgagtctgggggacgctgcagtgacttgttccaaagagtcgctggcaggattcttgctgagcgtctccgcaacgactagagttgcaagacttcggattcctttcccacaaactggcacttggttcctggcactccgctccttgtgcggtgtggggccccgcttcgttaggtgtcggaacgccacagctgaggtgaggatgagaacttttctgtccccatgtgttgatgactgcggcccatatggccagtgcaaactgctgcgcacacacaactacctttacgccgcttgcgagtgcaaggcaggatggcgcgggtggggctgcactgactctgccgacgctctgacatacggattccagcttcttagtaccctccttctgtgcctatctaatttgatgtttctgccaccggtggtattagccatcagatcaaggtacgtgctggaagcagcggtgtatacatttaccatgttcttcagtactttttaccacgcctgcgatcagccaggcatcgttgtcttctgtatcatggattatgacgtgttgcagttttgcgattttctgggttccttgatgagtgtatgggtgaccgtcatagctatggcaagacttcagcccgtcgtgaaacaggttctgtacctgctgggagccatgctcctgtcgatggcattgcagctggaccggcacggactttggaatttgctgggcccaagtctgttcgccttaggcatcttggcgaccgcttggacggtcagaagtgtgcgccgccgccattgctacccccccacttggaggcgttggcttttctacttgtgtccagggagtctgatagctggaagcgcggtgttgctgtacgccttcgttgagactcgagataattatttctatattcattcaatatggcatatgctgatcgccggctccgtcgggtttctcttaccgccgagagcaaagaccgatcatggtgttccgtccggagccagggctcgggggtgcggataccagctgtgcataaatgaacaggaagagttggggttggttggtccaggaggcgcgaccgtgagttcaatatgtgccagttag

SEQ ID NO: 33897 - DNA, 1419 bp, Artificial Sequence
  derived and/or modified sequence
atgaacatgccacagagtcttggcaaccagcctctcccaccagaacctcccagcttgggcacccctgcggagggaccgggaaccacctcccctccagagcattgctggcctgtccgaccaaccctgcggaacgagttggatactttctccgtccacttctacatattctttggcccttcggttgctcttcctcctgaacgtccggcagtgtttgctatgcgcctgctgcccgtcttggacagtggtggagtgttaagccttgaactgcagcttaatgcatcctccgtaaggcaggagaatgtaacagtctttgggtgtctgacacacgaagttccgcttagtctcggcgatgcagctgttacctgttcaaaggaaagtctggcaggattcctactaagtgtttccgctaccacaagagtggctcgcctgaggattccttttccccagacagggacgtggtttcttgccctgaggtccctgtgcggcgtaggccctcgcttcgttcggtgtagaaacgcaaccgccgaggtacggatgaggacatttctcagcccgtgtgtcgacgactgtgggccttacgggcagtgtaagctccttcgcacacacaactacctctacgcagcctgtgagtgcaaggccggttggaggggatgggggtgtactgacagtgccgacgctctgacctacggattccagctcctctccacactcctgctttgtctgagtaatttgatgtttttaccgcctgtggtgctggcaattagatctagatacgttctcgaggcagccgtctatacctttacgatgttcttctccactttttaccacgcctgtgatcagccagggattgtcgtgttctgtattatggactatgacgtactccagttctgcgacttcctggggtctctcatgtccgtgtgggtgaccgtgatcgccatggcacggctacagccggtggtgaaacaggtgctttatctgctgggcgctatgttactgagtatggcactacagctggaccggcatggactttggaacctccttgggccaagtctgtttgcgctgggtatcttagctacagcttggaccgtgcgcagcgtccgccgaaggcattgttacccacccacatggagacggtggctgttttacctgtgtcctggttcactaatcgccggttccgctgtgttactctatgccttcgtggagacacgtgataattatttttacattcatagtatctggcatatgttaattgcgggtagtgtcggcttcctactccctccgagagcaaagactgaccatggggtaccgtcgggggcaagggcgagggggtgtggttatcagttgtgtattaacgaacaggaggagctgggcctcgtaggacccggtggcgcaacagtgtcttccatctgtgccagttag

SEQ ID NO: 33898 - DNA, 1419 bp, Artificial Sequence
  derived and/or modified sequence
atgaatatgccacagagtcttggaaaccagccactgccaccagaaccacctagtctggggacaccagctgaagggcctgggacaacctccccccctgagcactgttggccggtgagacctacacttagaaacgagcttgatacttttagtgtacacttctacatattcttcggaccttcggtggcactgccacccgagcggcctgctgtgttcgctatgcggctgctgccagtcttggactccgggggagttctgagtctcgaactacagctgaacgctagcagcgtgcgccaggagaatgttacagtgttcggatgtctgacacacgaggtaccactttccctgggagatgcggcagtcacgtgttcaaaggaaagcttggcgggatttctgctgtctgtgtcagctacgactcgagtagcaaggctgcggatccctttcccacaaaccggcacatggttcctggccctgcggtcactatgcggagtgggaccacgcttcgtgcgttgccggaacgctaccgcagaagtgaggatgagaacgttcctatcgccatgcgtcgatgactgcggtccttacggtcagtgcaaactattaaggacccataattacttgtacgcggcatgcgagtgtaaggctgggtggaggggatgggggtgtacagattctgccgacgcattaacctatggattccagctgttgtcaactctgttgctgtgcctctcaaacctcatgtttctccctccggtagtgctggcaatccgaagcaggtacgttttggaggcagccgtgtataccttcacgatgttcttttccacattctaccacgcctgcgaccaaccaggaatcgtcgttttttgtatcatggattacgacgttttgcaattctgtgattttcttggatcactcatgtcagtctgggtgacggtgattgcaatggctagactgcaacctgtggtgaaacaggtgctgtacctgctcggggcaatgctcctctctatggctttacaactcgatcgacacggactgtggaacctgttgggacccagtttgttcgccctgggtattctggcaaccgcatggaccgttaggtcagtgcgaagaaggcactgttacccccctacttggagacgctggttattctatctctgtccgggatcactgatcgctggctccgcagtactgctttacgctttcgttgagactagagacaattacttctatatacactccatttggcatatgctgattgcagggagtgtcgggtttctgctcccgcctcgggcaaagacagatcatggagtgccgtccggtgcgagggccagaggctgcggctaccagctgtgtatcaacgagcaggaggagttgggtttagtgggccctgggggtgcaaccgtatcctcaatttgtgctagctag

SEQ ID NO: 33899 - protein, 1292 aa, Artificial Sequence
  derived and/or modified sequence
MKPATGLWVWVSLLVAAGTVQPSDSQSVCAGTENKLSSLSDLEQQYRALRKYYENCEVVMGNLEITSIEHNRDLSFLRSVREVTGYVLVALNQFRYLPLENLRIIRGTKLYEDRYALAIFLNYRKDGNFGLQELGLKNLTEILNGGVYVDQNKFLCYADTIHWQDIVRNPWPSNLTLVSTNGSSGCGRCHKSCTGRCWGPTENHCQTLTRTVCAEQCDGRCYGPYVSDCCHRECAGGCSGPKDTDCFACMNFNDSGACVTQCPQTFVYNPTTFQLEHNFNAKYTYGAFCVKKCPHNFVVDSSSCVRACPSSKMEVEENGIKMCKPCTDICPKACDGIGTGSLMSAQTVDSSNIDKFINCTKINGNLIFLVTGIHGDPYNAIEAIDPEKLNVFRTVREITGFLNIQSWPPNMTDFSVFSNLVTIGGRVLYSGLSLLILKQQGITSLQFQSLKEISAGNIYITDNSNLCYYHTINWTTLFSTINQRIVIRDNRKAENCTAEGMVCNHLCSSDGCWGPGPDQCLSCRRFSRGRICIESCNLYDGEFREFENGSICVECDPQCEKMEDGLLTCHGPGPDNCTKCSHFKDGPNCVEKCPDGLQGANSFIFKYADPDRECHPCHPNCTQGCNGPTSHDCIYYPWTGHSTLPQHARTPLIAAGVIGGLFILVIVGLTFAVYVRRKSIKKKRALRRFLETELVEPLTPSGTAPNQAQLRILKETELKRVKVLGSGAFGTVYKGIWVPEGETVKIPVAIKILNETTGPKANVEFMDEALIMASMDHPHLVRLLGVCLSPTIQLVTQLMPHGCLLEYVHEHKDNIGSQLLLNWCVQIAKGMMYLEERRLVHRDLAARNVLVKSPNHVKITDFGLARLLEGDEKEYNADGGKMPIKWMALECIHYRKFTHQSDVWSYGVTIWELMTFGGKPYDGIPTREIPDLLEKGERLPQPPICTIDVYMVMVKCWMIDADSRPKFKELAAEFSRMARDPQRYLVIQGDDRMKLPSPNDSKFFQNLLDEEDLEDMMDAEEYLVPQAFNIPPPIYTSRARIDSNRNQFVYRDGGFAAEQGVSVPYRAPTSTIPEAPVAQGATAEIFDDSCCNGTLRKPVAPHVQEDSSTQRYSADPTVFAPERSPRGELDEEGYMTPMRDKPKQEYLNPVEENPFVSRRKNGDLQALDNPEYHNASNGPPKAEDEYVNEPLYLNTFANTLGKAEYLKNNILSMPEKAKKAFDNPDYWNHSLPPRSTLQHPDYLQEYSTKYFYKQNGRIRPIVAENPEYLSEFSLKPGTVLPPPPYRHRNTVV

SEQ ID NO: 33900 - DNA, 11893 bp, Artificial Sequence
  derived and/or modified sequence
cacgcgcgcccggctgggggatctcctccgcgtgcccgaaagggggatatgccatttggacatgtaattgtcagcacgggatctgagacttccaaaaaatgaagccggcgacaggactttgggtctgggtgagccttctcgtggcggcggggaccgtccagcccagcgattctcagtcagtgtgtgcaggaacggagaataaactgagctctctctctgacctggaacagcagtaccgagccttgcgcaagtactatgaaaactgtgaggttgtcatgggcaacctggagataaccagcattgagcacaaccgggacctctccttcctgcggtctgttcgagaagtcacaggctacgtgttagtggctcttaatcagtttcgttacctgcctctggagaatttacgcattattcgtgggacaaaactttatgaggatcgatatgccttggcaatatttttaaactacagaaaagatggaaactttggacttcaagaacttggattaaagaacttgacagaaatcctaaatggtggagtctatgtagaccagaacaaattcctttgttatgcagacaccattcattggcaagatattgttcggaacccatggccttccaacttgactcttgtgtcaacaaatggtagttcaggatgtggacgttgccataagtcctgtactggccgttgctggggacccacagaaaatcattgccagactttgacaaggacggtgtgtgcagaacaatgtgacggcagatgctacggaccttacgtcagtgactgctgccatcgagaatgtgctggaggctgctcaggacctaaggacacagactgctttgcctgcatgaatttcaatgacagtggagcatgtgttactcagtgtccccaaacctttgtctacaatccaaccacctttcaactggagcacaatttcaatgcaaagtacacatatggagcattctgtgtcaagaaatgtccacataactttgtggtagattccagttcttgtgtgcgtgcctgccctagttccaagatggaagtagaagaaaatgggattaaaatgtgtaaaccttgcactgacatttgcccaaaagcttgtgatggcattggcacaggatcattgatgtcagctcagactgtggattccagtaacattgacaaattcataaactgtaccaagatcaatgggaatttgatctttctagtcactggtattcatggggacccttacaatgcaattgaagccatagacccagagaaactgaacgtctttcggacagtcagagagataacaggtttcctgaacatacagtcatggccaccaaacatgactgacttcagtgttttttctaacctggtgaccattggtggaagagtactctatagtggcctgtccttgcttatcctcaagcaacagggcatcacctctctacagttccagtccctgaaggaaatcagcgcaggaaacatctatattactgacaacagcaacctgtgttattatcataccattaactggacaacactcttcagcacaatcaaccagagaatagtaatccgggacaacagaaaagctgaaaattgtactgctgaaggaatggtgtgcaaccatctgtgttccagtgatggctgttggggacctgggccagaccaatgtctgtcgtgtcgccgcttcagtagaggaaggatctgcatagagtcttgtaacctctatgatggtgaatttcgggagtttgagaatggctccatctgtgtggagtgtgacccccagtgtgagaagatggaagatggcctcctcacatgccatggaccgggtcctgacaactgtacaaagtgctctcattttaaagatggcccaaactgtgtggaaaaatgtccagatggcttacagggggcaaacagtttcattttcaagtatgctgatccagatcgggagtgccacccatgccatccaaactgcacccaagggtgtaacggtcccactagtcatgactgcatttactacccatggacgggccattccactttaccacaacatgctagaactcccctgattgcagctggagtaattggtgggctcttcattctggtcattgtgggtctgacatttgctgtttatgttagaaggaagagcatcaaaaagaaaagagccttgagaagattcttggaaacagagttggtggaaccattaactcccagtggcacagcacccaatcaagctcaacttcgtattttgaaagaaactgagctgaagagggtaaaagtccttggctcaggtgcttttggaacggtttataaaggtatttgggtacctgaaggagaaactgtgaagattcctgtggctattaagattcttaatgagacaactggtcccaaggcaaatgtggagttcatggatgaagctctgatcatggcaagtatggatcatccacacctagtccggttgctgggtgtgtgtctgagcccaaccatccagctggttactcaacttatgccccatggctgcctgttggagtatgtccacgagcacaaggataacattggatcacaactgctgcttaactggtgtgtccagatagctaagggaatgatgtacctggaagaaagacgactcgttcatcgggatttggcagcccgtaatgtcttagtgaaatctccaaaccatgtgaaaatcacagattttgggctagccagactcttggaaggagatgaaaaagagtacaatgctgatggaggaaagatgccaattaaatggatggctctggagtgtatacattacaggaaattcacccatcagagtgacgtttggagctatggagttactatatgggaactgatgacctttggaggaaaaccctatgatggaattccaacgcgagaaatccctgatttattagagaaaggagaacgtttgcctcagcctcccatctgcactattgacgtttacatggtcatggtcaaatgttggatgattgatgctgacagtagacctaaatttaaggaactggctgctgagttttcaaggatggctcgagaccctcaaagatacctagttattcagggtgatgatcgtatgaagcttcccagtccaaatgacagcaagttctttcagaatctcttggatgaagaggatttggaagatatgatggatgctgaggagtacttggtccctcaggctttcaacatcccacctcccatctatacttccagagcaagaattgactcgaataggaaccagtttgtataccgagatggaggttttgctgctgaacaaggagtgtctgtgccctacagagccccaactagcacaattccagaagctcctgtggcacagggtgctactgctgagatttttgatgactcctgctgtaatggcaccctacgcaagccagtggcaccccatgtccaagaggacagtagcacccagaggtacagtgctgaccccaccgtgtttgccccagaacggagcccacgaggagagctggatgaggaaggttacatgactcctatgcgagacaaacccaaacaagaatacctgaatccagtggaggagaacccttttgtttctcggagaaaaaatggagaccttcaagcattggataatcccgaatatcacaatgcatccaatggtccacccaaggccgaggatgagtatgtgaatgagccactgtacctcaacacctttgccaacaccttgggaaaagctgagtacctgaagaacaacatactgtcaatgccagagaaggccaagaaagcgtttgacaaccctgactactggaaccacagcctgccacctcggagcacccttcagcacccagactacctgcaggagtacagcacaaaatatttttataaacagaatgggcggatccggcctattgtggcagagaatcctgaatacctctctgagttctccctgaagccaggcactgtgctgccgcctccaccttacagacaccggaatactgtggtgtaagctcagttgtggttttttaggtggagagacacacctgctccaatttccccacccccctctctttctctggtggtcttccttctaccccaaggccagtagttttgacacttcccagtggaagatacagagatgcaatgatagttatgtgcttacctaacttgaacattagagggaaagactgaaagagaaagataggaggaaccacaatgtttcttcatttctctgcatgggttggtcaggagaatgaaacagctagagaaggaccagaaaatgtaaggcaatgctgcctactatcaaactagctgtcactttttttctttttctttttctttctttgtttctttcttcctcttcttttttttttttttttttaaagcagatggttgaaacacccatgctatctgttcctatctgcaggaactgatgtgtgcatatttagcatccctggaaatcataataaagtttccattagaacaaaagaataacattttctataacatatgatggtgtctgaaattgagaatccagtttctttccccagcagtttctgtcctagcaagtaagaatggccaactcaactttcataatttaaaaatctccattaaagttataactagtaattatgttttcaacactttttggtttttttcattttgttttgctctgaccgattcctttatatttgctcccctatttttggctttaatttctaattgcaaagatgtttacatcaaagcttcttcacagaatttaagcaagaaatattttaatatagtgaaatggccactactttaagtatacaatctttaaaataagaaagggaggctaatatttttcatgctatcaaattatcttcaccctcatcctttacatttttcaacatttttttttctccataaatgacactacttgataggccgttggttgtctgaagagtagaagggaaactaagagacagttctctgtggttcaggaaaactactgatactttcaggggtggcccaatgagggaatccattgaactggaagaaacacactggattgggtatgtctacctggcagatactcagaaatgtagtttgcacttaagctgtaattttatttgttctttttctgaactccattttggattttgaatcaagcaatatggaagcaaccagcaaattaactaatttaagtacatttttaaaaaaagagctaagataaagactgtggaaatgccaaaccaagcaaattaggaaccttgcaacggtatccagggactatgatgagaggccagcacattatcttcatatgtcacctttgctacgcaaggaaatttgttcagttcgtatacttcgtaagaaggaatgcgagtaaggattggcttgaattccatggaatttctagtatgagactatttatatgaagtagaaggtaactctttgcacataaattggtataataaaaagaaaaacacaaacattcaaagcttagggataggtccttgggtcaaaagttgtaaataaatgtgaaacatcttctcatgcaattattttattatccaacacactaatcttttgatactttatataattccctttcttcatatactgcatccagtactagaaccatcattattatgtatcattttgaaagaatacctgatgagatgaaggatgagaacaaatgacagagatgagtctccaagtaaagggggcctcacatcaataattaggaaacttagatataagtcgcccttttctgaaaattctaccccaagtcatttagatttttaaaaaatatttctaatgttaaaatattgggaccaaattagaatcaatagtataagattaattaattagagtaaaaatatctattaaggcagagaaagtttagagaaaaaaatccaaagaaatttgtgtttcttcctattctgaacaagtaaatccatccatccatccatccaaacctcctttatctaactgtgtctactaaaagcaccatgttttgtggggaacactcagataaatggaatatcatcctcaacttcaaaattctatgatctaggagatttaattaaaatgacattttaatttttctatgcgttccaacaatcagattgcatagtctcttttgtgaatagctgtcatataatcagttgtactgtaagatatctcctttaaactcatttgggatataagttaaacatccttcaaattgttgatgttgacaaacaggataatttcaataatattattcaaacataaactggtctaggagaatattgcatcactgactaattagcctatctagagtctaacttcaccattaaaccaaaagcagatggtggtccttggccaagaatattggagacattggagttggtttttttctaagctataagaagtgaggcgagctgaaaaagtatggtagagcaggagaagggtttgtgagattccttctagtgaagttcaccctcaaacttttcaggggtaaagacacagagtgattcaggggccacaatctaatagctcagggctctcctatccattcagagaagtctctaggaaaagggatctcatatcagtacttatgaaaaattgaatataagcctccctttctaaataaatctgcatcgagtcatcacagccctctttttggatactataccttgattttttttttctgatttacaatatgcatatggtttctactgggctatagaaagcagaatcactcattttggagaaggaaaaaatgaatagttaaaacaaacttttaactgttaaggtaacagaaatgtatttagtgaatgtctctttcctcctaagaacacaagacttctacatgttgggtaatacctagagatgcatgtaggaataatccaaaatgacccaaatgctttataatagcaccactttataattcttttgaatgatttctgtagtatataattgacttcagttgtttgagtgttttttgttttatttttgtcccccctgggaaaacatatttcagcatgtataagagggagaaaaaaagtttcattccttccagagaataacttatttagtccagtagggtagaattttaaaatgtcagttaaagtcttcaaagtgcttggggggatatcagattccagaggccaattgtagcaattgaaatttgcagaatcaattatgtaaatctgagacaaattagtattaaaattacacggagtatattttttaaatcacccaactttgtagattatacctattttgggcaggtatggaaaaattttgcagttaaatgattgcctaaagaaagtggtaaacaggtgaggaaagatggcctctgatctaggatagatccagaaccacaaagcatctgcaccacaaaaggtgttagactaccaagcagctcctggttttctgcatagtattagtagcacagcttaggatgagaatcctttctccagtaacattcttaaaatagcatgaaaaacaacgcaaaactcaaatttctattaaaacacacaaactaaaatcaagtgattcttttttgtagattagggagaaggactgaatatctaatttaagagaaggaatagtgtttaagtgttatagtgtgtgagctaataccttctaaaggaaagacatggcatgaagattgtgcatacttacaatgctaaggaaaaatcaagaaaaggactgtgtgaggctctgctactagatgaagttggaaggactattaatgtgcttcttgaagtatcaaaaatgaaaagaaaattaaaattgtttaagcctgacagggaaggatgtaaatacaagtttttctagagctctctaacctttatttcaaaactggaattattcatccatctgtaattgttgataatttaactagtatatgtagttcataaggtaatagaaaaggtgatcatgaaagcatgtatataactggacagaaccacgataatgctataagatgtagatttagttaggttatcagatgttaaatgattttaatattattaaataaatcaaactagaaaactaaccacaagtataatgtaacaaagttaaatgcaggatataaaaatgtaggatggattttgcatagtaaaaagataagtttgccatttaaaattgttgtttgttgggtttagctgaaagtaggcatatatggttccacttgggaaaacttgctttaaagcattacaatgaacaattttttctcattctcttattcctttatcactttttaaatgtaaagaaaattgtatttatttatttttttaaataaacaccaccttgcagaatttaataggcaaacatgttacatatgactaagtaagggtcttcaagatgaagtaaagaaaatgtaaatgttctattaccttatgcagagacaaaaaaaaaaaggagtggtgtcatttagctagcaaacaaacaaaatacagttaattggtgatatgtcctttcttttctcactatgccctcttgcctccaaaaatgacaacaaagaatcacaatttttctgataaataaatgctaaaccaagcgtttcaaactattgcattgccattcttttggactttagttattagaatgatgattgttatagggcaaatgagaaatccatgtgcatcagcttctagttgttaaaaaaaccagataaattaacttctactgtatactgtgggcagaggatcctagagctgatcctacaacatcagcttctagttgttaaaaaaaaaaaaagaaacagataaattaacttctactgtatatactgtgggcagaggatcttactgtgcctctgtttgtgtacatggacttcggtgtgtatcagtttgaaggacagccttgccccatgtaaacatataaatgcagattggtatcgcctggttgctatttgcttaagaacaaatattatacagatgagatcaggcataattttaaaagatcattatcagtggagacctcattattactgatattacaatggggccagtttttatacttctgggtagaattaataaaatttttctgatcccagagatctgagttctctctgcagttggaaacaagaagctgttgtgggcattgtgtcgggccaggggcccttgtgtttgtgtgggcaaatatcttttagcagtgtgagctgcttttttcttttcattaaaagtctctctaaaataatagaaatttcagatactcggttcaagtctcactgattttgtagaggtccaaaaatgtaggatctgtcacttttgcaggcccctgcctcacctaattcctggccaggtgacattttgggcagaagtaaatgcttctatagtcacaagctaaaatgactctaagccccaatttcacggggggtattcacatgcttcctctggaaaatactctttgacagtcagctttgcaagtaagtgattaccttgttaggaatcaaagaaaaatgtatttctctctgacctttagaggaaaatagaatccttcccttttttgcccattgacacaactggcactgctctcttccctttctaccaccctggttcaaagtagtcccccgatgctgtcctgttcctttcttaagccatagtggatctctgagatcctacaccccactttgtgaaacactgacttcatctttgccctcgaatgcctgattttttcataagagattctagcaatttggacactgtttaagtgaactatcaaactaccgcatagagaatatttaagctattaaaattatggtttcccatgaagatcaattctctgtgtccttccctataggaatttgagacgagttagccctgtgatgaatcttgaaactcacatatgtccacatacacttggtagaacttcgatttaatctttacataaaagctgtacatataaccaagaagttatttttgccagtaaattaacttatttgctttattcatcttatttggttcctaatcgtaaatattttgtagctgctgtaaatttttttctcccaaatgaggagtcttattatcataaaggtaaaggctattcagctttgataaccacctgcaattcttttttggatcattcatccatctaacaaatacataatgaggacagttcatgttaatgaaaatccatgttgtttaatagaatgccatcctttacctacttttgctctttatggacgtttttcttttcatgctctagtgagctttccctatatcatgagaagtggttatatttgtgcaaatatacaaatataggaaaacaaagattcatacctgtaggcaatagtctaacttgtccaaaccactttgcctttactgctatttttatccccaatgcgtagatatttcccccaggcctatagcctttgtgaaggaaagcaaatcatacctcctgtatattgacacgaatctggttttcaaatgtcatttccagattttttagttaattgggggttgtccttttcccttaatgtgagagtcattttcctgtatatttctggatctctcaggggctgggaggggggagtgaggggactacaaccatagcactccaagaacccttttgggattactccagtaatcaactacgaaagttattttctaaatgtagatatgtaaggtgttcttttaaagtaaggtactttgaaatatgtagcataaactggtactgctgttaaatgggtcgattattaaacggagcagctgtgtgagggcagctaactttgaatgcctgtctccctggctggtgtgtctccttctcatgttgagagcaccagggattgcgtggctgcatgctgaaaccgcattttcccatggtgtatgactagttcatctctttcttgagcaccattacaagaagatcaaatgaaaatgagatcaatgtggaagacaattcatagcacaaaaaaagtcatcttaaatctactctcaaacattcatcttatacatgcatcaaagtaatttactgacatcagtttgggtgagagagggagtcactttactgaaaaggcagaggcttaaggtgtatacatttgtactcacttccttattttcttaacttgtaagcagaaaacaagccctctctcttgtgaagtatcttcaaaggattggggtgcaaaaataccttgctggtaagccatcaatgttttatttaaatccctgcattcaaagttagctgcctttttgaaataaacaaacaaaaaatactactgtatgtttgaaaatgtgaatagtatttttatagcttgttaaagacatggctagttgcatttgtaaataagtataatgttgctttgattttcttttgtggacatctttatttggaacataattgtctttagggttgatttgtatataagtaattggcctgtgattgtttcttttttggttggaagttatcattttgacattacttgtgattctgtgttcagcactattgtgatgtgttcaacctctgcactcgcttacacaataggatatgccaattgtgtgtggtgtaatgttattttgatttttttccatgttattgatgaaggatcatgcacctaacacatactaacttttttaatgttaggcatatttttagtatactttctcttattctttcttctcctccaaccttttacccatcctccttcctttccctcattcctgttgttatttgagaatgagggagaaacagtattttacatttatgtaattaggcttttccgttagttctcaaggatcctcttttggctcttgggaaagaattgtacctgtacaaggcaattatagaatgcgaactgctttgcctcattccatactgatcatcccagctgaacaatttgaaaactgttctgcctttttgttacatgaatctgtcagaaatatatttttaatttaatataaatgaaattcaataaaatatgaaacaaacgttaaaaaaaaaaaaaaaaaa

SEQ ID NO: 33901 - DNA, 3879 bp, Artificial Sequence
  derived and/or modified sequence
atgaagcccgccaccggcctgtgggtgtgggtgagcctgctggtggccgccggcaccgtgcagcccagcgacagccagagcgtgtgcgccggcaccgagaacaagctgagcagcctgagcgacctggagcagcagtacagagccctgagaaagtactacgagaactgcgaggtggtgatgggcaacctggagatcaccagcatcgagcacaacagagacctgagcttcctgagaagcgtgagagaggtgaccggctacgtgctggtggccctgaaccagttcagatacctgcccctggagaacctgagaatcatcagaggcaccaagctgtacgaggacagatacgccctggccatcttcctgaactacagaaaggacggcaacttcggcctgcaggagctgggcctgaagaacctgaccgagatcctgaacggcggcgtgtacgtggaccagaacaagttcctgtgctacgccgacaccatccactggcaggacatcgtgagaaacccctggcccagcaacctgaccctggtgagcaccaacggcagcagcggctgcggcagatgccacaagagctgcaccggcagatgctggggccccaccgagaaccactgccagaccctgaccagaaccgtgtgcgccgagcagtgcgacggcagatgctacggcccctacgtgagcgactgctgccacagagagtgcgccggcggctgcagcggccccaaggacaccgactgcttcgcctgcatgaacttcaacgacagcggcgcctgcgtgacccagtgcccccagaccttcgtgtacaaccccaccaccttccagctggagcacaacttcaacgccaagtacacctacggcgccttctgcgtgaagaagtgcccccacaacttcgtggtggacagcagcagctgcgtgagagcctgccccagcagcaagatggaggtggaggagaacggcatcaagatgtgcaagccctgcaccgacatctgccccaaggcctgcgacggcatcggcaccggcagcctgatgagcgcccagaccgtggacagcagcaacatcgacaagttcatcaactgcaccaagatcaacggcaacctgatcttcctggtgaccggcatccacggcgacccctacaacgccatcgaggccatcgaccccgagaagctgaacgtgttcagaaccgtgagagagatcaccggcttcctgaacatccagagctggccccccaacatgaccgacttcagcgtgttcagcaacctggtgaccatcggcggcagagtgctgtacagcggcctgagcctgctgatcctgaagcagcagggcatcaccagcctgcagttccagagcctgaaggagatcagcgccggcaacatctacatcaccgacaacagcaacctgtgctactaccacaccatcaactggaccaccctgttcagcaccatcaaccagagaatcgtgatcagagacaacagaaaggccgagaactgcaccgccgagggcatggtgtgcaaccacctgtgcagcagcgacggctgctggggccccggccccgaccagtgcctgagctgcagaagattcagcagaggcagaatctgcatcgagagctgcaacctgtacgacggcgagttcagagagttcgagaacggcagcatctgcgtggagtgcgacccccagtgcgagaagatggaggacggcctgctgacctgccacggccccggccccgacaactgcaccaagtgcagccacttcaaggacggccccaactgcgtggagaagtgccccgacggcctgcagggcgccaacagcttcatcttcaagtacgccgaccccgacagagagtgccacccctgccaccccaactgcacccagggctgcaacggccccaccagccacgactgcatctactacccctggaccggccacagcaccctgccccagcacgccagaacccccctgatcgccgccggcgtgatcggcggcctgttcatcctggtgatcgtgggcctgaccttcgccgtgtacgtgagaagaaagagcatcaagaagaagagagccctgagaagattcctggagaccgagctggtggagcccctgacccccagcggcaccgcccccaaccaggcccagctgagaatcctgaaggagaccgagctgaagagagtgaaggtgctgggcagcggcgccttcggcaccgtgtacaagggcatctgggtgcccgagggcgagaccgtgaagatccccgtggccatcaagatcctgaacgagaccaccggccccaaggccaacgtggagttcatggacgaggccctgatcatggccagcatggaccacccccacctggtgagactgctgggcgtgtgcctgagccccaccatccagctggtgacccagctgatgccccacggctgcctgctggagtacgtgcacgagcacaaggacaacatcggcagccagctgctgctgaactggtgcgtgcagatcgccaagggcatgatgtacctggaggagagaagactggtgcacagagacctggccgccagaaacgtgctggtgaagagccccaaccacgtgaagatcaccgacttcggcctggccagactgctggagggcgacgagaaggagtacaacgccgacggcggcaagatgcccatcaagtggatggccctggagtgcatccactacagaaagttcacccaccagagcgacgtgtggagctacggcgtgaccatctgggagctgatgaccttcggcggcaagccctacgacggcatccccaccagagagatccccgacctgctggagaagggcgagagactgccccagccccccatctgcaccatcgacgtgtacatggtgatggtgaagtgctggatgatcgacgccgacagcagacccaagttcaaggagctggccgccgagttcagcagaatggccagagacccccagagatacctggtgatccagggcgacgacagaatgaagctgcccagccccaacgacagcaagttcttccagaacctgctggacgaggaggacctggaggacatgatggacgccgaggagtacctggtgccccaggccttcaacatccccccccccatctacaccagcagagccagaatcgacagcaacagaaaccagttcgtgtacagagacggcggcttcgccgccgagcagggcgtgagcgtgccctacagagcccccaccagcaccatccccgaggcccccgtggcccagggcgccaccgccgagatcttcgacgacagctgctgcaacggcaccctgagaaagcccgtggccccccacgtgcaggaggacagcagcacccagagatacagcgccgaccccaccgtgttcgcccccgagagaagccccagaggcgagctggacgaggagggctacatgacccccatgagagacaagcccaagcaggagtacctgaaccccgtggaggagaaccccttcgtgagcagaagaaagaacggcgacctgcaggccctggacaaccccgagtaccacaacgccagcaacggcccccccaaggccgaggacgagtacgtgaacgagcccctgtacctgaacaccttcgccaacaccctgggcaaggccgagtacctgaagaacaacatcctgagcatgcccgagaaggccaagaaggccttcgacaaccccgactactggaaccacagcctgccccccagaagcaccctgcagcaccccgactacctgcaggagtacagcaccaagtacttctacaagcagaacggcagaatcagacccatcgtggccgagaaccccgagtacctgagcgagttcagcctgaagcccggcaccgtgctgcccccccccccctacagacacagaaacaccgtggtgtag

SEQ ID NO: 33902 - DNA, 3879 bp, Artificial Sequence
  derived and/or modified sequence
atgaaacccgccaccgggctttgggtctgggtgagcctgcttgtggccgccggcacagttcagcctagtgatagtcagtccgtttgcgccgggaccgagaacaagctgtcttctcttagcgacctggagcaacagtatagggctctgagaaagtactatgagaattgtgaggtcgttatgggtaatctcgagattacgtcaatcgagcataaccgggatctctcgttcctgcgctcagttcgggaagtcactggctatgtgctggtagctctcaaccagttccgttatctcccactggaaaacctgagaattatcaggggaactaagctctatgaggaccggtacgctctggctatatttctgaactaccgaaaagacggcaatttcggactgcaggaactcggactgaaaaacctgactgagattttgaatgggggcgtgtatgtggatcagaacaagtttctgtgttacgcagatacaatccattggcaggatattgtgcgtaacccttggccttccaatctgacacttgtctcaaccaatggatcttcaggatgtggaaggtgtcacaaatcatgcacaggaagatgctggggccccactgagaatcattgccagacgctcaccaggactgtatgtgctgagcagtgcgacggacggtgttacggtccgtatgtaagcgactgttgtcatagagagtgtgctggcggctgtagcggaccaaaggataccgattgcttcgcatgcatgaatttcaatgattctggagcgtgcgtgactcagtgccctcagactttcgtgtacaatccaacaactttccagctggagcacaacttcaatgcgaagtatacttatggggccttttgcgtgaaaaagtgcccccacaactttgttgtcgactcatccagttgcgtccgggcttgccccagttcaaaaatggaagtagaagagaacgggattaagatgtgtaaaccatgcacagatatttgcccaaaagcatgtgacggaatcggaacaggcagtttaatgagtgctcagacggttgatagttccaacatcgataaatttattaattgcactaaaattaacggcaacctgatcttcctggtcactggcatccacggagacccctataatgcaatcgaggcaattgatccagagaaacttaacgtattcaggactgttcgtgagattacaggattcctaaatattcagtcctggccgcccaacatgacggacttctcggtgttcagcaatctggtcacaataggcgggagggtattgtattcgggactcagccttctcatcttgaaacagcagggcattaccagcttacagttccagtccctgaaagaaatctcagccgggaatatctacatcactgataattccaatctttgctattaccatacaattaattggactactctattttctaccataaatcagagaatcgtaatacgcgacaaccggaaggccgaaaactgcacagctgaaggtatggtatgtaaccatctgtgctcatccgacggttgctggggccctggtcctgaccagtgtctttcttgccggcggttcagccgggggcgtatctgcatcgaaagctgcaacctgtacgacggggaattccgggaattcgaaaacggctctatctgcgtggagtgcgacccccaatgcgagaagatggaggacggcctcttgacttgccacggcccagggcctgataactgtaccaagtgctcccacttcaaagatggacctaactgcgtcgagaaatgcccagatggcttgcagggggccaacagtttcatttttaagtacgccgatcctgatagagagtgccatccatgccacccaaattgcacacagggctgtaatggtcctaccagccatgactgcatttattacccctggaccggtcactctaccctaccacagcatgccaggaccccattgattgcagctggcgtgatcggtggcctctttattctagtaatcgtggggctgacttttgctgtgtacgtccggaggaaatccatcaaaaaaaaaagagccttgaggagatttctcgaaacggagttagtggaacccctcacaccatccggaaccgctccaaatcaggcccagctgagaattctcaaggagaccgagctgaagagggttaaggtgctcgggtccggagctttcggcacagtatacaaggggatttgggtccctgagggagagaccgtgaaaatccccgttgcgataaaaatcttgaatgaaacaacgggtcctaaagcgaacgtggagtttatggatgaagccctcataatggctagtatggaccatcctcacctggtgcgtctcctcggtgtgtgtctcagtcctacaattcagcttgtgactcagctgatgccccacgggtgtttgcttgaatacgtacatgaacacaaggataatatcggctctcagttactcctcaattggtgtgtgcaaatcgcaaagggcatgatgtacctcgaggagcggcgcctggtgcacagagatctggctgccagaaatgttctggtaaaatctcccaatcacgtgaagataaccgacttcggtctggccaggctgcttgaaggcgatgagaaagaatacaacgctgacggaggcaaaatgccaattaagtggatggcgctggagtgcatccactaccgtaagttcactcaccagtctgacgtgtggtcctatggcgtcactatttgggaactgatgacttttggagggaaaccatacgatgggatcccaacacgcgagattccagatctgctggagaaaggggagcggcttccacaacctcctatttgtactatcgacgtctacatggtgatggttaagtgctggatgatcgatgcagactcacggcccaagtttaaggaacttgctgccgagttctcacgcatggcccgggatccacagagatacctcgtgatccagggggacgatcgtatgaaattgccgtcacccaacgactcaaaattcttccagaacttgctcgatgaagaagatctggaagacatgatggatgccgaggagtacctagtgccacaggcctttaacataccgcccccaatctataccagccgtgcccgaatcgacagcaacagaaatcagttcgtctatagggatggcggcttcgccgccgagcagggagtatctgtgccatatcgagccccgacatccactatacccgaggctcccgtggcgcaaggagcaaccgcagagatcttcgatgattcctgctgtaacgggactttacggaaaccggtggctccacacgtgcaggaagatagctctactcagcgctacagcgctgacccaaccgtatttgcacctgagcggtccccccgtggggagcttgatgaggaggggtacatgactcctatgagggacaagccaaaacaggaatacctgaatcctgtagaggaaaatccgttcgtttctaggcggaaaaacggggatctacaagcgttggataatccagaataccacaacgcctcaaacggaccccccaaggccgaggatgagtatgtcaacgagccactgtatctgaacactttcgctaatactctgggcaaggccgaatatctgaagaacaacattcttagcatgcctgagaaagcaaaaaaagcatttgataatcccgactactggaaccacagccttccaccacggagcacactgcagcaccccgattacctgcaagagtacagtacaaagtacttctataagcagaacggaaggatccgacccatcgtcgctgaaaatcctgagtacctttctgaattcagcctgaaacctggtactgtactgcctccccccccctacagacacaggaacacagtggtatag

SEQ ID NO: 33903 - DNA, 3879 bp, Artificial Sequence
  derived and/or modified sequence
atgaagccagccaccggcctgtgggtgtgggtgtccctgctggtggccgccggcaccgtgcagcccagcgacagccagagcgtgtgtgccggcacagagaacaagctgagcagcctgagtgacctggagcagcagtaccgggccctgaggaagtactatgagaactgtgaggtggtgatgggcaacctggagatcaccagcattgagcacaacagagacctgtccttcctgcggtctgtgcgggaggtgacaggctacgtgctggtggccctgaaccagttccgctacctgcccctggagaacctgcgcatcatccggggcaccaagctgtatgaggacagatatgccctggccatcttcctgaactacaggaaggatggcaactttggcctgcaggagctgggcctgaagaacctgacagagatcctgaatggaggagtgtatgtggaccagaacaagttcctgtgctacgccgacaccatccactggcaggacatcgtgaggaacccctggcccagcaacctgaccctggtgtccaccaacggcagcagcggctgcggccgctgccacaagagctgcaccggccgctgctggggccccacagagaaccactgccagaccctgaccaggacagtgtgtgccgagcagtgtgatggccgctgctacggcccctacgtgtctgactgctgccacagagaatgtgccggcggctgcagcggccccaaggacacagactgctttgcctgcatgaacttcaatgattctggggcctgtgtgacccagtgcccccagacctttgtgtacaaccccaccaccttccagctggagcacaacttcaatgccaagtacacctatggagccttctgtgtgaagaagtgcccccacaactttgtggtggacagcagcagctgtgtgcgggcctgccccagcagcaagatggaggtggaggagaatggcatcaagatgtgcaagccctgcacagacatctgccccaaggcctgtgatggcattggaacaggcagcctgatgtctgcccagacagtggacagcagcaacatcgacaagttcatcaactgcaccaagatcaatggaaacctgatcttcctggtgacaggcatccacggggacccctacaatgccatcgaggccatcgaccctgagaagctgaatgtgttcagaacagtgcgggagatcaccggcttcctgaacatccagagctggccacccaacatgacagacttctctgtgttcagcaacctggtgaccatcggcggccgggtgctgtacagcggcctgagcctgctgatcctgaagcagcagggcatcaccagcctgcagttccagagcctgaaggagatctctgctggcaacatctacatcacagacaacagcaacctgtgctactaccacaccatcaactggaccaccctcttcagcaccatcaaccagagaattgtcatccgggacaacaggaaggccgagaactgcacagctgagggcatggtgtgcaaccacctgtgcagcagtgatggctgctggggccctggccctgaccagtgcctgagctgccgccgcttcagccggggccgcatctgcatcgagagctgcaacctgtatgatggagagttccgggagtttgaaaatggcagcatctgtgtggagtgtgacccccagtgtgagaagatggaggatggcctgctgacctgccacggccctggccctgacaactgcaccaagtgcagccacttcaaggatggccccaactgtgtggagaagtgcccagatggcctgcagggcgccaacagcttcatcttcaagtatgctgaccctgaccgggagtgccacccctgccaccccaactgcacccagggctgcaatggccccaccagccatgactgcatctactacccctggacaggccacagcaccctgccccagcacgcccggacccccctgattgctgctggggtcatcggcggcctcttcatcctggtgattgtgggcctgacctttgctgtgtatgtgcggaggaagagcatcaagaagaagagggccctgcggcgcttcctggagacagagctggtggagcccctgaccccatctggaacagcccccaaccaggcccagctgcgcatcctgaaggagacagagctgaagagggtgaaggtgctgggcagcggggcctttggaacagtgtacaagggcatctgggtgcctgagggggagaccgtgaagatccctgtggccatcaagatcctgaatgagaccaccggccccaaggccaacgtggagttcatggatgaggccctgatcatggcctccatggaccacccccacctggtgcggctgctgggcgtgtgcctgagccccaccatccagctggtgacccagctgatgcctcatggctgcctgctggagtatgtgcatgagcacaaggacaacatcggcagccagctgctgctgaactggtgtgtgcagatcgccaagggcatgatgtacctggaggagcggcggctggtgcaccgggacctggccgccagaaatgtgctggtgaagagccccaaccacgtgaagatcacagactttggcctggcccggctgctggagggagatgagaaggagtacaatgctgatggcggcaagatgcccatcaagtggatggccctggagtgcatccactacaggaagttcacccaccagagtgatgtgtggagctatggagtgaccatctgggagctgatgaccttcggcggcaagccctatgatggcatccccacccgggagatcccagacctgctggagaagggggagcggctgccccagccccccatctgcaccattgatgtgtacatggtgatggtgaagtgctggatgattgatgctgacagccggcccaagttcaaggagctggccgctgagttcagcaggatggcccgggacccccagcgctacctggtgatccagggagatgacaggatgaagctgcccagccccaatgacagcaagttcttccagaacctgctggatgaggaggacctggaggacatgatggatgctgaggagtacctggtgccccaggccttcaacatccccccacccatctacaccagccgggccagaattgacagcaacagaaaccagtttgtgtacagagatggcggctttgctgctgagcagggcgtgtctgtgccctaccgggcccccaccagcaccatccctgaggcccctgtggcccagggcgccacagctgagatctttgatgacagctgctgcaatggcaccctgaggaagcctgtggccccccacgtgcaggaggacagcagcacccagcgctacagcgctgaccccaccgtgtttgcccctgagaggagccccagaggagagctggatgaggagggctacatgacccccatgagggacaagcccaagcaggagtacctgaaccctgtggaggagaacccctttgtgtccaggaggaagaatggagacctgcaggccctggacaaccctgagtaccacaatgccagcaatggaccacccaaggcagaagatgaatatgtgaatgagcccctgtacctgaacacctttgccaacaccctgggcaaggccgagtacctgaagaacaacatcctgtccatgcctgagaaggccaagaaggcctttgacaacccagactactggaaccacagcctgccccccaggagcaccctgcagcacccagactacctgcaggagtacagcaccaagtacttctacaagcagaatggccgcatccggcccatcgtggccgagaaccctgagtacctgtctgagttcagcctgaagccaggcaccgtgctgcccccaccaccctaccgccacaggaacacagtggtgtag

SEQ ID NO: 33904 - DNA, 3879 bp, Artificial Sequence
  derived and/or modified sequence
atgaagcccgccaccggcctgtgggtgtgggtgagcctgctggtggcagccggcaccgtccaaccctccgactcccagtccgtctgtgcaggaacagagaacaagctgagctccctatccgacctggagcagcagtatcgggcactgcggaaatactatgaaaattgcgaggtggtgatgggcaatctggaaatcacaagcatagaacataacagggacctctcctttctgagatcagtgcgggaggttacgggctatgtgttagtggcactcaaccagttccgatatctgcctttggaaaacctgaggatcattcgcggaacgaagctctacgaggacagatacgctcttgccatcttccttaactaccggaaagacgggaattttgggctacaggagctcggactgaagaacctcactgaaatattgaacgggggggtgtacgtggaccaaaataagttcttatgctacgccgacaccatccactggcaggacattgttcgtaatccctggccctccaacctcacactggtgtctaccaatggctcctccggctgcggtcgctgccataagtcttgtacaggtcgctgttggggccctaccgagaatcattgtcagactctgacccggaccgtgtgtgcagaacagtgtgatggtcgctgctacggaccctatgttagtgactgctgccacagggaatgcgctggagggtgtagcggcccgaaagacaccgactgcttcgcgtgtatgaacttcaacgactccggagcgtgtgtgacgcagtgtccgcagactttcgtgtataaccctacaacctttcaacttgagcacaactttaacgcaaaatatacctacggagccttctgcgtaaagaagtgtccacataactttgtcgtggactcgagctcatgtgtacgagcctgtccatccagcaagatggaggttgaagagaacggcatcaaaatgtgcaaaccatgtaccgatatttgtcctaaagcatgcgacggaatcggtaccggcagtctaatgtctgctcagactgtggattccagcaatatcgacaaatttataaattgtactaagattaacggcaatcttatcttcctagtcacggggattcacggcgatccctataatgcaatcgaggccattgaccctgaaaagctgaacgttttccgaacagtgcgggagattaccgggtttctgaatattcaatcatggcctcctaacatgaccgatttctccgtgttttccaacctcgtcacgatcggcggccgcgtcctgtattctgggcttagcctcctgattctcaaacagcagggaattacaagcctccagttccaatccctaaaagagatctctgctggcaatatatatatcacagataattcaaacctgtgctattaccacactattaattggactacactcttctcaacaatcaaccagagaattgtgatccgagataaccgcaaggccgaaaattgcaccgccgagggcatggtgtgtaaccatttatgctctagtgacggatgttggggcccagggcccgatcagtgtttatcctgtagacggtttagcagaggccggatttgtatagagtcatgtaacctttatgatggagagtttagggagttcgagaacggcagcatttgcgtggagtgcgatccacaatgcgagaagatggaggatggcctgctcacttgccatggtcccgggcccgataattgcaccaagtgctctcatttcaaggacggacccaattgcgttgagaagtgccctgacgggctgcaaggcgcaaactccttcatattcaaatacgcagacccggaccgggaatgccacccttgccatcccaactgtacacaggggtgcaacggcccaacatctcacgattgcatatattatccctggactggccacagtactttgcctcaacatgcacggactcctctgattgctgctggagttatcggcggactgttcatactggtgatcgtcgggctcactttcgctgtctacgtcagacggaagagtattaagaaaaagcgtgctcttcgccggtttttagagaccgagctagtggaacccctcacaccctcaggaactgcccccaaccaggctcaacttcgtatacttaaggagacagagctcaagcgagttaaggttctggggtcgggcgcatttggaacagtctataaaggcatttgggtacccgagggagagacggtcaaaatcccggtagccattaagattttgaacgaaacaacaggcccaaaagctaatgtggagtttatggatgaggccctgatcatggcgtcaatggaccatccacatctcgtgcggcttttgggtgtgtgcctgtcgccaactattcaacttgtaacccagctgatgcctcacggatgcttgctcgaatacgttcatgagcataaagataatattggtagccagcttctcctcaattggtgcgtgcagatcgcgaagggcatgatgtatctggaggaacgtcggttggtgcatcgggacctggctgcacggaacgtcctcgtcaagagccccaaccatgtgaagattacagatttcggactggcaagacttctcgagggagacgagaaagaatataatgccgatggcggaaagatgcccatcaaatggatggcccttgagtgcatccactacagaaagttcactcaccagtccgatgtgtggtcctatggggtaaccatctgggagctaatgacctttggagggaaaccttatgatggcattccaacccgtgagattcccgatctgctggaaaagggcgagcggcttccccagcctccaatctgcacaatcgacgtgtacatggtcatggtcaaatgctggatgatcgacgctgattcgagaccgaagttcaaggaattagcagccgaattcagccgtatggcgagagatccgcagcgctatctggtgatccagggcgacgaccggatgaaactgccatctcccaacgattcaaagtttttccagaatctgttggacgaagaagacttggaggacatgatggacgctgaggaatatctggtccctcaggcttttaacatcccgcccccaatctatacatctcgtgcacgtatcgactccaacagaaaccagtttgtctatcgcgatggcggcttcgccgcagaacagggggtcagcgtcccttacagggcaccaaccagtacaattccagaggcaccagtcgctcaaggagccaccgctgagatctttgacgacagctgttgcaacggtactctgcggaagccagtcgcaccccatgtgcaggaagattcatctacgcagcgctacagcgccgacccgactgtgttcgcccccgaaaggagcccacgcggtgagctcgatgaggaggggtatatgacacctatgagagacaagcctaaacaggaatatctcaacccagtcgaagagaatcccttcgtgtcgaggagaaaaaacggcgacctgcaggccctggataaccctgagtaccacaatgcgagtaacggacctccgaaggccgaggatgaatatgtaaatgagccactgtatttgaacacctttgccaacacactgggcaaggcagagtacctgaagaacaacattctgtctatgcccgagaaagctaaaaaggccttcgataatcctgactattggaatcattctctaccaccccgctccacgctgcagcaccccgattatcttcaggaatactccaccaaatacttttacaagcagaatggccgcattaggccaatcgtcgccgaaaacccggagtatcttagcgaattcagcctgaaacctgggaccgtgctgcctccccctccttataggcatcggaacactgttgtatag

SEQ ID NO: 33905 - DNA, 3878 bp, Artificial Sequence
  derived and/or modified sequence
atgaagcctgcaacgggattatgggtctgggtgagcttgctggtggccgcaggcacagttcaaccatctgacagccaatccgtatgtgctggcacagaaaataaactcagctcactttcagacctggagcaacagtatagagctctcagaaaatattatgagaactgtgaggtcgtcatgggtaacctcgaaattacgtctattgagcacaatcgtgatctaagtttcctcagaagcgttcgggaggttaccggttacgtgctggtcgccctcaaccagtttcgctacctgcctttggaaaacctccgcattatcaggggcactaagctgtacgaggatcgctacgcactggccattttcctcaactataggaaggacggcaatttcgggctgcaggagttagggctgaagaaccttactgaaatcttgaatggcggagtctatgtcgatcaaaataaattcctgtgctacgccgacaccattcactggcaggacattgtcaggaacccatggccatcaaacctcacactggtctcaactaacggatcctcaggctgtggacggtgccataagtcatgtacgggcagatgctggggccctaccgagaatcactgccagaccctaacgcggaccgtctgtgcggagcagtgtgatggaaggtgctacggcccttacgtctctgattgttgtcaccgggagtgtgctggtggctgctctggtccgaaggatacagactgctttgcttgtatgaattttaacgatagcggtgcctgcgttactcaatgcccacaaacgttcgtgtataaccctacaacatttcaactggagcacaattttaacgccaaatacacatacggagccttttgcgtaaaaaagtgtcctcacaattttgtggtagactctagttcctgcgtacgggcttgcccctcttcaaagatggaggtcgaagaaaatggtatcaagatgtgtaagccttgcaccgacatttgccctaaggcgtgtgatggcatcggtacagggagcctcatgtccgcgcagacggtggacagttctaacattgacaaatttattaattgtaccaagattaatggcaacctcatatttctggtgacaggaatccatggcgatccctataatgcaattgaagctatagatccagagaagctaaacgtgttcaggacagtgcgtgagataaccggattcttaaatattcaatcttggccccctaacatgacggacttttcagtatttagtaacctggtcacaatcggtggccgagtgctatacagcggcctgtctctgctgatcctgaaacagcagggaatcacatccctgcagtttcagtctcttaaggaaatctcggctggcaacatttacatcacagataactctaatctgtgctactaccacacaatcaactggaccaccctgtttagtactattaatcagaggatcgtgattcgagataatcgcaaagcagagaattgtactgcagagggtatggtctgtaaccatttatgcagctctgacggctgttggggcccaggtcccgatcaatgcctctcatgtaggcggtttagtcgcggtaggatctgcatcgagtcttgcaacctgtacgatggggagttccgggaattcgagaacggctctatctgtgtagaatgcgacccgcagtgcgaaaagatggaggacggcttgctgacctgccatggccctggccctgataactgcacgaaatgctcccattttaaggacgggccaaattgcgtcgagaagtgcccagacggactccagggagccaattcctttatctttaagtacgccgatccagaccgggagtgccatccttgtcacccaaactgcacgcaggggtgtaatggcccaacaagtcacgattgtatctattacccctggaccggtcatagcactctcccgcaacatgctaggaccccactgattgctgcgggagtgattgggggtctttttatcctcgtcatagttggactaacctttgcagtgtatgtaaggcgcaagtctatcaagaagaagcgagccttgcgcagatttttagaaactgaactcgtggagccactcaccccgagcggtaccgctcccaaccaggcccagctgcgcatcctgaaggagacggagctcaaacgggtgaaagtgctcgggtccggggcatttggcacggtgtataaaggcatttgggtgcccgaaggagagaccgtcaagatacccgtggcaatcaaaatactcaacgaaacaaccggaccaaaggccaacgttgaattcatggatgaagccctgataatggcatctatggatcatccccacttggtccgcctgctgggagtctgcctctcaccaaccattcagctggtaactcagttgatgccccatggttgtttgctggaatatgttcatgagcataaagacaatatcgggtcacagctgctcctaaactggtgcgtgcagatcgcgaagggcatgatgtacctggaagagaggcggttggtccatcgcgacctcgccgcacggaatgtgctcgtgaagtcccccaaccacgtcaagatcacagactttggcctcgccaggctcttggagggagatgagaaggagtacaacgccgacggtggtaaaatgcctatcaaatggatggctcttgaatgcattcactaccgcaagtttactcatcagagcgacgtgtggtcatacggagtgactatctgggaacttatgacattcggcggaaagccttacgatgggattccaaccagggagatccccgacctgctcgagaaaggcgaaaggctgccacagccgccaatctgtaccattgacgtgtatatggtgatggttaagtgctggatgatcgacgctgacagtcggcctaaatttaaagagcttgctgccgaattctccaggatggcgcgtgacccccagcggtatctcgttatccagggggatgaccgcatgaaacttccctctccgaatgatagcaagttttttcagaatctgctcgacgaagaggacttggaagacatgatggacgcagaggaatacctggttccacaggcctttaatatccctcccccaatttacacctccagggcaagaattgactctaatcgtaaccagttcgtgtaccgtgacggaggattcgctgcagagcagggcgtgagcgtgccttatcgcgctccgacaagcactattcctgaagccccagtggcccagggcgcaactgctgaaatcttcgatgattcctgctgtaatggcacactgcggaaacccgtcgcccctcacgtccaagaggactcttccacgcagagatactcagccgatccaactgtctttgccccagaacgcagccccaggggcgaactcgatgaggaaggatacatgacacccatgcgtgataaacccaaacaggaatacctgaacccagttgaggagaatccattcgtatccaggcggaaaaatggagatctccaggcactagataaccccgagtatcataatgcaagcaatggccctcccaaggccgaggacgagtacgtcaacgagcctttgtatctgaacacctttgctaataccttgggaaaagctgaatatttgaagaacaacatcctatcaatgccagaaaaagctaaaaaggccttcgacaatcctgattactggaatcactccctaccacccagaagcaccctacaacatccagactatctgcaggagtactctaccaagtacttctataaacagaatgggcgaatcaggcccattgtcgctgagaacccagagtatctgtcagagtttagcttgaaaccgggaactgttctaccccctcccccttacaggcacaggaacactgtggtcta

SEQ ID NO: 33906 - DNA, 12084 bp, Artificial Sequence
  derived and/or modified sequence
ggagcgagcaagcgaaggctcacgcggggaaatagctgcacagtccggcccagagcgccaagcgcacacaccgagcacactcccacacgcgcacacacgcgctcacactcgccccctcctcgggccccggccctggacccgcgggcgcggactcggtcgcccgccctgggagtcgccacaccgcgcgcgccgcgcccgcccccctcgcacccccacgcgcgcccggctgggggatctcctccgcgtgcccgaaagggggatatgccatttggacatgtaattgtcagcacgggatctgagacttccaaaaaatgaagccggcgacaggactttgggtctgggtgagccttctcgtggcggcggggaccgtccagcccagcgattctcagtcagtgtgtgcaggaacggagaataaactgagctctctctctgacctggaacagcagtaccgagccttgcgcaagtactatgaaaactgtgaggttgtcatgggcaacctggagataaccagcattgagcacaaccgggacctctccttcctgcggtctgttcgagaagtcacaggctacgtgttagtggctcttaatcagtttcgttacctgcctctggagaatttacgcattattcgtgggacaaaactttatgaggatcgatatgccttggcaatatttttaaactacagaaaagatggaaactttggacttcaagaacttggattaaagaacttgacagaaatcctaaatggtggagtctatgtagaccagaacaaattcctttgttatgcagacaccattcattggcaagatattgttcggaacccatggccttccaacttgactcttgtgtcaacaaatggtagttcaggatgtggacgttgccataagtcctgtactggccgttgctggggacccacagaaaatcattgccagactttgacaaggacggtgtgtgcagaacaatgtgacggcagatgctacggaccttacgtcagtgactgctgccatcgagaatgtgctggaggctgctcaggacctaaggacacagactgctttgcctgcatgaatttcaatgacagtggagcatgtgttactcagtgtccccaaacctttgtctacaatccaaccacctttcaactggagcacaatttcaatgcaaagtacacatatggagcattctgtgtcaagaaatgtccacataactttgtggtagattccagttcttgtgtgcgtgcctgccctagttccaagatggaagtagaagaaaatgggattaaaatgtgtaaaccttgcactgacatttgcccaaaagcttgtgatggcattggcacaggatcattgatgtcagctcagactgtggattccagtaacattgacaaattcataaactgtaccaagatcaatgggaatttgatctttctagtcactggtattcatggggacccttacaatgcaattgaagccatagacccagagaaactgaacgtctttcggacagtcagagagataacaggtttcctgaacatacagtcatggccaccaaacatgactgacttcagtgttttttctaacctggtgaccattggtggaagagtactctatagtggcctgtccttgcttatcctcaagcaacagggcatcacctctctacagttccagtccctgaaggaaatcagcgcaggaaacatctatattactgacaacagcaacctgtgttattatcataccattaactggacaacactcttcagcacaatcaaccagagaatagtaatccgggacaacagaaaagctgaaaattgtactgctgaaggaatggtgtgcaaccatctgtgttccagtgatggctgttggggacctgggccagaccaatgtctgtcgtgtcgccgcttcagtagaggaaggatctgcatagagtcttgtaacctctatgatggtgaatttcgggagtttgagaatggctccatctgtgtggagtgtgacccccagtgtgagaagatggaagatggcctcctcacatgccatggaccgggtcctgacaactgtacaaagtgctctcattttaaagatggcccaaactgtgtggaaaaatgtccagatggcttacagggggcaaacagtttcattttcaagtatgctgatccagatcgggagtgccacccatgccatccaaactgcacccaagggtgtaacggtcccactagtcatgactgcatttactacccatggacgggccattccactttaccacaacatgctagaactcccctgattgcagctggagtaattggtgggctcttcattctggtcattgtgggtctgacatttgctgtttatgttagaaggaagagcatcaaaaagaaaagagccttgagaagattcttggaaacagagttggtggaaccattaactcccagtggcacagcacccaatcaagctcaacttcgtattttgaaagaaactgagctgaagagggtaaaagtccttggctcaggtgcttttggaacggtttataaaggtatttgggtacctgaaggagaaactgtgaagattcctgtggctattaagattcttaatgagacaactggtcccaaggcaaatgtggagttcatggatgaagctctgatcatggcaagtatggatcatccacacctagtccggttgctgggtgtgtgtctgagcccaaccatccagctggttactcaacttatgccccatggctgcctgttggagtatgtccacgagcacaaggataacattggatcacaactgctgcttaactggtgtgtccagatagctaagggaatgatgtacctggaagaaagacgactcgttcatcgggatttggcagcccgtaatgtcttagtgaaatctccaaaccatgtgaaaatcacagattttgggctagccagactcttggaaggagatgaaaaagagtacaatgctgatggaggaaagatgccaattaaatggatggctctggagtgtatacattacaggaaattcacccatcagagtgacgtttggagctatggagttactatatgggaactgatgacctttggaggaaaaccctatgatggaattccaacgcgagaaatccctgatttattagagaaaggagaacgtttgcctcagcctcccatctgcactattgacgtttacatggtcatggtcaaatgttggatgattgatgctgacagtagacctaaatttaaggaactggctgctgagttttcaaggatggctcgagaccctcaaagatacctagttattcagggtgatgatcgtatgaagcttcccagtccaaatgacagcaagttctttcagaatctcttggatgaagaggatttggaagatatgatggatgctgaggagtacttggtccctcaggctttcaacatcccacctcccatctatacttccagagcaagaattgactcgaataggaaccagtttgtataccgagatggaggttttgctgctgaacaaggagtgtctgtgccctacagagccccaactagcacaattccagaagctcctgtggcacagggtgctactgctgagatttttgatgactcctgctgtaatggcaccctacgcaagccagtggcaccccatgtccaagaggacagtagcacccagaggtacagtgctgaccccaccgtgtttgccccagaacggagcccacgaggagagctggatgaggaaggttacatgactcctatgcgagacaaacccaaacaagaatacctgaatccagtggaggagaacccttttgtttctcggagaaaaaatggagaccttcaagcattggataatcccgaatatcacaatgcatccaatggtccacccaaggccgaggatgagtatgtgaatgagccactgtacctcaacacctttgccaacaccttgggaaaagctgagtacctgaagaacaacatactgtcaatgccagagaaggccaagaaagcgtttgacaaccctgactactggaaccacagcctgccacctcggagcacccttcagcacccagactacctgcaggagtacagcacaaaatatttttataaacagaatgggcggatccggcctattgtggcagagaatcctgaatacctctctgagttctccctgaagccaggcactgtgctgccgcctccaccttacagacaccggaatactgtggtgtaagctcagttgtggttttttaggtggagagacacacctgctccaatttccccacccccctctctttctctggtggtcttccttctaccccaaggccagtagttttgacacttcccagtggaagatacagagatgcaatgatagttatgtgcttacctaacttgaacattagagggaaagactgaaagagaaagataggaggaaccacaatgtttcttcatttctctgcatgggttggtcaggagaatgaaacagctagagaaggaccagaaaatgtaaggcaatgctgcctactatcaaactagctgtcactttttttctttttctttttctttctttgtttctttcttcctcttcttttttttttttttttttaaagcagatggttgaaacacccatgctatctgttcctatctgcaggaactgatgtgtgcatatttagcatccctggaaatcataataaagtttccattagaacaaaagaataacattttctataacatatgatggtgtctgaaattgagaatccagtttctttccccagcagtttctgtcctagcaagtaagaatggccaactcaactttcataatttaaaaatctccattaaagttataactagtaattatgttttcaacactttttggtttttttcattttgttttgctctgaccgattcctttatatttgctcccctatttttggctttaatttctaattgcaaagatgtttacatcaaagcttcttcacagaatttaagcaagaaatattttaatatagtgaaatggccactactttaagtatacaatctttaaaataagaaagggaggctaatatttttcatgctatcaaattatcttcaccctcatcctttacatttttcaacatttttttttctccataaatgacactacttgataggccgttggttgtctgaagagtagaagggaaactaagagacagttctctgtggttcaggaaaactactgatactttcaggggtggcccaatgagggaatccattgaactggaagaaacacactggattgggtatgtctacctggcagatactcagaaatgtagtttgcacttaagctgtaattttatttgttctttttctgaactccattttggattttgaatcaagcaatatggaagcaaccagcaaattaactaatttaagtacatttttaaaaaaagagctaagataaagactgtggaaatgccaaaccaagcaaattaggaaccttgcaacggtatccagggactatgatgagaggccagcacattatcttcatatgtcacctttgctacgcaaggaaatttgttcagttcgtatacttcgtaagaaggaatgcgagtaaggattggcttgaattccatggaatttctagtatgagactatttatatgaagtagaaggtaactctttgcacataaattggtataataaaaagaaaaacacaaacattcaaagcttagggataggtccttgggtcaaaagttgtaaataaatgtgaaacatcttctcatgcaattattttattatccaacacactaatcttttgatactttatataattccctttcttcatatactgcatccagtactagaaccatcattattatgtatcattttgaaagaatacctgatgagatgaaggatgagaacaaatgacagagatgagtctccaagtaaagggggcctcacatcaataattaggaaacttagatataagtcgcccttttctgaaaattctaccccaagtcatttagatttttaaaaaatatttctaatgttaaaatattgggaccaaattagaatcaatagtataagattaattaattagagtaaaaatatctattaaggcagagaaagtttagagaaaaaaatccaaagaaatttgtgtttcttcctattctgaacaagtaaatccatccatccatccatccaaacctcctttatctaactgtgtctactaaaagcaccatgttttgtggggaacactcagataaatggaatatcatcctcaacttcaaaattctatgatctaggagatttaattaaaatgacattttaatttttctatgcgttccaacaatcagattgcatagtctcttttgtgaatagctgtcatataatcagttgtactgtaagatatctcctttaaactcatttgggatataagttaaacatccttcaaattgttgatgttgacaaacaggataatttcaataatattattcaaacataaactggtctaggagaatattgcatcactgactaattagcctatctagagtctaacttcaccattaaaccaaaagcagatggtggtccttggccaagaatattggagacattggagttggtttttttctaagctataagaagtgaggcgagctgaaaaagtatggtagagcaggagaagggtttgtgagattccttctagtgaagttcaccctcaaacttttcaggggtaaagacacagagtgattcaggggccacaatctaatagctcagggctctcctatccattcagagaagtctctaggaaaagggatctcatatcagtacttatgaaaaattgaatataagcctccctttctaaataaatctgcatcgagtcatcacagccctctttttggatactataccttgattttttttttctgatttacaatatgcatatggtttctactgggctatagaaagcagaatcactcattttggagaaggaaaaaatgaatagttaaaacaaacttttaactgttaaggtaacagaaatgtatttagtgaatgtctctttcctcctaagaacacaagacttctacatgttgggtaatacctagagatgcatgtaggaataatccaaaatgacccaaatgctttataatagcaccactttataattcttttgaatgatttctgtagtatataattgacttcagttgtttgagtgttttttgttttatttttgtcccccctgggaaaacatatttcagcatgtataagagggagaaaaaaagtttcattccttccagagaataacttatttagtccagtagggtagaattttaaaatgtcagttaaagtcttcaaagtgcttggggggatatcagattccagaggccaattgtagcaattgaaatttgcagaatcaattatgtaaatctgagacaaattagtattaaaattacacggagtatattttttaaatcacccaactttgtagattatacctattttgggcaggtatggaaaaattttgcagttaaatgattgcctaaagaaagtggtaaacaggtgaggaaagatggcctctgatctaggatagatccagaaccacaaagcatctgcaccacaaaaggtgttagactaccaagcagctcctggttttctgcatagtattagtagcacagcttaggatgagaatcctttctccagtaacattcttaaaatagcatgaaaaacaacgcaaaactcaaatttctattaaaacacacaaactaaaatcaagtgattcttttttgtagattagggagaaggactgaatatctaatttaagagaaggaatagtgtttaagtgttatagtgtgtgagctaataccttctaaaggaaagacatggcatgaagattgtgcatacttacaatgctaaggaaaaatcaagaaaaggactgtgtgaggctctgctactagatgaagttggaaggactattaatgtgcttcttgaagtatcaaaaatgaaaagaaaattaaaattgtttaagcctgacagggaaggatgtaaatacaagtttttctagagctctctaacctttatttcaaaactggaattattcatccatctgtaattgttgataatttaactagtatatgtagttcataaggtaatagaaaaggtgatcatgaaagcatgtatataactggacagaaccacgataatgctataagatgtagatttagttaggttatcagatgttaaatgattttaatattattaaataaatcaaactagaaaactaaccacaagtataatgtaacaaagttaaatgcaggatataaaaatgtaggatggattttgcatagtaaaaagataagtttgccatttaaaattgttgtttgttgggtttagctgaaagtaggcatatatggttccacttgggaaaacttgctttaaagcattacaatgaacaattttttctcattctcttattcctttatcactttttaaatgtaaagaaaattgtatttatttatttttttaaataaacaccaccttgcagaatttaataggcaaacatgttacatatgactaagtaagggtcttcaagatgaagtaaagaaaatgtaaatgttctattaccttatgcagagacaaaaaaaaaaaggagtggtgtcatttagctagcaaacaaacaaaatacagttaattggtgatatgtcctttcttttctcactatgccctcttgcctccaaaaatgacaacaaagaatcacaatttttctgataaataaatgctaaaccaagcgtttcaaactattgcattgccattcttttggactttagttattagaatgatgattgttatagggcaaatgagaaatccatgtgcatcagcttctagttgttaaaaaaaccagataaattaacttctactgtatactgtgggcagaggatcctagagctgatcctacaacatcagcttctagttgttaaaaaaaaaaaaagaaacagataaattaacttctactgtatatactgtgggcagaggatcttactgtgcctctgtttgtgtacatggacttcggtgtgtatcagtttgaaggacagccttgccccatgtaaacatataaatgcagattggtatcgcctggttgctatttgcttaagaacaaatattatacagatgagatcaggcataattttaaaagatcattatcagtggagacctcattattactgatattacaatggggccagtttttatacttctgggtagaattaataaaatttttctgatcccagagatctgagttctctctgcagttggaaacaagaagctgttgtgggcattgtgtcgggccaggggcccttgtgtttgtgtgggcaaatatcttttagcagtgtgagctgcttttttcttttcattaaaagtctctctaaaataatagaaatttcagatactcggttcaagtctcactgattttgtagaggtccaaaaatgtaggatctgtcacttttgcaggcccctgcctcacctaattcctggccaggtgacattttgggcagaagtaaatgcttctatagtcacaagctaaaatgactctaagccccaatttcacggggggtattcacatgcttcctctggaaaatactctttgacagtcagctttgcaagtaagtgattaccttgttaggaatcaaagaaaaatgtatttctctctgacctttagaggaaaatagaatccttcccttttttgcccattgacacaactggcactgctctcttccctttctaccaccctggttcaaagtagtcccccgatgctgtcctgttcctttcttaagccatagtggatctctgagatcctacaccccactttgtgaaacactgacttcatctttgccctcgaatgcctgattttttcataagagattctagcaatttggacactgtttaagtgaactatcaaactaccgcatagagaatatttaagctattaaaattatggtttcccatgaagatcaattctctgtgtccttccctataggaatttgagacgagttagccctgtgatgaatcttgaaactcacatatgtccacatacacttggtagaacttcgatttaatctttacataaaagctgtacatataaccaagaagttatttttgccagtaaattaacttatttgctttattcatcttatttggttcctaatcgtaaatattttgtagctgctgtaaatttttttctcccaaatgaggagtcttattatcataaaggtaaaggctattcagctttgataaccacctgcaattcttttttggatcattcatccatctaacaaatacataatgaggacagttcatgttaatgaaaatccatgttgtttaatagaatgccatcctttacctacttttgctctttatggacgtttttcttttcatgctctagtgagctttccctatatcatgagaagtggttatatttgtgcaaatatacaaatataggaaaacaaagattcatacctgtaggcaatagtctaacttgtccaaaccactttgcctttactgctatttttatccccaatgcgtagatatttcccccaggcctatagcctttgtgaaggaaagcaaatcatacctcctgtatattgacacgaatctggttttcaaatgtcatttccagattttttagttaattgggggttgtccttttcccttaatgtgagagtcattttcctgtatatttctggatctctcaggggctgggaggggggagtgaggggactacaaccatagcactccaagaacccttttgggattactccagtaatcaactacgaaagttattttctaaatgtagatatgtaaggtgttcttttaaagtaaggtactttgaaatatgtagcataaactggtactgctgttaaatgggtcgattattaaacggagcagctgtgtgagggcagctaactttgaatgcctgtctccctggctggtgtgtctccttctcatgttgagagcaccagggattgcgtggctgcatgctgaaaccgcattttcccatggtgtatgactagttcatctctttcttgagcaccattacaagaagatcaaatgaaaatgagatcaatgtggaagacaattcatagcacaaaaaaagtcatcttaaatctactctcaaacattcatcttatacatgcatcaaagtaatttactgacatcagtttgggtgagagagggagtcactttactgaaaaggcagaggcttaaggtgtatacatttgtactcacttccttattttcttaacttgtaagcagaaaacaagccctctctcttgtgaagtatcttcaaaggattggggtgcaaaaataccttgctggtaagccatcaatgttttatttaaatccctgcattcaaagttagctgcctttttgaaataaacaaacaaaaaatactactgtatgtttgaaaatgtgaatagtatttttatagcttgttaaagacatggctagttgcatttgtaaataagtataatgttgctttgattttcttttgtggacatctttatttggaacataattgtctttagggttgatttgtatataagtaattggcctgtgattgtttcttttttggttggaagttatcattttgacattacttgtgattctgtgttcagcactattgtgatgtgttcaacctctgcactcgcttacacaataggatatgccaattgtgtgtggtgtaatgttattttgatttttttccatgttattgatgaaggatcatgcacctaacacatactaacttttttaatgttaggcatatttttagtatactttctcttattctttcttctcctccaaccttttacccatcctccttcctttccctcattcctgttgttatttgagaatgagggagaaacagtattttacatttatgtaattaggcttttccgttagttctcaaggatcctcttttggctcttgggaaagaattgtacctgtacaaggcaattatagaatgcgaactgctttgcctcattccatactgatcatcccagctgaacaatttgaaaactgttctgcctttttgttacatgaatctgtcagaaatatatttttaatttaatataaatgaaattcaataaaatatgaaacaaa

SEQ ID NO: 33907 - protein, 821 aa, Artificial Sequence
  derived and/or modified sequence
MDVVDPDIFNRDPRDHYDLLQRLGGGTYGEVFKARDKVSGDLVALKMVKMEPDDDVSTLQKEILILKTCRHANIVAYHGSYLWLQKLWICMEFCGAGSLQDIYQVTGSLSELQISYVCREVLQGLAYLHSQKKIHRDIKGANILINDAGEVRLADFGISAQIGATLARRLSFIGTPYWMAPEVAAVALKGGYNELCDIWSLGITAIELAELQPPLFDVHPLRVLFLMTKSGYQPPRLKEKGKWSAAFHNFIKVTLTKSPKKRPSATKMLSHQLVSQPGLNRGLILDLLDKLKNPGKGPSIGDIEDEEPELPPAIPRRIRSTHRSSSLGIPDADCCRRHMEFRKLRGMETRPPANTARLQPPRDLRSSSPRKQLSESSDDDYDDVDIPTPAEDTPPPLPPKPKFRSPSDEGPGSMGDDGQLSPGVLVRCASGPPPNSPRPGPPPSTSSPHLTAHSEPSLWNPPSRELDKPPLLPPKKEKMKRKGCALLVKLFNGCPLRIHSTAAWTHPSTKDQHLLLGAEEGIFILNRNDQEATLEMLFPSRTTWVYSINNVLMSLSGKTPHLYSHSILGLLERKETRAGNPIAHISPHRLLARKNMVSTKIQDTKGCRACCVAEGASSGGPFLCGALETSVVLLQWYQPMNKFLLVRQVLFPLPTPLSVFALLTGPGSELPAVCIGVSPGRPGKSVLFHTVRFGALSCWLGEMSTEHRGPVQVTQVEEDMVMVLMDGSVKLVTPEGSPVRGLRTPEIPMTEAVEAVAMVGGQLQAFWKHGVQVWALGSDQLLQELRDPTLTFRLLGSPRPVVVETRPVDDPTAPSNLYIQE

SEQ ID NO: 33908 - DNA, 2466 bp, Artificial Sequence
  derived and/or modified sequence
atggacgtcgtcgatcccgacatttttaatcgagacccaagagatcactatgatttgctgcaacggcttggtggtggcacttatggcgaggtgttcaaagcaagggacaaagtatctggcgacttagtcgctttaaagatggtcaagatggaaccggacgacgacgtgtcaaccctgcaaaaggagatcctgatcctgaagacttgcaggcacgccaatattgttgcatatcatgggagctatctgtggctccaaaagctttggatctgtatggagttttgcggagccggctccctgcaggacatctatcaggttacaggtagtttaagcgaactgcagatttcctacgtttgtcgagaggtgttacagggactagcgtatctgcactcccaaaagaaaattcatcgggacattaagggggccaacatcctgatcaatgacgccggcgaggtacgtctggcagactttgggatttcggcccagatcggcgccaccctggcaaggcggctgtccttcatcggcacaccctattggatggctcctgaggtggcagccgtcgccctgaaaggaggctacaacgaactttgtgacatttggtcgctcggtattacggcaatcgagctggccgagcttcaacctcccctattcgatgtacatcctttacgggtactattcctgatgaccaaaagcgggtaccagccaccacggctgaaagagaaggggaagtggtcagcagcctttcacaattttatcaaagttacccttaccaagtcccctaagaaaagaccttcagctaccaagatgctgagccaccagctggtaagtcagcctggcttaaacagagggctgattctcgacctgctggacaaacttaagaaccccggcaaggggccctctatcggagacattgaggacgaagagcctgagctgcccccggcaattccccgtagaattagaagtacccacagatcatcatccttgggcatcccagacgcagactgttgtaggcgtcatatggagttccggaaactgaggggaatggagacgcgcccacccgccaatactgcaaggctccaaccacctagagatctacgttcctcatcccccagaaaacagctgtccgaatcctccgacgacgactacgacgatgtggatatccctacccctgccgaggatactccaccgcctctgccccctaaacccaaattcagaagcccttcggacgaaggccccggttcaatgggggacgacggtcagctctcccccggtgtcctcgtccgctgcgcatcaggtccaccgccaaattcgccccgtcctggacccccaccttccacctcctcaccacatctcacagctcactctgaaccctctctgtggaacccgccaagcagggagttggataaaccgcctctgctgcctcctaagaaagagaaaatgaagcggaaaggctgtgctttgctggtgaaattgtttaacggctgccccctgcgaatacacagtactgctgcttggactcatccgagcacgaaggatcagcacctgttactgggggcagaggaggggatttttattctgaaccgtaacgaccaggaagctacattggagatgctcttccctagccggactacttgggtatacagcataaacaatgtcctaatgtccctatctggcaagacgccccatttatactctcactctatcctgggactactcgagaggaaggaaactagagcgggtaaccccatcgcccatatctctccacacaggctcctggcacgaaaaaatatggtctccaccaagattcaggacacgaaaggctgtcgggcctgttgtgtggccgaaggcgctagcagcggcggcccctttctttgtggggcacttgaaacaagcgttgttttgctgcagtggtaccaaccgatgaataagtttcttttggtgcgacaggtgctgttcccactaccaacacccctatctgtgttcgccctgttgacaggccccggctcggagttgcccgcagtttgtatcggagtgagccccgggaggccaggtaaaagcgttctcttccatacggtccgctttggtgcactttcctgttggcttggggaaatgtctacggaacatcggggccccgttcaagtgacccaagtcgaagaagacatggttatggtgctgatggacgggtcagtcaagctggtgaccccggaggggagcccggtaagggggttgcgcacccccgagatacctatgactgaagccgtggaagccgtggccatggtcggcggccagctgcaggccttttggaaacacggagtccaggtttgggccttggggagcgaccagcttctgcaggaacttcgcgatcctacccttactttcaggctgctgggctcacccagacccgttgtggtagagacacggcctgtggacgatcctacagcaccatccaacctctacatccaggagtag

SEQ ID NO: 33909 - DNA, 720 bp, Artificial Sequence
  derived and/or modified sequence
atggaattcagaaaactccgcgggatggaaacccgccctccagccaacaccgccagattacagccccccagggacttgaggtcatcatccccacgcaagcagttgtctgagtcaagcgacgacgactatgatgatgtggatatacctacacctgcagaggacaccccgcccccactcccaccaaagccaaagttcagatcccccagtgacgaagggcccggctcaatgggagacgatggtcagttgtctcctggtgtgctggtgaggtgcgccagcggcccacccccaaactctcccaggcccggcccgccacctagcacaagttctccgcacctgactgcacatagcgagccctccctgtggaaccccccttcccgggagctcgataaaccccctctgctgccacccaaaaaggagaaaatgaagaggaaaggctgcgcccttctggttaaactcttcaacgggtgtccattgcgtattcacagcactgccgcgtggacccacccaagcaccaaagatcagcatctgcttctcggcgcagaggagggcatctttatcttaaatagaaacgatcaggaagctaccttggagatggagaggcctcccacctgtattcttatcgccagtcttgcctgttggaatgggaaacgccctgagcaggagacgccttcactgacactcgcccccacagcctattggcaaggaacatcatcacagtag

SEQ ID NO: 33910 - DNA, 2466 bp, Artificial Sequence
  derived and/or modified sequence
atggatgtggtggaccctgacatcttcaacagagacccccgggaccactatgacctgctgcagaggctgggcggcggcacctacggggaggtgttcaaggcccgggacaaggtgtctggggacctggtggccctgaagatggtgaagatggagccagatgatgatgtgtccaccctgcagaaggagatcctgatcctgaagacctgcagacatgccaacatcgtggcctaccacggcagctacctgtggctgcagaagctgtggatctgcatggagttctgtggggccggcagcctgcaggacatctaccaggtgacaggcagcctgtctgagctgcagatctcctatgtgtgccgggaggtgctgcagggcctggcctacctgcacagccagaagaagatccaccgggacatcaagggggccaacatcctgatcaatgatgctggggaggtgcggctggccgactttggcatcagcgcccagatcggggccaccctggcccggcggctgtccttcatcggcaccccctactggatggcccctgaggtggccgctgtggccctgaagggcggctacaatgagctgtgtgacatctggagcctgggcatcacagccatcgagctggccgagctgcagccccccctgtttgatgtgcaccccctgcgggtgctcttcctgatgaccaagagcggctaccagcccccccggctgaaggagaagggcaagtggagcgctgccttccacaacttcatcaaggtgaccctgaccaagagccccaagaagaggcccagcgccaccaagatgctgagccaccagctggtgtcccagcccggcctgaacagaggcctcatcctggacctgctggacaagctgaagaaccctgggaagggccccagcatcggggacattgaagatgaggagcctgagctgcccccagccatcccccggcgcatccgcagcacccacaggagcagcagcctgggcatcccagatgctgactgctgccgccgccacatggagttcaggaagctgcggggcatggagacccggcccccagccaacacagcccggctgcagcccccccgggacctgcggagcagcagccccaggaagcagctgtctgagagcagtgatgatgattatgatgatgtggacatccccaccccagctgaggacaccccaccacccctgccccccaagcccaagttccgcagccccagtgatgagggccctggctccatgggagatgatggccagctgagccctggggtgctggtgcgctgtgccagcggccccccacccaacagccccaggcctggccccccacccagcaccagcagcccccacctgacagcccacagcgagcccagcctgtggaacccccccagccgggagctggacaagccacccctgctgccccccaagaaggagaagatgaagaggaagggctgtgccctgctggtgaagctgttcaacggctgccccctgcgcatccacagcacagctgcctggacccaccccagcaccaaggaccagcacctgctgctgggcgctgaggagggcatcttcatcctgaacagaaatgaccaggaggccaccctggagatgctgttccccagcaggaccacctgggtgtacagcatcaacaacgtgctgatgagcctgagcggcaagaccccccacctgtacagccacagcatcctgggcctgctggagaggaaggagacccgggccggcaaccccatcgcccacatcagcccccaccggctgctggccaggaagaacatggtgtccaccaagatccaggacaccaagggctgccgggcctgctgcgtggccgagggcgccagcagcggcggccccttcctgtgtggggccctggagacctctgtggtgctgctgcagtggtaccagcccatgaacaagttcctgctggtgcggcaggtgctcttccccctgcccacccccctgtctgtgtttgccctgctgaccggccctggcagcgagctgcctgctgtgtgcattggagtgtccccaggccggcctgggaagtctgtgctcttccacacagtgcgctttggagccctgagctgctggctgggggagatgagcacagagcaccggggccctgtgcaggtgacccaggtggaggaggacatggtgatggtgctgatggatggctctgtgaagctggtgaccccagagggcagccctgtgcggggcctgcggaccccagagatccccatgacagaggccgtggaggccgtggccatggtgggcggccagctgcaggccttctggaagcatggagtgcaggtgtgggccctgggcagtgaccagctgctgcaggagctgcgggaccccaccctgaccttccggctgctgggcagccccaggcctgtggtggtggagaccaggcctgtggatgaccccacagcccccagcaacctgtacatccaggagtag

SEQ ID NO: 33911 - DNA, 720 bp, Artificial Sequence
  derived and/or modified sequence
atggagttcaggaagctgcggggcatggagacccggcccccagccaacacagcccggctgcagcccccccgggacctgcggagcagcagccccaggaagcagctgtctgagagcagtgatgatgattatgatgatgtggacatccccaccccagctgaggacaccccaccacccctgccccccaagcccaagttccgcagccccagtgatgagggccctggctccatgggagatgatggccagctgagccctggggtgctggtgcgctgtgccagcggccccccacccaacagccccaggcctggccccccacccagcaccagcagcccccacctgacagcccacagcgagcccagcctgtggaacccccccagccgggagctggacaagccacccctgctgccccccaagaaggagaagatgaagaggaagggctgtgccctgctggtgaagctgttcaacggctgccccctgcgcatccacagcacagctgcctggacccaccccagcaccaaggaccagcacctgctgctgggcgctgaggagggcatcttcatcctgaacagaaatgaccaggaggccaccctggagatggagaggcctcccacctgcatcctgattgccagcctggcctgctggaatggcaagaggcctgagcaggagacccccagcctgaccctggcccccacagcctactggcagggcaccagcagccagtag

SEQ ID NO: 33912 - DNA, 2681 bp, Artificial Sequence
  derived and/or modified sequence
gcggaggcaaggcgggtgcagggcttctggggacggagggaggtgccagaagttgagccctgaggccctgctggcccctgggcgcaggcccagctcaggcccccagggatggacgtcgtggaccctgacattttcaatagagacccccgggaccactatgacctgctacagcggctgggtggcggcacgtatggggaagtctttaaggctcgagacaaggtgtcaggggacctggtggcactgaagatggtgaagatggagcctgatgatgatgtctccacccttcagaaggaaatcctcatattgaaaacttgccggcacgccaacatcgtggcctaccatgggagttatctctggttgcagaaactctggatctgcatggaattctgtggggctggttctctccaggacatctaccaagtgacaggctccctgtcagagctccagattagctatgtctgccgggaagtgctccagggactggcctatttgcactcacagaagaagatacacagggacatcaagggagctaacatcctcatcaatgatgctggggaggtcagattggctgactttggcatctcggcccagattggggctacactggccagacgcctctctttcattgggacaccctactggatggctccggaagtggcagctgtggccctgaagggaggatacaatgagctgtgtgacatctggtccctgggcatcacggccatcgaactggccgagctacagccaccgctctttgatgtgcaccctctcagagttctcttcctcatgaccaagagtggctaccagcctccccgactgaaggaaaaaggcaaatggtcggctgccttccacaacttcatcaaagtcactctgactaagagtcccaagaaacgacccagcgccaccaagatgctcagtcatcaactggtatcccagcctgggctgaatcgaggcctgatcctggatcttcttgacaaactgaagaatcccgggaaaggaccctccattggggacattgaggatgaggagcccgagctaccccctgctatccctcggcggatcagatccacccaccgctccagctctctggggatcccagatgcagactgctgtcggcggcacatggagttcaggaagctccgaggaatggagaccagacccccagccaacaccgctcgcctacagcctcctcgagacctcaggagcagcagccccaggaagcaactgtcagagtcgtctgacgatgactatgacgacgtggacatccccacccctgcagaggacacacctcctccacttccccccaagcccaagttccgttctccatcagacgagggtcctgggagcatgggggatgatgggcagctgagcccgggggtgctggtccggtgtgccagtgggcccccaccaaacagcccccgtcctgggcctcccccatccaccagcagcccccacctcaccgcccattcagaaccctcactctggaacccaccctcccgggagcttgacaagcccccacttctgccccccaagaaggaaaagatgaagagaaagggatgtgcccttctcgtaaagttgttcaatggctgccccctccggatccacagcacggccgcctggacacatccctccaccaaggaccagcacctgctcctgggggcagaggaaggcatcttcatcctgaaccggaatgaccaggaggccacgctggaaatgctctttcctagccggactacgtgggtgtactccatcaacaacgttctcatgtctctctcaggaaagaccccccacctgtattctcatagcatccttggcctgctggaacggaaagagaccagagcaggaaaccccatcgctcacattagcccccaccgcctactggcaaggaagaacatggtttccaccaagatccaggacaccaaaggctgccgggcgtgctgtgtggcggagggtgcgagctctgggggcccgttcctgtgcggtgcattggagacgtccgttgtcctgcttcagtggtaccagcccatgaacaaattcctgcttgtccggcaggtgctgttcccactgccgacgcctctgtccgtgttcgcgctgctgaccgggccaggctctgagctgcccgctgtgtgcatcggcgtgagccccgggcggccggggaagtcggtgctcttccacacggtgcgctttggcgcgctctcttgctggctgggcgagatgagcaccgagcacaggggacccgtgcaggtgacccaggtagaggaagatatggtgatggtgttgatggatggctctgtgaagctggtgaccccggaggggtccccagtccggggacttcgcacacctgagatccccatgaccgaagcggtggaggccgtggctatggttggaggtcagcttcaggccttctggaagcatggagtgcaggtgtgggctctaggctcggatcagctgctacaggagctgagagaccctaccctcactttccgtctgcttggctcccccaggcctgtagtggtggagacacgcccagtggatgatcctactgctcccagcaacctctacatccaggaatgagtccctaggggggtgtcaggaactagtccttgcaccccctcccccatagacacactagtggtcatggcatgtcctcatctcccaataaacatgactttagcctctgc

SEQ ID NO: 33913 - DNA, 1225 bp, Artificial Sequence
  derived and/or modified sequence
tggggctacactggccagacgcctctctttcattgggacaccctactggatggctccggaagtggcagctgtggccctgaagggaggatacaatgagctgtgtgacatctggtccctgggcatcacggccatcgaactggccgagctacagccaccgctctttgatgtgcaccctctcagcatcaactggtatcccagcctgggctgaatcgaggcctgatcctggatcttcttgacaaactgaagaatcccgggaaaggaccctccattggggacattgaggatgaggagcccgagctaccccctgctatccctcggcggatcagatccacccaccgctccagctctctggggatcccagatgcagactgctgtcggcggcacatggagttcaggaagctccgaggaatggagaccagacccccagccaacaccgctcgcctacagcctcctcgagacctcaggagcagcagccccaggaagcaactgtcagagtcgtctgacgatgactatgacgacgtggacatccccacccctgcagaggacacacctcctccacttccccccaagcccaagttccgttctccatcagacgagggtcctgggagcatgggggatgatgggcagctgagcccgggggtgctggtccggtgtgccagtgggcccccaccaaacagcccccgtcctgggcctcccccatccaccagcagcccccacctcaccgcccattcagaaccctcactctggaacccaccctcccgggagcttgacaagcccccacttctgccccccaagaaggaaaagatgaagagaaagggatgtgcccttctcgtaaagttgttcaatggctgccccctccggatccacagcacggccgcctggacacatccctccaccaaggaccagcacctgctcctgggggcagaggaaggcatcttcatcctgaaccggaatgaccaggaggccacgctggaaatggaaagaccccccacctgtattctcatagcatccttggcctgctggaacggaaagagaccagagcaggaaaccccatcgctcacattagcccccaccgcctactggcaaggtaccagctcccaatgaatggcaccacacagccttataattcctcccatgcccctctgcctcctgctgtcctaccccccttcacacctacctattctccaggaagaacatggtttccaccaagatccaggacaccaaa

SEQ ID NO: 33914 - DNA, 2466 bp, Artificial Sequence
  derived and/or modified sequence
atggacgtggtggaccccgacatcttcaaccgggacccccgggaccactacgatttgctgcagcggcttgggggggggacttacggcgaggtgtttaaggcccgtgataaggtgtctggcgatctcgtcgcacttaaaatggtcaaaatggagccggacgacgacgttagcaccctccagaaagaaatcctgatcctgaaaacctgcaggcacgcaaacatcgtagcatatcacggcagttacctgtggctgcaaaagttgtggatctgtatggagttctgcggcgccgggtccttgcaagatatctaccaggtcaccggttctctgtccgagctgcagatttcctatgtatgcagagaagtgctgcagggcttggcttacttgcactcccagaagaagattcatcgcgatatcaagggggccaatatcctgattaacgacgcgggggaggttcgtttggcagacttcggtatctcagcgcaaattggcgccactctcgccaggagactatcattcattggaacaccctactggatggctcctgaagtggccgcagtcgccctgaagggggggtataatgaactgtgcgacatttggtctcttggcattacagcaatcgaactcgccgagttacagcctcctttgttcgatgtgcaccccctgcgcgtgctgtttttgatgaccaaatccggataccagccaccacggctgaaggaaaagggaaagtggtcagctgcctttcataactttattaaggtgacccttaccaagagcccgaaaaagcgacctagcgcgactaagatgctctcacatcaactcgtttctcagcctggcctgaaccgagggttgattctagatctgctggataagttgaaaaaccctggcaagggtccgtcaatcggcgatattgaagatgaagagccagagctgccgcctgccattcctcggcgaattaggtccacccaccggtccagcagtctcggtatacctgatgcagattgttgtaggaggcatatggagtttaggaagctgcgggggatggaaacccgcccgcccgccaacacggcacgactccaacctcccagggacctgcggagctcttctccccggaaacaactatctgaaagctccgatgatgactacgatgatgtggacatcccgactcctgccgaggacacaccgcccccactgcctcccaaacctaaattcaggtcacccagtgacgaaggtccaggatcaatgggagacgacggtcagctttctcctggtgtgctggtgagatgtgcgtcaggcccacccccgaatagccctcggcctgggcctccccccagtacatcctctccccatttgactgcacatagtgaaccttcactttggaatccaccatccagggaattggacaagccacctcttttgcctccgaaaaaagaaaagatgaaacgcaagggatgtgccttgctcgtgaaattgttcaacgggtgcccgttgcgaatccattctactgcagcttggactcaccccagtacaaaggatcagcacctgctgttgggggccgaagagggcatcttcatattgaaccgcaacgatcaagaggctaccctcgagatgctgtttccatcgaggaccacatgggtgtatagcattaacaatgtcttgatgtcactaagtggtaagacccctcacctgtattctcactcaatactcggactgctggaaaggaaggaaacccgggccggcaacccaatcgctcatattagcccccaccggcttcttgctcgcaagaacatggtgagcaccaaaatacaggatactaagggctgccgggcatgctgtgtggcggaaggagcatcatcaggagggcccttcctgtgcggggctctcgaaacctctgtggtgctgctgcagtggtatcaaccaatgaacaagtttctcctggttcggcaggtgttgtttccactaccgacgcccctttcagtgtttgccttgttgacagggcccgggtccgagcttccagccgtgtgcatcggcgtgagccctggccgtcccgggaagagcgtcttgttccacactgtgcggttcggggctctgagctgttggctcggagagatgagcacggagcatagggggcccgttcaggtcacacaggtcgaggaagatatggtcatggtcttaatggacggcagcgtgaagttagtgacacccgagggttctccagtccggggcctcagaacaccggagattccgatgacagaagccgtggaagccgtggctatggttggcggtcagctgcaggctttttggaagcatggggtgcaggtttgggcactgggctctgaccaactcctgcaagagctcagagatcccacactgacatttcggctgctgggatctcctcgccctgtcgtggtggagacccgaccggtagacgacccaacagccccttcaaacctttatatccaggagtag

SEQ ID NO: 33915 - DNA, 720 bp, Artificial Sequence
  derived and/or modified sequence
atggagttccggaagctgcggggcatggagacccggccccccgccaatacggcacgcctgcaaccaccacgagacttgcgttcaagttccccccgtaagcaactttccgaaagctcagacgacgactatgatgacgttgacatacccacaccggcagaggatacacctccacccctgccaccaaagcccaagttccgttctccgtcagacgaaggaccagggtccatgggcgacgacggtcagctctccccaggggtactggtgcgatgtgcctccggcccaccccccaattcgccgcgcccagggcctcccccctcgacaagcagtccccatctgaccgctcactccgagcccagcctctggaacccaccatctagggagttggacaaaccccccctgttgcccccaaaaaaggaaaagatgaagcgaaagggctgcgctctgttggtcaaattgtttaacgggtgccccctacgcatccatagtaccgccgcgtggacccatccatccacaaaagatcaacacctgctgcttggcgccgaggaagggatctttattctcaaccgaaatgaccaggaagccaccctcgagatggagcgcccccccacgtgcatcctgatcgctagcctcgcctgttggaatggcaagcgccctgaacaggagacaccatctctgactttggctccaacagcatattggcagggcactagctcacaatag

SEQ ID NO: 33916 - DNA, 2466 bp, Artificial Sequence
  derived and/or modified sequence
atggatgtcgtggatcccgatatcttcaatagggatcccagagaccactacgatctgctgcagcgcctagggggtggcacctacggggaagtgtttaaggctagagataaagtcagtggcgatctggtcgccctcaagatggtgaagatggaaccagacgacgacgtgtcaaccctccaaaaggagatcttgatcctgaaaacatgtaggcacgccaacatcgtcgcttatcacggatcctatctgtggctccagaagctctggatctgcatggaattctgtggagccggaagcctgcaggatatttaccaggtcactgggagcctgtctgaacttcagatctcctatgtctgtagagaggttcttcagggcttggcctacctgcattcacagaaaaagatacaccgcgatattaagggagccaacattctgatcaacgacgcgggtgaggtgaggctcgcagatttcggcattagtgcgcagataggcgctactctggctaggcggttaagcttcattggcaccccttactggatggcccctgaggtggctgcagtggcgcttaagggaggctataatgagctctgtgacatttggagcctcggcattacggccattgagttggccgagttacagcctcccctcttcgatgtccaccccctgcgcgttctctttcttatgaccaaatccggctaccagccccctcgactgaaagagaagggcaagtggagcgctgcgttccataacttcatcaaggtgaccttaacaaagagtcctaagaagcgtcccagcgcgacaaagatgctatcacaccagttggtctcacagcctggtcttaatcgtggactgattttagatctattggacaagctgaagaatcctggaaagggacccagcattggagatattgaggatgaggaacccgaacttcctcccgctatccctagacgcatcagaagcactcaccgctcttcttccctgggtatccccgacgcagattgctgcaggcgccatatggaattcaggaagttgaggggaatggaaaccaggccccctgcaaatacagccagacttcagccccctagggacctgaggagcagctcgcctcggaagcaacttagtgaatcatcagacgatgattacgacgacgtagacatccccacacccgcagaagacactcctcctcctcttcccccaaaacctaagttccgcagccccagcgacgaaggaccaggctccatgggcgacgatgggcagctctctcctggggtcttagtgcgctgcgcgagcgggccaccacccaatagccctcgtccgggacccccaccaagtacgagttctccccacctgaccgcccacagtgagccaagtctgtggaaccctccctcgagggaactggataagcccccactgttgccacccaagaaggagaaaatgaagcggaaaggctgcgctcttttggtcaagctctttaacggctgcccactgaggattcactccaccgcagcttggacccatccctctaccaaagaccagcacctacttctgggcgctgaggaggggatcttcatcctgaatcgaaacgatcaggaggcaacccttgaaatgcttttcccttcgagaacaacttgggtgtattccattaataacgtcttaatgagtctgagcggtaagaccccacacttgtatagccactcaatactcgggcttctggaacgtaaagaaacaagggctggtaacccaatcgcacacattagtcctcataggctcctggcgaggaaaaatatggtatctactaaaatacaggataccaaggggtgtcgagcctgttgtgtagctgaaggggctagttccggtggtccattcctttgcggcgcactggaaacgtctgttgttctgttgcagtggtaccagccaatgaacaagtttctcttggtaaggcaggtcctgttcccattgccgacgcccctgtccgtatttgcactgttgacgggccctggaagcgaacttccagctgtatgtatcggcgtgtctcctgggagacctggtaagagcgtcctatttcacactgtgcgttttggggctcttagttgttggctcggggagatgagcaccgagcaccgtggtcccgtccaggtgacccaggtcgaggaggatatggtgatggttctcatggacggcagtgttaagctggttactcctgagggttcccccgtgagaggtctcagaacgccggaaattcctatgaccgaggccgtggaggccgtggctatggtgggcggacagcttcaagctttctggaaacacggcgtccaggtgtgggccctcggctctgaccagctgctccaggagttgcgggacccaaccctgacatttcggctgcttggctctccccgtccagtggtggtggagaccagaccagtggacgacccgacagcaccctctaacctctacattcaagaatag

SEQ ID NO: 33917 - DNA, 720 bp, Artificial Sequence
  derived and/or modified sequence
atggagtttaggaaacttcgaggtatggagacacgccctccagctaacacggcacgccttcagcctccacgtgatttacggtcgtcttcgccacgtaaacagctgtctgagtcctctgacgatgattacgatgatgtggacatcccaacccccgcagaggatacaccccctcctctgccaccgaagcctaaattccggtctcccagtgacgagggacctgggtcgatgggcgacgacggtcaactttcccccggagtgctagtgcggtgcgcttccgggccacccccaaactctcccagaccagggcctccaccctccacgagttcccctcatcttaccgcacactccgagccatccctctggaacccgccatcccgagagctggataagccacccctgttacctcccaagaaagaaaaaatgaagaggaaaggatgtgcccttctggtgaagctgttcaacggctgccccctccgtatccactccaccgctgcatggacacatccctccaccaaagatcagcatcttctccttggggctgaggaggggatatttatcctcaaccggaacgaccaggaggccacgttggagatggagcgccctcccacttgcatcctgatcgcatctctggcttgttggaatggtaaacgacccgaacaagagacccccagtttaacactggcccctactgcgtactggcagggtacttccagccagtag

SEQ ID NO: 33918 - DNA, 2466 bp, Artificial Sequence
  derived and/or modified sequence
atggacgtggtggaccccgacatcttcaacagagaccccagagaccactacgacctgctgcagagactgggcggcggcacctacggcgaggtgttcaaggccagagacaaggtgagcggcgacctggtggccctgaagatggtgaagatggagcccgacgacgacgtgagcaccctgcagaaggagatcctgatcctgaagacctgcagacacgccaacatcgtggcctaccacggcagctacctgtggctgcagaagctgtggatctgcatggagttctgcggcgccggcagcctgcaggacatctaccaggtgaccggcagcctgagcgagctgcagatcagctacgtgtgcagagaggtgctgcagggcctggcctacctgcacagccagaagaagatccacagagacatcaagggcgccaacatcctgatcaacgacgccggcgaggtgagactggccgacttcggcatcagcgcccagatcggcgccaccctggccagaagactgagcttcatcggcaccccctactggatggcccccgaggtggccgccgtggccctgaagggcggctacaacgagctgtgcgacatctggagcctgggcatcaccgccatcgagctggccgagctgcagccccccctgttcgacgtgcaccccctgagagtgctgttcctgatgaccaagagcggctaccagccccccagactgaaggagaagggcaagtggagcgccgccttccacaacttcatcaaggtgaccctgaccaagagccccaagaagagacccagcgccaccaagatgctgagccaccagctggtgagccagcccggcctgaacagaggcctgatcctggacctgctggacaagctgaagaaccccggcaagggccccagcatcggcgacatcgaggacgaggagcccgagctgccccccgccatccccagaagaatcagaagcacccacagaagcagcagcctgggcatccccgacgccgactgctgcagaagacacatggagttcagaaagctgagaggcatggagaccagaccccccgccaacaccgccagactgcagccccccagagacctgagaagcagcagccccagaaagcagctgagcgagagcagcgacgacgactacgacgacgtggacatccccacccccgccgaggacacccccccccccctgccccccaagcccaagttcagaagccccagcgacgagggccccggcagcatgggcgacgacggccagctgagccccggcgtgctggtgagatgcgccagcggccccccccccaacagccccagacccggccccccccccagcaccagcagcccccacctgaccgcccacagcgagcccagcctgtggaacccccccagcagagagctggacaagccccccctgctgccccccaagaaggagaagatgaagagaaagggctgcgccctgctggtgaagctgttcaacggctgccccctgagaatccacagcaccgccgcctggacccaccccagcaccaaggaccagcacctgctgctgggcgccgaggagggcatcttcatcctgaacagaaacgaccaggaggccaccctggagatgctgttccccagcagaaccacctgggtgtacagcatcaacaacgtgctgatgagcctgagcggcaagaccccccacctgtacagccacagcatcctgggcctgctggagagaaaggagaccagagccggcaaccccatcgcccacatcagcccccacagactgctggccagaaagaacatggtgagcaccaagatccaggacaccaagggctgcagagcctgctgcgtggccgagggcgccagcagcggcggccccttcctgtgcggcgccctggagaccagcgtggtgctgctgcagtggtaccagcccatgaacaagttcctgctggtgagacaggtgctgttccccctgcccacccccctgagcgtgttcgccctgctgaccggccccggcagcgagctgcccgccgtgtgcatcggcgtgagccccggcagacccggcaagagcgtgctgttccacaccgtgagattcggcgccctgagctgctggctgggcgagatgagcaccgagcacagaggccccgtgcaggtgacccaggtggaggaggacatggtgatggtgctgatggacggcagcgtgaagctggtgacccccgagggcagccccgtgagaggcctgagaacccccgagatccccatgaccgaggccgtggaggccgtggccatggtgggcggccagctgcaggccttctggaagcacggcgtgcaggtgtgggccctgggcagcgaccagctgctgcaggagctgagagaccccaccctgaccttcagactgctgggcagccccagacccgtggtggtggagaccagacccgtggacgaccccaccgcccccagcaacctgtacatccaggagtag

SEQ ID NO: 33919 - DNA, 720 bp, Artificial Sequence
  derived and/or modified sequence
atggagttcagaaagctgagaggcatggagaccagaccccccgccaacaccgccagactgcagccccccagagacctgagaagcagcagccccagaaagcagctgagcgagagcagcgacgacgactacgacgacgtggacatccccacccccgccgaggacacccccccccccctgccccccaagcccaagttcagaagccccagcgacgagggccccggcagcatgggcgacgacggccagctgagccccggcgtgctggtgagatgcgccagcggccccccccccaacagccccagacccggccccccccccagcaccagcagcccccacctgaccgcccacagcgagcccagcctgtggaacccccccagcagagagctggacaagccccccctgctgccccccaagaaggagaagatgaagagaaagggctgcgccctgctggtgaagctgttcaacggctgccccctgagaatccacagcaccgccgcctggacccaccccagcaccaaggaccagcacctgctgctgggcgccgaggagggcatcttcatcctgaacagaaacgaccaggaggccaccctggagatggagagaccccccacctgcatcctgatcgccagcctggcctgctggaacggcaagagacccgagcaggagacccccagcctgaccctggcccccaccgcctactggcagggcaccagcagccagtag

SEQ ID NO: 33920 - protein, 715 aa, Artificial Sequence
  derived and/or modified sequence
MAGVGPGGYAAEFVPPPECPVFEPSWEEFTDPLSFIGRIRPLAEKTGICKIRPPKEYALSGWNLNNMPVLEQSVLAHINVDISGMKVPWLYVGMCFSSFCWHIEDHWSYSINYLHWGEPKTWYGVPSHAAEQLEEVMRELAPELFESQPDLLHQLVTIMNPNVLMEHGVPVYRTNQCAGEFVVTFPRAYHSGFNQGYNFAEAVNFCTADWLPIGRQCVNHYRRLRRHCVFSHEELIFKMAADPECLDVGLAAMVCKELTLMTEEETRLRESVVQMGVLMSEEEVFELVPDDERQCSACRTTCFLSALTCSCNPERLVCLYHPTDLCPCPMQKKCLRYRYPLEDLPSLLYGVKVRAQSYDTWVSRVTEALSANFNHKKDLIELRVMLEDAEDRKYPENDLFRKLRDAVKEAETCASVAQLLLSKKQKHRQSPDSGRTRTKLTVEELKAFVQQLFSLPCVISQARQVKNLLDDVEEFHERAQEAMMDETPDSSKLQMLIDMGSSLYVELPELPRLKQELQQARWLDEVRLTLSDPQQVTLDVMKKLIDSGVGLAPHHAVEKAMAELQELLTVSERWEEKAKVCLQARPRHSVASLESIVNEAKNIPAFLPNVLSLKEALQKAREWTAKVEAIQSGSNYAYLEQLESLSAKGRPIPVRLEALPQVESQVAAARAWRERTGRTFLKKNSSHTLLQVLSPRTDIGVYGSGKNRRKKVKEL

SEQ ID NO: 33921 - protein, 1636 aa, Artificial Sequence
  derived and/or modified sequence
MAGVGPGGYAAEFVPPPECPVFEPSWEEFTDPLSFIGRIRPLAEKTGICKIRPPKDWQPPFACEVKSFRFTPRVQRLNELEAMTRVRLDFLDQLAKFWELQGSTLKIPVVERKILDLYALSKIVASKGGFEMVTKEKKWSKVGSRLGYLPGKGTGSLLKSHYERILYPYELFQSGVSLMGVQMPNLDLKEKVEPEVLSTDTQTSPEPGTRMNILPKRTRRVKTQSESGDVSRNTELKKLQIFGAGPKVVGLAMGTKDKEDEVTRRRKVTNRSDAFNMQMRQRKGTLSVNFVDLYVCMFCGRGNNEDKLLLCDGCDDSYHTFCLIPPLPDVPKGDWRCPKCVAEECSKPREAFGFEQAVREYTLQSFGEMADNFKSDYFNMPVHMVPTELVEKEFWRLVSSIEEDVIVEYGADISSKDFGSGFPVKDGRRKILPEEEEYALSGWNLNNMPVLEQSVLAHINVDISGMKVPWLYVGMCFSSFCWHIEDHWSYSINYLHWGEPKTWYGVPSHAAEQLEEVMRELAPELFESQPDLLHQLVTIMNPNVLMEHGVPVYRTNQCAGEFVVTFPRAYHSGFNQGYNFAEAVNFCTADWLPIGRQCVNHYRRLRRHCVFSHEELIFKMAADPECLDVGLAAMVCKELTLMTEEETRLRESVVQMGVLMSEEEVFELVPDDERQCSACRTTCFLSALTCSCNPERLVCLYHPTDLCPCPMQKKCLRYRYPLEDLPSLLYGVKVRAQSYDTWVSRVTEALSANFNHKKDLIELRVMLEDAEDRKYPENDLFRKLRDAVKEAETCASVAQLLLSKKQKHRQSPDSGRTRTKLTVEELKAFVQQLFSLPCVISQARQVKNLLDDVEEFHERAQEAMMDETPDSSKLQMLIDMGSSLYVELPELPRLKQELQQARWLDEVRLTLSDPQQVTLDVMKKLIDSGVGLAPHHAVEKAMAELQELLTVSERWEEKAKVCLQARPRHSVASLESIVNEAKNIPAFLPNVLSLKEALQKAREWTAKVEAIQSGSNYAYLEQLESLSAKGRPIPVRLEALPQVESQVAAARAWRERTGRTFLKKNSSHTLLQVLSPRTDIGVYGSGKNRRKKVKELIEKEKEKDLDLEPLSDLEEGLEETRDTAMVVAVFKEREQKEIEAMHSLRAANLAKMTMVDRIEEVKFCICRKTASGFMLQCELCKDWFHNSCVPLPKSSSQKKGSSWQAKEVKFLCPLCMRSRRPRLETILSLLVSLQKLPVRLPEGEALQCLTERAMSWQDRARQALATDELSSALAKLSVLSQRMVEQAAREKTEKIISAELQKAAANPDLQGHLPSFQQSAFNRVVSSVSSSPRQTMDYDDEETDSDEDIRETYGYDMKDTASVKSSSSLEPNLFCDEEIPIKSEEVVTHMWTAPSFCAEHAYSSASKSCSQGSSTPRKQPRKSPLVPRSLEPPVLELSPGAKAQLEELMMVGDLLEVSLDETQHIWRILQATHPPSEDRFLHIMEDDSMEEKPLKVKGKDSSEKKRKRKLEKVEQLFGEGKQKSKELKKMDKPRKKKLKLGADKSKELNKLAKKLAKEEERKKKKEKAAAAKVELVKESTEKKREKKVLDIPSKYDWSGAEESDDENAVCAAQNCQRPCKDKGVVFVTEEEKNKKY

SEQ ID NO: 33922 - protein, 1049 aa, Artificial Sequence
  derived and/or modified sequence
MAGVGPGGYAAEFVPPPECPVFEPSWEEFTDPLSFIGRIRPLAEKTGICKIRPPKDWQPPFACEVKSFRFTPRVQRLNELEIVASKGGFEMVTKEKKWSKVGSRLGYLPGKGTGSLLKSHYERILYPYELFQSGVSLMGVQMPNLDLKEKVEPEVLSTDTQTSPEPGTRMNILPKRTRRVKTQSESGDVSRNTELKKLQIFGAGPKVVGLAMGTKDKEDEVTRRRKVTNRSDAFNMQMRQRKGTLSVNFVDLYVCMFCGRGNNEDKLLLCDGCDDSYHTFCLIPPLPDVPKGDWRCPKCVAEECSKPREAFGFEQAVREYTLQSFGEMADNFKSDYFNMPVHMVPTELVEKEFWRLVSSIEEDVIVEYGADISSKDFGSGFPVKDGRRKILPEEEEYALSGWNLNNMPVLEQSVLAHINVDISGMKVPWLYVGMCFSSFCWHIEDHWSYSINYLHWGEPKTWYGVPSHAAEQLEEVMRELAPELFESQPDLLHQLVTIMNPNVLMEHGVPVYRTNQCAGEFVVTFPRAYHSGFNQGYNFAEAVNFCTADWLPIGRQCVNHYRRLRRHCVFSHEELIFKMAADPECLDVGLAAMVCKELTLMTEEETRLRESVVQMGVLMSEEEVFELVPDDERQCSACRTTCFLSALTCSCNPERLVCLYHPTDLCPCPMQKKCLRYRYPLEDLPSLLYGVKVRAQSYDTWVSRVTEALSANFNHKKDLIELRVMLEDAEDRKYPENDLFRKLRDAVKEAETCASVAQLLLSKKQKHRQSPDSGRTRTKLTVEELKAFVQQLFSLPCVISQARQVKNLLDDVEEFHERAQEAMMDETPDSSKLQMLIDMGSSLYVELPELPRLKQELQQARWLDEVRLTLSDPQQVTLDVMKKLIDSGVGLAPHHAVEKAMAELQELLTVSERWEEKAKVCLQARPRHSVASLESIVNEAKNIPAFLPNVLSLKEALQKAREWTAKVEAIQSGSNYAYLEQLESLSAKGRPIPVRLEALPQVESQVAAARAWRERTGRTFLKKNSSHTLLQVLSPRTDIGVYGSGKNRR

SEQ ID NO: 33923 - protein, 1690 aa, Artificial Sequence
  derived and/or modified sequence
MAGVGPGGYAAEFVPPPECPVFEPSWEEFTDPLSFIGRIRPLAEKTGICKIRPPKDWQPPFACEVKSFRFTPRVQRLNELEAMTRVRLDFLDQLAKFWELQGSTLKIPVVERKILDLYALSKIVASKGGFEMVTKEKKWSKVGSRLGYLPGKGTGSLLKSHYERILYPYELFQSGVSLMGVQMPNLDLKEKVEPEVLSTDTQTSPEPGTRMNILPKRTRRVKTQSESGDVSRNTELKKLQIFGAGPKVVGLAMGTKDKEDEVTRRRKVTNRSDAFNMQMRQRKGTLSVNFVDLYVCMFCGRGNNEDKLLLCDGCDDSYHTFCLIPPLPDVPKGDWRCPKCVAEECSKPREAFGFEQAVREYTLQSFGEMADNFKSDYFNMPVHMVPTELVEKEFWRLVSSIEEDVIVEYGADISSKDFGSGFPVKDGRRKILPEEEEYALSGWNLNNMPVLEQSVLAHINVDISGMKVPWLYVGMCFSSFCWHIEDHWSYSINYLHWGEPKTWYGVPSHAAEQLEEVMRELAPELFESQPDLLHQLVTIMNPNVLMEHGVPVYRTNQCAGEFVVTFPRAYHSGFNQGYNFAEAVNFCTADWLPIGRQCVNHYRRLRRHCVFSHEELIFKMAADPECLDVGLAAMVCKELTLMTEEETRLRESVVQMGVLMSEEEVFELVPDDERQCSACRTTCFLSALTCSCNPERLVCLYHPTDLCPCPMQKKCLRYRYPLEDLPSLLYGVKVRAQSYDTWVSRVTEALSANFNHKKDLIELRVMLEDAEDRKYPENDLFRKLRDAVKEAETCASVAQLLLSKKQKHRQSPDSGRTRTKLTVEELKAFVQQLFSLPCVISQARQVKNLLDDVEEFHERAQEAMMDETPDSSKLQMLIDMGSSLYVELPELPRLKQELQQARWLDEVRLTLSDPQQVTLDVMKKLIDSGVGLAPHHAVEKAMAELQELLTVSERWEEKAKVCLQARPRHSVASLESIVNEAKNIPAFLPNVLSLKEALQKAREWTAKVEAIQSGSNYAYLEQLESLSAKGRPIPVRLEALPQVESQVAAARAWRERTGRTFLKKNSSHTLLQVLSPRTDIGVYGSGKNRRKKVKELIEKEKEKDLDLEPLSDLEEGLEETRDTAMVVAVFKEREQKEIEAMHSLRAANLAKMTMVDRIEEVKFCICRKTASGFMLQCELCKDWFHNSCVPLPKSSSQKKGSSWQAKEVKFLCPLCMRSRRPRLETILSLLVSLQKLPVRLPEGEALQCLTERAMSWQDRARQALATDELSSALAKLSVLSQRMVEQAAREKTEKIISAELQKAAANPDLQGHLPSFQQSAFNRVVSSVSSSPRQTMDYDDEETDSDEDIRETYGYDMKDTASVKSSSSLEPNLFCDEEIPIKSEEVVTHMWTAPSFCAEHAYSSASKSCSQGSSTPRKQPRKSPLVPRSLEPPVLELSPGAKAQLEELMMVGDLLEVSLDETQHIWRILQATHPPSEDRFLHIMEDDSMEEKPLKVKGKDSSEKKRKRKLEKVEQLFGEGKQKSKELKKMDKPRKKKLKLGADKSKELNKLAKKLAKEEERKKKKEKAAAAKVELVKESTEKKREKKVLDIPSKYDWSGAEESDDENAVCAAQNCQRPCKDKVDWVQCDGGCDEWFHQVCVGVSPEMAENEDYICINCAKKQGPVSPGPAPPPSFIMSYKLPMEDLKETS

SEQ ID NO: 33924 - DNA, 10932 bp, Artificial Sequence
  derived and/or modified sequence
gcagaactttggcgggcaaggagacaaacagccacactgtgctgccggggaagagaagaagaaggaaaggccagacacacaggcgtcgtgcagctgcggaaggattccgtttcctgcagggggcggagggatttgacagcacggtaacttccggaaaagtcctgaacctcagtggaaaagccttgcaagaaacaataacaaacgggaggaggaagcgattctggggtttctgtgttgaacggttcttgtccgcgaagatgcgcttcggcctctgtcaggggacttgaacgggcttagtgggcttcagccagcttttctccaccggttccccacggggacccccccccccccccggccgttgcaatggcgggcgtggggccggggggctacgcggcggagttcgtgccaccgccagagtgccccgtctttgagccgagttgggaggagttcacagatccgctcagctttatcggccgcatccggcctttggcggagaaaaccggcatctgcaaaattcggccgcccaaggactggcagcctccatttgcctgtgaagtaaaaagctttcgtttcactccaagagtccagcgcctgaatgaacttgaggcaatgaccagagtgagattggatttcttggatcaactagcaaaattttgggaacttcaaggatctactctgaagatccctgtggtagagagaaaaatcctggatctgtatgctttgagcaagattgttgccagcaaaggaggttttgaaatggtcaccaaagagaagaaatggtctaaagtgggtagtcgcttgggatatctgccaggaaaaggaactgggtctcttttgaagtcacattatgaaagaattctctacccatatgagcttttccagtctggtgtgagccttatgggtgtgcagatgcctaatttagatcttaaagaaaaagtggagcctgaggttctcagcactgatacccaaacttccccagagccaggcacaaggatgaacattctgccgaagagaacaagacgtgtgaagactcagtcagaatctggagatgtgagtagaaacacggaactgaagaaacttcagatttttggggctgggcccaaggttgtgggcttggcaatgggaacaaaagataaagaagatgaggtcacccgaagacgaaaagttaccaacaggtcagacgcatttaacatgcaaatgagacaacggaaaggcactctctctgttaactttgttgatctctatgtttgtatgttttgtggtcggggaaacaatgaagataaattgcttttgtgtgatggatgtgatgacagctatcatacattttgtctaattcctccactacctgatgtgcccaaaggagactggaggtgtcctaaatgtgtcgccgaggaatgtagcaaacctcgagaagcctttggatttgaacaagctgtacgagagtatacacttcagagctttggagagatggcagataattttaagtctgattattttaatatgccagtccatatggttcccacagaactagtagaaaaggaattttggcggctggtaagcagcattgaagaagatgttattgtggaatatggagcagatatctcctcaaaagactttggaagtggatttccggtgaaggatgggcggagaaagattctgccagaagaagaggaatatgcactttctggttggaatttgaataacatgcctgtcctggaacagtctgttcttgcacatattaatgtggacatctctggtatgaaagtgccgtggctctatgtgggaatgtgcttctcttctttttgctggcacattgaggatcactggagttattccatcaactacttgcactggggggagccaaagacatggtatggtgtgccatctcatgctgcagagcaactggaggaggtgatgagagagctggcccccgagttatttgaatcccagcctgatcttctgcatcagttagttaccatcatgaaccccaacgtgctaatggagcatggtgtgcctgtgtacaggaccaatcagtgtgctggcgagtttgttgtgacatttcctcgtgcctatcactctggatttaaccagggctacaactttgctgaagctgtgaacttctgtactgctgactggttgcccattggacgtcaatgtgtaaatcattaccgacgcctaaggcgccactgtgtcttttcacacgaggaactaattttcaagatggcagcagatccagaatgcttagatgtggggctggctgccatggtctgcaaagaattgactctcatgactgaagaagaaacacgattaagagagtctgttgtacagatgggtgtcctgatgtcagaagaagaagtgtttgaacttgttcctgatgatgagcggcagtgttcagcatgcagaaccacatgttttctctctgctctcacatgttcctgtaatcctgagcggcttgtatgtctctaccatccaactgatctgtgcccctgccccatgcagaagaaatgtcttagatatcgctacccattagaagacctcccttctctgctatatggtgtaaaagtcagggcacagtcctatgacacttgggtcagtcgtgttacagaagcattgtctgctaacttcaaccacaaaaaagatttgattgaattgcgagtaatgctggaagatgctgaggataggaaatacccagagaatgatctctttcgaaaactcagggatgctgtaaaagaagctgagacctgtgcttctgtggctcagctgcttctgagcaaaaagcagaaacacagacagagcccagatagtgggaggactcggaccaaactgacagtggaagaattgaaggcctttgtccaacaactttttagtcttccgtgtgtcatcagccaagctcggcaagtaaagaatctgctagatgatgtggaagagtttcatgaacgtgctcaggaggccatgatggatgaaaccccagattcttccaaactccagatgttgatagatatgggctctagtctctatgtggaactccctgaattaccacgactgaagcaagagctacaacaggctcggtggttggacgaagtaagactgaccttatcagatccgcaacaagtcactttggatgtcatgaagaagctgatagactctggggtagggttggcaccccaccatgctgtggagaaagcaatggctgaactacaggagctccttacagtctctgaacgatgggaagaaaaggctaaggtctgcctacaggcaagaccgaggcacagtgtggcaagtttagaaagcattgtgaatgaagccaagaacattccagcctttctacccaatgtgttgtccttgaaagaagccttacaaaaggctcgagaatggaccgctaaagtggaagctattcagagtggcagcaattacgcttatttggagcagcttgagagcttgtctgcgaaaggacgccctattcctgtgcgtcttgaagcactgccgcaagtggaatcacaggtagcagcagcacgggcatggagagaacggactgggcggacgtttcttaagaagaattctagccatacattgttacaggtgctgagcccccggaccgacattggtgtatatgggagtggcaaaaataggaggaaaaaagtaaaagaactaatagaaaaagaaaaagaaaaggatctggacctggagcctctgagtgatctggaggaaggattggaggaaaccagagatacagccatggtggtggcagttttcaaagaacgggagcaaaaagagattgaagccatgcattctctcagagcagccaacctagccaagatgacaatggtggaccgcatagaagaagtaaaattttgcatttgccgcaagacagccagtgggtttatgctacagtgtgagctctgcaaagactggttccataacagctgtgttcctcttcctaaatcaagttcccaaaaaaaaggatccagctggcaagctaaagaagtaaaattcctttgccctctttgtatgcggtctcgaaggcccaggctagagactattctgtcactcctggtatcccttcagaagttgcccgtacggttgcctgaaggagaggccctgcagtgtttgacagaacgtgctatgagttggcaagatagagcgcggcaggctctagccacagatgaactatcctctgccctggccaaactatctgtgttgagccagcgtatggtggaacaggcggctcgagaaaaaactgaaaagatcatcagtgcagaactccaaaaagcagctgccaatccagacttacagggacacttacctagtttccagcagtctgcttttaaccgggtggtgagcagtgtgtcatcttctcctcgacaaacaatggactatgatgatgaagaaacagactctgatgaagacattcgagagacatatggctacgacatgaaggacacagccagtgtgaagtcctctagtagtcttgaacccaatcttttttgtgatgaagagattcccatcaaatccgaggaggtggtgacccacatgtggacagcaccttcattttgtgcagagcatgcttattcttctgcttctaagagttgttctcaagtattttttgggaaaggttctagcaccccaaggaaacaacctcggaagagccctttggtgccccgaagtttggaacctccagtgctggagttgtcacctggagctaaggcacaactggaagaacttatgatggttggagatctcctggaagtatctctggacgagactcaacacatatggcggattttgcaggccacacacccaccctctgaagacagattcttgcatatcatggaggatgacagcatggaagagaaaccactaaaagtgaaaggaaaggactcttcagagaagaaacggaaacggaagctagaaaaggtagagcaactttttggagaaggaaaacagaagtccaaggagttaaagaaaatggacaaacctagaaagaagaaattaaaattaggtgcagacaaatcaaaggagctgaataaactggccaagaaactagcaaaagaagaagagagaaagaaaaagaaggagaaggctgctgcagccaaagttgaacttgtgaaagagagcactgaaaagaaaagagagaaaaaggtgctggacatcccctcaaagtatgactggtcaggagcagaggagtctgatgatgagaatgctgtgtgcgcagcacagaactgccaaaggccctgcaaggacaagggagttgtatttgtaacggaagaagagaagaataaaaaatattagttttaaaagtggcctatgtgactgcttttctaaaaaggtagactgggtacaatgtgatggtggctgtgatgagtggtttcatcaagtttgtgtgggtgtatctccagaaatggctgaaaatgaagattacatctgtataaactgtgcaaagaagcaggggccagttagcccaggtccagcaccacctccttccttcataatgagctacaaactaccaatggaggatcttaaagagaccagttagcagatgcttggttagtttgggacatggggggacatggaccacattgagaccttagtcatcaagtagagtggtttatatccacttggaatgttgcttccaaagatgaatggccttcagagaaagtccccttagtgctggcttcctctttgcatggactctgtgggttacattctctatcaacatatctatgcagagggtgtcttctttggtacaacagccaatatttcatgtctcctttgagtgtggtttactgcattaaggccagatgcttaattgagctctagggtggctggttagtattaatacattggtgtgctaacagggcatataggatgtggcttttgtccagctgatagtagttagaggcttacaacttaggagcagcaccaactgaaggtgctaattgcttggatctccttcattgggatagttggagagggattggagtaccactttccttccactgttacctggtacttaatgccctaaagatacaactaggagtaacagggccaaagttatttctgttagacgtcaaggaatggtatcacagtctattgacctcagcgatttgtgcttgtttgtgctagaagaacatcccaaataggagaacctctcacaagctggggcaggtcaccttatctttgtaagatgaggatatcatctagatcagaaatctgactagattggattctgaggagaagaacctactacaaggcaaggagccgttttttggctttgaaaagtcttgctgtcttgggtctacattttagggaagagcaggtacatggatccaggcttctgccaaaaaaaaaaagagaagaagatgacgatgatgaccagtcgtactatcttactgagccacagtgatgcatgcttttcggggaaaacttcattcacaagtattccagacaccaggcttcaggcatggccatgagcaagaccagcaaataacagctttttgccttgcagccctgaccccaatgtctgctgtttccaacactggtgatttctaactacggcccacagcagatgctgttgaataacaccatggcttcatcagaggatgtggggttgtagtacctctgggtgatgaagttgttttagtaaatccatttttaaaaaaaaaaaaggacttgtttttacttttttctaaatgtctctgactactgactgttctatacatagattatttttccttttttaatatacatatatgaatatataaatatatatatttactgttaccagcagcatatgacagagtttcaacatcaaaaatccatttgggggcttgctttttcttttttgctttaaaaaaaaaaatcccattccttctttgtagtacaaggagttagcactccctcctccatcccagcctgaccagatcttccattttgcttttgttcatatagataattatatgtcctttgtgtgttgggacttgtccctgtctgttgggaaacttggtctcactctagtctgtgctggctcttttttcttttgtgtgtgaatgtttgaaactatggtgctgtgtcctcttccctcctgttgtgttctctgttcttcttaaggtattaggtaagctgtatgtaaactcttattagaaggggactaatttttttttaaaggacaaaaaaaaaaatgactaaaaatagtgttttgtcatcactgtctggtgtctttattttggtttaaaaaaatctgtggtttgacttaaattcatcagttttccttttaaaggggggattggggtggacctagcaacagcttatagtttcctcttccctttttgccccagtctcttttaaagaactgtcttctagtaactagaagtgaaatgtactgtccagttacagtttgagtgggtatgagatttaactcaaaaggaatcttacaaaaaaaaagatgttttcttataaaatccaatttctgtaaatgttttctctgaagttcatactacctactttttattcattcttaatactgtataacattttgagtgttttgacttgttcagaggtttgttagtgttgctgtgcatatgtcttgaggtctcatctgaagtaagtttgtgtatgatcgaagatttcaatggatattgcaaggtaactaattaactgatttcataagttttcgttttgccaagctaacgattatcaattaagaatttcctctggttgatgttatacaagaaagcacaatattttttgcctgttgatcttctttgtaacagtcttcagatatttgtgggttaaaaattgaatgtaattttaagtgacagatgcctggaatacatttaaaatttttatttttccttcctaatcatccattaactattccactatcagtggagagtcatgaggatgctgagaaagtatgaatagcttcctgtcaccttctgacgttttgaaacttaaatatgtcttttcgttgatactgtgggattttctgtatttacttgacagtcatggaggatttggtatgacttgaccacaggtttagaccaaggctgagaagaacagaagggagaaattaatggcaaaacaaaaaatacacaaatctgcggttttggaattaatgaaacaagattcatctatttaaagaaatgttggtgttctaatacaaagcattattttcacttagagaaaattacttacttgctcccttctgtattgtaatattttgtattaagacatgatttaaaatgtctttctacccttatctcctctaaactgcaactgaagttgcaattcttcatcattagtattttaactctggcaaaggttatagaaagaaaaatggaaatatggtaggcctgtggtattcttaaaagctaagtcattagaactatgcagatccccaagtttaaaagtacaaatacagcaccagtagttagctttctagctgggggagaagacaggagatttttcttccacagatgtttattttgcttcctgataggtactgcagcaaagccatgttgatgtgtagatgcatgacttcctcactaagctgctgcacaccagctttgcctgcatgattcaaatttgtgcctcagtaaaattataaattattgcatgtcataccttgaataatggaaacggcaaacattaaacctgtgattacccataatgtactttaataataaaaaacatggcagccaggtgcagtagagtgcacctgtggtcaggaggctgaagtgggaagattgcttcaacctgtgagtttgagtcccgcctggtcaacagcgagaccccatgtgtctgtctgtctctctctttttttaaaggacagaggctaagctgtaaggttagcatggttctgcctgggctttgcttctgtgcttctgtgcaggctgagctgtaaggttagcatggttctgcctgggctttgcttctgcgcttctgtgcaggctgagctgtaaggttagcatggttctgcctgggctttgcttctgcgcttctgtgcaggctgagctgtaaggttagcatggttctgcctgggctttgcttctgcgcttctgtgctagcaggtgcccacaaaatgtctttttgaatttcttaatttttgggttctggatgcaattcgtgcacgccaagaaactacttgcttgtcagtattttaattctgtagtacatgtgtgtgaatatcagccagtacttacagtaggaggatgaacagaaaaactgagaagacctgtctttcaaaagatgggtttatccactttttaagggaaaaagtgacagtttggcatgggatttgaaaagtggaaattgtggaaaaattgagctgttgaagtcccacatataaccagatttaataaagcttcacatgtgaattagctccatatgtgtgtagaaggttgcttttatagcaggtccttaagtactccttttgaaattcctcctttttttttaagtcataccattacttctttggatatgaatgtcccaagtggtatctcctactgtagtatgaggaagaatggctgttaatgtattttttgaattttggtcttgtcttggcctggatcatatccagtcaccactatgcaacaaatgatgtgcactgggcaaggatatgatgggttatgaaagctgtatcttgtttgttttttcttttgcagtactccaagtggtctaaacaggaatgtcttgtaaaacctcaagactccctattgattattcccttacatatttatttacaatttatcagggtaattggtggtgccttatgaaaagtataactcgatttcttgatctttgagcatgttttgtgtttcttgtgttttctaaaagaatattagatatggttaattgcattacatctaaaagatttaaaaaattgtgtgtatgctcaggttccccacacccatacccaccctaacccctgtcatttacattggtggcaactttaaatggtaaccaagcaaaagtacattttgataatgagtattgataatcctgaggaaaactagtgagtatatgggagccacctttgacctgtgccaaagcagtttctaatttcatttgctaactataaaataaagaactgagccaaaataatttgatcagtggtgtgattagcctattatcattgctgagaatagtgtttttggagtgtgaagtgattcctgaagatttcacctgccttctgtttccagcaagaatccagtgatgaccaacacatttcctcacttttggttcttgagaagtttatccctttgcaacaaaccattaatagggaaaacaaggaaatgctttccctttctctttggcttcttaaagctcacaaccaattcagaccccaagttacttcagagaagcaaatggcaccttttccccattgccaaggatcccagcttatgcagatatgaaggacggatcatttctgaaaatgttaagactctgcttgcagtggacttggcctcagtttcatgaaatgtgtaactctgtatgtgtatgttaggaggagggttggttgaaagagcgggggcagggaggggaatctgattacctcttgggaaataattttcttgccaacaaaaagatacacttgaagtttcttaaggtggcaagtccattaaaaaaaaaaattgtgttggaccctcccagtttagatcaagtatttcttgggggtcttgctattgtggttgataccaataaatggaagatccagaatattttcatttaaagctcaaccattaattggaacatggtgaaacattgtacacattgtaaaagtagggaacagtacaaaagaatggaatcaaatactatattatgtgaataaactagagtgattttggaatttcactctcttcaccccttctcacttgtatgttctgtaaagtgtatttctactttggtaggaagaaagacttgatttaatatttc

SEQ ID NO: 33925 - DNA, 2148 bp, Artificial Sequence
  derived and/or modified sequence
atggcaggggttggacccggaggctacgcagctgagtttgttccacctcctgaatgtcctgtctttgagccctcttgggaagagtttacagaccctctttcttttataggtcggatacgccctcttgctgagaaaaccggaatttgcaaaattcgcccccctaaagaatatgcactatccggttggaatttgaataatatgccagtgctagagcagagcgtacttgcccatatcaacgtcgacatttccggtatgaaagtgccttggctgtatgtgggtatgtgtttctcctcattctgttggcatattgaggatcactggagctactccataaattatctgcattggggggaacctaagacgtggtatggagtcccctcccacgccgcagagcagctggaagaggtgatgagggaattagcccctgagctgttcgaatcgcagcccgatctccttcaccaactggtgaccatcatgaaccccaacgtgctgatggagcacggcgtgccagtgtataggaccaaccagtgcgctggcgaattcgttgtgacctttcctcgcgcttaccactctgggttcaaccagggatacaattttgctgaggccgttaacttctgtaccgctgactggttacctattgggcgccagtgtgtgaatcattaccgtaggctccgaagacactgcgtcttttcccacgaagaactcatctttaaaatggccgcagaccctgaatgtctggacgttggtctcgccgcgatggtttgcaaggagctgaccctgatgacagaggaagagacccggctgagagagtctgtggttcaaatgggagtcctgatgagcgaggaagaggtgttcgagctagtgcccgacgacgagcgccaatgtagcgcatgtcgaacaacgtgcttcctctcagccttaacctgtagttgcaacccagagaggctagtctgcctttatcacccaaccgatctttgtccttgtcccatgcaaaaaaaatgtctccggtatcggtatcctttggaggacctaccatctttgttgtacggagttaaagtcagggcccaaagctacgatacatgggtgtctcgcgtgaccgaggcactctccgcaaattttaatcacaagaaggacctgattgagctacgggttatgctggaagacgctgaagatcgtaaatatccagagaatgacctattccgaaagcttcgtgatgccgtgaaggaggctgagacctgcgcgtcggttgcacagctgttactctctaaaaagcagaaacacaggcagtcacctgactcaggtaggactaggactaagctgaccgtggaggagctaaaggccttcgtccaacagcttttctcactaccatgcgtaataagccaagcgcgccaggtcaaaaacttgctcgacgacgtggaggagtttcatgagcgagcccaggaagccatgatggatgagacgcccgactccagtaagttacagatgctcatagatatgggatcctccttatacgttgaacttccagaactcccaaggctcaagcaggaattgcagcaggcacgctggttggacgaagtgcggctgacactctctgatccacagcaagttaccctggatgtgatgaaaaaacttatcgatagtggagttggactcgcaccgcatcatgccgtcgaaaaagctatggccgaactgcaggaactgcttacagtctctgagcgatgggaggagaaggccaaagtttgccttcaggctcggccccggcacagcgtagcgagcctggaatccattgtcaacgaggcaaagaacatccctgcctttttgccgaacgtgctcagcctgaaagaggccctccagaaggccagagaatggacagctaaagtcgaagctattcaatcgggctccaattacgcttacctagagcagcttgagtccctatccgctaaaggccggcctatccccgtgaggcttgaagccctaccccaggtggaaagtcaggttgctgctgcgcgagcctggagagaaaggactgggagaacatttctcaagaagaattcctcccacacactgctccaagtgctaagtcccagaacagatataggagtgtacgggagcggcaagaacaggcgcaaaaaagtgaaggagctgtag

SEQ ID NO: 33926 - DNA, 4911 bp, Artificial Sequence
  derived and/or modified sequence
atggccggcgtggggccaggggggtacgcagctgagttcgtgccaccaccagaatgcccagtgttcgagccttcttgggaagaattcacagaccctctgagcttcataggcagaatccgtcctctggccgaaaaaacgggaatctgtaagatacgaccacccaaggattggcagccacctttcgcatgcgaggtgaaatccttccggttcacaccaagagtccagcggctcaatgagctggaggccatgacacgggtgcgcttggactttctggaccagcttgccaagttttgggagcttcaggggtccacgctgaaaattccagtggtggagcggaagattcttgatctgtatgccttatctaaaatcgtagctagcaagggaggctttgagatggtgacaaaggagaaaaagtggtcgaaggtcggctctcgcctgggatatctgccaggaaaagggactggatcgctgctgaagtcccactatgagagaatcctgtacccatatgagctctttcaaagtggtgtgagtctgatgggggtccaaatgcccaacctggacctgaaggagaaggtggaacctgaagtcctttcaactgatactcaaaccagcccagaacctgggacacgaatgaatatccttccaaagaggactagaagagttaagacccaatccgagtcaggagacgtctctcgtaacaccgagctcaagaagctccaaatctttggcgccggcccgaaggtggtgggactagctatgggcaccaaagataaagaggatgaggtaacccgacgacgcaaggtaaccaatcgatccgacgcattcaacatgcagatgcggcaacggaaaggaacccttagtgtaaactttgttgatctgtacgtatgtatgttctgtggccgtgggaataacgaggataaattacttttgtgcgacggatgcgacgattcctaccacacattctgtctcattccaccactacctgatgttccaaaaggcgactggcgatgccctaagtgcgtcgctgaagaatgtagcaagccacgtgaggccttcggtttcgaacaggccgttcgggagtataccctacagtcctttggggagatggcagacaacttcaagagcgactacttcaacatgcccgttcacatggtgcccacggagttagttgaaaaagaattttggcgcctcgtgtcatctatcgaggaggatgtgattgtggagtatggggccgacatttcatccaaagatttcgggagcggcttccctgtcaaggatggccggcgaaagatccttccagaagaagaggagtacgctctgtctgggtggaatctgaacaatatgcctgtgctggagcagagtgtgcttgctcacattaacgtggatatcagcggcatgaaggtgccttggctgtatgttggcatgtgcttttcgtccttttgttggcatatcgaggaccactggagctatagcattaactatctccactggggcgaacccaaaacttggtatggggtcccgagccacgcggcagagcagctcgaagaggtgatgagggaactcgcacctgagttatttgaatcccagcccgatctgctccaccagctggtgacaatcatgaaccctaatgtcttaatggagcatggcgttccagtttataggaccaaccagtgcgccggggaattcgttgtcacgtttccaagagcataccactcaggctttaatcaaggctacaattttgccgaagctgtcaacttctgcactgcagactggctgccaattgggcgtcagtgtgttaatcactatagaaggttaaggagacattgtgtcttctcccacgaggagctgatttttaagatggctgcagacccagagtgcctggatgtggggctggctgccatggtgtgcaaggaattaacattaatgaccgaggaagagacacgattgcgagaaagcgtcgtgcaaatgggcgtgctgatgtccgaagaggaggttttcgaacttgtgccggacgatgagcgtcaatgctctgcttgcaggacgacttgttttttgagtgcgctgacgtgtagctgcaaccctgaacgtctggtttgtttatatcatcccacagatctgtgcccatgcccaatgcagaaaaagtgtctccgctaccgctacccccttgaggatctgccatccctcttgtatggggtgaaggtcagggcccagtcttacgatacgtgggtcagccgggtgaccgaagccctgtctgccaacttcaatcataaaaaggacctcatcgaactccgcgtgatgttggaagatgctgaagaccgcaaataccctgagaacgacttatttcgaaaactcagagacgccgtgaaagaagctgagacctgtgcttcagtcgcacagttgttgctgtctaagaaacagaagcacaggcagagccctgatagcggccgaacgcgtacaaagttgacagtcgaggaactcaaggcattcgtgcaacagctgttcagtctcccttgtgttatctcgcaggctaggcaggttaagaatctccttgacgacgtggaggaattccatgaaagggctcaggaagctatgatggacgagacacctgactcatcaaagctccagatgctgattgacatgggaagttctctctacgtagagctgccggagctaccccgactgaagcaggaactgcagcaggctaggtggttagatgaagttaggcttactctttctgatccacagcaggtaacgcttgatgtgatgaaaaagctaatcgactctggtgtgggactggccccacaccacgcagtagagaaagcgatggccgagcttcaagagttacttactgtgagcgaacgatgggaagaaaaggctaaagtttgtctccaggcaagacctagacacagtgtggcttcgcttgagtccatagtcaacgaggccaagaacattcccgccttcttgccgaatgttctgagcctgaaggaagcgctacagaaagcccgtgagtggactgcaaaggtggaagctatccagtccggtagcaattacgcatatcttgagcagctcgagagcctctccgccaaaggaagaccaataccagtgcggctcgaggctttgcctcaggttgagagccaggtagcagctgcccgagcatggagagagaggaccggccggaccttccttaaaaaaaactcttctcacaccctactgcaagtgctgtccccccgcactgacatcggcgtctacggcagcggcaagaaccgaaggaagaaggtaaaggaactaatcgaaaaagaaaaggagaaagatttggatctggagccgttgtctgacctggaggagggtctcgaggaaaccagagatacagccatggtcgtcgccgtgtttaaagagcgcgagcagaaagagatcgaggcaatgcactccttacgggctgccaacttagcaaaaatgactatggtggacaggatagaggaggtgaagttttgtatctgcaggaagactgcgagcggtttcatgttacagtgcgagctgtgtaaagactggtttcacaacagttgtgtgcctctgccaaagagtagctcccagaagaagggctcctcttggcaggcaaaggaagtgaagtttctttgtcccctctgtatgcgctctcggcgacccagactggagacgattttgagcctgctcgtctccttgcagaagttgcccgttagactgccggagggcgaagcattgcagtgtctaacagaaagggccatgtcgtggcaagatcgcgccagacaagcacttgcgacggacgagctaagctcagctttggcgaaattatccgtactcagtcagaggatggtcgagcaggccgcaagagaaaagacagaaaagattatcagtgctgagttgcaaaaagcagcggcaaatcctgatctgcaaggacacctgcctagcttccaacagagcgccttcaaccgtgtcgtgagctcagtctcatcctccccgcggcagactatggattatgacgatgaagagacagattctgacgaggatatcagagagacatatggatatgacatgaaggacacagctagtgtgaagtcatcatctagtctggagccaaacctattttgcgacgaagagattccaatcaagtccgaggaggtggttactcacatgtggaccgctccgtcattttgtgcagagcacgcttactcctcagctagtaaatcatgtagtcagggttcgtcaaccccacggaagcagcccaggaagagtccactcgtcccaagaagccttgagccccccgtgctggagctcagtcccggagctaaagcccaacttgaggaactgatgatggtgggagacttactggaggtgagtctcgatgagacgcagcacatctggcgcatcctccaggcaacccaccctccctccgaggaccggttcctccatataatggaagatgatagcatggaagaaaagccactgaaagtcaagggcaaggatagctctgagaagaagaggaagcggaagcttgagaaggtggagcagttattcggagaaggcaagcagaagtctaaagaactgaagaagatggacaagccaaggaaaaagaagctgaagctaggcgccgacaaaagcaaggaactgaacaagctggccaaaaagctggccaaagaagaggagcgcaagaaaaaaaaggaaaaggccgccgctgccaaggttgagctggtcaaagagtccactgaaaaaaagcgggagaaaaaggtgttggatattccctctaagtacgactggagcggggcggaggaatctgacgacgagaatgctgtctgcgctgcccagaactgccaacggccctgtaaggacaaaggcgtcgtcttcgtaacagaggaggaaaagaacaaaaagtattag

SEQ ID NO: 33927 - DNA, 3150 bp, Artificial Sequence
  derived and/or modified sequence
atggcaggcgtgggtccgggaggctatgccgctgagttcgtgccccccccagaatgtccggtgttcgagcctagttgggaggagtttaccgatccactctcctttatcggtcggatacgccctctagcagagaagacaggcatctgcaagattaggccacctaaagactggcaaccacctttcgcgtgtgaggtgaagagttttcgcttcacccctagagtccaaagactaaacgaattggagatcgtggcatctaagggcggttttgaaatggtgacgaaagaaaaaaagtggtccaaagtcggttctcgactaggctacttgccaggtaaagggactggatccctcctgaaaagccactatgagaggatcctctacccctacgagctgttccaaagcggcgtttctctaatgggtgtccaaatgcccaatcttgaccttaaggaaaaagttgaacccgaggtcttatccacagacacccagacttcaccagagcccggaacacggatgaacatcctccccaaaagaactcgccgagtcaaaactcagtccgaatcgggagacgtatccagaaacaccgagcttaaaaaacttcaaattttcggggcaggaccaaaagtagtgggtttggcgatgggaacaaaagataaagaggacgaggttacacgaagaagaaaagtcacaaaccgatctgatgcatttaatatgcagatgcgccagcggaaaggcacactgagcgtcaacttcgttgatctctacgtgtgcatgttttgcggacgcggtaacaatgaggacaaattactcctctgcgacggatgcgatgacagttaccatactttttgcctgatccctccacttccagatgtgccaaaaggggattggaggtgtcccaaatgcgtggccgaagagtgcagcaaacctcgggaagctttcggctttgaacaagcggtgagagagtatacgctgcagtccttcggagaaatggcagataattttaaatcagactacttcaatatgcccgtgcacatggtgcccacagagctagtggaaaaggagttttggagactggtgtcctcaatcgaggaagacgtcatagttgaatacggggctgatatcagctcaaaagatttcggatccggcttccccgttaaggatggccgacggaagatcctacctgaagaagaagaatatgccctctccggctggaacttgaacaatatgccagtgctggaacagtccgttctcgcgcatatcaacgtggacatttccggcatgaaggtcccttggctctacgttggaatgtgcttttcgagtttctgctggcatatcgaagatcactggtcatactcaattaattacctgcactggggggagcccaagacatggtacggagtgcccagtcacgctgccgaacaacttgaagaggtaatgcgagaactggcccctgagttattcgagtctcagccagatctactccatcagctagttactatcatgaatccgaatgtcctcatggagcacggagtgcccgtgtaccggaccaatcaatgcgctggggaatttgtcgtaacatttcctagagcctatcactcgggttttaatcagggctacaattttgcagaggcggtcaacttctgtaccgctgactggctgcctatcggccggcagtgcgttaatcactaccggcggctgcgcagacactgtgtctttagccatgaggaacttatatttaagatggctgccgatccagagtgcttggacgtaggactggctgccatggtctgcaaagagcttaccctcatgacagaagaggagacccgcctaagggagagcgtggtccagatgggcgttcttatgtctgaagaggaagtttttgagctggtgcccgatgacgaacggcaatgcagcgcatgtcggacgacttgctttttaagcgcccttacatgcagctgcaatcctgagaggctggtgtgcctgtaccacccgactgatctatgcccttgcccgatgcagaaaaaatgtcttaggtaccgttatccgttagaagacctgccgagtctgctctacggcgtaaaagtcagggctcagtcttatgatacctgggtgagccgagtaacggaagctctatcagctaatttcaaccataaaaaggacctgatcgagctgagagtgatgctggaagacgccgaagacaggaaataccccgaaaatgacctgttcagaaagctccgcgatgctgtgaaggaggcggagacctgtgccagcgtggcacagttgctcctgtctaagaagcagaagcatagacagagcccggatagtgggaggactcgtaccaagctgactgtagaggagcttaaggcctttgtccagcagctgttctcattgccctgtgtgatctcccaggcccgccaggtcaagaacctcctggatgatgtagaagagtttcatgagagggctcaagaggccatgatggatgaaacccctgattcgagtaaactgcagatgcttatcgacatggggtcatcactgtatgtagagctgccagaactgcccaggctcaagcaggaactacaacaggcccgatggctggatgaggtgcgcctgactctgtcggatccacaacaggtcacactggacgtgatgaagaagctcattgatagcggtgtggggctggccccacatcacgccgtggagaaggccatggcggaactccaagagctcctgaccgtctctgaacgctgggaagagaaggctaaggtgtgtttacaggccaggccgcgacatagcgttgcaagcctggaatcgatcgtcaatgaggccaaaaatatacctgcatttctcccaaacgttctgtctttgaaagaagcacttcagaaggctcgcgaatggacagcgaaggtggaagctatccagtccgggagtaattacgcctatctggaacaactcgaatccctttccgcaaaaggtcgacctattcctgtgagactggaagcgctgccacaggttgagagtcaggtcgctgcagctcgggcatggagagagcgtactggccgaacattcctcaagaaaaattcatctcacaccctgctgcaggttttgtccccaagaacagacattggcgtctacggatccggaaagaatagaaggtag

SEQ ID NO: 33928 - DNA, 5073 bp, Artificial Sequence
  derived and/or modified sequence
atggctggagttgggccaggaggatacgcggcagagtttgttcctcctcccgagtgccccgtcttcgagccaagctgggaggagtttacggaccccctgtcgttcatcggcagaatacgtccactcgcagagaagacaggaatttgcaaaataagacctcctaaggactggcaacccccctttgcatgtgaagtcaagtcttttagattcactccacgtgtccagcggctaaatgagctagaggcaatgactcgggtgaggcttgattttctggaccaattggcaaagttttgggagctgcaggggagcaccctgaaaattcctgtggtggagcgcaagatattagatctttacgcattatccaaaattgttgcttccaaaggcggtttcgagatggtgacgaaggaaaaaaagtggagcaaagtgggttctcgtctcggctacctgcccgggaaaggcacggggtctcttctgaagagtcactacgaacgcattctgtatccctacgaactgtttcagagtggcgtcagtcttatgggcgtacagatgccgaatttggatctgaaagaaaaggtcgagcccgaggtcctctctactgatacccaaacgtcaccagaaccaggcaccagaatgaatatcctccccaaaagaacaaggcgcgttaaaactcagagtgagagtggagacgtttctaggaatacagagcttaaaaagttacagatttttggcgccggcccaaaggtggtgggtctagcaatgggaacaaaggataaggaggacgaggtgacccgccgcagaaaggtcacaaataggagtgatgcctttaatatgcagatgcgccagcgcaagggcaccttgagtgtgaatttcgtggatctctacgtgtgtatgttctgcggtagaggcaacaatgaggataaactgctgctctgtgatggatgcgatgattcataccacaccttctgtctcatacccccactgccagacgtacccaagggggactggagatgtccaaaatgtgttgcagaggaatgttctaaaccaagagaagcgttcgggttcgagcaggccgttagagaatacacgctgcagtcctttggggagatggcagacaacttcaagagcgattacttcaatatgccagtgcatatggtgcccacagaactggtggagaaggagttttggagacttgtcagtagtatcgaggaggacgttattgtcgaatacggggccgatatctcgtctaaggatttcggttccggctttcccgtgaaagacggccgacgtaagatccttccagaagaggaggagtacgcactctctggctggaacctcaataacatgcctgtcctagagcagtcagtcctcgcccatatcaatgtcgatattagtggcatgaaggtcccctggctatatgtgggaatgtgctttagctcattttgttggcatatcgaagaccattggtcctacagcataaactatctacactggggagagcctaaaacatggtacggtgtccctagtcatgccgccgaacagctggaagaagtgatgagagagctggcccccgagctattcgagagccagccagatttacttcatcagctggttaccattatgaatcccaatgtgctcatggagcacggagtgccagtgtacaggaccaatcagtgcgcaggcgagtttgtggtcaccttcccccgtgcataccacagcggttttaaccagggttataatttcgccgaagctgtaaacttctgcaccgccgattggctgcccattggtcgccagtgcgttaatcactatagacgactgcgacgtcattgtgtgttctcacacgaggaactgatatttaaaatggcagctgatccagaatgtctggacgtgggcctggcagccatggtgtgtaaggagctgaccctgatgacagaggaggagacacgcctccgcgaaagcgtcgtgcaaatgggggttctgatgagcgaggaagaggtgttcgagctggtgccagacgacgaacgacaatgttctgcatgtcgaaccacttgttttctgagtgccttaacttgcagctgcaatcctgagcggctagtctgtctgtaccatcccacagacctctgtccatgcccaatgcagaagaagtgcttacgatacaggtaccctctcgaggatttacccagcctgttgtacggggtgaaggtgcgcgctcagtcatacgatacatgggttagtagagtgactgaagcactgagcgctaatttcaatcacaagaaagatctcatagaactgcgggttatgctggaggacgccgaggatagaaagtacccggaaaacgacctctttagaaagctcagagacgcggtcaaagaagctgagacttgcgcgagcgttgctcaactactcttaagcaaaaagcagaagcataggcagtcaccggatagtggtagaaccagaaccaaactcactgtcgaagagcttaaagcctttgtgcaacagcttttcagtctgccctgtgttatttctcaagccagacaggtgaaaaaccttctcgatgatgtggaggaattccacgagagggcccaagaggcaatgatggacgagaccccggatagtagtaaattgcagatgctcatagacatgggctcatctctgtacgttgagttaccggaactcccaagactgaaacaggagctccagcaggctcggtggctggacgaagtgaggcttacccttagcgacccacaacaggtcacgctggacgtgatgaaaaaactcattgactccggagtgggtctggctccacatcatgcagtggaaaaagccatggctgagttgcaggagctgctcacagtcagcgagagatgggaggagaaggcaaaggtgtgcctgcaggcaagaccaagacactctgttgccagcctggaatctattgttaacgaagctaaaaacatccccgcatttttacctaatgtgctgtcgctaaaggaggcccttcagaaggcgagagaatggaccgccaaggtggaagccatacaatccgggagcaattatgcttacctggaacagctggagagcctgagcgcgaagggcagaccaatacccgttagactcgaggctctaccccaagtcgagagccaggtggctgccgccagggcgtggcgcgagaggacagggcggacttttctgaaaaaaaacagctcacacaccctccttcaagtgctgagccctaggaccgatattggcgtatatggatctgggaagaatagaaggaaaaaggtgaaggaattaatcgaaaaagagaaagagaaagacttggacctcgagcccctgagcgatcttgaagaggggctcgaggaaactagggacaccgccatggtcgtggccgtctttaaggagagggagcagaaagagatcgaggcgatgcattcgctgagggccgccaacttggccaagatgactatggtcgatagaattgaggaagtgaagttttgtatttgcagaaaaacagcctcaggttttatgctccagtgcgagctctgtaaagactggttccataattcctgcgtgccactgccgaagtcctccagccagaaaaagggctcttcttggcaggcaaaggaggtgaagttcctctgcccgctctgtatgcgctcaagacgcccaaggttggagacaattttgtccttactggtgagcttgcaaaagctgccagttaggcttccagaaggcgaggcactgcaatgcttaaccgagagggccatgtcctggcaggaccgggcccgccaggctttggccacagatgaactcagctcagctcttgccaagttgtccgtgctgtcccagcgaatggtcgaacaagccgcacgcgagaagactgaaaaaatcattagcgctgaactgcaaaaggccgccgcaaaccctgacctgcaaggccacctgccatcattccagcagagcgcatttaacagggtcgtgtcatccgtatccagcagcccgagacagacaatggattacgatgacgaggaaaccgacagcgacgaagatatcagagagacatacggctatgacatgaaagacactgcctcagttaaaagcagttccagtctggaacctaacctgttctgcgacgaagagatccccattaagtcagaagaagttgtgacacacatgtggactgccccttcgttctgtgccgaacatgcatatagttccgcctctaagtcctgcagccaaggaagtagtacaccccggaaacaacctaggaaaagccccttggtgccccgttctctagagcctccagtgttggaattgtctccaggcgcgaaggcccagcttgaagagttaatgatggtcggcgacctgttggaagtctcgctggatgaaacgcaacacatttggagaatccttcaggctacccatcctccttccgaggacaggttccttcacatcatggaggatgactccatggaagagaaaccactgaaagtgaaaggaaaggattcttccgaaaagaagcggaaaagaaaattggagaaagtcgagcaattatttggggaaggcaagcaaaaatctaaggaactgaagaaaatggataagccgaggaagaagaagttaaagctgggcgcggataagtcaaaagaactcaataagctggccaagaagcttgcaaaagaagaagagaggaagaaaaaaaaagaaaaggccgccgcagcgaaagttgagcttgtgaaggagtctacggaaaaaaagagagaaaaaaaagttcttgacatcccttctaagtatgactggtccggtgcagaggaaagcgatgatgaaaatgcagtgtgcgcggcacagaattgccagcgcccttgtaaggataaagtggactgggtacagtgcgacggcggatgtgacgaatggttccatcaggtgtgcgtgggagtgtctcctgaaatggccgaaaatgaggactacatatgtattaactgtgcgaagaaacaaggcccagtgagcccaggaccagccccaccccccagctttatcatgagttacaaattgccgatggaagatctcaaggaaactagctag

SEQ ID NO: 33929 - DNA, 2148 bp, Artificial Sequence
  derived and/or modified sequence
atggccggcgtgggccctgggggctacgccgctgagtttgtgcccccacctgagtgccctgtgtttgagcccagctgggaggagttcacagaccccctgtccttcatcggccgcatccggcccctggccgagaagacaggcatctgcaagatccggccccccaaggagtatgccctgagcggctggaacctgaacaacatgcctgtgctggagcagagcgtgctggcccacatcaacgtggacatcagcggcatgaaggtgccctggctgtatgtgggcatgtgcttcagcagcttctgctggcacatcgaggaccactggagctacagcatcaactacctgcactggggcgagcccaagacctggtatggagtgcccagccatgctgctgagcagctggaggaggtgatgagggagctggcccctgagctgtttgagagccagcctgacctgctgcaccagctggtgaccatcatgaaccccaacgtgctgatggagcacggcgtgcctgtgtaccgcaccaaccagtgtgccggggagtttgtggtgaccttcccccgggcctaccacagcggcttcaaccagggctacaactttgctgaggccgtgaacttctgcacagctgactggctgcccatcggccggcagtgtgtgaaccactaccgccgcctgcggcggcactgtgtgttcagccatgaggagctgatcttcaagatggctgctgaccctgagtgcctggatgtgggcctggccgccatggtgtgcaaggagctgaccctgatgacagaggaggagacccggctgcgggagagcgtggtgcagatgggcgtgctgatgtctgaggaggaggtgtttgagctggtgcctgatgatgagcggcagtgcagcgcctgcaggaccacctgcttcctgagcgccctgacctgcagctgcaaccctgagcggctggtgtgcctgtaccaccccacagacctgtgcccctgccccatgcagaagaagtgcctgcgctaccgctaccccctggaggacctgcccagcctgctgtatggagtgaaggtgcgggcccagagctatgacacctgggtgtcccgggtgacagaggccctgagcgccaacttcaaccacaagaaggacctgattgagctgcgggtgatgctggaggatgctgaggacaggaagtacccagaaaatgacctcttcaggaagctgagagatgctgtgaaggaggccgagacctgtgcctctgtggcccagctgctgctgagcaagaagcagaagcaccggcagagcccagattctggccgcaccaggaccaagctgactgtggaggagctgaaggcctttgtgcagcagctgttcagcctgccctgtgtgatcagccaggcccggcaggtgaagaacctgctggatgatgtggaggagttccacgagcgggcccaggaggccatgatggatgagaccccagacagcagcaagctgcagatgctgattgacatgggcagcagcctgtatgtggagctgcctgagctgccccggctgaagcaggagctgcagcaggcccgctggctggatgaggtgcggctgaccctgagtgacccccagcaggtgaccctggatgtgatgaagaagctgattgattctggagtgggcctggccccccaccacgctgtggagaaggccatggccgagctgcaggagctgctgactgtgtctgagcgctgggaggagaaggccaaggtgtgcctgcaggcccggcccaggcacagcgtggccagcctggagagcatcgtgaatgaggccaagaacatcccagccttcctgcccaacgtgctgagcctgaaggaggccctgcagaaggcccgggagtggacagccaaggtggaggccatccagagcggcagcaactatgcctacctggagcagctggagagcctgagcgccaagggccggcccatccctgtgcggctggaggccctgccccaggtggagagccaggtggccgccgcccgggcctggagggagaggacaggccgcaccttcctgaagaagaacagcagccacaccctgctgcaggtgctgagccccaggacagacattggagtgtatggcagcggcaagaacagaaggaagaaggtgaaggagctgtag

SEQ ID NO: 33930 - DNA, 4911 bp, Artificial Sequence
  derived and/or modified sequence
atggccggcgtgggccctgggggctacgccgctgagtttgtgcccccacctgagtgccctgtgtttgagcccagctgggaggagttcacagaccccctgtccttcatcggccgcatccggcccctggccgagaagacaggcatctgcaagatccggccccccaaggactggcagcccccatttgcctgtgaggtgaagagcttccgcttcaccccccgggtgcagaggctgaatgagctggaggccatgaccagggtgcggctggacttcctggaccagctggccaagttctgggagctgcagggcagcaccctgaagatccctgtggtggagaggaagatcctggacctgtatgccctgagcaagatcgtggccagcaaaggaggctttgagatggtgaccaaggagaagaagtggagcaaggtgggcagccggctgggctacctgcccgggaagggcaccggcagcctgctgaagagccactatgaaagaatcctgtacccctatgagctgttccagagcggcgtgtccctgatgggcgtgcagatgcccaacctggacctgaaggagaaggtggagcctgaggtgctgagcacagacacccagaccagccctgagcccggcaccaggatgaacatcctgcccaagaggaccaggagagtgaagacccagagcgagagcggagatgtgtccaggaacacagagctgaagaagctgcagatctttggagctggccccaaggtggtgggcctggccatgggcaccaaggacaaggaggatgaggtgaccaggaggaggaaggtgaccaacagaagtgatgccttcaacatgcagatgaggcagaggaagggcaccctgtctgtgaactttgtggacctgtatgtgtgcatgttctgtggccggggcaacaatgaagacaagctgctgctgtgtgatggctgtgatgacagctaccacaccttctgcctgatcccccccctgcctgatgtgcccaagggggactggcgctgccccaagtgtgtggccgaggagtgcagcaagccccgggaggccttcggctttgagcaggccgtgcgggagtacaccctgcagagctttggagagatggctgacaacttcaagagtgactacttcaacatgcctgtgcacatggtgcccacagagctggtggagaaggagttctggaggctggtgagcagcattgaagaagatgtgattgtggagtatggagctgacatcagcagcaaggactttggcagcggcttccctgtgaaggatggccgcaggaagatcctgcctgaggaggaggagtatgccctgagcggctggaacctgaacaacatgcctgtgctggagcagagcgtgctggcccacatcaacgtggacatcagcggcatgaaggtgccctggctgtatgtgggcatgtgcttcagcagcttctgctggcacatcgaggaccactggagctacagcatcaactacctgcactggggcgagcccaagacctggtacggcgtgcccagccacgccgctgagcagctggaggaggtgatgagggagctggcccctgagctgtttgagagccagcctgacctgctgcaccagctggtgaccatcatgaaccccaacgtgctgatggagcacggcgtgcctgtgtaccgcaccaaccagtgtgccggggagtttgtggtgaccttcccccgggcctaccacagcggcttcaaccagggctacaactttgctgaggccgtgaacttctgcacagctgactggctgcccatcggccggcagtgtgtgaaccactacagaaggctgcggcggcactgtgtgttcagccatgaggagctgatcttcaagatggctgctgaccctgaatgtctggatgtgggcctggccgccatggtgtgcaaggagctgaccctgatgacagaggaggagacccggctgcgggagagcgtggtgcagatgggcgtgctgatgtctgaggaggaggtgtttgagctggtgcctgatgatgagcggcagtgcagcgcctgcaggaccacctgcttcctgagcgccctgacctgcagctgcaaccctgagcggctggtgtgcctgtaccaccccacagacctgtgcccctgccccatgcagaagaagtgcctgcgctaccgctaccccctggaggacctgcccagcctgctgtatggagtgaaggtgcgggcccagagctatgacacctgggtgtcccgggtgacagaggccctgagcgccaacttcaaccacaagaaggacctgattgagctgcgggtgatgctggaggatgctgaggacaggaagtacccagaaaatgacctcttcaggaagctgagagatgctgtgaaggaggccgagacctgtgcctctgtggcccagctgctgctgagcaagaagcagaagcaccggcagagcccagacagcggccgcaccaggaccaagctgactgtggaggagctgaaggcctttgtgcagcagctgttcagcctgccctgcgtcatcagccaggcccggcaggtgaagaacctgctggatgatgtggaggagttccacgagcgggcccaggaggccatgatggatgagaccccagacagcagcaagctgcagatgctgattgacatgggcagcagcctgtatgtggagctgcctgagctgccccggctgaagcaggagctgcagcaggcccgctggctggatgaggtgcggctgaccctgagtgacccccagcaggtgaccctggatgtgatgaagaagctgattgacagcggcgtgggcctggccccccaccacgctgtggagaaggccatggccgagctgcaggagctgctgactgtgtctgagcgctgggaggagaaggccaaggtgtgcctgcaggcccggcccaggcacagcgtggccagcctggagagcatcgtgaatgaggccaagaacatcccagccttcctgcccaacgtgctgagcctgaaggaggccctgcagaaggcccgggagtggacagccaaggtggaggccatccagagcggcagcaactatgcctacctggagcagctggagagcctgagcgccaagggccggcccatccctgtgcggctggaggccctgccccaggtggagagccaggtggccgccgcccgggcctggagggagaggactggaagaaccttcctgaagaagaacagcagccacaccctgctgcaggtgctgagccccaggacagacatcggcgtgtatggcagcggcaagaacagaaggaagaaggtgaaggagctgattgagaaggagaaggagaaggacctggacctggagcccctgagtgacctggaggagggcctggaggagacccgggacacagccatggtggtggccgtgttcaaggagcgggagcagaaggagattgaggccatgcacagcctgcgggccgccaacctggccaagatgaccatggtggaccgcatcgaggaggtgaagttctgcatctgcaggaagacagccagcggcttcatgctgcagtgtgagctgtgcaaggactggttccacaacagctgtgtgcccctgcccaagagcagcagccagaagaagggcagctcctggcaggccaaggaggtgaagttcctgtgccccctgtgcatgaggagcagaagaccccggctggagaccatcctgagcctgctggtgtccctgcagaagctgcctgtgcggctgcctgagggggaggccctgcagtgcctgacagagcgggccatgtcctggcaggaccgggcccggcaggccctggccacagatgagctgagcagcgccctggccaagctgtctgtgctgagccagaggatggtggagcaggccgcccgggagaagacagagaagatcatctctgctgagctgcagaaggccgccgccaacccagacctgcagggccacctgcccagcttccagcagagcgccttcaacagagtggtgtcctctgtgagcagcagcccccggcagaccatggactatgatgatgaggagacagacagtgatgaggacatccgggagacctacggctatgacatgaaggacacagcctctgtgaagagcagcagcagcctggagcccaacctcttctgtgatgaggagatccccatcaagtctgaggaggtggtgacccacatgtggacagcccccagcttctgtgccgagcacgcctacagcagcgccagcaagagctgcagccagggcagcagcacccccaggaagcagcccaggaagagccccctggtgcccaggagcctggagccccctgtgctggagctgagccctggggccaaggcccagctggaggagctgatgatggtgggggacctgctggaggtgtccctggatgagacccagcacatctggaggatcctgcaggccacccaccccccatctgaagatcgcttcctgcacatcatggaggatgacagcatggaggagaagcccctgaaggtgaagggcaaggacagcagcgagaagaagaggaagaggaagctggagaaggtggagcagctgtttggagagggcaagcagaagagcaaggagctgaagaagatggacaagcccaggaagaagaagctgaagctgggcgctgacaagagcaaggagctgaacaagctggccaagaagctggccaaggaggaggagaggaagaagaagaaggagaaggctgctgctgccaaggtggagctggtgaaggagagcacagagaagaagcgggagaagaaggtgctggacatccccagcaaatatgactggagcggggctgaggagagtgatgatgaaaatgctgtgtgtgccgcccagaactgccagaggccctgcaaggacaagggcgtggtgtttgtgacagaggaggagaagaacaagaagtactag

SEQ ID NO: 33931 - DNA, 3150 bp, Artificial Sequence
  derived and/or modified sequence
atggccggcgtgggccctgggggctacgccgctgagtttgtgcccccacctgagtgccctgtgtttgagcccagctgggaggagttcacagaccccctgtccttcatcggccgcatccggcccctggccgagaagacaggcatctgcaagatccggccccccaaggactggcagcccccatttgcctgtgaggtgaagagcttccgcttcaccccccgggtgcagaggctgaatgagctggagatcgtggccagcaagggcggctttgagatggtgaccaaggagaagaagtggagcaaggtgggcagccggctgggctacctgcctggaaaaggaacaggcagcctgctgaagagccactatgagcgcatcctgtacccctatgagctgttccagagcggcgtgtccctgatgggcgtgcagatgcccaacctggacctgaaggagaaggtggagcctgaggtgctgagcacagacacccagaccagccctgagcccggcaccaggatgaacatcctgcccaagaggacccggcgggtgaagacccagagcgagagcggagatgtgtccaggaacacagagctgaagaagctgcagatctttggagctggccccaaggtggtgggcctggccatgggcaccaaggacaaggaggatgaggtgaccaggaggaggaaggtgaccaacagaagtgatgccttcaacatgcagatgaggcagaggaagggcaccctgtctgtgaactttgtggacctgtatgtgtgcatgttctgtggccggggcaacaatgaagacaagctgctgctgtgtgatggctgtgatgacagctaccacaccttctgcctgatcccccccctgcctgatgtgcccaagggggactggcgctgccccaagtgtgtggccgaggagtgcagcaagccccgggaggcctttggatttgagcaggccgtgcgggagtacaccctgcagagctttggagagatggctgacaacttcaagagtgactacttcaacatgcctgtgcacatggtgcccacagagctggtggagaaggagttctggaggctggtgagcagcattgaggaggatgtgattgtggagtatggagctgacatcagcagcaaggactttggaagtggcttccctgtgaaggatggaagaaggaagatcctgcctgaggaggaggagtatgccctgagcggctggaacctgaacaacatgcctgtgctggagcagagcgtgctggcccacatcaacgtggacatcagcggcatgaaggtgccctggctgtatgtgggcatgtgcttcagcagcttctgctggcacatcgaggaccactggagctacagcatcaactacctgcactggggcgagcccaagacctggtatggagtgcccagccatgctgctgagcagctggaggaggtgatgagggagctggcccctgagctgtttgagagccagcctgacctgctgcaccagctggtgaccatcatgaaccccaacgtgctgatggagcacggcgtgcctgtgtaccgcaccaaccagtgtgccggggagtttgtggtgaccttcccccgggcctaccacagcggcttcaaccagggctacaactttgctgaggccgtgaacttctgcacagctgactggctgcccatcggccggcagtgtgtgaaccactaccgccgcctgcggcggcactgtgtgttcagccatgaggagctgatcttcaagatggctgctgaccctgagtgcctggatgtgggcctggccgccatggtgtgcaaggagctgaccctgatgacagaggaggagacccggctgcgggagagcgtggtgcagatgggcgtgctgatgtctgaggaggaggtgtttgagctggtgcctgatgatgagcggcagtgcagcgcctgcaggaccacctgcttcctgagcgccctgacctgcagctgcaaccctgagcggctggtgtgcctgtaccaccccacagacctgtgcccctgccccatgcagaagaagtgcctgcgctaccgctaccccctggaggacctgcccagcctgctgtatggagtgaaggtgcgggcccagagctatgacacctgggtgtcccgggtgacagaggccctgagcgccaacttcaaccacaagaaggacctgattgagctgcgggtgatgctggaggatgctgaggacaggaagtacccagaaaatgacctcttcaggaagctgagagatgctgtgaaggaggccgagacctgtgcctctgtggcccagctgctgctgagcaagaagcagaagcaccggcagagcccagattctggccgcaccaggaccaagctgactgtggaggagctgaaggcctttgtgcagcagctgttcagcctgccctgtgtgatcagccaggcccggcaggtgaagaacctgctggatgatgtggaggagttccacgagcgggcccaggaggccatgatggatgagaccccagacagcagcaagctgcagatgctgattgacatgggcagcagcctgtatgtggagctgcctgagctgccccggctgaagcaggagctgcagcaggcccgctggctggatgaggtgcggctgaccctgagtgacccccagcaggtgaccctggatgtgatgaagaagctgattgattctggagtgggcctggccccccaccacgctgtggagaaggccatggccgagctgcaggagctgctgactgtgtctgagcgctgggaggagaaggccaaggtgtgcctgcaggcccggcccaggcacagcgtggccagcctggagagcatcgtgaatgaggccaagaacatcccagccttcctgcccaacgtgctgagcctgaaggaggccctgcagaaggcccgggagtggacagccaaggtggaggccatccagagcggcagcaactatgcctacctggagcagctggagagcctgagcgccaagggccggcccatccctgtgcggctggaggccctgccccaggtggagagccaggtggccgccgcccgggcctggagggagaggacaggccgcaccttcctgaagaagaacagcagccacaccctgctgcaggtgctgagccccaggacagacattggagtgtatggcagcggcaagaacagaagatag

SEQ ID NO: 33932 - DNA, 5073 bp, Artificial Sequence
  derived and/or modified sequence
atggccggcgtgggccctgggggctacgccgctgagtttgtgcccccacctgagtgccctgtgtttgagcccagctgggaggagttcacagaccccctgtccttcatcggccgcatccggcccctggccgagaagacaggcatctgcaagatccggccccccaaggactggcagcccccatttgcctgtgaggtgaagagcttccgcttcaccccccgggtgcagaggctgaatgagctggaggccatgaccagggtgcggctggacttcctggaccagctggccaagttctgggagctgcagggcagcaccctgaagatccctgtggtggagaggaagatcctggacctgtatgccctgagcaagatcgtggccagcaaaggaggctttgagatggtgaccaaggagaagaagtggagcaaggtgggcagccggctgggctacctgcccgggaagggcaccggcagcctgctgaagagccactatgaaagaatcctgtacccctatgagctgttccagagcggcgtgtccctgatgggcgtgcagatgcccaacctggacctgaaggagaaggtggagcctgaggtgctgagcacagacacccagaccagccctgagcccggcaccaggatgaacatcctgcccaagaggaccaggagagtgaagacccagagcgagagcggagatgtgtccaggaacacagagctgaagaagctgcagatctttggagctggccccaaggtggtgggcctggccatgggcaccaaggacaaggaggatgaggtgaccaggaggaggaaggtgaccaacagaagtgatgccttcaacatgcagatgaggcagaggaagggcaccctgtctgtgaactttgtggacctgtatgtgtgcatgttctgtggccggggcaacaatgaagacaagctgctgctgtgtgatggctgtgatgacagctaccacaccttctgcctgatcccccccctgcctgatgtgcccaagggggactggcgctgccccaagtgtgtggccgaggagtgcagcaagccccgggaggccttcggctttgagcaggccgtgcgggagtacaccctgcagagctttggagagatggctgacaacttcaagagtgactacttcaacatgcctgtgcacatggtgcccacagagctggtggagaaggagttctggaggctggtgagcagcattgaagaagatgtgattgtggagtatggagctgacatcagcagcaaggactttggcagcggcttccctgtgaaggatggccgcaggaagatcctgcctgaggaggaggagtatgccctgagcggctggaacctgaacaacatgcctgtgctggagcagagcgtgctggcccacatcaacgtggacatcagcggcatgaaggtgccctggctgtatgtgggcatgtgcttcagcagcttctgctggcacatcgaggaccactggagctacagcatcaactacctgcactggggcgagcccaagacctggtacggcgtgcccagccacgccgctgagcagctggaggaggtgatgagggagctggcccctgagctgtttgagagccagcctgacctgctgcaccagctggtgaccatcatgaaccccaacgtgctgatggagcacggcgtgcctgtgtaccgcaccaaccagtgtgccggggagtttgtggtgaccttcccccgggcctaccacagcggcttcaaccagggctacaactttgctgaggccgtgaacttctgcacagctgactggctgcccatcggccggcagtgtgtgaaccactacagaaggctgcggcggcactgtgtgttcagccatgaggagctgatcttcaagatggctgctgaccctgaatgtctggatgtgggcctggccgccatggtgtgcaaggagctgaccctgatgacagaggaggagacccggctgcgggagagcgtggtgcagatgggcgtgctgatgtctgaggaggaggtgtttgagctggtgcctgatgatgagcggcagtgcagcgcctgcaggaccacctgcttcctgagcgccctgacctgcagctgcaaccctgagcggctggtgtgcctgtaccaccccacagacctgtgcccctgccccatgcagaagaagtgcctgcgctaccgctaccccctggaggacctgcccagcctgctgtatggagtgaaggtgcgggcccagagctatgacacctgggtgtcccgggtgacagaggccctgagcgccaacttcaaccacaagaaggacctgattgagctgcgggtgatgctggaggatgctgaggacaggaagtacccagaaaatgacctcttcaggaagctgagagatgctgtgaaggaggccgagacctgtgcctctgtggcccagctgctgctgagcaagaagcagaagcaccggcagagcccagacagcggccgcaccaggaccaagctgactgtggaggagctgaaggcctttgtgcagcagctgttcagcctgccctgcgtcatcagccaggcccggcaggtgaagaacctgctggatgatgtggaggagttccacgagcgggcccaggaggccatgatggatgagaccccagacagcagcaagctgcagatgctgattgacatgggcagcagcctgtatgtggagctgcctgagctgccccggctgaagcaggagctgcagcaggcccgctggctggatgaggtgcggctgaccctgagtgacccccagcaggtgaccctggatgtgatgaagaagctgattgacagcggcgtgggcctggccccccaccacgctgtggagaaggccatggccgagctgcaggagctgctgactgtgtctgagcgctgggaggagaaggccaaggtgtgcctgcaggcccggcccaggcacagcgtggccagcctggagagcatcgtgaatgaggccaagaacatcccagccttcctgcccaacgtgctgagcctgaaggaggccctgcagaaggcccgggagtggacagccaaggtggaggccatccagagcggcagcaactatgcctacctggagcagctggagagcctgagcgccaagggccggcccatccctgtgcggctggaggccctgccccaggtggagagccaggtggccgccgcccgggcctggagggagaggactggaagaaccttcctgaagaagaacagcagccacaccctgctgcaggtgctgagccccaggacagacatcggcgtgtatggcagcggcaagaacagaaggaagaaggtgaaggagctgattgagaaggagaaggagaaggacctggacctggagcccctgagtgacctggaggagggcctggaggagacccgggacacagccatggtggtggccgtgttcaaggagcgggagcagaaggagattgaggccatgcacagcctgcgggccgccaacctggccaagatgaccatggtggaccgcatcgaggaggtgaagttctgcatctgcaggaagacagccagcggcttcatgctgcagtgtgagctgtgcaaggactggttccacaacagctgtgtgcccctgcccaagagcagcagccagaagaagggcagctcctggcaggccaaggaggtgaagttcctgtgccccctgtgcatgaggagcagaagaccccggctggagaccatcctgagcctgctggtgtccctgcagaagctgcctgtgcggctgcctgagggggaggccctgcagtgcctgacagagcgggccatgtcctggcaggaccgggcccggcaggccctggccacagatgagctgagcagcgccctggccaagctgtctgtgctgagccagaggatggtggagcaggccgcccgggagaagacagagaagatcatctctgctgagctgcagaaggccgccgccaacccagacctgcagggccacctgcccagcttccagcagagcgccttcaacagagtggtgtcctctgtgagcagcagcccccggcagaccatggactatgatgatgaggagacagacagtgatgaggacatccgggagacctacggctatgacatgaaggacacagcctctgtgaagagcagcagcagcctggagcccaacctcttctgtgatgaggagatccccatcaagtctgaggaggtggtgacccacatgtggacagcccccagcttctgtgccgagcacgcctacagcagcgccagcaagagctgcagccagggcagcagcacccccaggaagcagcccaggaagagccccctggtgcccaggagcctggagccccctgtgctggagctgagccctggggccaaggcccagctggaggagctgatgatggtgggggacctgctggaggtgtccctggatgagacccagcacatctggaggatcctgcaggccacccaccccccatctgaagatcgcttcctgcacatcatggaggatgacagcatggaggagaagcccctgaaggtgaagggcaaggacagcagcgagaagaagaggaagaggaagctggagaaggtggagcagctgtttggagagggcaagcagaagagcaaggagctgaagaagatggacaagcccaggaagaagaagctgaagctgggcgctgacaagagcaaggagctgaacaagctggccaagaagctggccaaggaggaggagaggaagaagaagaaggagaaggctgctgctgccaaggtggagctggtgaaggagagcacagagaagaagcgggagaagaaggtgctggacatccccagcaaatatgactggagcggggctgaggagagtgatgatgaaaatgctgtgtgtgccgcccagaactgccagaggccctgcaaggacaaggtggactgggtgcagtgtgatggcggctgtgatgagtggttccaccaggtgtgtgtgggcgtgtccccagagatggctgaaaatgaagactacatctgcatcaactgtgccaagaagcagggccctgtgtccccaggccctgcccccccacccagcttcatcatgagctacaagctgcccatggaggacctgaaggagaccagctag

SEQ ID NO: 33933 - DNA, 9692 bp, Artificial Sequence
  derived and/or modified sequence
gcagaactttggcgggcaaggagacaaacagccacactgtgctgccggggaagagaagaagaaggaaaggccagacacacaggcgtcgtgcagctgcggaaggattccgtttcctgcagggggcggagggatttgacagcacggtaacttccggaaaagtcctgaacctcagtggaaaagccttgcaagaaacaataacaaacgggaggaggaagcgattctggggtttctgtgttgaacggttcttgtccgcgaagatgcgcttcggcctctgtcaggggacttgaacgggcttagtgggcttcagccagcttttctccaccggttccccacggggacccccccccccccccggccgttgcaatggcgggcgtggggccggggggctacgcggcggagttcgtgccaccgccagagtgccccgtctttgagccgagttgggaggagttcacagatccgctcagctttatcggccgcatccggcctttggcggagaaaaccggcatctgcaaaattcggccgcccaaggaatatgcactttctggttggaatttgaataacatgcctgtcctggaacagtctgttcttgcacatattaatgtggacatctctggtatgaaagtgccgtggctctatgtgggaatgtgcttctcttctttttgctggcacattgaggatcactggagttattccatcaactacttgcactggggggagccaaagacatggtatggtgtgccatctcatgctgcagagcaactggaggaggtgatgagagagctggcccccgagttatttgaatcccagcctgatcttctgcatcagttagttaccatcatgaaccccaacgtgctaatggagcatggtgtgcctgtgtacaggaccaatcagtgtgctggcgagtttgttgtgacatttcctcgtgcctatcactctggatttaaccagggctacaactttgctgaagctgtgaacttctgtactgctgactggttgcccattggacgtcaatgtgtaaatcattaccgacgcctaaggcgccactgtgtcttttcacacgaggaactaattttcaagatggcagcagatccagaatgcttagatgtggggctggctgccatggtctgcaaagaattgactctcatgactgaagaagaaacacgattaagagagtctgttgtacagatgggtgtcctgatgtcagaagaagaagtgtttgaacttgttcctgatgatgagcggcagtgttcagcatgcagaaccacatgttttctctctgctctcacatgttcctgtaatcctgagcggcttgtatgtctctaccatccaactgatctgtgcccctgccccatgcagaagaaatgtcttagatatcgctacccattagaagacctcccttctctgctatatggtgtaaaagtcagggcacagtcctatgacacttgggtcagtcgtgttacagaagcattgtctgctaacttcaaccacaaaaaagatttgattgaattgcgagtaatgctggaagatgctgaggataggaaatacccagagaatgatctctttcgaaaactcagggatgctgtaaaagaagctgagacctgtgcttctgtggctcagctgcttctgagcaaaaagcagaaacacagacagagcccagatagtgggaggactcggaccaaactgacagtggaagaattgaaggcctttgtccaacaactttttagtcttccgtgtgtcatcagccaagctcggcaagtaaagaatctgctagatgatgtggaagagtttcatgaacgtgctcaggaggccatgatggatgaaaccccagattcttccaaactccagatgttgatagatatgggctctagtctctatgtggaactccctgaattaccacgactgaagcaagagctacaacaggctcggtggttggacgaagtaagactgaccttatcagatccgcaacaagtcactttggatgtcatgaagaagctgatagactctggggtagggttggcaccccaccatgctgtggagaaagcaatggctgaactacaggagctccttacagtctctgaacgatgggaagaaaaggctaaggtctgcctacaggcaagaccgaggcacagtgtggcaagtttagaaagcattgtgaatgaagccaagaacattccagcctttctacccaatgtgttgtccttgaaagaagccttacaaaaggctcgagaatggaccgctaaagtggaagctattcagagtggcagcaattacgcttatttggagcagcttgagagcttgtctgcgaaaggacgccctattcctgtgcgtcttgaagcactgccgcaagtggaatcacaggtagcagcagcacgggcatggagagaacggactgggcggacgtttcttaagaagaattctagccatacattgttacaggtgctgagcccccggaccgacattggtgtatatgggagtggcaaaaataggaggaaaaaagtaaaagaactaatagaaaaagaaaaagaaaaggatctggacctggagcctctgagtgatctggaggaaggattggaggaaaccagagatacagccatggtggtggcagttttcaaagaacgggagcaaaaagagattgaagccatgcattctctcagagcagccaacctagccaagatgacaatggtggaccgcatagaagaagtaaaattttgcatttgccgcaagacagccagtgggtttatgctacagtgtgagctctgcaaagactggttccataacagctgtgttcctcttcctaaatcaagttcccaaaaaaaaggatccagctggcaagctaaagaagtaaaattcctttgccctctttgtatgcggtctcgaaggcccaggctagagactattctgtcactcctggtatcccttcagaagttgcccgtacggttgcctgaaggagaggccctgcagtgtttgacagaacgtgctatgagttggcaagatagagcgcggcaggctctagccacagatgaactatcctctgccctggccaaactatctgtgttgagccagcgtatggtggaacaggcggctcgagaaaaaactgaaaagatcatcagtgcagaactccaaaaagcagctgccaatccagacttacagggacacttacctagtttccagcagtctgcttttaaccgggtggtgagcagtgtgtcatcttctcctcgacaaacaatggactatgatgatgaagaaacagactctgatgaagacattcgagagacatatggctacgacatgaaggacacagccagtgtgaagtcctctagtagtcttgaacccaatcttttttgtgatgaagagattcccatcaaatccgaggaggtggtgacccacatgtggacagcaccttcattttgtgcagagcatgcttattcttctgcttctaagagttgttctcaaggttctagcaccccaaggaaacaacctcggaagagccctttggtgccccgaagtttggaacctccagtgctggagttgtcacctggagctaaggcacaactggaagaacttatgatggttggagatctcctggaagtatctctggacgagactcaacacatatggcggattttgcaggccacacacccaccctctgaagacagattcttgcatatcatggaggatgacagcatggaagagaaaccactaaaagtgaaaggaaaggactcttcagagaagaaacggaaacggaagctagaaaaggtagagcaactttttggagaaggaaaacagaagtccaaggagttaaagaaaatggacaaacctagaaagaagaaattaaaattaggtgcagacaaatcaaaggagctgaataaactggccaagaaactagcaaaagaagaagagagaaagaaaaagaaggagaaggctgctgcagccaaagttgaacttgtgaaagagagcactgaaaagaaaagagagaaaaaggtgctggacatcccctcaaagtatgactggtcaggagcagaggagtctgatgatgagaatgctgtgtgcgcagcacagaactgccaaaggccctgcaaggacaaggtagactgggtacaatgtgatggtggctgtgatgagtggtttcatcaagtttgtgtgggtgtatctccagaaatggctgaaaatgaagattacatctgtataaactgtgcaaagaagcaggggccagttagcccaggtccagcaccacctccttccttcataatgagctacaaactaccaatggaggatcttaaagagaccagttagcagatgcttggttagtttgggacatggggggacatggaccacattgagaccttagtcatcaagtagagtggtttatatccacttggaatgttgcttccaaagatgaatggccttcagagaaagtccccttagtgctggcttcctctttgcatggactctgtgggttacattctctatcaacatatctatgcagagggtgtcttctttggtacaacagccaatatttcatgtctcctttgagtgtggtttactgcattaaggccagatgcttaattgagctctagggtggctggttagtattaatacattggtgtgctaacagggcatataggatgtggcttttgtccagctgatagtagttagaggcttacaacttaggagcagcaccaactgaaggtgctaattgcttggatctccttcattgggatagttggagagggattggagtaccactttccttccactgttacctggtacttaatgccctaaagatacaactaggagtaacagggccaaagttatttctgttagacgtcaaggaatggtatcacagtctattgacctcagcgatttgtgcttgtttgtgctagaagaacatcccaaataggagaacctctcacaagctggggcaggtcaccttatctttgtaagatgaggatatcatctagatcagaaatctgactagattggattctgaggagaagaacctactacaaggcaaggagccgttttttggctttgaaaagtcttgctgtcttgggtctacattttagggaagagcaggtacatggatccaggcttctgccaaaaaaaaaaagagaagaagatgacgatgatgaccagtcgtactatcttactgagccacagtgatgcatgcttttcggggaaaacttcattcacaagtattccagacaccaggcttcaggcatggccatgagcaagaccagcaaataacagctttttgccttgcagccctgaccccaatgtctgctgtttccaacactggtgatttctaactacggcccacagcagatgctgttgaataacaccatggcttcatcagaggatgtggggttgtagtacctctgggtgatgaagttgttttagtaaatccatttttaaaaaaaaaaaaggacttgtttttacttttttctaaatgtctctgactactgactgttctatacatagattatttttccttttttaatatacatatatgaatatataaatatatatatttactgttaccagcagcatatgacagagtttcaacatcaaaaatccatttgggggcttgctttttcttttttgctttaaaaaaaaaaatcccattccttctttgtagtacaaggagttagcactccctcctccatcccagcctgaccagatcttccattttgcttttgttcatatagataattatatgtcctttgtgtgttgggacttgtccctgtctgttgggaaacttggtctcactctagtctgtgctggctcttttttcttttgtgtgtgaatgtttgaaactatggtgctgtgtcctcttccctcctgttgtgttctctgttcttcttaaggtattaggtaagctgtatgtaaactcttattagaaggggactaatttttttttaaaggacaaaaaaaaaaatgactaaaaatagtgttttgtcatcactgtctggtgtctttattttggtttaaaaaaatctgtggtttgacttaaattcatcagttttccttttaaaggggggattggggtggacctagcaacagcttatagtttcctcttccctttttgccccagtctcttttaaagaactgtcttctagtaactagaagtgaaatgtactgtccagttacagtttgagtgggtatgagatttaactcaaaaggaatcttacaaaaaaaaagatgttttcttataaaatccaatttctgtaaatgttttctctgaagttcatactacctactttttattcattcttaatactgtataacattttgagtgttttgacttgttcagaggtttgttagtgttgctgtgcatatgtcttgaggtctcatctgaagtaagtttgtgtatgatcgaagatttcaatggatattgcaaggtaactaattaactgatttcataagttttcgttttgccaagctaacgattatcaattaagaatttcctctggttgatgttatacaagaaagcacaatattttttgcctgttgatcttctttgtaacagtcttcagatatttgtgggttaaaaattgaatgtaattttaagtgacagatgcctggaatacatttaaaatttttatttttccttcctaatcatccattaactattccactatcagtggagagtcatgaggatgctgagaaagtatgaatagcttcctgtcaccttctgacgttttgaaacttaaatatgtcttttcgttgatactgtgggattttctgtatttacttgacagtcatggaggatttggtatgacttgaccacaggtttagaccaaggctgagaagaacagaagggagaaattaatggcaaaacaaaaaatacacaaatctgcggttttggaattaatgaaacaagattcatctatttaaagaaatgttggtgttctaatacaaagcattattttcacttagagaaaattacttacttgctcccttctgtattgtaatattttgtattaagacatgatttaaaatgtctttctacccttatctcctctaaactgcaactgaagttgcaattcttcatcattagtattttaactctggcaaaggttatagaaagaaaaatggaaatatggtaggcctgtggtattcttaaaagctaagtcattagaactatgcagatccccaagtttaaaagtacaaatacagcaccagtagttagctttctagctgggggagaagacaggagatttttcttccacagatgtttattttgcttcctgataggtactgcagcaaagccatgttgatgtgtagatgcatgacttcctcactaagctgctgcacaccagctttgcctgcatgattcaaatttgtgcctcagtaaaattataaattattgcatgtcataccttgaataatggaaacggcaaacattaaacctgtgattacccataatgtactttaataataaaaaacatggcagccaggtgcagtagagtgcacctgtggtcaggaggctgaagtgggaagattgcttcaacctgtgagtttgagtcccgcctggtcaacagcgagaccccatgtgtctgtctgtctctctctttttttaaaggacagaggctaagctgtaaggttagcatggttctgcctgggctttgcttctgtgcttctgtgcaggctgagctgtaaggttagcatggttctgcctgggctttgcttctgcgcttctgtgcaggctgagctgtaaggttagcatggttctgcctgggctttgcttctgcgcttctgtgcaggctgagctgtaaggttagcatggttctgcctgggctttgcttctgcgcttctgtgctagcaggtgcccacaaaatgtctttttgaatttcttaatttttgggttctggatgcaattcgtgcacgccaagaaactacttgcttgtcagtattttaattctgtagtacatgtgtgtgaatatcagccagtacttacagtaggaggatgaacagaaaaactgagaagacctgtctttcaaaagatgggtttatccactttttaagggaaaaagtgacagtttggcatgggatttgaaaagtggaaattgtggaaaaattgagctgttgaagtcccacatataaccagatttaataaagcttcacatgtgaattagctccatatgtgtgtagaaggttgcttttatagcaggtccttaagtactccttttgaaattcctcctttttttttaagtcataccattacttctttggatatgaatgtcccaagtggtatctcctactgtagtatgaggaagaatggctgttaatgtattttttgaattttggtcttgtcttggcctggatcatatccagtcaccactatgcaacaaatgatgtgcactgggcaaggatatgatgggttatgaaagctgtatcttgtttgttttttcttttgcagtactccaagtggtctaaacaggaatgtcttgtaaaacctcaagactccctattgattattcccttacatatttatttacaatttatcagggtaattggtggtgccttatgaaaagtataactcgatttcttgatctttgagcatgttttgtgtttcttgtgttttctaaaagaatattagatatggttaattgcattacatctaaaagatttaaaaaattgtgtgtatgctcaggttccccacacccatacccaccctaacccctgtcatttacattggtggcaactttaaatggtaaccaagcaaaagtacattttgataatgagtattgataatcctgaggaaaactagtgagtatatgggagccacctttgacctgtgccaaagcagtttctaatttcatttgctaactataaaataaagaactgagccaaaataatttgatcagtggtgtgattagcctattatcattgctgagaatagtgtttttggagtgtgaagtgattcctgaagatttcacctgccttctgtttccagcaagaatccagtgatgaccaacacatttcctcacttttggttcttgagaagtttatccctttgcaacaaaccattaatagggaaaacaaggaaatgctttccctttctctttggcttcttaaagctcacaaccaattcagaccccaagttacttcagagaagcaaatggcaccttttccccattgccaaggatcccagcttatgcagatatgaaggacggatcatttctgaaaatgttaagactctgcttgcagtggacttggcctcagtttcatgaaatgtgtaactctgtatgtgtatgttaggaggagggttggttgaaagagcgggggcagggaggggaatctgattacctcttgggaaataattttcttgccaacaaaaagatacacttgaagtttcttaaggtggcaagtccattaaaaaaaaaaattgtgttggaccctcccagtttagatcaagtatttcttgggggtcttgctattgtggttgataccaataaatggaagatccagaatattttcatttaaagctcaaccattaattggaacatggtgaaacattgtacacattgtaaaagtagggaacagtacaaaagaatggaatcaaatactatattatgtgaataaactagagtgattttggaatttcactctcttcaccccttctcacttgtatgttctgtaaagtgtatttctactttggtaggaagaaagacttgatttaatatttc

SEQ ID NO: 33934 - DNA, 5274 bp, Artificial Sequence
  derived and/or modified sequence
gcagaactttggcgggcaaggagacaaacagccacactgtgctgccggggaagagaagaagaaggaaaggccagacacacaggcgtcgtgcagctgcggaaggattccgtttcctgcagggggcggagggatttgacagcacggtaacttccggaaaagtcctgaacctcagtggaaaagccttgcaagaaacaataacaaacgggaggaggaagcgattctggggtttctgtgttgaacggttcttgtccgcgaagatgcgcttcggcctctgtcaggggacttgaacgggcttagtgggcttcagccagcttttctccaccggttccccacggggacccccccccccccccggccgttgcaatggcgggcgtggggccggggggctacgcggcggagttcgtgccaccgccagagtgccccgtctttgagccgagttgggaggagttcacagatccgctcagctttatcggccgcatccggcctttggcggagaaaaccggcatctgcaaaattcggccgcccaaggactggcagcctccatttgcctgtgaagtaaaaagctttcgtttcactccaagagtccagcgcctgaatgaacttgaggcaatgaccagagtgagattggatttcttggatcaactagcaaaattttgggaacttcaaggatctactctgaagatccctgtggtagagagaaaaatcctggatctgtatgctttgagcaagattgttgccagcaaaggaggttttgaaatggtcaccaaagagaagaaatggtctaaagtgggtagtcgcttgggatatctgccaggaaaaggaactgggtctcttttgaagtcacattatgaaagaattctctacccatatgagcttttccagtctggtgtgagccttatgggtgtgcagatgcctaatttagatcttaaagaaaaagtggagcctgaggttctcagcactgatacccaaacttccccagagccaggcacaaggatgaacattctgccgaagagaacaagacgtgtgaagactcagtcagaatctggagatgtgagtagaaacacggaactgaagaaacttcagatttttggggctgggcccaaggttgtgggcttggcaatgggaacaaaagataaagaagatgaggtcacccgaagacgaaaagttaccaacaggtcagacgcatttaacatgcaaatgagacaacggaaaggcactctctctgttaactttgttgatctctatgtttgtatgttttgtggtcggggaaacaatgaagataaattgcttttgtgtgatggatgtgatgacagctatcatacattttgtctaattcctccactacctgatgtgcccaaaggagactggaggtgtcctaaatgtgtcgccgaggaatgtagcaaacctcgagaagcctttggatttgaacaagctgtacgagagtatacacttcagagctttggagagatggcagataattttaagtctgattattttaatatgccagtccatatggttcccacagaactagtagaaaaggaattttggcggctggtaagcagcattgaagaagatgttattgtggaatatggagcagatatctcctcaaaagactttggaagtggatttccggtgaaggatgggcggagaaagattctgccagaagaagaggaatatgcactttctggttggaatttgaataacatgcctgtcctggaacagtctgttcttgcacatattaatgtggacatctctggtatgaaagtgccgtggctctatgtgggaatgtgcttctcttctttttgctggcacattgaggatcactggagttattccatcaactacttgcactggggggagccaaagacatggtatggtgtgccatctcatgctgcagagcaactggaggaggtgatgagagagctggcccccgagttatttgaatcccagcctgatcttctgcatcagttagttaccatcatgaaccccaacgtgctaatggagcatggtgtgcctgtgtacaggaccaatcagtgtgctggcgagtttgttgtgacatttcctcgtgcctatcactctggatttaaccagggctacaactttgctgaagctgtgaacttctgtactgctgactggttgcccattggacgtcaatgtgtaaatcattaccgacgcctaaggcgccactgtgtcttttcacacgaggaactaattttcaagatggcagcagatccagaatgcttagatgtggggctggctgccatggtctgcaaagaattgactctcatgactgaagaagaaacacgattaagagagtctgttgtacagatgggtgtcctgatgtcagaagaagaagtgtttgaacttgttcctgatgatgagcggcagtgttcagcatgcagaaccacatgttttctctctgctctcacatgttcctgtaatcctgagcggcttgtatgtctctaccatccaactgatctgtgcccctgccccatgcagaagaaatgtcttagatatcgctacccattagaagacctcccttctctgctatatggtgtaaaagtcagggcacagtcctatgacacttgggtcagtcgtgttacagaagcattgtctgctaacttcaaccacaaaaaagatttgattgaattgcgagtaatgctggaagatgctgaggataggaaatacccagagaatgatctctttcgaaaactcagggatgctgtaaaagaagctgagacctgtgcttctgtggctcagctgcttctgagcaaaaagcagaaacacagacagagcccagatagtgggaggactcggaccaaactgacagtggaagaattgaaggcctttgtccaacaactttttagtcttccgtgtgtcatcagccaagctcggcaagtaaagaatctgctagatgatgtggaagagtttcatgaacgtgctcaggaggccatgatggatgaaaccccagattcttccaaactccagatgttgatagatatgggctctagtctctatgtggaactccctgaattaccacgactgaagcaagagctacaacaggctcggtggttggacgaagtaagactgaccttatcagatccgcaacaagtcactttggatgtcatgaagaagctgatagactctggggtagggttggcaccccaccatgctgtggagaaagcaatggctgaactacaggagctccttacagtctctgaacgatgggaagaaaaggctaaggtctgcctacaggcaagaccgaggcacagtgtggcaagtttagaaagcattgtgaatgaagccaagaacattccagcctttctacccaatgtgttgtccttgaaagaagccttacaaaaggctcgagaatggaccgctaaagtggaagctattcagagtggcagcaattacgcttatttggagcagcttgagagcttgtctgcgaaaggacgccctattcctgtgcgtcttgaagcactgccgcaagtggaatcacaggtagcagcagcacgggcatggagagaacggactgggcggacgtttcttaagaagaattctagccatacattgttacaggtgctgagcccccggaccgacattggtgtatatgggagtggcaaaaataggaggaaaaaagtaaaagaactaatagaaaaagaaaaagaaaaggatctggacctggagcctctgagtgatctggaggaaggattggaggaaaccagagatacagccatggtggtggcagttttcaaagaacgggagcaaaaagagattgaagccatgcattctctcagagcagccaacctagccaagatgacaatggtggaccgcatagaagaagtaaaattttgcatttgccgcaagacagccagtgggtttatgctacagtgtgagctctgcaaagactggttccataacagctgtgttcctcttcctaaatcaagttcccaaaaaaaaggatccagctggcaagctaaagaagtaaaattcctttgccctctttgtatgcggtctcgaaggcccaggctagagactattctgtcactcctggtatcccttcagaagttgcccgtacggttgcctgaaggagaggccctgcagtgtttgacagaacgtgctatgagttggcaagatagagcgcggcaggctctagccacagatgaactatcctctgccctggccaaactatctgtgttgagccagcgtatggtggaacaggcggctcgagaaaaaactgaaaagatcatcagtgcagaactccaaaaagcagctgccaatccagacttacagggacacttacctagtttccagcagtctgcttttaaccgggtggtgagcagtgtgtcatcttctcctcgacaaacaatggactatgatgatgaagaaacagactctgatgaagacattcgagagacatatggctacgacatgaaggacacagccagtgtgaagtcctctagtagtcttgaacccaatcttttttgtgatgaagagattcccatcaaatccgaggaggtggtgacccacatgtggacagcaccttcattttgtgcagagcatgcttattcttctgcttctaagagttgttctcaaggttctagcaccccaaggaaacaacctcggaagagccctttggtgccccgaagtttggaacctccagtgctggagttgtcacctggagctaaggcacaactggaagaacttatgatggttggagatctcctggaagtatctctggacgagactcaacacatatggcggattttgcaggccacacacccaccctctgaagacagattcttgcatatcatggaggatgacagcatggaagagaaaccactaaaagtgaaaggaaaggactcttcagagaagaaacggaaacggaagctagaaaaggtagagcaactttttggagaaggaaaacagaagtccaaggagttaaagaaaatggacaaacctagaaagaagaaattaaaattaggtgcagacaaatcaaaggagctgaataaactggccaagaaactagcaaaagaagaagagagaaagaaaaagaaggagaaggctgctgcagccaaagttgaacttgtgaaagagagcactgaaaagaaaagagagaaaaaggtgctggacatcccctcaaagtatgactggtcaggagcagaggagtctgatgatgagaatgctgtgtgcgcagcacagaactgccaaaggccctgcaaggacaagggagttgtatttgtaacggaagaagagaagaataaaaaatattag

SEQ ID NO: 33935 - DNA, 10712 bp, Artificial Sequence
  derived and/or modified sequence
gcagaactttggcgggcaaggagacaaacagccacactgtgctgccggggaagagaagaagaaggaaaggccagacacacaggcgtcgtgcagctgcggaaggattccgtttcctgcagggggcggagggatttgacagcacggtaacttccggaaaagtcctgaacctcagtggaaaagccttgcaagaaacaataacaaacgggaggaggaagcgattctggggtttctgtgttgaacggttcttgtccgcgaagatgcgcttcggcctctgtcaggggacttgaacgggcttagtgggcttcagccagcttttctccaccggttccccacggggacccccccccccccccggccgttgcaatggcgggcgtggggccggggggctacgcggcggagttcgtgccaccgccagagtgccccgtctttgagccgagttgggaggagttcacagatccgctcagctttatcggccgcatccggcctttggcggagaaaaccggcatctgcaaaattcggccgcccaaggactggcagcctccatttgcctgtgaagtaaaaagctttcgtttcactccaagagtccagcgcctgaatgaacttgagattgttgccagcaaaggaggttttgaaatggtcaccaaagagaagaaatggtctaaagtgggtagtcgcttgggatatctgccaggaaaaggaactgggtctcttttgaagtcacattatgaaagaattctctacccatatgagcttttccagtctggtgtgagccttatgggtgtgcagatgcctaatttagatcttaaagaaaaagtggagcctgaggttctcagcactgatacccaaacttccccagagccaggcacaaggatgaacattctgccgaagagaacaagacgtgtgaagactcagtcagaatctggagatgtgagtagaaacacggaactgaagaaacttcagatttttggggctgggcccaaggttgtgggcttggcaatgggaacaaaagataaagaagatgaggtcacccgaagacgaaaagttaccaacaggtcagacgcatttaacatgcaaatgagacaacggaaaggcactctctctgttaactttgttgatctctatgtttgtatgttttgtggtcggggaaacaatgaagataaattgcttttgtgtgatggatgtgatgacagctatcatacattttgtctaattcctccactacctgatgtgcccaaaggagactggaggtgtcctaaatgtgtcgccgaggaatgtagcaaacctcgagaagcctttggatttgaacaagctgtacgagagtatacacttcagagctttggagagatggcagataattttaagtctgattattttaatatgccagtccatatggttcccacagaactagtagaaaaggaattttggcggctggtaagcagcattgaagaagatgttattgtggaatatggagcagatatctcctcaaaagactttggaagtggatttccggtgaaggatgggcggagaaagattctgccagaagaagaggaatatgcactttctggttggaatttgaataacatgcctgtcctggaacagtctgttcttgcacatattaatgtggacatctctggtatgaaagtgccgtggctctatgtgggaatgtgcttctcttctttttgctggcacattgaggatcactggagttattccatcaactacttgcactggggggagccaaagacatggtatggtgtgccatctcatgctgcagagcaactggaggaggtgatgagagagctggcccccgagttatttgaatcccagcctgatcttctgcatcagttagttaccatcatgaaccccaacgtgctaatggagcatggtgtgcctgtgtacaggaccaatcagtgtgctggcgagtttgttgtgacatttcctcgtgcctatcactctggatttaaccagggctacaactttgctgaagctgtgaacttctgtactgctgactggttgcccattggacgtcaatgtgtaaatcattaccgacgcctaaggcgccactgtgtcttttcacacgaggaactaattttcaagatggcagcagatccagaatgcttagatgtggggctggctgccatggtctgcaaagaattgactctcatgactgaagaagaaacacgattaagagagtctgttgtacagatgggtgtcctgatgtcagaagaagaagtgtttgaacttgttcctgatgatgagcggcagtgttcagcatgcagaaccacatgttttctctctgctctcacatgttcctgtaatcctgagcggcttgtatgtctctaccatccaactgatctgtgcccctgccccatgcagaagaaatgtcttagatatcgctacccattagaagacctcccttctctgctatatggtgtaaaagtcagggcacagtcctatgacacttgggtcagtcgtgttacagaagcattgtctgctaacttcaaccacaaaaaagatttgattgaattgcgagtaatgctggaagatgctgaggataggaaatacccagagaatgatctctttcgaaaactcagggatgctgtaaaagaagctgagacctgtgcttctgtggctcagctgcttctgagcaaaaagcagaaacacagacagagcccagatagtgggaggactcggaccaaactgacagtggaagaattgaaggcctttgtccaacaactttttagtcttccgtgtgtcatcagccaagctcggcaagtaaagaatctgctagatgatgtggaagagtttcatgaacgtgctcaggaggccatgatggatgaaaccccagattcttccaaactccagatgttgatagatatgggctctagtctctatgtggaactccctgaattaccacgactgaagcaagagctacaacaggctcggtggttggacgaagtaagactgaccttatcagatccgcaacaagtcactttggatgtcatgaagaagctgatagactctggggtagggttggcaccccaccatgctgtggagaaagcaatggctgaactacaggagctccttacagtctctgaacgatgggaagaaaaggctaaggtctgcctacaggcaagaccgaggcacagtgtggcaagtttagaaagcattgtgaatgaagccaagaacattccagcctttctacccaatgtgttgtccttgaaagaagccttacaaaaggctcgagaatggaccgctaaagtggaagctattcagagtggcagcaattacgcttatttggagcagcttgagagcttgtctgcgaaaggacgccctattcctgtgcgtcttgaagcactgccgcaagtggaatcacaggtagcagcagcacgggcatggagagaacggactgggcggacgtttcttaagaagaattctagccatacattgttacaggtgctgagcccccggaccgacattggtgtatatgggagtggcaaaaataggaggaaaaaagtaaaagaactaatagaaaaagaaaaagaaaaggatctggacctggagcctctgagtgatctggaggaaggattggaggaaaccagagatacagccatggtggtggcagttttcaaagaacgggagcaaaaagagattgaagccatgcattctctcagagcagccaacctagccaagatgacaatggtggaccgcatagaagaagtaaaattttgcatttgccgcaagacagccagtgggtttatgctacagtgtgagctctgcaaagactggttccataacagctgtgttcctcttcctaaatcaagttcccaaaaaaaaggatccagctggcaagctaaagaagtaaaattcctttgccctctttgtatgcggtctcgaaggcccaggctagagactattctgtcactcctggtatcccttcagaagttgcccgtacggttgcctgaaggagaggccctgcagtgtttgacagaacgtgctatgagttggcaagatagagcgcggcaggctctagccacagatgaactatcctctgccctggccaaactatctgtgttgagccagcgtatggtggaacaggcggctcgagaaaaaactgaaaagatcatcagtgcagaactccaaaaagcagctgccaatccagacttacagggacacttacctagtttccagcagtctgcttttaaccgggtggtgagcagtgtgtcatcttctcctcgacaaacaatggactatgatgatgaagaaacagactctgatgaagacattcgagagacatatggctacgacatgaaggacacagccagtgtgaagtcctctagtagtcttgaacccaatcttttttgtgatgaagagattcccatcaaatccgaggaggtggtgacccacatgtggacagcaccttcattttgtgcagagcatgcttattcttctgcttctaagagttgttctcaaggttctagcaccccaaggaaacaacctcggaagagccctttggtgccccgaagtttggaacctccagtgctggagttgtcacctggagctaaggcacaactggaagaacttatgatggttggagatctcctggaagtatctctggacgagactcaacacatatggcggattttgcaggccacacacccaccctctgaagacagattcttgcatatcatggaggatgacagcatggaagagaaaccactaaaagtgaaaggaaaggactcttcagagaagaaacggaaacggaagctagaaaaggtagagcaactttttggagaaggaaaacagaagtccaaggagttaaagaaaatggacaaacctagaaagaagaaattaaaattaggtgcagacaaatcaaaggagctgaataaactggccaagaaactagcaaaagaagaagagagaaagaaaaagaaggagaaggctgctgcagccaaagttgaacttgtgaaagagagcactgaaaagaaaagagagaaaaaggtgctggacatcccctcaaagtatgactggtcaggagcagaggagtctgatgatgagaatgctgtgtgcgcagcacagaactgccaaaggccctgcaaggacaaggtagactgggtacaatgtgatggtggctgtgatgagtggtttcatcaagtttgtgtgggtgtatctccagaaatggctgaaaatgaagattacatctgtataaactgtgcaaagaagcaggggccagttagcccaggtccagcaccacctccttccttcataatgagctacaaactaccaatggaggatcttaaagagaccagttagcagatgcttggttagtttgggacatggggggacatggaccacattgagaccttagtcatcaagtagagtggtttatatccacttggaatgttgcttccaaagatgaatggccttcagagaaagtccccttagtgctggcttcctctttgcatggactctgtgggttacattctctatcaacatatctatgcagagggtgtcttctttggtacaacagccaatatttcatgtctcctttgagtgtggtttactgcattaaggccagatgcttaattgagctctagggtggctggttagtattaatacattggtgtgctaacagggcatataggatgtggcttttgtccagctgatagtagttagaggcttacaacttaggagcagcaccaactgaaggtgctaattgcttggatctccttcattgggatagttggagagggattggagtaccactttccttccactgttacctggtacttaatgccctaaagatacaactaggagtaacagggccaaagttatttctgttagacgtcaaggaatggtatcacagtctattgacctcagcgatttgtgcttgtttgtgctagaagaacatcccaaataggagaacctctcacaagctggggcaggtcaccttatctttgtaagatgaggatatcatctagatcagaaatctgactagattggattctgaggagaagaacctactacaaggcaaggagccgttttttggctttgaaaagtcttgctgtcttgggtctacattttagggaagagcaggtacatggatccaggcttctgccaaaaaaaaaaagagaagaagatgacgatgatgaccagtcgtactatcttactgagccacagtgatgcatgcttttcggggaaaacttcattcacaagtattccagacaccaggcttcaggcatggccatgagcaagaccagcaaataacagctttttgccttgcagccctgaccccaatgtctgctgtttccaacactggtgatttctaactacggcccacagcagatgctgttgaataacaccatggcttcatcagaggatgtggggttgtagtacctctgggtgatgaagttgttttagtaaatccatttttaaaaaaaaaaaaggacttgtttttacttttttctaaatgtctctgactactgactgttctatacatagattatttttccttttttaatatacatatatgaatatataaatatatatatttactgttaccagcagcatatgacagagtttcaacatcaaaaatccatttgggggcttgctttttcttttttgctttaaaaaaaaaaatcccattccttctttgtagtacaaggagttagcactccctcctccatcccagcctgaccagatcttccattttgcttttgttcatatagataattatatgtcctttgtgtgttgggacttgtccctgtctgttgggaaacttggtctcactctagtctgtgctggctcttttttcttttgtgtgtgaatgtttgaaactatggtgctgtgtcctcttccctcctgttgtgttctctgttcttcttaaggtattaggtaagctgtatgtaaactcttattagaaggggactaatttttttttaaaggacaaaaaaaaaaatgactaaaaatagtgttttgtcatcactgtctggtgtctttattttggtttaaaaaaatctgtggtttgacttaaattcatcagttttccttttaaaggggggattggggtggacctagcaacagcttatagtttcctcttccctttttgccccagtctcttttaaagaactgtcttctagtaactagaagtgaaatgtactgtccagttacagtttgagtgggtatgagatttaactcaaaaggaatcttacaaaaaaaaagatgttttcttataaaatccaatttctgtaaatgttttctctgaagttcatactacctactttttattcattcttaatactgtataacattttgagtgttttgacttgttcagaggtttgttagtgttgctgtgcatatgtcttgaggtctcatctgaagtaagtttgtgtatgatcgaagatttcaatggatattgcaaggtaactaattaactgatttcataagttttcgttttgccaagctaacgattatcaattaagaatttcctctggttgatgttatacaagaaagcacaatattttttgcctgttgatcttctttgtaacagtcttcagatatttgtgggttaaaaattgaatgtaattttaagtgacagatgcctggaatacatttaaaatttttatttttccttcctaatcatccattaactattccactatcagtggagagtcatgaggatgctgagaaagtatgaatagcttcctgtcaccttctgacgttttgaaacttaaatatgtcttttcgttgatactgtgggattttctgtatttacttgacagtcatggaggatttggtatgacttgaccacaggtttagaccaaggctgagaagaacagaagggagaaattaatggcaaaacaaaaaatacacaaatctgcggttttggaattaatgaaacaagattcatctatttaaagaaatgttggtgttctaatacaaagcattattttcacttagagaaaattacttacttgctcccttctgtattgtaatattttgtattaagacatgatttaaaatgtctttctacccttatctcctctaaactgcaactgaagttgcaattcttcatcattagtattttaactctggcaaaggttatagaaagaaaaatggaaatatggtaggcctgtggtattcttaaaagctaagtcattagaactatgcagatccccaagtttaaaagtacaaatacagcaccagtagttagctttctagctgggggagaagacaggagatttttcttccacagatgtttattttgcttcctgataggtactgcagcaaagccatgttgatgtgtagatgcatgacttcctcactaagctgctgcacaccagctttgcctgcatgattcaaatttgtgcctcagtaaaattataaattattgcatgtcataccttgaataatggaaacggcaaacattaaacctgtgattacccataatgtactttaataataaaaaacatggcagccaggtgcagtagagtgcacctgtggtcaggaggctgaagtgggaagattgcttcaacctgtgagtttgagtcccgcctggtcaacagcgagaccccatgtgtctgtctgtctctctctttttttaaaggacagaggctaagctgtaaggttagcatggttctgcctgggctttgcttctgtgcttctgtgcaggctgagctgtaaggttagcatggttctgcctgggctttgcttctgcgcttctgtgcaggctgagctgtaaggttagcatggttctgcctgggctttgcttctgcgcttctgtgcaggctgagctgtaaggttagcatggttctgcctgggctttgcttctgcgcttctgtgctagcaggtgcccacaaaatgtctttttgaatttcttaatttttgggttctggatgcaattcgtgcacgccaagaaactacttgcttgtcagtattttaattctgtagtacatgtgtgtgaatatcagccagtacttacagtaggaggatgaacagaaaaactgagaagacctgtctttcaaaagatgggtttatccactttttaagggaaaaagtgacagtttggcatgggatttgaaaagtggaaattgtggaaaaattgagctgttgaagtcccacatataaccagatttaataaagcttcacatgtgaattagctccatatgtgtgtagaaggttgcttttatagcaggtccttaagtactccttttgaaattcctcctttttttttaagtcataccattacttctttggatatgaatgtcccaagtggtatctcctactgtagtatgaggaagaatggctgttaatgtattttttgaattttggtcttgtcttggcctggatcatatccagtcaccactatgcaacaaatgatgtgcactgggcaaggatatgatgggttatgaaagctgtatcttgtttgttttttcttttgcagtactccaagtggtctaaacaggaatgtcttgtaaaacctcaagactccctattgattattcccttacatatttatttacaatttatcagggtaattggtggtgccttatgaaaagtataactcgatttcttgatctttgagcatgttttgtgtttcttgtgttttctaaaagaatattagatatggttaattgcattacatctaaaagatttaaaaaattgtgtgtatgctcaggttccccacacccatacccaccctaacccctgtcatttacattggtggcaactttaaatggtaaccaagcaaaagtacattttgataatgagtattgataatcctgaggaaaactagtgagtatatgggagccacctttgacctgtgccaaagcagtttctaatttcatttgctaactataaaataaagaactgagccaaaataatttgatcagtggtgtgattagcctattatcattgctgagaatagtgtttttggagtgtgaagtgattcctgaagatttcacctgccttctgtttccagcaagaatccagtgatgaccaacacatttcctcacttttggttcttgagaagtttatccctttgcaacaaaccattaatagggaaaacaaggaaatgctttccctttctctttggcttcttaaagctcacaaccaattcagaccccaagttacttcagagaagcaaatggcaccttttccccattgccaaggatcccagcttatgcagatatgaaggacggatcatttctgaaaatgttaagactctgcttgcagtggacttggcctcagtttcatgaaatgtgtaactctgtatgtgtatgttaggaggagggttggttgaaagagcgggggcagggaggggaatctgattacctcttgggaaataattttcttgccaacaaaaagatacacttgaagtttcttaaggtggcaagtccattaaaaaaaaaaattgtgttggaccctcccagtttagatcaagtatttcttgggggtcttgctattgtggttgataccaataaatggaagatccagaatattttcatttaaagctcaaccattaattggaacatggtgaaacattgtacacattgtaaaagtagggaacagtacaaaagaatggaatcaaatactatattatgtgaataaactagagtgattttggaatttcactctcttcaccccttctcacttgtatgttctgtaaagtgtatttctactttggtaggaagaaagacttgatttaatatttc

SEQ ID NO: 33936 - DNA, 10763 bp, Artificial Sequence
  derived and/or modified sequence
gcagaactttggcgggcaaggagacaaacagccacactgtgctgccggggaagagaagaagaaggaaaggccagacacacaggcgtcgtgcagctgcggaaggattccgtttcctgcagggggcggagggatttgacagcacggtaacttccggaaaagtcctgaacctcagtggaaaagccttgcaagaaacaataacaaacgggaggaggaagcgattctggggtttctgtgttgaacggttcttgtccgcgaagatgcgcttcggcctctgtcaggggacttgaacgggcttagtgggcttcagccagcttttctccaccggttccccacggggacccccccccccccccggccgttgcaatggcgggcgtggggccggggggctacgcggcggagttcgtgccaccgccagagtgccccgtctttgagccgagttgggaggagttcacagatccgctcagctttatcggccgcatccggcctttggcggagaaaaccggcatctgcaaaattcggccgcccaaggactggcagcctccatttgcctgtgaagtaaaaagctttcgtttcactccaagagtccagcgcctgaatgaacttgaggcaatgaccagagtgagattggatttcttggatcaactagcaaaattttgggaacttcaaggatctactctgaagatccctgtggtagagagaaaaatcctggatctgtatgctttgagcaagattgttgccagcaaaggaggttttgaaatggtcaccaaagagaagaaatggtctaaagtgggtagtcgcttgggatatctgccaggaaaaggaactgggtctcttttgaagtcacattatgaaagaattctctacccatatgagcttttccagtctggtgtgagccttatgggtgtgcagatgcctaatttagatcttaaagaaaaagtggagcctgaggttctcagcactgatacccaaacttccccagagccaggcacaaggatgaacattctgccgaagagaacaagacgtgtgaagactcagtcagaatctggagatgtgagtagaaacacggaactgaagaaacttcagatttttggggctgggcccaaggttgtgggcttggcaatgggaacaaaagataaagaagatgaggtcacccgaagacgaaaagttaccaacaggtcagacgcatttaacatgcaaatgagacaacggaaaggcactctctctgttaactttgttgatctctatgtttgtatgttttgtggtcggggaaacaatgaagataaattgcttttgtgtgatggatgtgatgacagctatcatacattttgtctaattcctccactacctgatgtgcccaaaggagactggaggtgtcctaaatgtgtcgccgaggaatgtagcaaacctcgagaagcctttggatttgaacaagctgtacgagagtatacacttcagagctttggagagatggcagataattttaagtctgattattttaatatgccagtccatatggttcccacagaactagtagaaaaggaattttggcggctggtaagcagcattgaagaagatgttattgtggaatatggagcagatatctcctcaaaagactttggaagtggatttccggtgaaggatgggcggagaaagattctgccagaagaagaggaatatgcactttctggttggaatttgaataacatgcctgtcctggaacagtctgttcttgcacatattaatgtggacatctctggtatgaaagtgccgtggctctatgtgggaatgtgcttctcttctttttgctggcacattgaggatcactggagttattccatcaactacttgcactggggggagccaaagacatggtatggtgtgccatctcatgctgcagagcaactggaggaggtgatgagagagctggcccccgagttatttgaatcccagcctgatcttctgcatcagttagttaccatcatgaaccccaacgtgctaatggagcatggtgtgcctgtgtacaggaccaatcagtgtgctggcgagtttgttgtgacatttcctcgtgcctatcactctggatttaaccagggctacaactttgctgaagctgtgaacttctgtactgctgactggttgcccattggacgtcaatgtgtaaatcattaccgacgcctaaggcgccactgtgtcttttcacacgaggaactaattttcaagatggcagcagatccagaatgcttagatgtggggctggctgccatggtctgcaaagaattgactctcatgactgaagaagaaacacgattaagagagtctgttgtacagatgggtgtcctgatgtcagaagaagaagtgtttgaacttgttcctgatgatgagcggcagtgttcagcatgcagaaccacatgttttctctctgctctcacatgttcctgtaatcctgagcggcttgtatgtctctaccatccaactgatctgtgcccctgccccatgcagaagaaatgtcttagatatcgctacccattagaagacctcccttctctgctatatggtgtaaaagtcagggcacagtcctatgacacttgggtcagtcgtgttacagaagcattgtctgctaacttcaaccacaaaaaagatttgattgaattgcgagtaatgctggaagatgctgaggataggaaatacccagagaatgatctctttcgaaaactcagggatgctgtaaaagaagctgagacctgtgcttctgtggctcagctgcttctgagcaaaaagcagaaacacagacagagcccagatagtgggaggactcggaccaaactgacagtggaagaattgaaggcctttgtccaacaactttttagtcttccgtgtgtcatcagccaagctcggcaagtaaagaatctgctagatgatgtggaagagtttcatgaacgtgctcaggaggccatgatggatgaaaccccagattcttccaaactccagatgttgatagatatgggctctagtctctatgtggaactccctgaattaccacgactgaagcaagagctacaacaggctcggtggttggacgaagtaagactgaccttatcagatccgcaacaagtcactttggatgtcatgaagaagctgatagactctggggtagggttggcaccccaccatgctgtggagaaagcaatggctgaactacaggagctccttacagtctctgaacgatgggaagaaaaggctaaggtctgcctacaggcaagaccgaggcacagtgtggcaagtttagaaagcattgtgaatgaagccaagaacattccagcctttctacccaatgtgttgtccttgaaagaagccttacaaaaggctcgagaatggaccgctaaagtggaagctattcagagtggcagcaattacgcttatttggagcagcttgagagcttgtctgcgaaaggacgccctattcctgtgcgtcttgaagcactgccgcaagtggaatcacaggtagcagcagcacgggcatggagagaacggactgggcggacgtttcttaagaagaattctagccatacattgttacaggtgctgagcccccggaccgacattggtgtatatgggagtggcaaaaataggaggaaaaaagtaaaagaactaatagaaaaagaaaaagaaaaggatctggacctggagcctctgagtgatctggaggaaggattggaggaaaccagagatacagccatggtggtggcagttttcaaagaacgggagcaaaaagagattgaagccatgcattctctcagagcagccaacctagccaagatgacaatggtggaccgcatagaagaagtaaaattttgcatttgccgcaagacagccagtgggtttatgctacagtgtgagctctgcaaagactggttccataacagctgtgttcctcttcctaaatcaagttcccaaaaaaaaggatccagctggcaagctaaagaagtaaaattcctttgccctctttgtatgcggtctcgaaggcccaggctagagactattctgtcactcctggtatcccttcagaagttgcccgtacggttgcctgaaggagaggccctgcagtgtttgacagaacgtgctatgagttggcaagatagagcgcggcaggctctagccacagatgaactatcctctgccctggccaaactatctgtgttgagccagcgtatggtggaacaggcggctcgagaaaaaactgaaaagatcatcagtgcagaactccaaaaagcagctgccaatccagacttacagggacacttacctagtttccagcagtctgcttttaaccgggtggtgagcagtgtgtcatcttctcctcgacaaacaatggactatgatgatgaagaaacagactctgatgaagacattcgagagacatatggctacgacatgaaggacacagccagtgtgaagtcctctagtagtcttgaacccaatcttttttgtgatgaagagattcccatcaaatccgaggaggtggtgacccacatgtggacagcaccttcattttgtgcagagcatgcttattcttctgcttctaagagttgttctcaaggttctagcaccccaaggaaacaacctcggaagagccctttggtgccccgaagtttggaacctccagtgctggagttgtcacctggagctaaggcacaactggaagaacttatgatggttggagatctcctggaagtatctctggacgagactcaacacatatggcggattttgcaggccacacacccaccctctgaagacagattcttgcatatcatggaggatgacagcatggaagagaaaccactaaaagtgaaaggaaaggactcttcagagaagaaacggaaacggaagctagaaaaggtagagcaactttttggagaaggaaaacagaagtccaaggagttaaagaaaatggacaaacctagaaagaagaaattaaaattaggtgcagacaaatcaaaggagctgaataaactggccaagaaactagcaaaagaagaagagagaaagaaaaagaaggagaaggctgctgcagccaaagttgaacttgtgaaagagagcactgaaaagaaaagagagaaaaaggtgctggacatcccctcaaagtatgactggtcaggagcagaggagtctgatgatgagaatgctgtgtgcgcagcacagaactgccaaaggccctgcaaggacaaggtagactgggtacaatgtgatggtggctgtgatgagtggtttcatcaagtttgtgtgggtgtatctccagaaatggctgaaaatgaagattacatctgtataaactgtgcaaagaagcaggggccagttagcccaggtccagcaccacctccttccttcataatgagctacaaactaccaatggaggatcttaaagagaccagttagcagatgcttggttagtttgggacatggggggacatggaccacattgagaccttagtcatcaagtagagtggtttatatccacttggaatgttgcttccaaagatgaatggccttcagagaaagtccccttagtgctggcttcctctttgcatggactctgtgggttacattctctatcaacatatctatgcagagggtgtcttctttggtacaacagccaatatttcatgtctcctttgagtgtggtttactgcattaaggccagatgcttaattgagctctagggtggctggttagtattaatacattggtgtgctaacagggcatataggatgtggcttttgtccagctgatagtagttagaggcttacaacttaggagcagcaccaactgaaggtgctaattgcttggatctccttcattgggatagttggagagggattggagtaccactttccttccactgttacctggtacttaatgccctaaagatacaactaggagtaacagggccaaagttatttctgttagacgtcaaggaatggtatcacagtctattgacctcagcgatttgtgcttgtttgtgctagaagaacatcccaaataggagaacctctcacaagctggggcaggtcaccttatctttgtaagatgaggatatcatctagatcagaaatctgactagattggattctgaggagaagaacctactacaaggcaaggagccgttttttggctttgaaaagtcttgctgtcttgggtctacattttagggaagagcaggtacatggatccaggcttctgccaaaaaaaaaaagagaagaagatgacgatgatgaccagtcgtactatcttactgagccacagtgatgcatgcttttcggggaaaacttcattcacaagtattccagacaccaggcttcaggcatggccatgagcaagaccagcaaataacagctttttgccttgcagccctgaccccaatgtctgctgtttccaacactggtgatttctaactacggcccacagcagatgctgttgaataacaccatggcttcatcagaggatgtggggttgtagtacctctgggtgatgaagttgttttagtaaatccatttttaaaaaaaaaaaaggacttgtttttacttttttctaaatgtctctgactactgactgttctatacatagattatttttccttttttaatatacatatatgaatatataaatatatatatttactgttaccagcagcatatgacagagtttcaacatcaaaaatccatttgggggcttgctttttcttttttgctttaaaaaaaaaaatcccattccttctttgtagtacaaggagttagcactccctcctccatcccagcctgaccagatcttccattttgcttttgttcatatagataattatatgtcctttgtgtgttgggacttgtccctgtctgttgggaaacttggtctcactctagtctgtgctggctcttttttcttttgtgtgtgaatgtttgaaactatggtgctgtgtcctcttccctcctgttgtgttctctgttcttcttaaggtattaggtaagctgtatgtaaactcttattagaaggggactaatttttttttaaaggacaaaaaaaaaaatgactaaaaatagtgttttgtcatcactgtctggtgtctttattttggtttaaaaaaatctgtggtttgacttaaattcatcagttttccttttaaaggggggattggggtggacctagcaacagcttatagtttcctcttccctttttgccccagtctcttttaaagaactgtcttctagtaactagaagtgaaatgtactgtccagttacagtttgagtgggtatgagatttaactcaaaaggaatcttacaaaaaaaaagatgttttcttataaaatccaatttctgtaaatgttttctctgaagttcatactacctactttttattcattcttaatactgtataacattttgagtgttttgacttgttcagaggtttgttagtgttgctgtgcatatgtcttgaggtctcatctgaagtaagtttgtgtatgatcgaagatttcaatggatattgcaaggtaactaattaactgatttcataagttttcgttttgccaagctaacgattatcaattaagaatttcctctggttgatgttatacaagaaagcacaatattttttgcctgttgatcttctttgtaacagtcttcagatatttgtgggttaaaaattgaatgtaattttaagtgacagatgcctggaatacatttaaaatttttatttttccttcctaatcatccattaactattccactatcagtggagagtcatgaggatgctgagaaagtatgaatagcttcctgtcaccttctgacgttttgaaacttaaatatgtcttttcgttgatactgtgggattttctgtatttacttgacagtcatggaggatttggtatgacttgaccacaggtttagaccaaggctgagaagaacagaagggagaaattaatggcaaaacaaaaaatacacaaatctgcggttttggaattaatgaaacaagattcatctatttaaagaaatgttggtgttctaatacaaagcattattttcacttagagaaaattacttacttgctcccttctgtattgtaatattttgtattaagacatgatttaaaatgtctttctacccttatctcctctaaactgcaactgaagttgcaattcttcatcattagtattttaactctggcaaaggttatagaaagaaaaatggaaatatggtaggcctgtggtattcttaaaagctaagtcattagaactatgcagatccccaagtttaaaagtacaaatacagcaccagtagttagctttctagctgggggagaagacaggagatttttcttccacagatgtttattttgcttcctgataggtactgcagcaaagccatgttgatgtgtagatgcatgacttcctcactaagctgctgcacaccagctttgcctgcatgattcaaatttgtgcctcagtaaaattataaattattgcatgtcataccttgaataatggaaacggcaaacattaaacctgtgattacccataatgtactttaataataaaaaacatggcagccaggtgcagtagagtgcacctgtggtcaggaggctgaagtgggaagattgcttcaacctgtgagtttgagtcccgcctggtcaacagcgagaccccatgtgtctgtctgtctctctctttttttaaaggacagaggctaagctgtaaggttagcatggttctgcctgggctttgcttctgtgcttctgtgcaggctgagctgtaaggttagcatggttctgcctgggctttgcttctgcgcttctgtgcaggctgagctgtaaggttagcatggttctgcctgggctttgcttctgcgcttctgtgcaggctgagctgtaaggttagcatggttctgcctgggctttgcttctgcgcttctgtgctagcaggtgcccacaaaatgtctttttgaatttcttaatttttgggttctggatgcaattcgtgcacgccaagaaactacttgcttgtcagtattttaattctgtagtacatgtgtgtgaatatcagccagtacttacagtaggaggatgaacagaaaaactgagaagacctgtctttcaaaagatgggtttatccactttttaagggaaaaagtgacagtttggcatgggatttgaaaagtggaaattgtggaaaaattgagctgttgaagtcccacatataaccagatttaataaagcttcacatgtgaattagctccatatgtgtgtagaaggttgcttttatagcaggtccttaagtactccttttgaaattcctcctttttttttaagtcataccattacttctttggatatgaatgtcccaagtggtatctcctactgtagtatgaggaagaatggctgttaatgtattttttgaattttggtcttgtcttggcctggatcatatccagtcaccactatgcaacaaatgatgtgcactgggcaaggatatgatgggttatgaaagctgtatcttgtttgttttttcttttgcagtactccaagtggtctaaacaggaatgtcttgtaaaacctcaagactccctattgattattcccttacatatttatttacaatttatcagggtaattggtggtgccttatgaaaagtataactcgatttcttgatctttgagcatgttttgtgtttcttgtgttttctaaaagaatattagatatggttaattgcattacatctaaaagatttaaaaaattgtgtgtatgctcaggttccccacacccatacccaccctaacccctgtcatttacattggtggcaactttaaatggtaaccaagcaaaagtacattttgataatgagtattgataatcctgaggaaaactagtgagtatatgggagccacctttgacctgtgccaaagcagtttctaatttcatttgctaactataaaataaagaactgagccaaaataatttgatcagtggtgtgattagcctattatcattgctgagaatagtgtttttggagtgtgaagtgattcctgaagatttcacctgccttctgtttccagcaagaatccagtgatgaccaacacatttcctcacttttggttcttgagaagtttatccctttgcaacaaaccattaatagggaaaacaaggaaatgctttccctttctctttggcttcttaaagctcacaaccaattcagaccccaagttacttcagagaagcaaatggcaccttttccccattgccaaggatcccagcttatgcagatatgaaggacggatcatttctgaaaatgttaagactctgcttgcagtggacttggcctcagtttcatgaaatgtgtaactctgtatgtgtatgttaggaggagggttggttgaaagagcgggggcagggaggggaatctgattacctcttgggaaataattttcttgccaacaaaaagatacacttgaagtttcttaaggtggcaagtccattaaaaaaaaaaattgtgttggaccctcccagtttagatcaagtatttcttgggggtcttgctattgtggttgataccaataaatggaagatccagaatattttcatttaaagctcaaccattaattggaacatggtgaaacattgtacacattgtaaaagtagggaacagtacaaaagaatggaatcaaatactatattatgtgaataaactagagtgattttggaatttcactctcttca

SEQ ID NO: 33937 - DNA, 2148 bp, Artificial Sequence
  derived and/or modified sequence
atggccggcgtgggccccggcggctacgccgccgagttcgtgccccctccggaatgcccagtgttcgagccatcttgggaggaattcactgatcctctgtcattcatcggccgtatccgccctttggcagagaaaacggggatttgcaagatcaggcctcccaaggagtatgcactgagtggctggaatcttaacaacatgccagtgctcgaacagagcgtgctagcccatattaatgtggacatttccggaatgaaagtcccctggctatacgtgggcatgtgtttctcctcattctgttggcacattgaggatcactggtcgtacagcataaactatcttcactggggcgaaccaaagacttggtatggtgtcccttcccacgctgcggaacaacttgaggaagtaatgcgagagctcgctcccgagctttttgaatcgcaacctgaccttctgcatcagctggtgactattatgaacccaaacgtgttgatggagcatggagtgccagtgtacagaacaaatcagtgcgccggggagtttgttgtaacattcccgagagcctatcacagcggtttcaaccaaggttacaactttgccgaggctgtgaatttctgcacggctgactggctccctatcggtcgtcagtgtgtgaatcactaccgacgactcaggaggcactgtgtattctctcacgaggaactgatatttaaaatggctgctgacccggagtgccttgatgttgggctcgctgccatggtgtgcaaggagttaacccttatgacagaagaagagactaggctgcgagagtctgtggtgcaaatgggcgtcctgatgtccgaggaggaagtctttgagctcgttcctgacgacgaaaggcagtgtagcgcgtgccgcacgacctgcttcctgtcagccctcacctgcagttgcaatcccgaacgcctcgtttgtttgtaccacccaaccgacctatgcccctgtccaatgcagaagaagtgtctgcgatacaggtatcccttggaggacctgccatctctgctgtatggcgtcaaagtgagggcgcagagctatgatacctgggtatcaagagtgacagaggccctttcggcaaactttaaccataagaaagacttgatagagttgcgggtaatgcttgaggacgctgaggaccggaaatatccagaaaacgatctcttcagaaaactgcgtgatgcagtgaaggaggccgagacatgtgccagcgtggcccaactgctgctcagcaagaagcagaagcacaggcagtcccctgactccggaaggacacgtaccaagctgacagtggaggagctgaaagcttttgtgcagcagctcttcagcctgccttgcgtcatttctcaggcaagacaagtcaagaatcttctggatgacgtagaggagttccatgagagggcccaggaagccatgatggatgagacgcccgactctagtaaattacaaatgctcatcgacatgggaagcagtctgtacgttgagctgcccgaattgcccagattaaagcaggaattgcaacaggcacgctggctagatgaagttcgccttaccctgtctgaccctcaacaagtcacattggatgtcatgaaaaagttaatcgacagcggggtgggtctggcacctcatcacgctgtggaaaaagccatggcagagctgcaagagctccttaccgtttccgagagatgggaagagaaagccaaggtctgtttgcaggcccgaccccgccattctgtggcgtctcttgaatctatcgtaaacgaagccaagaacattcctgcatttctgccaaatgtcctcagcctcaaggaagctctgcagaaggcacgagaatggaccgccaaggtggaggcaatacaatcaggtagcaactatgcctacctagaacagttagaatccctttccgccaaaggcaggcccattccagtcaggctcgaagcgctaccgcaggtcgaatcccaggtggccgccgcaagagcatggcgcgaacgcacagggcgtactttcctcaaaaaaaattccagccatactctcctgcaagtgctcagccctcgcacagatatcggagtttatggctccggaaaaaacaggcgcaagaaagttaaggagctgtag

SEQ ID NO: 33938 - DNA, 4911 bp, Artificial Sequence
  derived and/or modified sequence
atggccggcgtgggccccggcggctacgccgccgagttcgtgccccctccagagtgcccagtttttgagccgtcttgggaggaatttacagatcctctctcattcattgggcgaatcaggccccttgccgaaaaaacagggatctgtaaaatccggcctccaaaggattggcagcctccttttgcttgtgaagtcaagtcgttcagatttactcccagggtgcagagattaaacgagctggaggccatgactagagtgagattagacttcttggatcaactggctaaattctgggagctccaggggtccacgttgaagattcccgtggtagagcgcaagatcctggacttgtacgctctaagcaagatcgtggcgagtaagggcggatttgaaatggtaacaaaagagaagaaatggagcaaggtgggttctagactaggctatttgccaggtaaaggtacgggaagcctgctgaagagccactacgaaaggattctgtacccatacgagctatttcagagtggcgtctctttgatgggcgtgcagatgccaaatctcgacctgaaggaaaaagtcgagcctgaggttctgagtaccgatacccaaaccagcccggaaccaggcacccggatgaacatcttacccaagcggacaagaagggtcaagacgcagagcgagtccggcgatgtgtcccggaacactgaactaaaaaaactgcagatttttggggcaggaccaaaagtagtgggtcttgcgatgggcacaaaagacaaagaagatgaggtcacacgcagacgcaaagtcaccaatagaagcgacgctttcaatatgcagatgcgccagagaaagggaacgctgtcagtgaatttcgtggatctgtacgtgtgtatgttttgtggccgcggcaacaacgaggacaaactgttgctctgtgacggatgcgatgattcctatcatactttttgtctgataccccctctccccgatgttccaaagggcgattggcgttgcccgaaatgtgtggccgaggagtgctccaagccccgcgaagccttcgggttcgaacaggcagtcagggaatataccctgcagtcctttggggaaatggccgataatttcaagtcggactacttcaacatgcctgtccatatggttcctaccgagttagttgaaaaagaattctggaggcttgtcagcagcatcgaggaggatgtgatcgttgagtacggggccgatatctcgtctaaggactttggcagcggattccccgtgaaggacgggaggaggaaaatcctgcccgaggaggaggagtacgccctgagcggctggaatctcaacaacatgccagttttggagcagtctgttctggcgcacattaacgtagatatcagcggaatgaaggttccctggctgtacgtcggaatgtgcttctcgtccttctgctggcacatcgaggaccactggtcgtattccattaattacctgcactggggagagcctaaaacctggtacggggttccatcccatgctgcagaacagctggaagaagtcatgcgggagctggccccggagttgttcgaaagtcagccagatctgctgcatcaactggtgactataatgaatcccaatgtattaatggaacatggagtgccagtataccgcactaatcagtgcgctggcgaatttgtggtgacattccctcgggcatatcactccggattcaaccaaggatacaattttgccgaggccgtcaacttttgtaccgctgactggctgcccattggccgccagtgcgtcaatcattaccggagactacgccggcactgcgtgttttcccacgaagagctgattttcaagatggctgctgaccctgagtgtcttgatgtcgggttggcggccatggtttgtaaggagttgacactgatgactgaggaggaaactcgcttgagagagtcagtcgtgcagatgggagtactgatgagcgaagaagaggtgtttgagctggtccccgatgacgaacgccagtgctcggcatgcaggactacgtgcttcttgtccgcactcacatgctcatgtaatcccgaacgcttagtctgcctatatcacccaaccgacttgtgcccttgccctatgcagaaaaaatgtttgcggtaccgctatccattggaagacctgccttccctgctttatggcgtgaaggtgcgtgctcagtcttacgacacctgggtttcccgagtgacagaagccttgtctgccaactttaatcataagaaggatctaatcgagcttcgcgtgatgctcgaggacgctgaagatcggaaatatccagaaaatgatctgtttcggaagctgagggatgctgtgaaggaagccgaaacctgtgcatccgtggctcaattgctcttgagcaagaagcaaaagcacagacaatcaccagactcgggccgcacccgtactaagctgacagttgaggagctaaaggcatttgtacagcaattgttcagtttaccctgtgtcattagtcaggctcggcaggtgaagaatctactggacgacgtggaagagttccacgagagggcccaggaggctatgatggacgagacccctgactcctctaagcttcaaatgctgattgacatgggcagttcattgtacgtcgaactgccagagttaccacggttgaagcaggaattgcagcaggctagatggctcgatgaagtgcgcctgactctgtccgatccacaacaagtgactctggatgttatgaaaaagctaattgacagtggcgtggggctggccccccaccacgccgtggagaaggcgatggcagagctccaagaactgcttaccgtctctgagagatgggaagaaaaagctaaggtttgccttcaggctcgccctaggcactcagtggcctccctggagtcgattgtgaacgaggcgaaaaacatccccgcctttctgccgaacgtgctgagtctgaaagaagctctacagaaggcaagagagtggaccgccaaggtagaggccatacagagcggctcgaattatgcttatttggaacagctggaatccttgtcggctaaggggcgccccatcccggttcgattggaggccctgccccaggtcgagagtcaggtagcagcggccagagcatggcgggagcgcacgggccggacctttctcaagaagaactcttcccacaccctgctgcaggtgctgtccccaaggacagacattggtgtatacggatctggtaagaatagacggaagaaagtaaaagagctgattgagaaagaaaaagagaaagatctggacctggaaccactctccgatctggaggaaggcctggaggagacgcgcgacacagcaatggtagtggcggtttttaaggaaagagaacagaaggagatcgaggcgatgcatagcctcagagctgctaacttagcgaaaatgaccatggtcgatcggatagaggaggtcaagttttgtatctgtaggaagaccgccagcgggttcatgcttcagtgtgagttatgcaaagattggttccataatagctgcgtgcctttgcccaagagctctagtcagaaaaaaggaagctcatggcaggccaaggaagttaagtttctgtgtcctctgtgtatgaggtcacggagacccaggctggaaaccatcctgagcttgctggtcagcctccaaaagcttcctgtgaggctgcccgagggcgaggccttgcagtgcctgacagagagagccatgagctggcaggacagagcccgtcaggcactggcaactgatgagctctcctctgctttggccaagctttcagtgctcagccagaggatggtcgagcaggcagcccgcgagaagactgagaagatcatctccgctgaattacagaaggccgccgccaatcctgacctccaggggcacttgccttccttccagcaatcagcattcaacagagtggtctccagcgtcagttcgtccccccgacagacaatggactatgacgatgaggagacagactccgacgaagatattcgggagacatatgggtatgatatgaaggatacggccagtgtgaagtcaagtagctctttagaacctaatctgttctgtgacgaagagattccgataaaaagcgaggaagtggtgacgcacatgtggactgcaccaagcttttgcgcagagcacgcctacagtagtgcctcaaagagttgtagccaggggtcctcaacgcctcggaagcaacccagaaagagccctttggtaccacggtcattggagccccccgttctggagctgtccccgggagcaaaggctcagctggaagaacttatgatggtgggagatcttctggaggtttccctcgatgagacacagcacatttggaggattcttcaggccacccatccgcccagcgaagatcgttttctgcacatcatggaggacgatagcatggaggaaaagcccctgaaagtgaaaggaaaagattccagcgagaagaagcgcaagaggaaactcgagaaggtcgaacagctattcggggaggggaagcagaaaagcaaagagctcaagaagatggacaaaccacgaaaaaagaagttgaagctaggagccgacaaatcgaaggaattgaataagttggcaaagaaactggccaaagaggaggagcggaagaaaaaaaaggaaaaagctgccgcagcaaaggtggagctcgtgaaagagtcaactgagaagaagcgggagaagaaagtcctggacatcccctcaaaatacgactggtccggagccgaggagagtgatgacgaaaacgccgtgtgcgccgcgcagaactgccagcgaccatgcaaggacaagggcgtggtgttcgtgactgaggaagagaagaacaaaaaatattag

SEQ ID NO: 33939 - DNA, 3150 bp, Artificial Sequence
  derived and/or modified sequence
atggccggcgtgggccccggcggctacgccgccgagttcgtgccccctcccgagtgtccggtgttcgaaccttcctgggaggaatttaccgacccactaagcttcatcggtaggattagaccgctggcagaaaagactgggatctgcaagatcaggccccccaaagattggcagccaccttttgcctgcgaagtcaaatctttcaggttcactcctcgcgtgcagcgcctgaacgagctggagattgtggcgtccaagggaggctttgaaatggttacaaaggaaaagaagtggtccaaggttgggtctagacttggatacctgcctggaaaaggaacaggatcactcctcaagtctcactatgagaggatcctctatccctatgagctcttccagtctggagtgtccctgatgggcgtacagatgcccaacctagatctcaaagagaaagtggagcccgaggttttgtcaactgacacacagacctcgcctgaacccggcacccgaatgaatatcctcccaaagcgtacaagacgggttaagacacagtccgagagcggagacgtctctaggaacacagagctgaaaaagttgcagatatttggtgccggcccaaaggtggtcggactggcgatgggtaccaaagacaaagaagacgaagtgacccggcggcggaaggttaccaaccggagcgacgcgttcaacatgcagatgcgccagaggaagggtactctgtctgtcaattttgtagacctgtatgtgtgcatgttttgtgggcgcggaaataacgaggacaagttgcttttgtgcgatggctgtgacgattcttaccataccttctgcctgatccctccccttccagacgttccaaagggggactggcgatgtcccaagtgcgtggccgaggaatgtagcaagccacgggaagccttcggatttgagcaggccgtgcgtgagtacactttgcaatcgttcggagaaatggccgacaattttaagagcgactactttaatatgcccgtgcacatggttcccactgaactagttgaaaaggaattctggcggctggtcagctctatcgaagaagacgtgatagtcgagtacggcgctgacatatcttcaaaggactttggtagcgggtttcctgtaaaagatggtaggcggaagattctgccggaggaggaggaatacgcactgagtggatggaacttgaataatatgcccgtactggagcagagcgttctggcccacatcaacgtggacatcagcggcatgaaagttccctggctttacgtgggaatgtgctttagttctttttgctggcacatagaagatcactggagttacagtatcaactacctccattggggagagccaaagacttggtatggagtgcccagccacgcggctgagcaattggaagaagtgatgcgtgagttagcacccgaactcttcgagagccaacccgatctcctgcaccagctggttaccattatgaacccaaacgtcctgatggagcacggcgtgccggtttataggactaatcagtgcgctggtgaatttgtggtcacttttcctagagcctaccacagcgggtttaatcagggctacaatttcgccgaagcagtgaacttttgcacagctgactggctccctatcggccgccagtgcgttaaccactatcgccgtttacgacgccattgtgtgttcagtcacgaggaattaatttttaaaatggcagccgatcccgagtgtctcgacgtcggactggcagctatggtctgtaaagaattgaccctgatgaccgaggaagaaacccgtctgagagagtccgtggtccagatgggagttctgatgagtgaggaagaggttttcgagctggtgcctgacgacgaacggcagtgtagcgcttgtagaaccacatgcttcctctcagccctaacatgttcttgcaatcccgaacgcctggtgtgcctttatcacccgacagacctgtgtccttgtcctatgcaaaaaaagtgtcttcgctaccgctatccgttggaggaccttccctccctgctctatggagtcaaagttagagcccagtcctacgacacctgggtatcgagggtgactgaagccctgtcagccaacttcaaccataagaaggatctgatcgaactaagagttatgctggaggatgcagaggaccggaaatatccagaaaacgatctttttcggaaacttagggacgctgtaaaagaggcagagacctgtgctagcgtcgcccagcttttactaagtaagaaacagaaacatcggcagagccctgactctggccggaccaggacaaagcttaccgtggaggaactgaaggcatttgtccagcaactattttcgttaccttgcgtcattagtcaagccagacaggtcaaaaatctgctggacgacgtggaggaatttcatgaacgggcccaggaggcgatgatggacgagactccagactcgtctaaactgcagatgttaatagacatgggctcttcattgtatgtggaactgccagaactgccccgcctgaagcaggaactacagcaagcaagatggctggatgaggttagactgaccctgtctgatccgcagcaggtcaccctagatgtgatgaagaaacttatcgactccggcgtgggactggccccacaccacgccgtggagaaagccatggctgaactccaggaactactcaccgtcagcgaaaggtgggaggagaaagctaaggtttgtctccaggcacgtccgcggcacagcgtggctagtttggagtcaatagtgaacgaggctaaaaatatcccagcgtttctgccaaacgttctcagtctcaaagaggccctccagaaggcgcgcgagtggacagcaaaagtggaggccattcagtccggatctaattatgcatatctggaacagctggaatctctttccgccaagggcagacccattcccgttcgactcgaagcgctccctcaagttgagtctcaggttgccgccgcacgcgcttggcgcgaacggaccggcagaacatttcttaagaaaaattcgagccacactctcctgcaggtcctttctccaaggacggacataggggtgtacggatcgggtaaaaatagacgctag

SEQ ID NO: 33940 - DNA, 5073 bp, Artificial Sequence
  derived and/or modified sequence
atggccggcgtgggccccggcggctacgccgccgagttcgtgcccccaccagagtgtcctgtatttgagccttcctgggaggagtttaccgatccactatctttcataggcaggattagaccactggcagaaaagaccggaatatgtaagattcgaccccctaaggactggcaaccgccctttgcatgcgaggtgaagtcatttcgctttactccacgggtccagcggctaaacgagctcgaagcaatgacaagagtcagactcgatttcctcgatcagctggccaagttctgggagctgcaagggtctactctgaagatcccagtggtggagcgtaagatcttggacctctatgccctgtcaaaaattgttgcctcaaagggaggatttgagatggtgaccaaggaaaagaagtggagcaaagtcggctcacgattggggtacctgccaggaaagggaaccggctccctgctgaagtcccactacgagcgcatcctgtacccttacgaattgtttcagtccggcgtctccctgatgggcgtgcagatgccaaatctcgatcttaaggaaaaggttgaacctgaagtgctctccactgatacacaaacaagccctgagccggggacacgcatgaacatcctgccaaagcggacacggcgtgtgaaaactcagtctgagagcggggacgtgtccagaaacacggaactgaagaaactccagatcttcggggcggggcctaaagtcgtgggattagcaatgggcacgaaggataaagaagatgaggtgacccggaggaggaaggtaacgaacaggtcggacgcattcaatatgcagatgcgtcagaggaaagggaccctatcagttaacttcgttgacctgtacgtgtgtatgttttgtggccgaggaaataacgaggataaactgctgctttgcgatggctgtgacgatagttaccacacgttctgcctcatcccccccttgccagacgtccctaaaggggactggaggtgccctaagtgtgtggccgaggaatgctctaaaccacgtgaagccttcggcttcgagcaggccgttcgggaatacaccctgcagtctttcggggaaatggctgataattttaagtcagactactttaatatgccagtgcacatggtgcctaccgagctggtcgaaaaggaattttggcgtctcgtgtccagcattgaggaggacgtgatcgtcgagtacggagctgatatctcaagtaaggattttggcagtgggttccccgtgaaggacgggcgaagaaagatactgcctgaagaagaagagtatgccctgagtgggtggaacctgaataatatgccagtcctcgagcagagtgttctggctcacataaacgttgacatcagcggaatgaaggtcccctggctttacgtggggatgtgcttctcctcgttctgctggcacattgaagaccattggagctacagtatcaattacctgcactggggggagccaaaaacatggtatggggtcccatcacacgctgccgagcaactggaagaagtgatgcgagagctggcacctgagctctttgaaagccagccagacttgctacatcagctcgtgacaatcatgaaccctaacgtactgatggaacatggcgtcccagtgtacaggacaaatcaatgcgcgggcgagttcgtcgtcaccttcccacgagcatatcacagtggctttaaccagggctataatttcgctgaggccgtgaacttctgtactgccgactggctgcccattggccggcagtgtgtgaatcattaccggcggctgcgccggcactgtgtgttctctcacgaggagcttatcttcaaaatggcagccgaccctgagtgcctggacgtgggactggcagccatggtgtgcaaggagctaaccctgatgactgaggaggaaacccgattgagagagagcgtggttcagatgggtgtgctgatgtctgaggaagaagtgttcgaactggttccagacgatgaacgacagtgtagcgcgtgtaggaccacctgtttcctgtccgccctgacatgtagttgcaaccccgaacgtctggtctgtctctatcatccaacggatctctgcccgtgtccaatgcagaagaagtgtctgcggtatagataccccctcgaagacctgccctcactgctctacggagtcaaagtgcgagcacaatcttatgacacctgggtgagcagggttacagaagctctgtcagccaactttaaccacaagaaggacttgattgaattaagagtaatgttagaggacgctgaagatcgcaagtatcctgagaacgacctgttccggaagctgcgcgacgctgttaaggaggctgaaacttgcgcctctgttgcccagttactactatccaagaaacaaaagcataggcagtccccagacagcggacggacaaggaccaaactaacagtggaggagctgaaagcctttgtccagcagctgttcagcttgccatgtgtgatcagtcaggcacggcaggttaagaatttgttagatgacgtggaggaattccacgagagagctcaggaagcaatgatggatgaaacccccgacagttctaaactgcagatgctcattgacatgggcagctccctgtacgtggaactacctgagctcccccggctgaagcaggaactccagcaggcgaggtggctggacgaggtgagactgactctgtctgacccccagcaagtgaccctagacgtgatgaaaaaacttatcgactctggcgtcggtctcgccccccatcatgctgtcgaaaaggctatggccgaactgcaggagttgctaaccgtatctgagaggtgggaggagaaggcaaaggtatgcctgcaagctagacctcggcattctgtggcaagcctcgaatctatagtaaatgaggcgaagaacataccagcctttcttcctaatgtcctgagtcttaaagaagcccttcaaaaagcgcgagaatggactgccaaagtggaggctatacagtccggaagcaattatgcgtacctagagcagctagaaagcctaagtgctaaggggaggcccattcccgtgcgcttggaagctctgccgcaagttgaaagccaggtggccgcggcgcgagcttggcgggaacgcacggggcgcacctttctgaaaaagaattcctctcacaccctgctccaggttttatccccaaggactgacatcggggtgtatggcagtggcaaaaacaggcgcaaaaaagtcaaagagctgattgagaaggagaaggagaaggatctggacttggaacctctgtcggacctcgaggaaggactggaggaaactcgagataccgccatggtggttgcagtttttaaggagcgggagcagaaagagatcgaagctatgcatagcctgcgggctgctaatcttgcaaagatgaccatggtggataggattgaagaagtgaaattttgtatctgcaggaaaactgccagtggatttatgctgcaatgcgagctgtgtaaggattggttccacaattcgtgtgtaccccttcctaagagctcatctcagaaaaagggcagcagttggcaggctaaagaagtgaaattcttgtgtccactttgtatgagaagcagacgcccacgcctggaaactattttatccctgcttgtttctttgcagaagcttcccgttcggttgcctgagggcgaggccctgcaatgcttgaccgagagggccatgagctggcaggaccgcgcgcgtcaggcattagccacagatgagctttcatcagcattggccaagctgtcagtgttgtctcagaggatggttgaacaggccgcccgggagaagacggaaaagataatttctgccgagttgcagaaggcagcagctaacccagacctacaagggcatttacccagcttccaacagtcagccttcaatcgggtagttagctccgtgtccagctcacctagacagaccatggactacgacgatgaagaaaccgattccgatgaggatatcagggagacctatggctatgatatgaaagacaccgctagcgtaaaaagtagctcatctctggagcctaatctattctgcgatgaagagattcctatcaaatcagaagaggtggtgactcatatgtggaccgctccaagcttctgcgctgagcatgcatactccagtgcttctaaatcatgcagtcaaggttcttccaccccacgaaaacaaccccgcaaatctccactcgtcccgagaagcttagagccacccgtactggaactctcgcccggcgctaaggcgcagcttgaggaactcatgatggtgggcgatctgctggaggtctcgcttgatgagacacagcacatttggcggatcctacaggcaactcacccgccatcagaagatcgctttctgcatatcatggaggatgattctatggaggagaaaccgttgaaggtaaaagggaaggattcttcggagaaaaaacgaaaaaggaaactcgagaaagtcgagcagctattcggggagggcaagcagaagtcaaaggagctgaagaagatggataaaccccgaaagaaaaagttgaaacttggagctgacaagagtaaggagctgaataagctggccaagaagctggctaaagaggaagaaaggaaaaagaaaaaggaaaaggccgccgcagctaaggtggagcttgttaaggaatccaccgagaagaagagagaaaagaaagtgctggatattcctagtaagtatgactggtctggagctgaggagtcagacgatgaaaacgcggtgtgtgccgctcaaaactgccagagaccttgcaaggataaggtagattgggtccagtgtgatggcggatgcgatgaatggtttcatcaagtgtgcgtaggggtttctcctgagatggctgaaaatgaggactatatttgcattaactgtgccaaaaagcagggcccggtttcgcctggtcccgctcctcctccctcattcataatgagctataaattgcctatggaggacctcaaggaaaccagctag

SEQ ID NO: 33941 - DNA, 2148 bp, Artificial Sequence
  derived and/or modified sequence
atggcaggcgtcggcccaggaggatacgcagctgaatttgtgcccccacctgaatgtcccgtatttgaacccagttgggaagaatttactgatcctctttccttcatcggtcggattcggcctctcgccgagaagacagggatctgcaagatcaggccccctaaggaatatgcgcttagcgggtggaacctgaacaacatgcctgtgctagagcagtcagtgttggcacacataaatgttgatatatccgggatgaaggtgccctggctatacgtgggaatgtgtttttcatccttttgctggcatatcgaggaccattggtcctattcaatcaactacctgcattggggggagccaaagacgtggtacggggtaccgtctcacgcagcggagcaactcgaggaggtgatgcgggaactagcacccgagctgttcgaaagccagccggatctcttacaccagcttgttaccattatgaaccctaacgtgctgatggaacatggcgtacccgtgtatagaacgaaccagtgtgcaggggagtttgttgtaacctttcctcgcgcttatcattcagggtttaaccagggttataactttgccgaagcagtgaatttctgcactgcagattggctgcccattggcagacagtgcgtgaaccactataggcggctgcggcgacactgcgtgttttcacacgaggaactgatctttaagatggcagctgacccagaatgcttggatgttgggctggcagccatggtgtgtaaggagctgaccctcatgacagaagaagagaccagactgcgagagagcgtggtccagatgggagtcctgatgtccgaggaggaggtttttgaactcgtccccgatgacgagaggcagtgctccgcatgtcggacaacttgttttttatcagccctgacctgttcttgcaatcctgagcggctggtgtgtctgtaccatcctaccgatctgtgtccgtgccccatgcaaaaaaaatgcctaaggtatcggtatcctctcgaggacctcccatccctcctttacggcgttaaagtgagagcacaaagttatgatacatgggtgtcgagggtgacagaggccctgtctgccaattttaaccataagaaggacctgatcgagctcagggtgatgctggaagatgctgaagaccgaaagtaccccgagaatgatctatttcggaaacttagggatgctgttaaagaagctgaaacttgcgccagcgtcgcacagctgcttctgtccaagaaacagaagcaccggcagagccccgactctggaaggacacgcaccaagctgaccgtcgaagaactgaaggcctttgttcagcagctcttttcccttccctgcgtgatatcccaggccaggcaagtcaaaaatctgctggacgatgtggaagaattccacgagcgcgcacaggaagctatgatggacgagactcccgatagctccaagctgcagatgctgattgacatgggcagttcactgtacgtcgagctcccggagctgccacgcctcaaacaggagctccagcaggcacggtggctagacgaggtgcgcctaacactgtctgacccacaacaggtgaccctcgacgtcatgaagaagcttattgattcaggggtgggacttgcaccgcaccatgccgtggagaaggcgatggccgagctgcaggagctcctgacagtgtcagaacgttgggaggagaaggccaaagtgtgcctgcaagctcgacctcgacactccgtcgcctctctggagtccatagtcaatgaggcaaagaacatacctgcattcctaccaaacgtactatctttgaaagaagctttgcagaaagcgagagagtggactgccaaggtagaggctatccagtctggctccaattacgcctacctggaacagctggaatccctgtcagccaaagggcgtccaatacccgtccggttggaggcactgccacaggttgagtcccaggtggcagccgctcgggcttggagagagagaacaggtagaacctttctgaagaaaaacagttcccataccctgctacaagtacttagccccagaacagacattggcgtttacggatccggaaagaatcgtcggaagaaagtgaaagagttgtag

SEQ ID NO: 33942 - DNA, 4911 bp, Artificial Sequence
  derived and/or modified sequence
atggccggtgttggccctggcggatacgcagccgaattcgtgccaccccctgagtgccccgtcttcgaacctagctgggaagagtttaccgatcctctctccttcattggcagaattcggccactggcagagaagactggaatttgcaagatcagaccccctaaagactggcagccgccattcgcttgcgaggtcaagtcattcaggttcaccccacgcgtccagcggctcaacgagctagaggccatgactagggtcagactggatttcctcgatcagctggcaaagttctgggagctgcagggtagcactctcaaaatcccggtcgttgaacgtaagatcctggacctatacgctctctctaagatcgttgcatccaagggagggtttgagatggtgactaaggaaaaaaagtggtccaaggtgggttcacgtctcggatatttgccaggtaagggcacaggttccttactgaaaagccactacgagaggattctgtacccatacgagctcttccagagcggagtttccctgatgggtgtccaaatgcccaacctggatttgaaggagaaggtggaacccgaggtgctttcgacagatacgcagaccagccccgagccgggaacacgcatgaatattctccctaaacggactcgccgtgtgaagactcagagcgaatccggtgatgtttcaaggaatactgagctcaagaaactccagattttcggagcaggacccaaggtggtggggctggccatgggaaccaaagacaaggaagacgaggtgacaagaaggaggaaagtgaccaacagatccgacgccttcaatatgcaaatgaggcagaggaagggtacactgagtgtgaattttgtggacctctacgtgtgcatgttttgcggacgagggaacaacgaggataagttactgttgtgtgatggttgtgacgatagctatcacacattctgtctgattcccccactgccggatgtacccaaaggtgattggagatgtcctaaatgtgtggcagaggagtgctcaaaaccacgggaggccttcggatttgagcaggccgttcgcgaatatacacttcagagcttcggggaaatggccgataacttcaagtcagattatttcaacatgccggtgcacatggtccccacagagctggtcgaaaaggaattctggagactagtgtcctcaattgaggaggacgtcatagtcgaatatggagcggacattagttctaaagactttggaagtggcttcccagtaaaagacggtagacgaaaaattcttcccgaggaagaagagtatgctcttagcggctggaacttgaacaacatgcctgtcctggagcagtccgtcctcgcacatatcaatgtggatattagtgggatgaaagtgccatggttatatgtgggaatgtgtttttccagcttctgctggcatatagaggatcattggagctactcaattaattaccttcattggggcgaaccgaaaacatggtacggcgtgccctcacacgctgcagagcagctggaggaagttatgcgggaactagcaccagagctcttcgagtcccaacctgatttgttgcaccagttggtcactattatgaaccctaacgtgctcatggaacacggagtgccagtgtataggaccaaccaatgtgcgggagagtttgttgtgactttccccagagcctatcattctggatttaatcaggggtacaattttgccgaggcggtgaacttctgcactgctgactggctgcccatcggcaggcagtgcgttaatcactaccgtcgtctacggagacactgcgtgttttcccacgaagagctcatttttaaaatggccgctgatccagaatgcctggatgttggcctcgccgctatggtctgcaaagagctgaccctgatgacagaggaagagacaaggctccgcgaatccgttgtgcagatgggagtgttaatgtctgaggaagaggtgtttgaactcgtgccagatgacgagcgacagtgctccgcttgccgtacaacatgctttctaagcgccctgacttgttcatgtaatcctgaacgactggtctgcctctatcatcctacagacctgtgtccttgcccaatgcaaaagaaatgcctgaggtacaggtaccccctggaggacctgccaagcctgctgtacggggtgaaggtgcgggcacagagctacgatacgtgggttagtcgtgttacagaagcgctttctgctaatttcaaccataagaaggacttgattgagcttcgggtgatgctggaggatgcagaggatcggaagtatccagaaaatgacctgttcagaaaactacgagacgcagtaaaggaagcggaaacctgcgcctcagtggcccagttgctcctgagtaagaaacagaaacataggcagagcccagacagtggacgcacccgcaccaaattgacagtggaagagttaaaagcattcgtccagcaactgttctccctgccctgcgtcatttcacaggccagacaagtgaaaaatctgctggacgatgtcgaagagtttcatgagcgcgcacaggaggccatgatggatgagacaccagattcgtctaaactgcagatgttgatagatatgggtagttccttgtacgtcgagctgcccgagcttcccagacttaagcaggaattgcaacaggcacgttggttagacgaagttcgcctcaccttgagtgacccgcaacaagttacattagacgtaatgaaaaagctgatcgactccggcgtgggcttggctccccaccatgccgttgagaaagctatggccgaattgcaagagctgctgacagtttcagagcgatgggaggagaaggctaaagtgtgtctccaggccagaccacgtcattctgtggcaagtctagagtcaattgtgaacgaggccaaaaatatcccagccttcctgccgaacgtgctgagcctcaaggaagctctacagaaagctagggagtggacagccaaagttgaagccatccagagtggctccaattacgcctacctggaacagcttgaatctctaagcgctaagggcagacctatcccggttcggctggaggcactccctcaagttgagtcccaggtggctgcagctagggcctggcgggaaagaacaggcagaactttcctgaaaaagaatagcagtcacaccctgcttcaggtgctgtctcctaggactgatatcggagtgtacggttctggcaagaataggaggaagaaggtgaaggagctgattgagaaggaaaaggagaaagacctggacctcgaacccctgagtgacctcgaggaagggttagaggagactcgggacacagctatggtggtggccgtttttaaagagagagagcagaaagaaatagaggcaatgcactctctgagggccgctaaccttgcaaaaatgaccatggttgatcggatcgaggaggtgaagttttgcatctgtcgaaaaacagctagcgggtttatgctgcagtgcgaactgtgtaaggattggtttcacaattcctgcgttccactgcctaagtcttcaagccagaagaagggaagcagttggcaggctaaggaggttaagtttctctgtccgctgtgtatgcggtctcgccgtcctcgtctggaaacaatcctgtcgctgctggtgtcgctgcagaaattgcccgtcaggctgcctgagggcgaagctctgcagtgtctgaccgagcgagctatgagttggcaggaccgagcaagacaggcacttgccaccgatgaactgagcagtgccttggcgaagctgtccgtactctctcaacgcatggtggagcaagcagcaagggagaagaccgagaaaataatctccgctgagctccagaaggccgcagcgaaccctgatttgcagggccacttaccttcctttcaacagagtgctttcaaccgcgttgtgagctctgtcagcagctcccctcggcagactatggattacgacgatgaggaaacggattcggacgaggatatacgcgagacctacggctacgatatgaaagataccgcctccgtgaaatcatccagcagtttggagcccaatctgttctgtgatgaggagataccgatcaagagcgaagaggtagtgacccatatgtggacggcacctagcttctgcgccgaacatgcctatagtagcgcctcaaagagctgttcgcagggaagctccacccctcggaagcagccgaggaagtctcccctggtgccacggtctttggagcctcctgtactggaactgagccctggggctaaggcccagctcgaggaacttatgatggtgggagacctgctcgaagtctccctggacgagactcagcatatttggcggattctgcaggccacacaccccccttctgaggaccggttcctgcatattatggaggacgatagtatggaggaaaagccccttaaagtaaagggcaaagactcgagtgagaagaagcgcaaacgcaaactagagaaggttgaacaactttttggggaaggaaaacagaagtcaaaagaactgaagaagatggataagcctcgcaagaagaagctcaagctgggagctgacaagtctaaagagctaaacaagctggccaaaaagctggccaaggaagaggaacgaaaaaagaagaaggaaaaggccgctgccgctaaagtggagctcgtgaaggaaagtaccgaaaagaagcgtgagaagaaggttctagatattccaagcaaatatgattggagtggagccgaggagagtgatgatgaaaacgccgtgtgcgccgctcagaattgccaacgaccatgcaaggacaagggcgttgtgttcgtaaccgaggaggaaaaaaataagaagtattag

SEQ ID NO: 33943 - DNA, 3150 bp, Artificial Sequence
  derived and/or modified sequence
atggcaggcgtggggccaggcggttacgcagctgaattcgttcccccacccgagtgccccgtgttcgagccctcctgggaagagtttactgacccactgtcgtttatagggaggatcaggccacttgctgagaagactggaatttgtaagatcagacctcccaaagattggcagcccccatttgcctgcgaagttaagtcgttccgcttcacccccagagtacagaggttgaacgaactcgaaatcgtggcatccaagggtgggttcgaaatggttacaaaagaaaagaagtggtcgaaggttgggagccgactgggatacctgccagggaagggcacgggctctctcttgaaatcacactatgagcgcatactctatccctacgagctgtttcagtccggcgttagcctgatgggggtgcagatgcccaaccttgacctgaaagagaaagttgagccggaagtgctttccacggacacacaaaccagccccgagccagggactaggatgaatatcctccctaagaggactagacgggtcaagacacaaagcgaatctggagatgtgtcaagaaacactgagctgaaaaagctgcagatcttcggagcaggccctaaggtggtgggacttgccatgggaaccaaggataaggaagatgaggtcacccgcagacggaaggtgacaaacaggtcagacgcatttaatatgcaaatgcggcaacgcaagggcaccctttctgtgaatttcgtggatctgtatgtctgtatgttctgcggcagaggcaataatgaagataagctcttactgtgcgacgggtgcgatgactcctaccacacgttctgtctcattccacccctgcccgatgtcccgaagggagactggcgttgccctaagtgtgtggcggaagagtgctccaagcccagggaggcattcggcttcgaacaggcagttagggaatacactttgcagtcttttggcgagatggccgataatttcaagagcgattatttcaatatgcccgtgcacatggtcccaacagagttagtggaaaaggaattctggaggttggtttcaagcattgaggaggacgtgattgtggagtatggcgctgacatcagcagcaaagacttcggaagcgggttcccggtcaaagatgggaggcgcaagatcctacccgaagaagaggaatacgcgctgagtggctggaacctcaataacatgccggtgttggagcagtccgtgctggcacacatcaatgtggatataagtggcatgaaggtaccttggctctacgtgggcatgtgctttagcagcttttgctggcatatcgaggatcattggagttattcaattaactacctgcactggggcgaacccaaaacatggtacggcgtgccatctcatgcggcagaacagctggaagaagtcatgcgggagctggcccctgagctgttcgagtcgcagcctgacctcctgcaccagctagttacaatcatgaaccctaatgtgctaatggaacatggggtgcctgtatacaggacaaatcaatgcgcaggtgaatttgtggttacattccccagggcatatcattccggatttaaccagggctacaatttcgctgaagctgtcaacttttgcacagctgactggctccctattgggaggcagtgtgttaatcattaccgcaggctcagacgacattgcgtgttctcacacgaggagctgatttttaaaatggctgccgacccggaatgccttgacgtcggattggcagcaatggtgtgtaaagaactgactctgatgacagaagaagagacacgtctcagggagtcagtagtgcagatgggagtgttgatgtcagaggaagaagttttcgagttagttcctgatgatgaacgccagtgtagcgcgtgtcgaaccacctgctttttatccgccctgacatgttcttgtaatcctgagcggcttgtgtgtttgtatcaccccactgatctttgtccctgccctatgcagaaaaagtgtcttcgatacaggtatccgctggaagatcttcccagcctactctacggtgtgaaagtcagggcccagagctacgatacctgggtgtcacgcgtaactgaggccctgtcagccaactttaaccacaaaaaggaccttatcgaattgcgggtgatgctggaggacgccgaggaccgcaaataccctgaaaacgatttgttcagaaaactgcgggacgcagtcaaggaagctgaaacctgtgcctcagtcgcacagctcctgttatccaagaagcagaaacacaggcagagccccgatagcggccgaacacgcacaaagttaaccgtcgaagagttgaaggcgttcgtgcagcagctgttttccttaccttgcgtgattagtcaggctcgccaggtgaagaatttgctcgacgacgtagaggaatttcatgaacgggcacaagaggcaatgatggatgagacccctgactctagcaagctgcagatgctcatcgatatggggtccagcttatatgttgagctcccagaactgcctagacttaaacaggagctccagcaggctcgatggctagatgaagtgaggctaaccttatccgatccacaacaggtcaccctcgacgttatgaagaagcttatagattccggagttggtctcgctccccatcatgctgtggaaaaggcgatggcagagctccaagaacttctgaccgttagtgaacgctgggaggagaaggccaaagtctgcctgcaagcacgccctcggcattctgtagccagtctagagtccatcgtcaacgaagcaaaaaacatccccgcatttctgccaaatgttctaagtctgaaggaggcgctccagaaggcccgagagtggacagctaaggtggaagcaattcaatccggcagtaattacgcctacctggagcaactcgagtccctgtccgctaagggcagaccaattccggtgcgactggaggccttgccacaggtggagtcgcaggtggccgcagcacgagcatggcgtgagagaactggtcgaacctttctgaaaaagaactctagtcacactctgttgcaagttttgtctcccagaaccgacattggagtgtatggatctggcaaaaatcgacgatag

SEQ ID NO: 33944 - DNA, 5072 bp, Artificial Sequence
  derived and/or modified sequence
atggctggtgtgggccctggaggttacgctgctgagtttgtgccaccaccagaatgtccggtttttgaaccatcatgggaagaatttacggatcctctaagtttcatcggacggattagacccctggctgagaagacagggatctgtaagattagaccacctaaagattggcaaccaccctttgcatgcgaagtaaaaagtttccgtttcacaccccgtgtgcagcgcctcaatgaactggaggcaatgactagggttcgcctcgactttctggaccagctggcaaagttttgggagttgcagggcagcacactgaaaatcccagtcgtggaacgcaaaatcctggatttatacgccctgagtaagatcgtcgcttctaagggaggcttcgagatggtgactaaggagaaaaaatggtccaaagtggggtctcgcttaggatacctgcctggaaagggtacagggagtctgctgaagagccattacgaaagaattctttacccttacgaactgtttcaatccggcgtctctctgatgggagtacagatgcctaacctagacctgaaggagaaggtggaacccgaagtgctttccactgatacccagacgtcccccgagcccggtacgcgcatgaacattttacccaaaagaacacgacgggtaaagacccaatccgaatctggcgatgtgtcccgtaatactgagctgaaaaagctgcagatattcggcgctgggcctaaagtcgtcgggctagccatggggaccaaggataaggaggatgaggttacccgcaggaggaaggtaacaaaccgaagcgacgccttcaatatgcaaatgcggcagcgaaagggcaccctttcggtcaactttgtggacttgtacgtctgcatgttctgtggtcggggaaataacgaagataagttattgttgtgcgacgggtgcgatgattcataccacacattctgtctgatacctcctctgccagacgtgcccaagggcgactggcgatgtcccaagtgcgtggcggaggagtgtagcaagcccagggaggcgttcggctttgagcaggctgtccgagaatataccctccagtcgttcggcgagatggccgataactttaaaagcgactactttaacatgcccgtgcatatggtccctaccgaattagttgagaaggaattctggaggttggtgtctagtattgaagaagatgtgatcgtcgaatacggcgcagatatttcctcgaaagactttggatcaggctttccagttaaggatgggcgtagaaaaatcctacctgaggaggaggaatatgccctatccggttggaacctcaataatatgcctgttctggaacagagtgtcctggcacatattaatgtggacatctctggtatgaaagtcccgtggctatacgtgggcatgtgcttctcctcgttttgttggcacatcgaggaccactggtcatatagtatcaactatctccattggggggagccaaaaacatggtatggcgttccaagccacgctgccgagcagctggaggaagtgatgagagagttggccccagaactcttcgagagtcagccggacttacttcaccagttagtgacaattatgaatcctaatgttttaatggagcatggagtgcctgtctacagaaccaaccagtgtgccggagagtttgtcgttacattcccccgagcctaccactctgggtttaatcaaggctataattttgcagaagccgtgaacttctgtacagccgactggttgccaataggacgccagtgtgtcaatcattatcgccgtctgagacgacattgcgttttctcccacgaagaactgatcttcaaaatggctgcggaccccgaatgcctggacgtaggcctggccgctatggtctgtaaggagttaaccttgatgacagaggaagaaacccgactaagggaatccgtggtgcaaatgggagtgttaatgtctgaagaggaagtattcgaattggtgcctgacgatgaaaggcagtgttcagcatgcaggacaacctgctttctgtcagcactcacttgctcctgtaaccctgagaggcttgtgtgcctgtaccaccccacagatctgtgtccttgccctatgcagaagaagtgcctgcgctataggtaccctttggaggatctgccaagcctgctgtatggtgtaaaggtccgcgctcagagttatgacacttgggtgtcgcgagtcactgaagccctgagcgcaaatttcaaccacaaaaaggacctgattgagctgagggtgatgttggaagatgccgaagatcggaaatacccagagaatgatctctttcgcaagttgcgcgatgccgtgaaggaagccgaaacatgcgcgtccgttgcacagctgctgttgagcaagaagcaaaaacaccgccaatctcccgactctggcagaacccgcacaaaactgacagtagaggaattgaaggctttcgtacagcagctgttttcgcttccctgcgtcatctcgcaggcacggcaggtcaagaatcttctagatgatgtggaagagttccacgagcgcgctcaggaggccatgatggatgaaacaccagactcttctaaactccagatgttaatcgacatgggttcgtctctctacgttgagctgcctgaactgcctcgcctcaagcaggagctgcagcaagctaggtggttggatgaagttcggctcaccctttccgatccacaacaggtcactctggacgttatgaaaaagctgatagattccggagtgggtctggcaccccaccatgccgtggaaaaagctatggccgagctgcaagaactgctgaccgtgtcagagagatgggaggagaaggcgaaggtgtgcttacaggctaggcctcggcattccgttgcatcccttgagagcatcgtcaacgaggctaagaatattcctgccttcttaccaaacgtgctatccctcaaggaggcacttcagaaagcgagagaatggaccgccaaggttgaggctatacagagcggcagtaactacgcttatctagaacagctggaaagcctttccgccaaagggagaccaatccctgtgcggctggaggcactgccccaggtcgagagtcaggtggcagccgctagggcttggagggaacgcaccggcaggacattcttgaaaaagaattcctcacataccctgctccaggttctgtcccccaggaccgacattggggtgtacggcagtggaaagaatcggaggaagaaggttaaggagctgatcgagaaagagaaagagaaggatctggatctcgaaccactgtccgacctggaggaaggcctggaagaaactagggacacagctatggtggtggccgtctttaaagagcgggagcaaaaagagatcgaggccatgcactcacttagggccgcaaatcttgcaaagatgaccatggtggacagaatcgaggaggtgaagttctgtatttgccgaaagaccgcgagcggattcatgttgcagtgcgagctctgtaaagattggtttcataatagttgtgtacccctgcctaaatcctcatcacagaagaaaggctcctcttggcaggcaaaagaggtcaaattcctttgccccctatgtatgcggtctagacgtcccaggcttgagacaatcttgtctctcctggtgtcactccagaaactgccagtgaggcttcccgaaggggaggcccttcagtgtctgaccgaacgagcaatgtcttggcaggatagagctagacaggccctggcaacagatgaactcagcagcgccctggccaagctctcggtgctctcgcagaggatggttgagcaggccgctcgagaaaagacagagaagattatatctgccgaactccagaaggccgcagcaaatccagaccttcaaggtcatcttccctctttccagcaatctgcattcaatagggtcgtcagctccgtaagttcttctccacgacagaccatggattatgacgatgaggagacggattccgatgaagatattcgagagacgtacggatacgacatgaaagacactgccagtgtgaaatcaagtagcagtttggagcccaacctgttttgcgatgaggagatcccaatcaagagtgaagaggtggtgacacacatgtggactgcccctagtttttgtgccgagcacgcctatagttctgcgtccaagtcctgtagccagggcagttccactcctagaaaacagcctagaaagtcccccctagtgcccaggtctttagaacccccagtgctggagctttcccctggagccaaggcccagttggaggagctaatgatggtgggagatctgctggaggtgtctctagatgagacccaacatatatggagaatattgcaggccacgcaccctccttctgaggatcgttttctgcacatcatggaggatgattctatggaggaaaagcctctaaaggtcaaaggaaaggatagttctgagaagaaacgcaagagaaagctggaaaaggtggagcagttattcggggagggaaaacaaaaatcaaaggaactcaagaaaatggacaaaccgaggaaaaagaaattaaaactcggcgctgacaaatccaaagagctgaataagttagccaaaaagttagcaaaggaggaagagaggaagaagaagaaagagaaagcagccgcagctaaagtggaactcgttaaggagagcaccgagaaaaagcgcgaaaagaaggtcttagatataccttcgaagtatgactggtcgggcgctgaggaatccgatgatgagaatgccgtgtgcgccgcacagaactgccagcggccatgcaaagataaagtggactgggtgcagtgtgacggcggatgtgatgaatggtttcatcaggtttgtgttggcgtcagtcccgagatggccgaaaacgaggactacatctgcattaattgtgcaaaaaagcagggccctgtatctcctgggccagcccctcccccttcattcattatgagctataaacttcccatggaggacttaaaggagacttcata

SEQ ID NO: 33945 - DNA, 2148 bp, Artificial Sequence
  derived and/or modified sequence
atggccggcgtgggccccggcggctacgccgccgagttcgtgcccccccccgagtgccccgtgttcgagcccagctgggaggagttcaccgaccccctgagcttcatcggcagaatcagacccctggccgagaagaccggcatctgcaagatcagaccccccaaggagtacgccctgagcggctggaacctgaacaacatgcccgtgctggagcagagcgtgctggcccacatcaacgtggacatcagcggcatgaaggtgccctggctgtacgtgggcatgtgcttcagcagcttctgctggcacatcgaggaccactggagctacagcatcaactacctgcactggggcgagcccaagacctggtacggcgtgcccagccacgccgccgagcagctggaggaggtgatgagagagctggcccccgagctgttcgagagccagcccgacctgctgcaccagctggtgaccatcatgaaccccaacgtgctgatggagcacggcgtgcccgtgtacagaaccaaccagtgcgccggcgagttcgtggtgaccttccccagagcctaccacagcggcttcaaccagggctacaacttcgccgaggccgtgaacttctgcaccgccgactggctgcccatcggcagacagtgcgtgaaccactacagaagactgagaagacactgcgtgttcagccacgaggagctgatcttcaagatggccgccgaccccgagtgcctggacgtgggcctggccgccatggtgtgcaaggagctgaccctgatgaccgaggaggagaccagactgagagagagcgtggtgcagatgggcgtgctgatgagcgaggaggaggtgttcgagctggtgcccgacgacgagagacagtgcagcgcctgcagaaccacctgcttcctgagcgccctgacctgcagctgcaaccccgagagactggtgtgcctgtaccaccccaccgacctgtgcccctgccccatgcagaagaagtgcctgagatacagataccccctggaggacctgcccagcctgctgtacggcgtgaaggtgagagcccagagctacgacacctgggtgagcagagtgaccgaggccctgagcgccaacttcaaccacaagaaggacctgatcgagctgagagtgatgctggaggacgccgaggacagaaagtaccccgagaacgacctgttcagaaagctgagagacgccgtgaaggaggccgagacctgcgccagcgtggcccagctgctgctgagcaagaagcagaagcacagacagagccccgacagcggcagaaccagaaccaagctgaccgtggaggagctgaaggccttcgtgcagcagctgttcagcctgccctgcgtgatcagccaggccagacaggtgaagaacctgctggacgacgtggaggagttccacgagagagcccaggaggccatgatggacgagacccccgacagcagcaagctgcagatgctgatcgacatgggcagcagcctgtacgtggagctgcccgagctgcccagactgaagcaggagctgcagcaggccagatggctggacgaggtgagactgaccctgagcgacccccagcaggtgaccctggacgtgatgaagaagctgatcgacagcggcgtgggcctggccccccaccacgccgtggagaaggccatggccgagctgcaggagctgctgaccgtgagcgagagatgggaggagaaggccaaggtgtgcctgcaggccagacccagacacagcgtggccagcctggagagcatcgtgaacgaggccaagaacatccccgccttcctgcccaacgtgctgagcctgaaggaggccctgcagaaggccagagagtggaccgccaaggtggaggccatccagagcggcagcaactacgcctacctggagcagctggagagcctgagcgccaagggcagacccatccccgtgagactggaggccctgccccaggtggagagccaggtggccgccgccagagcctggagagagagaaccggcagaaccttcctgaagaagaacagcagccacaccctgctgcaggtgctgagccccagaaccgacatcggcgtgtacggcagcggcaagaacagaagaaagaaggtgaaggagctgtag

SEQ ID NO: 33946 - DNA, 4911 bp, Artificial Sequence
  derived and/or modified sequence
atggccggcgtgggccccggcggctacgccgccgagttcgtgcccccccccgagtgccccgtgttcgagcccagctgggaggagttcaccgaccccctgagcttcatcggcagaatcagacccctggccgagaagaccggcatctgcaagatcagaccccccaaggactggcagccccccttcgcctgcgaggtgaagagcttcagattcacccccagagtgcagagactgaacgagctggaggccatgaccagagtgagactggacttcctggaccagctggccaagttctgggagctgcagggcagcaccctgaagatccccgtggtggagagaaagatcctggacctgtacgccctgagcaagatcgtggccagcaagggcggcttcgagatggtgaccaaggagaagaagtggagcaaggtgggcagcagactgggctacctgcccggcaagggcaccggcagcctgctgaagagccactacgagagaatcctgtacccctacgagctgttccagagcggcgtgagcctgatgggcgtgcagatgcccaacctggacctgaaggagaaggtggagcccgaggtgctgagcaccgacacccagaccagccccgagcccggcaccagaatgaacatcctgcccaagagaaccagaagagtgaagacccagagcgagagcggcgacgtgagcagaaacaccgagctgaagaagctgcagatcttcggcgccggccccaaggtggtgggcctggccatgggcaccaaggacaaggaggacgaggtgaccagaagaagaaaggtgaccaacagaagcgacgccttcaacatgcagatgagacagagaaagggcaccctgagcgtgaacttcgtggacctgtacgtgtgcatgttctgcggcagaggcaacaacgaggacaagctgctgctgtgcgacggctgcgacgacagctaccacaccttctgcctgatcccccccctgcccgacgtgcccaagggcgactggagatgccccaagtgcgtggccgaggagtgcagcaagcccagagaggccttcggcttcgagcaggccgtgagagagtacaccctgcagagcttcggcgagatggccgacaacttcaagagcgactacttcaacatgcccgtgcacatggtgcccaccgagctggtggagaaggagttctggagactggtgagcagcatcgaggaggacgtgatcgtggagtacggcgccgacatcagcagcaaggacttcggcagcggcttccccgtgaaggacggcagaagaaagatcctgcccgaggaggaggagtacgccctgagcggctggaacctgaacaacatgcccgtgctggagcagagcgtgctggcccacatcaacgtggacatcagcggcatgaaggtgccctggctgtacgtgggcatgtgcttcagcagcttctgctggcacatcgaggaccactggagctacagcatcaactacctgcactggggcgagcccaagacctggtacggcgtgcccagccacgccgccgagcagctggaggaggtgatgagagagctggcccccgagctgttcgagagccagcccgacctgctgcaccagctggtgaccatcatgaaccccaacgtgctgatggagcacggcgtgcccgtgtacagaaccaaccagtgcgccggcgagttcgtggtgaccttccccagagcctaccacagcggcttcaaccagggctacaacttcgccgaggccgtgaacttctgcaccgccgactggctgcccatcggcagacagtgcgtgaaccactacagaagactgagaagacactgcgtgttcagccacgaggagctgatcttcaagatggccgccgaccccgagtgcctggacgtgggcctggccgccatggtgtgcaaggagctgaccctgatgaccgaggaggagaccagactgagagagagcgtggtgcagatgggcgtgctgatgagcgaggaggaggtgttcgagctggtgcccgacgacgagagacagtgcagcgcctgcagaaccacctgcttcctgagcgccctgacctgcagctgcaaccccgagagactggtgtgcctgtaccaccccaccgacctgtgcccctgccccatgcagaagaagtgcctgagatacagataccccctggaggacctgcccagcctgctgtacggcgtgaaggtgagagcccagagctacgacacctgggtgagcagagtgaccgaggccctgagcgccaacttcaaccacaagaaggacctgatcgagctgagagtgatgctggaggacgccgaggacagaaagtaccccgagaacgacctgttcagaaagctgagagacgccgtgaaggaggccgagacctgcgccagcgtggcccagctgctgctgagcaagaagcagaagcacagacagagccccgacagcggcagaaccagaaccaagctgaccgtggaggagctgaaggccttcgtgcagcagctgttcagcctgccctgcgtgatcagccaggccagacaggtgaagaacctgctggacgacgtggaggagttccacgagagagcccaggaggccatgatggacgagacccccgacagcagcaagctgcagatgctgatcgacatgggcagcagcctgtacgtggagctgcccgagctgcccagactgaagcaggagctgcagcaggccagatggctggacgaggtgagactgaccctgagcgacccccagcaggtgaccctggacgtgatgaagaagctgatcgacagcggcgtgggcctggccccccaccacgccgtggagaaggccatggccgagctgcaggagctgctgaccgtgagcgagagatgggaggagaaggccaaggtgtgcctgcaggccagacccagacacagcgtggccagcctggagagcatcgtgaacgaggccaagaacatccccgccttcctgcccaacgtgctgagcctgaaggaggccctgcagaaggccagagagtggaccgccaaggtggaggccatccagagcggcagcaactacgcctacctggagcagctggagagcctgagcgccaagggcagacccatccccgtgagactggaggccctgccccaggtggagagccaggtggccgccgccagagcctggagagagagaaccggcagaaccttcctgaagaagaacagcagccacaccctgctgcaggtgctgagccccagaaccgacatcggcgtgtacggcagcggcaagaacagaagaaagaaggtgaaggagctgatcgagaaggagaaggagaaggacctggacctggagcccctgagcgacctggaggagggcctggaggagaccagagacaccgccatggtggtggccgtgttcaaggagagagagcagaaggagatcgaggccatgcacagcctgagagccgccaacctggccaagatgaccatggtggacagaatcgaggaggtgaagttctgcatctgcagaaagaccgccagcggcttcatgctgcagtgcgagctgtgcaaggactggttccacaacagctgcgtgcccctgcccaagagcagcagccagaagaagggcagcagctggcaggccaaggaggtgaagttcctgtgccccctgtgcatgagaagcagaagacccagactggagaccatcctgagcctgctggtgagcctgcagaagctgcccgtgagactgcccgagggcgaggccctgcagtgcctgaccgagagagccatgagctggcaggacagagccagacaggccctggccaccgacgagctgagcagcgccctggccaagctgagcgtgctgagccagagaatggtggagcaggccgccagagagaagaccgagaagatcatcagcgccgagctgcagaaggccgccgccaaccccgacctgcagggccacctgcccagcttccagcagagcgccttcaacagagtggtgagcagcgtgagcagcagccccagacagaccatggactacgacgacgaggagaccgacagcgacgaggacatcagagagacctacggctacgacatgaaggacaccgccagcgtgaagagcagcagcagcctggagcccaacctgttctgcgacgaggagatccccatcaagagcgaggaggtggtgacccacatgtggaccgcccccagcttctgcgccgagcacgcctacagcagcgccagcaagagctgcagccagggcagcagcacccccagaaagcagcccagaaagagccccctggtgcccagaagcctggagccccccgtgctggagctgagccccggcgccaaggcccagctggaggagctgatgatggtgggcgacctgctggaggtgagcctggacgagacccagcacatctggagaatcctgcaggccacccacccccccagcgaggacagattcctgcacatcatggaggacgacagcatggaggagaagcccctgaaggtgaagggcaaggacagcagcgagaagaagagaaagagaaagctggagaaggtggagcagctgttcggcgagggcaagcagaagagcaaggagctgaagaagatggacaagcccagaaagaagaagctgaagctgggcgccgacaagagcaaggagctgaacaagctggccaagaagctggccaaggaggaggagagaaagaagaagaaggagaaggccgccgccgccaaggtggagctggtgaaggagagcaccgagaagaagagagagaagaaggtgctggacatccccagcaagtacgactggagcggcgccgaggagagcgacgacgagaacgccgtgtgcgccgcccagaactgccagagaccctgcaaggacaagggcgtggtgttcgtgaccgaggaggagaagaacaagaagtactag

SEQ ID NO: 33947 - DNA, 3150 bp, Artificial Sequence
  derived and/or modified sequence
atggccggcgtgggccccggcggctacgccgccgagttcgtgcccccccccgagtgccccgtgttcgagcccagctgggaggagttcaccgaccccctgagcttcatcggcagaatcagacccctggccgagaagaccggcatctgcaagatcagaccccccaaggactggcagccccccttcgcctgcgaggtgaagagcttcagattcacccccagagtgcagagactgaacgagctggagatcgtggccagcaagggcggcttcgagatggtgaccaaggagaagaagtggagcaaggtgggcagcagactgggctacctgcccggcaagggcaccggcagcctgctgaagagccactacgagagaatcctgtacccctacgagctgttccagagcggcgtgagcctgatgggcgtgcagatgcccaacctggacctgaaggagaaggtggagcccgaggtgctgagcaccgacacccagaccagccccgagcccggcaccagaatgaacatcctgcccaagagaaccagaagagtgaagacccagagcgagagcggcgacgtgagcagaaacaccgagctgaagaagctgcagatcttcggcgccggccccaaggtggtgggcctggccatgggcaccaaggacaaggaggacgaggtgaccagaagaagaaaggtgaccaacagaagcgacgccttcaacatgcagatgagacagagaaagggcaccctgagcgtgaacttcgtggacctgtacgtgtgcatgttctgcggcagaggcaacaacgaggacaagctgctgctgtgcgacggctgcgacgacagctaccacaccttctgcctgatcccccccctgcccgacgtgcccaagggcgactggagatgccccaagtgcgtggccgaggagtgcagcaagcccagagaggccttcggcttcgagcaggccgtgagagagtacaccctgcagagcttcggcgagatggccgacaacttcaagagcgactacttcaacatgcccgtgcacatggtgcccaccgagctggtggagaaggagttctggagactggtgagcagcatcgaggaggacgtgatcgtggagtacggcgccgacatcagcagcaaggacttcggcagcggcttccccgtgaaggacggcagaagaaagatcctgcccgaggaggaggagtacgccctgagcggctggaacctgaacaacatgcccgtgctggagcagagcgtgctggcccacatcaacgtggacatcagcggcatgaaggtgccctggctgtacgtgggcatgtgcttcagcagcttctgctggcacatcgaggaccactggagctacagcatcaactacctgcactggggcgagcccaagacctggtacggcgtgcccagccacgccgccgagcagctggaggaggtgatgagagagctggcccccgagctgttcgagagccagcccgacctgctgcaccagctggtgaccatcatgaaccccaacgtgctgatggagcacggcgtgcccgtgtacagaaccaaccagtgcgccggcgagttcgtggtgaccttccccagagcctaccacagcggcttcaaccagggctacaacttcgccgaggccgtgaacttctgcaccgccgactggctgcccatcggcagacagtgcgtgaaccactacagaagactgagaagacactgcgtgttcagccacgaggagctgatcttcaagatggccgccgaccccgagtgcctggacgtgggcctggccgccatggtgtgcaaggagctgaccctgatgaccgaggaggagaccagactgagagagagcgtggtgcagatgggcgtgctgatgagcgaggaggaggtgttcgagctggtgcccgacgacgagagacagtgcagcgcctgcagaaccacctgcttcctgagcgccctgacctgcagctgcaaccccgagagactggtgtgcctgtaccaccccaccgacctgtgcccctgccccatgcagaagaagtgcctgagatacagataccccctggaggacctgcccagcctgctgtacggcgtgaaggtgagagcccagagctacgacacctgggtgagcagagtgaccgaggccctgagcgccaacttcaaccacaagaaggacctgatcgagctgagagtgatgctggaggacgccgaggacagaaagtaccccgagaacgacctgttcagaaagctgagagacgccgtgaaggaggccgagacctgcgccagcgtggcccagctgctgctgagcaagaagcagaagcacagacagagccccgacagcggcagaaccagaaccaagctgaccgtggaggagctgaaggccttcgtgcagcagctgttcagcctgccctgcgtgatcagccaggccagacaggtgaagaacctgctggacgacgtggaggagttccacgagagagcccaggaggccatgatggacgagacccccgacagcagcaagctgcagatgctgatcgacatgggcagcagcctgtacgtggagctgcccgagctgcccagactgaagcaggagctgcagcaggccagatggctggacgaggtgagactgaccctgagcgacccccagcaggtgaccctggacgtgatgaagaagctgatcgacagcggcgtgggcctggccccccaccacgccgtggagaaggccatggccgagctgcaggagctgctgaccgtgagcgagagatgggaggagaaggccaaggtgtgcctgcaggccagacccagacacagcgtggccagcctggagagcatcgtgaacgaggccaagaacatccccgccttcctgcccaacgtgctgagcctgaaggaggccctgcagaaggccagagagtggaccgccaaggtggaggccatccagagcggcagcaactacgcctacctggagcagctggagagcctgagcgccaagggcagacccatccccgtgagactggaggccctgccccaggtggagagccaggtggccgccgccagagcctggagagagagaaccggcagaaccttcctgaagaagaacagcagccacaccctgctgcaggtgctgagccccagaaccgacatcggcgtgtacggcagcggcaagaacagaagatag

SEQ ID NO: 33948 - DNA, 5073 bp, Artificial Sequence
  derived and/or modified sequence
atggccggcgtgggccccggcggctacgccgccgagttcgtgcccccccccgagtgccccgtgttcgagcccagctgggaggagttcaccgaccccctgagcttcatcggcagaatcagacccctggccgagaagaccggcatctgcaagatcagaccccccaaggactggcagccccccttcgcctgcgaggtgaagagcttcagattcacccccagagtgcagagactgaacgagctggaggccatgaccagagtgagactggacttcctggaccagctggccaagttctgggagctgcagggcagcaccctgaagatccccgtggtggagagaaagatcctggacctgtacgccctgagcaagatcgtggccagcaagggcggcttcgagatggtgaccaaggagaagaagtggagcaaggtgggcagcagactgggctacctgcccggcaagggcaccggcagcctgctgaagagccactacgagagaatcctgtacccctacgagctgttccagagcggcgtgagcctgatgggcgtgcagatgcccaacctggacctgaaggagaaggtggagcccgaggtgctgagcaccgacacccagaccagccccgagcccggcaccagaatgaacatcctgcccaagagaaccagaagagtgaagacccagagcgagagcggcgacgtgagcagaaacaccgagctgaagaagctgcagatcttcggcgccggccccaaggtggtgggcctggccatgggcaccaaggacaaggaggacgaggtgaccagaagaagaaaggtgaccaacagaagcgacgccttcaacatgcagatgagacagagaaagggcaccctgagcgtgaacttcgtggacctgtacgtgtgcatgttctgcggcagaggcaacaacgaggacaagctgctgctgtgcgacggctgcgacgacagctaccacaccttctgcctgatcccccccctgcccgacgtgcccaagggcgactggagatgccccaagtgcgtggccgaggagtgcagcaagcccagagaggccttcggcttcgagcaggccgtgagagagtacaccctgcagagcttcggcgagatggccgacaacttcaagagcgactacttcaacatgcccgtgcacatggtgcccaccgagctggtggagaaggagttctggagactggtgagcagcatcgaggaggacgtgatcgtggagtacggcgccgacatcagcagcaaggacttcggcagcggcttccccgtgaaggacggcagaagaaagatcctgcccgaggaggaggagtacgccctgagcggctggaacctgaacaacatgcccgtgctggagcagagcgtgctggcccacatcaacgtggacatcagcggcatgaaggtgccctggctgtacgtgggcatgtgcttcagcagcttctgctggcacatcgaggaccactggagctacagcatcaactacctgcactggggcgagcccaagacctggtacggcgtgcccagccacgccgccgagcagctggaggaggtgatgagagagctggcccccgagctgttcgagagccagcccgacctgctgcaccagctggtgaccatcatgaaccccaacgtgctgatggagcacggcgtgcccgtgtacagaaccaaccagtgcgccggcgagttcgtggtgaccttccccagagcctaccacagcggcttcaaccagggctacaacttcgccgaggccgtgaacttctgcaccgccgactggctgcccatcggcagacagtgcgtgaaccactacagaagactgagaagacactgcgtgttcagccacgaggagctgatcttcaagatggccgccgaccccgagtgcctggacgtgggcctggccgccatggtgtgcaaggagctgaccctgatgaccgaggaggagaccagactgagagagagcgtggtgcagatgggcgtgctgatgagcgaggaggaggtgttcgagctggtgcccgacgacgagagacagtgcagcgcctgcagaaccacctgcttcctgagcgccctgacctgcagctgcaaccccgagagactggtgtgcctgtaccaccccaccgacctgtgcccctgccccatgcagaagaagtgcctgagatacagataccccctggaggacctgcccagcctgctgtacggcgtgaaggtgagagcccagagctacgacacctgggtgagcagagtgaccgaggccctgagcgccaacttcaaccacaagaaggacctgatcgagctgagagtgatgctggaggacgccgaggacagaaagtaccccgagaacgacctgttcagaaagctgagagacgccgtgaaggaggccgagacctgcgccagcgtggcccagctgctgctgagcaagaagcagaagcacagacagagccccgacagcggcagaaccagaaccaagctgaccgtggaggagctgaaggccttcgtgcagcagctgttcagcctgccctgcgtgatcagccaggccagacaggtgaagaacctgctggacgacgtggaggagttccacgagagagcccaggaggccatgatggacgagacccccgacagcagcaagctgcagatgctgatcgacatgggcagcagcctgtacgtggagctgcccgagctgcccagactgaagcaggagctgcagcaggccagatggctggacgaggtgagactgaccctgagcgacccccagcaggtgaccctggacgtgatgaagaagctgatcgacagcggcgtgggcctggccccccaccacgccgtggagaaggccatggccgagctgcaggagctgctgaccgtgagcgagagatgggaggagaaggccaaggtgtgcctgcaggccagacccagacacagcgtggccagcctggagagcatcgtgaacgaggccaagaacatccccgccttcctgcccaacgtgctgagcctgaaggaggccctgcagaaggccagagagtggaccgccaaggtggaggccatccagagcggcagcaactacgcctacctggagcagctggagagcctgagcgccaagggcagacccatccccgtgagactggaggccctgccccaggtggagagccaggtggccgccgccagagcctggagagagagaaccggcagaaccttcctgaagaagaacagcagccacaccctgctgcaggtgctgagccccagaaccgacatcggcgtgtacggcagcggcaagaacagaagaaagaaggtgaaggagctgatcgagaaggagaaggagaaggacctggacctggagcccctgagcgacctggaggagggcctggaggagaccagagacaccgccatggtggtggccgtgttcaaggagagagagcagaaggagatcgaggccatgcacagcctgagagccgccaacctggccaagatgaccatggtggacagaatcgaggaggtgaagttctgcatctgcagaaagaccgccagcggcttcatgctgcagtgcgagctgtgcaaggactggttccacaacagctgcgtgcccctgcccaagagcagcagccagaagaagggcagcagctggcaggccaaggaggtgaagttcctgtgccccctgtgcatgagaagcagaagacccagactggagaccatcctgagcctgctggtgagcctgcagaagctgcccgtgagactgcccgagggcgaggccctgcagtgcctgaccgagagagccatgagctggcaggacagagccagacaggccctggccaccgacgagctgagcagcgccctggccaagctgagcgtgctgagccagagaatggtggagcaggccgccagagagaagaccgagaagatcatcagcgccgagctgcagaaggccgccgccaaccccgacctgcagggccacctgcccagcttccagcagagcgccttcaacagagtggtgagcagcgtgagcagcagccccagacagaccatggactacgacgacgaggagaccgacagcgacgaggacatcagagagacctacggctacgacatgaaggacaccgccagcgtgaagagcagcagcagcctggagcccaacctgttctgcgacgaggagatccccatcaagagcgaggaggtggtgacccacatgtggaccgcccccagcttctgcgccgagcacgcctacagcagcgccagcaagagctgcagccagggcagcagcacccccagaaagcagcccagaaagagccccctggtgcccagaagcctggagccccccgtgctggagctgagccccggcgccaaggcccagctggaggagctgatgatggtgggcgacctgctggaggtgagcctggacgagacccagcacatctggagaatcctgcaggccacccacccccccagcgaggacagattcctgcacatcatggaggacgacagcatggaggagaagcccctgaaggtgaagggcaaggacagcagcgagaagaagagaaagagaaagctggagaaggtggagcagctgttcggcgagggcaagcagaagagcaaggagctgaagaagatggacaagcccagaaagaagaagctgaagctgggcgccgacaagagcaaggagctgaacaagctggccaagaagctggccaaggaggaggagagaaagaagaagaaggagaaggccgccgccgccaaggtggagctggtgaaggagagcaccgagaagaagagagagaagaaggtgctggacatccccagcaagtacgactggagcggcgccgaggagagcgacgacgagaacgccgtgtgcgccgcccagaactgccagagaccctgcaaggacaaggtggactgggtgcagtgcgacggcggctgcgacgagtggttccaccaggtgtgcgtgggcgtgagccccgagatggccgagaacgaggactacatctgcatcaactgcgccaagaagcagggccccgtgagccccggccccgcccccccccccagcttcatcatgagctacaagctgcccatggaggacctgaaggagaccagctag

SEQ ID NO: 33949 - protein, 71 aa, Artificial Sequence
  derived and/or modified sequence
MFLSLPTLTVLIPLVSLAGLFYSASVEENFPQGCTSTASLCFYSLLLPITIPVYVFFHLWTWMGIKLFRHN

SEQ ID NO: 33950 - DNA, 216 bp, Artificial Sequence
  derived and/or modified sequence
atgttcctgagcctgcccaccctgaccgtgctgatccccctggtgagcctggccggcctgttctacagcgccagcgtggaggagaacttcccccagggctgcaccagcaccgccagcctgtgcttctacagcctgctgctgcccatcaccatccccgtgtacgtgttcttccacctgtggacctggatgggcatcaagctgttcagacacaactag

SEQ ID NO: 33951 - DNA, 216 bp, Artificial Sequence
  derived and/or modified sequence
atgtttctgtcactgcccactctgacagtgctgatccccctcgtgagcctggccggcctgttctacagcgcgtctgttgaagaaaactttccccaggggtgcacgtcgacagccagtctttgtttttattcactgctgctgcctattactattcccgtgtatgtgttcttccatttatggacttggatggggatcaagctcttccgccataattag

SEQ ID NO: 33952 - DNA, 216 bp, Artificial Sequence
  derived and/or modified sequence
atgttcctgagcctgcccaccctgactgtgctgatccccctggtgtccctggccggcctcttctacagcgcctctgtggaggagaacttcccccagggctgcaccagcacagccagcctgtgcttctacagcctgctgctgcccatcaccatccctgtgtatgtgttcttccacctgtggacctggatgggcatcaagctgttccgccacaactag

SEQ ID NO: 33953 - DNA, 216 bp, Artificial Sequence
  derived and/or modified sequence
atgttcctgagcctgcccaccctgaccgtgctgatccccctggtgtctctggctggcctgttttattccgcctccgtggaggaaaatttcccccagggttgcacttccactgcttcgctgtgcttctattctctgcttctgcccattacaatccctgtgtatgtctttttccatctttggacctggatgggcatcaaactctttaggcacaattag

SEQ ID NO: 33954 - DNA, 217 bp, Artificial Sequence
  derived and/or modified sequence
atgtttctgtctcttcctacgttgactgttcttattccactggtttctttagcaggactgttctactcagcctctgtggaagaaaacttcccacagggctgcactagcacagccagcctttgcttttacagcctgctcttgcctattaccataccagtgtatgtattcttccacctttggacttggatgggtattaaactcttcaggcataattgat

SEQ ID NO: 33955 - DNA, 216 bp, Artificial Sequence
  derived and/or modified sequence
atgtttctctctctgcctactctgactgtgctgattcccctggtgagtctggccggtctgttttattctgcttcagtggaagagaattttccacagggatgtacctcaactgctagcttatgtttttactcattgcttctcccaatcaccatccccgtgtacgtgttcttccacctctggacatggatgggtatcaagctgtttcgacacaattag

SEQ ID NO: 33956 - protein, 570 aa, Artificial Sequence
  derived and/or modified sequence
MAARRRRSTGGGRARALNESKRVNNGNTAPEDSSPAKKTRRCQRQESKKMPVAGGKANKDRTEDKQDESVKALLLKGKAPVDPECTAKVGKAHVYCEGNDVYDVMLNQTNLQFNNNKYYLIQLLEDDAQRNFSVWMRWGRVGKMGQHSLVACSGNLNKAKEIFQKKFLDKTKNNWEDREKFEKVPGKYDMLQMDYATNTQDEEETKKEESLKSPLKPESQLDLRVQELIKLICNVQAMEEMMMEMKYNTKKAPLGKLTVAQIKAGYQSLKKIEDCIRAGQHGRALMEACNEFYTRIPHDFGLRTPPLIRTQKELSEKIQLLEALGDIEIAIKLVKTELQSPEHPLDQHYRNLHCALRPLDHESYEFKVISQYLQSTHAPTHSDYTMTLLDLFEVEKDGEKEAFREDLHNRMLLWHGSRMSNWVGILSHGLRIAPPEAPITGYMFGKGIYFADMSSKSANYCFASRLKNTGLLLLSEVALGQCNELLEANPKAEGLLQGKHSTKGLGKMAPSSAHFVTLNGSTVPLGPASDTGILNPDGYTLNYNEYIVYNPNQVRMRYLLKVQFNFLQLW

SEQ ID NO: 33957 - DNA, 1713 bp, Artificial Sequence
  derived and/or modified sequence
atggccgccagaagaagaagaagcaccggcggcggcagagccagagccctgaacgagagcaagagagtgaacaacggcaacaccgcccccgaggacagcagccccgccaagaagaccagaagatgccagagacaggagagcaagaagatgcccgtggccggcggcaaggccaacaaggacagaaccgaggacaagcaggacgagagcgtgaaggccctgctgctgaagggcaaggcccccgtggaccccgagtgcaccgccaaggtgggcaaggcccacgtgtactgcgagggcaacgacgtgtacgacgtgatgctgaaccagaccaacctgcagttcaacaacaacaagtactacctgatccagctgctggaggacgacgcccagagaaacttcagcgtgtggatgagatggggcagagtgggcaagatgggccagcacagcctggtggcctgcagcggcaacctgaacaaggccaaggagatcttccagaagaagttcctggacaagaccaagaacaactgggaggacagagagaagttcgagaaggtgcccggcaagtacgacatgctgcagatggactacgccaccaacacccaggacgaggaggagaccaagaaggaggagagcctgaagagccccctgaagcccgagagccagctggacctgagagtgcaggagctgatcaagctgatctgcaacgtgcaggccatggaggagatgatgatggagatgaagtacaacaccaagaaggcccccctgggcaagctgaccgtggcccagatcaaggccggctaccagagcctgaagaagatcgaggactgcatcagagccggccagcacggcagagccctgatggaggcctgcaacgagttctacaccagaatcccccacgacttcggcctgagaaccccccccctgatcagaacccagaaggagctgagcgagaagatccagctgctggaggccctgggcgacatcgagatcgccatcaagctggtgaagaccgagctgcagagccccgagcaccccctggaccagcactacagaaacctgcactgcgccctgagacccctggaccacgagagctacgagttcaaggtgatcagccagtacctgcagagcacccacgcccccacccacagcgactacaccatgaccctgctggacctgttcgaggtggagaaggacggcgagaaggaggccttcagagaggacctgcacaacagaatgctgctgtggcacggcagcagaatgagcaactgggtgggcatcctgagccacggcctgagaatcgccccccccgaggcccccatcaccggctacatgttcggcaagggcatctacttcgccgacatgagcagcaagagcgccaactactgcttcgccagcagactgaagaacaccggcctgctgctgctgagcgaggtggccctgggccagtgcaacgagctgctggaggccaaccccaaggccgagggcctgctgcagggcaagcacagcaccaagggcctgggcaagatggcccccagcagcgcccacttcgtgaccctgaacggcagcaccgtgcccctgggccccgccagcgacaccggcatcctgaaccccgacggctacaccctgaactacaacgagtacatcgtgtacaaccccaaccaggtgagaatgagatacctgctgaaggtgcagttcaacttcctgcagctgtggtag

SEQ ID NO: 33958 - DNA, 1713 bp, Artificial Sequence
  derived and/or modified sequence
atggctgctcggcggcgacgaagtacagggggcggaagagctcgcgctctaaacgaatccaaacgagtcaataacggaaatacagccccagaggactcttctcctgccaaaaaaacaaggaggtgccagcggcaggagtcgaagaaaatgcccgtggcagggggcaaagctaataaagaccgcactgaagataaacaagacgaatctgttaaggccctgctactcaaagggaaggctcccgtggaccccgagtgcaccgcgaaggtggggaaggcgcacgtgtactgtgaagggaacgatgtctatgacgtaatgctgaatcagactaacttgcagtttaataataataagtactacctcatccaacttctagaggatgacgcccagagaaatttctctgtttggatgcggtgggggagggtaggtaagatgggacagcactccttagtggcctgtagtggcaacctcaacaaagcaaaggagatctttcagaagaagttcctagataagacaaaaaataactgggaagatcgtgagaaattcgagaaagtcccgggcaaatacgacatgctgcaaatggactatgccacaaacacccaggacgaggaggaaactaagaaggaagaaagcctgaaaagccccctcaagccagaaagtcagctggatctgcgggtgcaggagctaatcaaactgatctgtaatgttcaggcaatggaagagatgatgatggagatgaagtacaataccaagaaagctccattgggtaaacttacagttgcccagatcaaggcgggatatcaatccttaaaaaaaatcgaggattgcatccgggcaggtcagcacgggcgcgccttgatggaggcttgcaatgagttctatactaggataccccatgacttcggccttcggacccctccactcatccgaacacagaaggagctgtccgaaaaaatacaactgctagaagccctgggagacatcgaaatagctatcaaactcgtcaagaccgagctccagtcccccgagcaccccttagatcagcattacaggaacctccactgcgccctgagacccctggaccacgagtcatatgagttcaaagttatttcccagtaccttcagtctacacacgccccgacacactctgattacacaatgaccctactggacttatttgaagttgagaaagacggtgaaaaggaggctttccgcgaggacctgcacaatcgcatgctcctgtggcatggttctaggatgagcaattgggtgggcattctgtctcatggactcaggattgccccaccagaggcccccatcacggggtacatgtttggtaagggcatttattttgcagatatgagcagtaaaagcgctaactactgttttgcctctcggctgaagaacacgggactgctcctgttgagtgaggtcgcacttggccagtgcaatgaactgctggaagctaaccctaaagccgaaggcctcttgcagggaaaacatagtacaaaaggcctgggtaagatggcccccagcagtgctcattttgtgacacttaatggcagcactgtccctctgggacccgcctcagacacaggaatcttgaatcccgacggctataccctcaattataatgaatacatcgtttataacccaaaccaagtccgtatgcggtatcttctgaaagtgcagtttaacttcttgcagctctggtag

SEQ ID NO: 33959 - DNA, 1713 bp, Artificial Sequence
  derived and/or modified sequence
atggccgccaggagaagaagaagcactggaggcggccgggcccgggccctgaatgaaagcaagagggtgaacaatggaaacacagcccctgaggacagcagccctgccaagaagacccggcgctgccagaggcaggagagcaagaagatgcctgtggccggcggcaaggccaacaaggacagaacagaggacaagcaggatgaatctgtgaaggccctgctgctgaagggcaaggcccctgtggaccctgagtgcacagccaaggtgggcaaggcccacgtgtactgtgagggcaatgatgtgtatgatgtgatgctgaaccagaccaacctgcagttcaacaacaacaagtactacctgatccagctgctggaggatgatgcccagaggaacttctctgtgtggatgcgctggggccgggtgggcaagatgggccagcacagcctggtggcctgcagcggcaacctgaacaaggccaaggagatcttccagaagaagttcctggacaagaccaagaacaactgggaggaccgggagaagtttgagaaggtgcctgggaagtatgacatgctgcagatggactatgccaccaacacccaggatgaggaggagaccaagaaggaggagagcctgaagagccccctgaagccagagagccagctggacctgcgggtgcaggagctgatcaagctgatctgcaatgtgcaggccatggaggagatgatgatggagatgaagtacaacaccaagaaggcccccctgggcaagctgactgtggcccagatcaaggccggctaccagagcctgaagaagattgaggactgcatccgggccggccagcacggccgggccctgatggaggcctgcaatgagttctacacccgcatcccccatgactttggcctgcggaccccacccctcatccgcacccagaaggagctgtctgagaagatccagctgctggaggccctgggggacattgaaattgccatcaagctggtgaagacagagctgcagagccctgagcaccccctggaccagcactacagaaacctgcactgtgccctgcggcccctggaccacgagagctatgagttcaaggtgatcagccagtacctgcagagcacccacgcccccacccacagcgactacaccatgaccctgctggacctgtttgaggtggagaaggatggagagaaggaggccttccgggaggacctgcacaacaggatgctgctgtggcacggcagcaggatgagcaactgggtgggcatcctgagccacggcctgcgcatcgcccctcctgaggcccccatcaccggctacatgtttgggaagggcatctactttgctgacatgagcagcaagagcgccaactactgctttgccagccggctgaagaacacaggcctgctgctgctgtctgaggtggccctgggccagtgcaatgagctgctggaggccaaccccaaggccgagggcctgctgcagggcaagcacagcaccaagggcctgggcaagatggcccccagcagcgcccactttgtgaccctgaatggcagcacagtgcccctgggccctgccagtgacaccggcatcctgaacccagatggctacaccctgaactacaatgagtacatcgtgtacaaccccaaccaggtgaggatgagatacctgctgaaggtgcagttcaacttcctgcagctgtggtag

SEQ ID NO: 33960 - DNA, 1713 bp, Artificial Sequence
  derived and/or modified sequence
atggccgcccggcggcggcggagcaccggcggcggccgggcccgggccctgaatgagagcaagcgagtgaataacggcaacacagctcctgaggactcatcgccagccaagaaaacacgcagatgccaaaggcaagaatctaagaagatgcctgtagctggcgggaaggccaataaagacagaactgaggataaacaggacgaatcggtaaaggcccttttgctcaaaggcaaggcacccgtagacccggaatgtaccgcaaaggtgggtaaggcccatgtatactgcgaaggtaatgacgtctacgatgttatgctaaaccagaccaacctccagttcaataacaacaagtattacctgatccaactcctcgaagacgacgcccagagaaatttcagcgtttggatgagatggggccgcgtgggaaaaatgggccagcatagcctggtggcctgttctggcaacctcaacaaggcgaaagagatcttccagaaaaaatttctggataagactaagaacaattgggaagatagggaaaaatttgagaaggttcctgggaagtacgatatgctacagatggactatgcaaccaacacacaggacgaagaggaaactaaaaaagaggagtccctcaagtctcctttaaagccagaatctcagctcgacttgcgggttcaggagctaatcaagctcatctgtaacgtgcaggccatggaggaaatgatgatggaaatgaagtacaatactaaaaaagcccctctcgggaaactgaccgttgctcagatcaaggctggctaccagagcctcaaaaagattgaagactgtataagggccggccaacatggaagagctctgatggaggcctgtaatgagttctacaccagaatcccgcatgacttcggcctccgtacaccccctctgattaggactcagaaagagttgtctgagaagatccagctgctggaagcgcttggagacattgaaatagcgatcaagctggtcaagactgagctgcagtcacctgagcacccactagatcagcactacaggaacttgcattgtgctttgcgcccccttgaccatgagtcctacgagttcaaggtgatatcccagtaccttcaaagtacacatgctccaacccactccgactatactatgactctactggacctctttgaagtagaaaaggacggtgagaaggaagcattccgagaggacctgcataaccgcatgctactgtggcatggtagccgtatgtccaactgggtgggcattctctcccatggcctgcgaatcgccccacccgaagcccccatcaccgggtacatgttcggaaaagggatttactttgcagatatgagctctaagagcgccaactactgtttcgcttccagactgaagaatactgggctgctacttcttagcgaggtggctcttggccagtgtaatgaactcctggaggcaaatcccaaggccgaggggctcctgcaggggaaacactcaaccaaagggctaggcaagatggcccctagcagtgcacacttcgtcacattaaacgggagcaccgttcccctgggtccagcatctgacactggaatcctaaacccagatggatacactctcaattacaatgagtacattgtctacaacccaaatcaggtgagaatgcgttacctgcttaaggttcaatttaactttctgcagttgtggtag

SEQ ID NO: 33961 - DNA, 1713 bp, Artificial Sequence
  derived and/or modified sequence
atggccgctcgccgacgccgttccacaggaggaggcagagccagggcgctgaatgaatccaaacgcgtaaacaacgggaacacagctcctgaagacagttctcccgcaaagaagactcgtcgttgccagcgtcaggaatctaagaagatgccagtggctggaggcaaagcaaacaaggataggacagaggataagcaagacgagagtgtgaaggctctgctgctgaaagggaaagccccagttgatcccgaatgcaccgcaaaagttggcaaggctcatgtgtactgtgagggcaatgacgtatacgacgtgatgcttaatcagaccaatcttcagttcaacaacaataagtactacctaattcagctgctggaggacgacgcccaacggaatttctctgtgtggatgagatggggcagagtgggcaagatgggtcagcattcactcgtagcgtgctccggtaacctcaataaggccaaagaaatattccaaaaaaaattcctggacaagaccaaaaataactgggaagacagagaaaaattcgaaaaagtcccagggaagtacgatatgctccagatggattacgccaccaacactcaggatgaggaagagacaaagaaagaagaatcactgaagtctcctctgaagccagagagtcagttggacctgcgtgtgcaagagctgatcaagctgatctgcaatgtgcaggcaatggaggagatgatgatggagatgaagtataatacaaagaaggcccctctggggaaactgaccgtagctcagattaaagccggataccagtctctcaagaaaattgaagactgtattagagctggacaacatggccgtgctttgatggaagcctgtaatgagttttatacacgcatcccccacgattttggcctccgtacccctcccctaatccggacacaaaaggagttgtcagagaagatacagttgttagaggctctgggagacatcgaaatcgccataaagctggtgaaaacagaactgcagagtccagagcatccgttggatcagcattatagaaaccttcactgtgcccttaggcctctcgatcacgaaagttacgagtttaaggtgatcagccagtacttgcaatccactcatgcacccacacattcagactataccatgacattgctggatctattcgaggtggaaaaggatggggagaaagaggcctttagagaggatctgcataaccggatgcttctgtggcacggctcccgcatgtcaaactgggtcggcatattgagccacggactgagaatcgcacccccagaagctcctattacaggctacatgttcggtaagggaatctatttcgccgacatgtcttcaaagtcagccaattactgttttgccagcaggctaaagaacacagggcttctgctcctaagtgaggttgcactgggtcaatgcaacgaacttctggaggccaaccccaaagccgagggactcttgcagggcaagcactcaaccaaaggcctcgggaaaatggccccttcaagtgcccatttcgtcaccctcaatggatctaccgtccccctgggacctgcctccgatactggtattctgaaccccgatggatatactttgaactataatgaatacattgtgtataacccgaatcaggtccggatgcgatacctcctgaaggtgcagtttaacttccttcagttatggtag

SEQ ID NO: 33962 - DNA, 1881 bp, Artificial Sequence
  derived and/or modified sequence
ctagtgacactgggcccgcgattccttggagcgggttgatgacgtcagcgttcgaattccatggcggcgcggcggcgacggagcaccggcggcggcagggcgagagcattaaatgaaagcaaaagagttaataatggcaacacggctccagaagactcttcccctgccaagaaaactcgtagatgccagagacaggagtcgaaaaagatgcctgtggctggaggaaaagctaataaggacaggacagaagacaagcaagatgaatctgtgaaggccttgctgttaaagggcaaagctcctgtggacccagagtgtacagccaaggtggggaaggctcatgtgtattgtgaaggaaatgatgtctatgatgtcatgctaaatcagaccaatctccagttcaacaacaacaagtactatctgattcagctattagaagatgatgcccagaggaacttcagtgtttggatgagatggggccgagttgggaaaatgggacagcacagcctggtggcttgttcaggcaatctcaacaaggccaaggaaatctttcagaagaaattccttgacaaaacgaaaaacaattgggaagatcgagaaaagtttgagaaggtgcctggaaaatatgatatgctacagatggactatgccaccaatactcaggatgaagaggaaacaaagaaagaggaatctcttaaatctcccttgaagccagagtcacagctagatcttcgggtacaggagttaataaagttgatctgtaatgttcaggccatggaagaaatgatgatggaaatgaagtataataccaagaaagccccacttgggaagctgacagtggcacaaatcaaggcaggttaccagtctcttaagaagattgaggattgtattcgggctggccagcatggacgagctctcatggaagcatgcaatgaattctacaccaggattccgcatgactttggactccgtactcctccactaatccggacacagaaggaactgtcagaaaaaatacaattactagaggctttgggagacattgaaattgctattaagctggtgaaaacagagctacaaagcccagaacacccattggaccaacactatagaaacctacattgtgccttgcgcccccttgaccatgaaagttatgagttcaaagtgatttcccagtacctacaatctacccatgctcccacacacagcgactataccatgaccttgctggatttgtttgaagtggagaaggatggtgagaaagaagccttcagagaggaccttcataacaggatgcttctatggcatggttccaggatgagtaactgggtgggaatcttgagccatgggcttcgaattgccccacctgaagctcccatcacaggttacatgtttgggaaaggaatctactttgctgacatgtcttccaagagtgccaattactgctttgcctctcgcctaaagaatacaggactgctgctcttatcagaggtagctctaggtcagtgtaatgaactactagaggccaatcctaaggccgaaggattgcttcaaggtaaacatagcaccaaggggctgggcaagatggctcccagttctgcccacttcgtcaccctgaatgggagtacagtgccattaggaccagcaagtgacacaggaattctgaatccagatggttataccctcaactacaatgaatatattgtatataaccccaaccaggtccgtatgcggtaccttttaaaggttcagtttaatttccttcagctgtggtgaatgttgatattaaataaaccagagatctgatcttcaagcaagaaaataagcagtgttgtacttgtgaattttgtgatattttatgtaataaaaactgtacaggtctac

SEQ ID NO: 33963 - DNA, 627 bp, Artificial Sequence
  derived and/or modified sequence
atggccggcaccgccagacacgacagagagatggccatccaggccaagaagaagctgaccaccgccaccgaccccatcgagagactgagactgcagtgcctggccagaggcagcgccggcatcaagggcctgggcagagtgttcagaatcatggacgacgacaacaacagaaccctggacttcaaggagttcatgaagggcctgaacgactacgccgtggtgatggagaaggaggaggtggaggagctgttcagaagattcgacaaggacggcaacggcaccatcgacttcaacgagttcctgctgaccctgagaccccccatgagcagagccagaaaggaggtgatcatgcaggccttcagaaagctggacaagaccggcgacggcgtgatcaccatcgaggacctgagagaggtgtacaacgccaagcaccaccccaagtaccagaacggcgagtggagcgaggagcaggtgttcagaaagttcctggacaacttcgacagcccctacgacaaggacggcctggtgacccccgaggagttcatgaactactacgccggcgtgagcgccagcatcgacaccgacgtgtacttcatcatcatgatgagaaccgcctggaagctgtag

SEQ ID NO: 33964 - DNA, 573 bp, Artificial Sequence
  derived and/or modified sequence
atggccggcaccgccagacacgacagagagatggccatccaggccaagaagaagctgaccaccgccaccgaccccatcgagagactgagactgcagtgcctggccagaggcagcgccggcatcaagggcctgggcagagtgttcagaatcatggacgacgacaacaacagaaccctggacttcaaggagttcatgaagggcctgaacgactacgccgtggtgatggagaaggaggaggtggaggagctgttcagaagattcgacaaggacggcaacggcaccatcgacttcaacgagttcctgctgaccctgagaccccccatgagcagagccagaaaggaggtgatcatgcaggccttcagaaagctggacaagaccggcgacggcgtgatcaccatcgaggacctgagagaggtgtacaacgccaagcaccaccccaagtaccagaacggcgagtggagcgaggagcaggtgttcagaaagttcctggacaacttcgacagcccctacgacaaggacggcctggtgacccccgaggagttcatgaactactacgccggcgtgagcgcctag

SEQ ID NO: 33965 - DNA, 627 bp, Artificial Sequence
  derived and/or modified sequence
atggctggaactgcgagacatgaccgtgagatggccatccaggccaagaagaaactcaccacggccactgaccccattgagcgcctacggttgcagtgcctggctcgcgggagcgccggcatcaagggcctgggtagggtattccgcatcatggatgatgacaacaaccggaccctagatttcaaagaattcatgaagggcttaaacgactatgctgtagtaatggagaaagaagaagttgaggaactgttccgaaggttcgacaaggacggtaacggcaccatagattttaatgaatttcttctgactctgagacctccaatgagccgcgcaaggaaagaagtgattatgcaggcttttcgaaaactggataagactggggatggcgttataaccatagaagacttacgcgaagtctataatgctaaacaccatcccaagtaccagaacggcgagtggtcagaggaacaggtgtttagaaagttcctggataactttgactccccttacgataaggatggtttggtgaccccagaagaatttatgaactactatgccggtgtatccgcttctatcgatacagatgtgtattttattattatgatgcgcacagcttggaagctttag

SEQ ID NO: 33966 - DNA, 627 bp, Artificial Sequence
  derived and/or modified sequence
atggcaggcacagcccgtcatgatcgggagatggccatccaggccaaaaagaagctgacaacagcgacagatcccatcgagaggctccggctgcagtgtcttgcccgtggttcggcaggcattaagggactaggtcgcgtattccgcattatggacgacgacaataatagaacactggacttcaaggaatttatgaaaggactgaacgactacgcagtcgttatggagaaggaagaggtagaagaactatttaggcgattcgataaggacgggaacggcacaattgatttcaacgagtttctactgacgctacggccacccatgagtcgggcacgcaaagaagtgatcatgcaggcatttcgaaagctcgacaagacaggcgacggagtgattaccatcgaagacctgagagaagtgtacaacgccaaacaccaccctaaataccagaacggggagtggagcgaggaacaagttttccgaaaattcctggataacttcgactccccttacgacaaggatggactggttacgcctgaagagttcatgaattattatgcaggagtatccgcctcaatcgacaccgacgtttacttcataattatgatgcgcaccgcctggaaattgtag

SEQ ID NO: 33967 - DNA, 573 bp, Artificial Sequence
  derived and/or modified sequence
atggcaggcaccgcgaggcatgaccgggagatggctattcaagctaagaagaagcttactactgccactgaccccattgagcgtctgagactccagtgcctcgcacgtggctctgcagggatcaaggggctgggacgagtattcagaattatggacgacgataataaccgcaccctggattttaaagagttcatgaaaggattgaatgattatgctgtcgtgatggaaaaagaagaggtcgaagagctgtttcgtagatttgacaaggatggtaatggtaccattgattttaacgagttcttgcttacccttagaccccccatgagcagggctcgcaaagaagtcatcatgcaggctttccgcaagttggacaaaactggtgacggcgtcatcacaatcgaagacctccgcgaggtctacaatgctaagcaccaccccaaataccagaatggcgagtggtccgaggagcaggtgtttaggaagttcttggacaactttgactccccatatgataaagatggcttggtaacgccagaggagtttatgaattactacgcaggcgtgtccgcttag

SEQ ID NO: 33968 - DNA, 627 bp, Artificial Sequence
  derived and/or modified sequence
atggccggcacagcccggcatgaccgggagatggccatccaggccaagaagaagctgaccacagccacagaccccatcgagcggctgcggctgcagtgcctggcccggggcagcgctggcatcaagggcctgggccgggtcttccgcatcatggatgatgacaacaacagaaccctggacttcaaggagttcatgaagggcctgaatgactatgctgtggtgatggagaaggaggaggtggaggagctgttcagaagatttgacaaggatggaaatggcaccatcgacttcaatgagttcctgctgaccctgcggccccccatgagccgggccaggaaggaggtgatcatgcaggccttcaggaagctggacaagacaggagatggagtcatcaccatcgaggacctgcgggaggtgtacaatgccaagcaccaccccaagtaccagaatggagagtggagcgaggagcaggtgttcaggaagttcctggacaactttgacagcccctatgacaaggatggcctggtgaccccagaggagttcatgaactactatgctggggtgtctgccagcattgacacagatgtgtacttcatcatcatgatgaggacagcctggaagctgtag

SEQ ID NO: 33969 - DNA, 573 bp, Artificial Sequence
  derived and/or modified sequence
atggccggcacagcccggcatgaccgggagatggccatccaggccaagaagaagctgaccacagccacagaccccatcgagcggctgcggctgcagtgcctggcccggggcagcgctggcatcaagggcctgggccgggtcttccgcatcatggatgatgacaacaacagaaccctggacttcaaggagttcatgaagggcctgaatgactatgctgtggtgatggagaaggaggaggtggaggagctgttcagaagatttgacaaggatggaaatggcaccatcgacttcaatgagttcctgctgaccctgcggccccccatgagccgggccaggaaggaggtgatcatgcaggccttcaggaagctggacaagacaggagatggagtcatcaccatcgaggacctgcgggaggtgtacaatgccaagcaccaccccaagtaccagaatggagagtggagcgaggagcaggtgttcaggaagttcctggacaactttgacagcccctatgacaaggatggcctggtgaccccagaggagttcatgaactactatgctggggtgtctgcctag

SEQ ID NO: 33970 - DNA, 627 bp, Artificial Sequence
  derived and/or modified sequence
atggccggcaccgcccggcacgaccgggagatggccatccaggccaaaaaaaaactgacaactgcgacagacccgatcgagaggttgcggctgcaatgcttagcacggggatccgccggcattaaaggtttaggacgggtcttccgcatcatggatgatgataataacaggacattggatttcaaagagttcatgaagggtttgaatgactacgctgttgtcatggagaaagaagaggtcgaagagttatttcgccggttcgataaggacggcaacggaaccatcgatttcaatgagtttctgttgacgctccgcccacccatgagccgtgctaggaaggaagttattatgcaggcattcaggaagctcgataagactggagatggagttatcaccatagaagacctccgggaagtatacaatgcgaaacaccacccgaagtaccagaatggcgagtggtcggaggagcaggttttccgaaagttcctagataactttgactccccctatgacaaggacggactggtgactcctgaggagtttatgaattattacgcgggggtatcagccagcatcgacaccgacgtgtactttataattatgatgagaaccgcctggaagctgtag

SEQ ID NO: 33971 - DNA, 627 bp, Artificial Sequence
  derived and/or modified sequence
atggccggcaccgcccggcacgaccgggagatggccatccaggccaagaagaagctaactacggctaccgaccccatcgagcgcctccggctgcagtgcttagccaggggtagtgctggcataaagggactgggacgagtgttccgcataatggatgatgacaacaataggaccctagacttcaaagaatttatgaaagggcttaatgactatgcagtggtcatggagaaagaggaggtggaagaactgttccgccgattcgataaggatggaaacggaaccatcgattttaatgagtttctgctcaccctgagaccccctatgtcaagggcacgcaaggaggtgattatgcaggcctttcgcaagcttgacaagaccggagatggagtgatcaccatcgaggatctgcgtgaggtctacaacgcgaagcaccaccctaagtatcagaatggtgaatggagtgaggaacaggtattccgcaagttcctagataatttcgactccccctatgataaagacggactagtgactccagaggagtttatgaattactatgcaggtgttagcgctagtatcgacactgatgtctatttcatcatcatgatgcggactgcttggaaactgtag

SEQ ID NO: 33972 - DNA, 573 bp, Artificial Sequence
  derived and/or modified sequence
atggccggcaccgcccggcacgaccgggagatggccatccaggccaagaagaagttgaccacagctaccgatcccattgagagactcagacttcagtgcctcgcccgggggagtgccggcatcaagggacttggcagagtctttaggatcatggatgacgataataaccggacccttgatttcaaggagtttatgaaggggctgaacgattacgctgtcgtgatggaaaaagaagaggttgaggaactattccgaagatttgataaagacggaaatggaacaatcgactttaatgagttcctcctgaccctacgtccccctatgagccgcgcaagaaaggaagtgattatgcaagcttttagaaagctggacaaaaccggagacggagtgatcactattgaagatcttcgcgaagtgtacaacgccaagcaccaccctaagtatcaaaacggagaatggtctgaagagcaggtgttcaggaagttcctcgacaactttgatagtccatacgataaagacggactggtgacccccgaagagttcatgaactactatgcaggagtgagcgcctag

SEQ ID NO: 33973 - DNA, 627 bp, Artificial Sequence
  derived and/or modified sequence
atggcaggaactgcccgtcacgatcgggagatggctattcaggccaaaaaaaaacttactaccgctacggacccaatcgagcgcctgcgccttcagtgtctggccaggggctccgctggaatcaagggccttggacgcgtatttaggatcatggatgacgacaacaatcgcaccctagacttcaaggagttcatgaaagggttgaacgattacgctgtggttatggagaaggaagaggtggaggaactattccggcgattcgacaaagacggaaatggaacgatagactttaacgagtttctgctcacactacgacctcctatgagtcgagccaggaaagaggttataatgcaggccttcaggaaactggataaaacaggagatggcgtgattacaattgaagatctccgcgaggtatataacgctaaacaccatccaaaatatcagaacggagaatggtctgaggagcaagtgttccgcaaattcttagataactttgatagtccctatgataaggacggcctggtgacacctgaagaattcatgaattattatgctggggtgagtgcttccatcgacaccgacgtgtactttatcatcatgatgcgcaccgcttggaagttgtag

SEQ ID NO: 33974 - DNA, 627 bp, Artificial Sequence
  derived and/or modified sequence
atggccggaaccgccagacatgatagagagatggccattcaagctaaaaagaagctgactactgcaactgatcctatcgaacgtcttcgcctgcagtgtttagcacgaggtagtgctggtattaagggattaggcagggttttcaggatcatggatgatgataataaccggactctggacttcaaggaatttatgaagggtctgaacgactatgccgtcgtcatggaaaaggaagaagtggaggagttgtttaggcgattcgacaaagatggcaatgggaccattgattttaatgagttcctgctcacgctgcgccctccaatgagccgggctcgaaaggaggtgataatgcaggcctttcgaaaactggacaaaaccggagatggagtgatcactatcgaggacctgcgtgaagtgtataatgccaagcaccaccccaaataccagaacggggagtggtccgaggaacaagtcttccggaaatttctcgacaactttgactcaccgtatgataaggatggattggtgactcccgaggagttcatgaattactacgccggagtgtctgcctcaatcgataccgacgtttacttcattatcatgatgagaactgcctggaagctgtag

SEQ ID NO: 33975 - DNA, 573 bp, Artificial Sequence
  derived and/or modified sequence
atggccggaaccgccagacacgaccgagagatggcaattcaggcaaaaaaaaaacttacgactgctaccgatcccattgagaggctccggctacagtgcctggcccgtgggagtgccggtattaagggtctgggcagggtgttcaggatcatggatgatgataacaaccgcaccctcgacttcaaggagtttatgaagggtctcaacgactacgcagtcgttatggagaaagaggaggttgaggaactatttagaagattcgacaaagatgggaacggaaccatcgacttcaacgaatttctgcttactttgcggccacccatgtcccgcgctagaaaggaagtcattatgcaggcctttcgcaaactggacaagacgggcgacggggtaatcaccatcgaggacctccgcgaggtttataacgcaaagcaccatcctaagtaccaaaacggtgagtggtcagaggaacaggtgtttagaaagttcctcgataattttgatagtccgtatgataaagacgggctcgtcacccctgaagagttcatgaattattacgccggtgtaagcgcatag

SEQ ID NO: 33976 - protein, 115 aa, Artificial Sequence
  derived and/or modified sequence
MSRHSRLQRQVLSLYRDLLRAGRGKPGAEARVRAEFRQHAGLPRSDVLRIEYLYRRGRRQLQLLRSGHATAMGAFVRPRAPTGEPGGVGCQPDDGDSPRNPHDSTGAPETRPDGR

SEQ ID NO: 33977 - DNA, 348 bp, Artificial Sequence
  derived and/or modified sequence
atgagcagacacagcagactgcagagacaggtgctgagcctgtacagagacctgctgagagccggcagaggcaagcccggcgccgaggccagagtgagagccgagttcagacagcacgccggcctgcccagaagcgacgtgctgagaatcgagtacctgtacagaagaggcagaagacagctgcagctgctgagaagcggccacgccaccgccatgggcgccttcgtgagacccagagcccccaccggcgagcccggcggcgtgggctgccagcccgacgacggcgacagccccagaaacccccacgacagcaccggcgcccccgagaccagacccgacggcagatag

SEQ ID NO: 33978 - DNA, 348 bp, Artificial Sequence
  derived and/or modified sequence
atgtcccggcactcaaggctgcaaaggcaggttctgtccttgtatcgcgatctcctgagggcaggccggggcaaacccggggctgaggcaagagttagagcggagttcaggcagcacgccggattgccccgcagcgatgtgttgagaatcgagtacctgtaccggagaggaagacgtcaacttcagttgctcaggagtggccacgccacggccatgggagcatttgtccgaccgagagcgccgaccggcgagccaggtggcgtgggctgccagcccgacgatggcgactctccccgaaatccacatgattctaccggggcacccgagacgcggccggatggaaggtag

SEQ ID NO: 33979 - DNA, 348 bp, Artificial Sequence
  derived and/or modified sequence
atgagccgccacagccggctgcagaggcaggtgctgagcctgtacagagacctgctgcgggccggccggggcaagccaggagctgaggcccgggtgcgggcagagttccggcagcacgccggcctgcccaggagtgatgtgctgcgcatcgagtacctgtacagaagaggccggcggcagctgcagctgctgcggagcggccacgccacagccatgggcgcctttgtgcggccccgggcccccaccggggagcctggaggagtgggctgccagccagatgatggagacagccccaggaacccccatgacagcactggagcccctgagaccaggccagatggaagatag

SEQ ID NO: 33980 - DNA, 348 bp, Artificial Sequence
  derived and/or modified sequence
atgagccggcacagccggctgcagcggcaggtgctgagcctgtacagagacttgctcagagctggacgtgggaagccaggggccgaagctagggtgagggccgagtttagacagcatgcagggctaccccgatccgatgttctgcgtatcgaatatctttatcggcgcggacgcagacagctacagctgctaagatccggtcatgcaactgcaatgggcgctttcgtgcgcccacgggccccgactggtgagcccggcggggtggggtgtcagcctgatgacggggattctcccagaaacccacacgattccacgggggcacccgaaactcggcctgacggccgatag

SEQ ID NO: 33981 - DNA, 348 bp, Artificial Sequence
  derived and/or modified sequence
atgtcccggcatagcaggcttcagagacaagtgctaagtctctaccgggacctgctgagggccggaaggggtaagccaggggctgaggccagagtgagagcagagtttaggcaacacgctgggcttcctcggtctgatgtgctgcgcattgagtatctttatagacgcggaaggagacagctccagctgctccgatccggccacgcgaccgccatgggagccttcgtgcgccctcgggctccgactggtgaaccaggcggtgtgggttgtcaaccagatgatggcgatagcccgagaaacccccacgatagcacaggcgcacctgagactcgacctgacggacggtag

SEQ ID NO: 33982 - DNA, 1131 bp, Artificial Sequence
  derived and/or modified sequence
gtggctttgccctttggcctttgctggctgtgtggcggctccgcggttcgcaggtcgttcgctgagcgtctctgcttagccgcggtcatgagccggcacagccggctgcagaggcaggttctgagcctgtaccgcgatctgctgcgcgccgggcgtgggaagccgggcgccgaggcgcgagtgcgggcagagttccggcagcatgcgggcctgccgcggtccgacgtgctgcgcatcgagtacctgtaccgccgcgggcggcgccagctgcagctgctacgctcgggccacgccaccgccatgggcgccttcgtacgcccgcgggccccgaccggggagcctggcggcgtgggttgccagcctgacgacggcgacagtccaaggaacccccacgacagcacgggggcaccggagacccgccccgacggacggtgacaggcgaagagccgaactcgctcgatggcgtggtggagccaggaggctcgcctgactgcatggggggactggggaacccgcctaaggtgagaggtcttaagagactagcttgacgaattggggatgtcagagactcctccttggcgacgcagggggcctagagagccccgtgatggacggcaagggaggcccgccttttccgatgcttggagacaggtcggtgctcctcccccatgagggcttggggcggcctgggacgctggcgggctggacagtgtcaagccaagagctacttgcccgaaggtacggggagccaggacgacccccggtggacagggagagcctgagacgcccttctcttgacccctgagaacatacccacttctggctcctcaaggagtctcccctctcctgtatttaactctgagaagtgcagactttttgctgagaacgttttgggaaggtgccctgatgagcggtgagaagcccggaatccccttctggaaaactttcccccattaattgtgacaagccaggaccatgaggaaggggtaggggtctatcaccctggttgatcaactgaagacccccaaaggcccctacttgatggttttgaggggcaacattgactcatttgccccttccctctcggaatgttggacaaagggaataaaattggggatatgtctacttccc

SEQ ID NO: 33983 - protein, 315 aa, Artificial Sequence
  derived and/or modified sequence
MAALGVLESDLPSAVTLLKNLQEQVMAVTAQVKSLTQKVQAGAYPTEKGLSFLEVKDQLLLMYLMDLTHLILDKASGGSLQGHDAVLRLVEIRTVLEKLRPLDQKLKYQIDKLIKTAVTGSLSENDPLRFKPHPSNMMSKLSSEDEEEDEAEDDQSEASGKKSVKGVSKKYVPPRLVPVHYDETEAEREKKRLERAKRRALSSSVIRELKEQYSDAPEEIRDARHPHVTRQSQEDQHRINYEESMMVRLSVSKREKGRRKRANVMSSQLHSLTHFSDISALTGGTVHLDEDQNPIKKRKKIPQKGRKKKGFRRRR

SEQ ID NO: 33984 - protein, 953 aa, Artificial Sequence
  derived and/or modified sequence
MALVFQFGQPVRAQPLPGLCHGKLIRTNACDVCNSTDLPEVEIISLLEEQLPHYKLRADTIYGYDHDDWLHTPLISPDANIDLTTEQIEETLKYFLLCAERVGQMTKTYNDIDAVTRLLEEKERDLELAARIGQSLLKKNKTLTERNELLEEQVEHIREEVSQLRHELSMKDELLQFYTSAAEESEPESVCSTPLKRNESSSSVQNYFHLDSLQKKLKDLEEENVVLRSEASQLKTETITYEEKEQQLVNDCVKELRDANVQIASISEELAKKTEDAARQQEEITHLLSQIVDLQKKAKACAVENEELVQHLGAAKDAQRQLTAELRELEDKYAECMEMLHEAQEELKNLRNKTMPNTTSRRYHSLGLFPMDSLAAEIEGTMRKELQLEEAESPDITHQKRVFETVRNINQVVKQRSLTPSPMNIPGSNQSSAMNSLLSSCVSTPRSSFYGSDIGNVVLDNKTNSIILETEAADLGNDERSKKPGTPGTPGSHDLETALRRLSLRRENYLSERRFFEEEQERKLQELAEKGELRSGSLTPTESIMSLGTHSRFSEFTGFSGMSFSSRSYLPEKLQIVKPLEGSATLHHWQQLAQPHLGGILDPRPGVVTKGFRTLDVDLDEVYCLNDFEEDDTGDHISLPRLATSTPVQHPETSAHHPGKCMSQTNSTFTFTTCRILHPSDELTRVTPSLNSAPTPACGSTSHLKSTPVATPCTPRRLSLAESFTNTRESTTTMSTSLGLVWLLKERGISAAVYDPQSWDRAGRGSLLHSYTPKMAVIPSTPPNSPMQTPTSSPPSFEFKCTSPPYDNFLASKPASSILREVREKNVRSSESQTDVSVSNLNLVDKVRRFGVAKVVNSGRAHVPTLTEEQGPLLCGPPGPAPALVPRGLVPEGLPLRCPTVTSAIGGLQLNSGIRRNRSFPTMVGSSMQMKAPVTLTSGILMGAKLSKQTSLR

SEQ ID NO: 33985 - DNA, 2862 bp, Artificial Sequence
  derived and/or modified sequence
atggccctggtgttccagttcggccagcccgtgagagcccagcccctgcccggcctgtgccacggcaagctgatcagaaccaacgcctgcgacgtgtgcaacagcaccgacctgcccgaggtggagatcatcagcctgctggaggagcagctgccccactacaagctgagagccgacaccatctacggctacgaccacgacgactggctgcacacccccctgatcagccccgacgccaacatcgacctgaccaccgagcagatcgaggagaccctgaagtacttcctgctgtgcgccgagagagtgggccagatgaccaagacctacaacgacatcgacgccgtgaccagactgctggaggagaaggagagagacctggagctggccgccagaatcggccagagcctgctgaagaagaacaagaccctgaccgagagaaacgagctgctggaggagcaggtggagcacatcagagaggaggtgagccagctgagacacgagctgagcatgaaggacgagctgctgcagttctacaccagcgccgccgaggagagcgagcccgagagcgtgtgcagcacccccctgaagagaaacgagagcagcagcagcgtgcagaactacttccacctggacagcctgcagaagaagctgaaggacctggaggaggagaacgtggtgctgagaagcgaggccagccagctgaagaccgagaccatcacctacgaggagaaggagcagcagctggtgaacgactgcgtgaaggagctgagagacgccaacgtgcagatcgccagcatcagcgaggagctggccaagaagaccgaggacgccgccagacagcaggaggagatcacccacctgctgagccagatcgtggacctgcagaagaaggccaaggcctgcgccgtggagaacgaggagctggtgcagcacctgggcgccgccaaggacgcccagagacagctgaccgccgagctgagagagctggaggacaagtacgccgagtgcatggagatgctgcacgaggcccaggaggagctgaagaacctgagaaacaagaccatgcccaacaccaccagcagaagataccacagcctgggcctgttccccatggacagcctggccgccgagatcgagggcaccatgagaaaggagctgcagctggaggaggccgagagccccgacatcacccaccagaagagagtgttcgagaccgtgagaaacatcaaccaggtggtgaagcagagaagcctgacccccagccccatgaacatccccggcagcaaccagagcagcgccatgaacagcctgctgagcagctgcgtgagcacccccagaagcagcttctacggcagcgacatcggcaacgtggtgctggacaacaagaccaacagcatcatcctggagaccgaggccgccgacctgggcaacgacgagagaagcaagaagcccggcacccccggcacccccggcagccacgacctggagaccgccctgagaagactgagcctgagaagagagaactacctgagcgagagaagattcttcgaggaggagcaggagagaaagctgcaggagctggccgagaagggcgagctgagaagcggcagcctgacccccaccgagagcatcatgagcctgggcacccacagcagattcagcgagttcaccggcttcagcggcatgagcttcagcagcagaagctacctgcccgagaagctgcagatcgtgaagcccctggagggcagcgccaccctgcaccactggcagcagctggcccagccccacctgggcggcatcctggaccccagacccggcgtggtgaccaagggcttcagaaccctggacgtggacctggacgaggtgtactgcctgaacgacttcgaggaggacgacaccggcgaccacatcagcctgcccagactggccaccagcacccccgtgcagcaccccgagaccagcgcccaccaccccggcaagtgcatgagccagaccaacagcaccttcaccttcaccacctgcagaatcctgcaccccagcgacgagctgaccagagtgacccccagcctgaacagcgcccccacccccgcctgcggcagcaccagccacctgaagagcacccccgtggccaccccctgcacccccagaagactgagcctggccgagagcttcaccaacaccagagagagcaccaccaccatgagcaccagcctgggcctggtgtggctgctgaaggagagaggcatcagcgccgccgtgtacgacccccagagctgggacagagccggcagaggcagcctgctgcacagctacacccccaagatggccgtgatccccagcaccccccccaacagccccatgcagacccccaccagcagcccccccagcttcgagttcaagtgcaccagccccccctacgacaacttcctggccagcaagcccgccagcagcatcctgagagaggtgagagagaagaacgtgagaagcagcgagagccagaccgacgtgagcgtgagcaacctgaacctggtggacaaggtgagaagattcggcgtggccaaggtggtgaacagcggcagagcccacgtgcccaccctgaccgaggagcagggccccctgctgtgcggcccccccggccccgcccccgccctggtgcccagaggcctggtgcccgagggcctgcccctgagatgccccaccgtgaccagcgccatcggcggcctgcagctgaacagcggcatcagaagaaacagaagcttccccaccatggtgggcagcagcatgcagatgaaggcccccgtgaccctgaccagcggcatcctgatgggcgccaagctgagcaagcagaccagcctgagatag

SEQ ID NO: 33986 - DNA, 2862 bp, Artificial Sequence
  derived and/or modified sequence
atggccctggtcttccagttcggccagcccgtcagagcacagccgctcccgggcctgtgtcacgggaaactgattagaaccaatgcatgcgacgtctgcaattccacagacctgccggaggtagaaattatctccctgttggaagagcaattgccccactataagctgcgcgcagacacaatatacggatacgatcacgacgactggctgcacacgccattaatttcccccgatgcgaacatcgatcttacgacagaacagattgaagagacattgaagtatttcctgctatgcgcagagagggttggacagatgaccaaaacctataacgatattgacgcggtgactcgcctcctggaggagaaagagagggatttggagcttgcagcccggattggacaatctctactaaagaaaaacaagacgttgacggagaggaacgagctgttagaagaacaggtggaacatatacgtgaagaggtttcacagcttagacacgagctgtcgatgaaggacgagctgctccagttctataccagcgcagctgaagagtctgaaccagagagcgtttgttcaaccccgctgaagcggaatgagagcagctcctcggtgcagaattactttcacctggacagcctgcagaagaagcttaaagacctcgaagaggaaaacgtggtgttgagatccgaggccagccaactgaaaacagaaacaattacgtatgaggagaaagaacagcagctagttaacgattgtgtaaaagagttgcgagacgccaacgtccagattgctagcattagcgaggaacttgcaaagaagacagaggacgcggcccgccagcaggaagaaattacacacctgttgtcccagatcgttgacctgcagaagaaagctaaagcctgtgccgttgaaaacgaagagctagttcagcatctgggtgccgccaaggacgcccagcgccagctgactgccgagttgcgggaactggaggataagtacgcagagtgtatggagatgctgcatgaagcccaggaggaactgaagaacctgcggaataagacaatgcccaacaccaccagcaggagatatcactctctgggtctattccccatggacagtctggctgccgagattgaggggacaatgagaaaggaactgcagttggaagaggccgaatcccccgatattacacatcagaaacgcgtcttcgagactgtgaggaacatcaatcaagtggtgaaacagagaagcctgaccccttcacctatgaatatcccaggctcaaatcaaagctccgcaatgaatagcctcctcagtagttgtgtgtcgactccccggagctctttttatggcagcgacatcggcaatgtggtcctcgataataaaacgaattcgatcatcctggaaactgaagctgctgacttagggaacgatgagagaagcaagaaacccggcacaccaggcacacctggaagccacgatctggaaaccgccctccggcggttatctttgcgacgggagaactatctctccgaacggcgcttcttcgaagaggaacaggagcggaaactgcaggagttggcagaaaagggagagctgcggagcgggtccctgacaccaacagagagcattatgtcactgggaacccactccaggtttagtgagtttacaggatttagcgggatgtccttttcttcccgctcgtacctgcctgagaagctccagatcgtgaagccattggagggttctgccactctccatcattggcagcagttggcgcagccacacttggggggaattcttgatccacgccctggcgtcgttaccaaaggatttcgaacgctggatgtggacctagacgaagtttactgtctcaatgatttcgaagaggatgatacgggggatcatatttccctccccagactggcaacaagcactcctgtgcaacaccccgagacttccgcccatcacccgggcaagtgcatgagtcagaccaacagcacctttaccttcaccacatgtcggattctccaccccagcgacgaactgacaagggtgactccgtccctcaactcagccccaactccagcctgtggcagcacttcccatctcaagagcacaccagttgcgactccttgtacacctagaaggctgtcactggcggagtcgttcaccaacacaagggagtccaccacgactatgtctacaagccttggattagtttggctgctcaaggaacgcggcatttctgccgccgtttacgatccccagagttgggaccgggcggggcgggggtcattattgcactcctacacccctaaaatggccgtgattccatcaaccccccctaactcgcccatgcagacccccactagcagcccgcccagttttgaattcaaatgcacgtctccaccttacgacaattttctggcaagcaagcctgctagttctatcttgcgggaagtcagggagaaaaacgttaggtcttccgaatctcagaccgacgtgtctgtgtccaacctcaacctcgtggataaggttcggcgctttggtgtggccaaagtggtcaatagcgggagggcccacgtcccaactctgacagaagagcagggtcctctcctttgtggccctcctggccccgctcccgctctcgtgccaagagggctcgtcccagaagggctaccactgaggtgccccacagtcacgagcgctataggcgggctgcagctcaacagcggcatcaggcgaaaccgatccttccccacgatggtcgggtcctctatgcaaatgaaagccccagtcaccctgacaagcggcattttgatgggtgctaagctgtctaaacagaccagcctccgctag

SEQ ID NO: 33987 - DNA, 2862 bp, Artificial Sequence
  derived and/or modified sequence
atggccctggtgttccagtttggccagcctgtgcgggcccagcccctgcccggcctgtgccacggcaagctgatccgcaccaatgcctgtgatgtgtgcaacagcacagacctgcctgaggtggagatcatcagcctgctggaggagcagctgccccactacaagctgcgggctgacaccatctacggctatgaccatgatgactggctgcacacccccctcatcagcccagatgccaacatcgacctgaccacagagcagatcgaggagaccctgaagtacttcctgctgtgtgccgagcgggtgggccagatgaccaagacctacaatgacattgatgctgtgacccggctgctggaggagaaggagcgggacctggagctggccgcccgcatcggccagagcctgctgaagaagaacaagaccctgacagaaagaaatgagctgctggaggagcaggtggagcacatccgggaggaggtgtcccagctgcggcatgagctgtccatgaaggatgagctgctgcagttctacaccagcgctgctgaggagagcgagcctgagagcgtgtgcagcacccccctgaagagaaatgaaagcagcagctctgtgcagaactacttccacctggacagcctgcagaagaagctgaaggacctggaggaggagaatgtggtgctgcggtctgaggccagccagctgaagacagagaccatcacctatgaggagaaggagcagcagctggtgaatgactgtgtgaaggagctgagagatgccaacgtgcagatcgccagcatcagcgaggagctggccaagaagacagaagatgctgcccggcagcaggaggagatcacccacctgctgagccagatcgtggacctgcagaagaaggccaaggcctgtgctgtggagaatgaggagctggtgcagcacctgggcgccgccaaggatgcccagaggcagctgacagctgagctgcgggagctggaggacaagtatgcagagtgcatggagatgctgcacgaggcccaggaggagctgaagaacctgaggaacaagaccatgcccaacaccaccagccgccgctaccacagcctgggcctcttccccatggacagcctggccgctgagattgagggcaccatgaggaaggagctgcagctggaggaggccgagagcccagacatcacccaccagaagagggtgtttgaaacagtgaggaacatcaaccaggtggtgaagcagaggagcctgacccccagccccatgaacatccctggcagcaaccagagcagcgccatgaacagcctgctgagcagctgtgtgtccacccccaggagcagcttctacggcagtgacattggaaatgtggtgctggacaacaagaccaacagcatcatcctggagacagaggccgctgacctgggcaatgatgagaggagcaagaagccaggcaccccaggcaccccaggcagccatgacctggagacagccctgcggcggctgagcctgcggcgggagaactacctgtctgaaagacgcttctttgaggaggagcaggagaggaagctgcaggagctggccgagaagggggagctgcggagcggcagcctgacccccacagagagcatcatgagcctgggcacccacagccgcttcagcgagttcaccggcttcagcggcatgtccttcagcagccgcagctacctgcctgagaagctgcagatcgtgaagcccctggagggcagcgccaccctgcaccactggcagcagctggcccagccccacctgggcggcatcctggaccccaggcctggggtggtgaccaagggcttccgcaccctggatgtggacctggatgaggtgtactgcctgaatgactttgaggaggatgacacaggagaccacatcagcctgccccggctggccaccagcacccctgtgcagcaccctgagaccagcgcccaccaccctgggaagtgcatgagccagaccaacagcaccttcaccttcaccacctgccgcatcctgcaccccagtgatgagctgaccagggtgacccccagcctgaacagcgcccccaccccagcctgtggcagcaccagccacctgaagagcacccctgtggccaccccctgcaccccccggcggctgagcctggccgagagcttcaccaacacccgggagagcaccaccaccatgagcaccagcctgggcctggtgtggctgctgaaggagcggggcatctctgctgctgtgtatgacccccagagctgggaccgggccggccggggcagcctgctgcacagctacacccccaagatggccgtcatccccagcaccccacccaacagccccatgcagacccccaccagcagcccccccagctttgagttcaagtgcaccagccccccctatgacaacttcctggccagcaagccagccagcagcatcctgcgggaggtgcgggagaagaatgtgcgcagcagcgagagccagacagatgtgtctgtgagcaacctgaacctggtggacaaggtgcggcgcttcggcgtggccaaggtggtgaacagcggccgggcccacgtgcccaccctgacagaggagcagggccccctgctgtgtggccccccaggccctgccccagccctggtgccccggggcctggtgcctgagggcctgcccctgcgctgccccaccgtgaccagcgccatcggcggcctgcagctgaacagcggcatcagaagaaacagaagcttccccaccatggtgggcagctccatgcagatgaaggcccctgtgaccctgaccagcggcatcctgatgggcgccaagctgagcaagcagaccagcctgaggtag

SEQ ID NO: 33988 - DNA, 2862 bp, Artificial Sequence
  derived and/or modified sequence
atggccctggtgttccagttcggccagcccgtgcgggcccagcccctacccgggctttgccacggtaagctgatacgaaccaacgcttgcgacgtttgcaattcaacggatctcccagaagtcgagatcatcagtctgctcgaagaacagctcccacattacaaacttcgcgctgacacgatttacggctacgatcacgacgactggttacatacccctctgatctcgcccgatgccaatatagatttaaccaccgaacaaatcgaggagacactgaagtactttctcctgtgcgctgagcgtgtaggacagatgactaaaacttataacgatatcgacgccgtaacaaggttgctggaggagaaggagcgggatctcgagctcgccgcacgtatcggccagagcttgctgaagaaaaacaaaaccctcactgagaggaacgaactcctggaggagcaggtggagcacatcagagaggaagtttcccagctgaggcatgaactgtcaatgaaggatgagctcttgcagttttacacgtccgctgccgaagaaagtgagcccgaatcagtgtgtagcacacccctgaagaggaatgagtccagcagttctgtacagaattacttccatctggactcgctgcagaagaagctgaaagatctggaagaagagaacgtggtgctgaggtccgaggcaagccaactgaagacagagacaataacatatgaggagaaggaacaacagcttgtgaatgactgtgtgaaggagctgagagatgctaacgtgcaaatcgccagtatatcggaggagctcgccaagaaaactgaagatgccgctcgtcagcaggaggagattacccacctcctgagtcagattgtggatttacagaagaaagccaaggcctgtgcagtcgaaaacgaagagctggtgcagcacttgggagccgccaaggacgcccagaggcagttgaccgcagaactgagagagttggaagacaagtatgccgagtgcatggaaatgctacatgaggcccaagaagagcttaagaatctgcggaacaaaacaatgcccaacacaacgagcagaaggtatcactctctgggactgtttccaatggactcgcttgccgccgaaattgagggcacaatgaggaaggagctgcagctggaggaggccgagagtccagacattacgcaccaaaagagagttttcgaaacggtgaggaacatcaatcaagtagtgaaacaacgtagcctgaccccatctcccatgaacattccaggcagtaaccaaagtagtgccatgaactcactgctgagcagctgcgtttctaccccccggagctccttctatggatctgacattgggaacgtagttttagacaataagaccaactctattatcctcgagacagaggctgccgacttgggcaacgacgagagaagcaagaagcccggaactccggggactcccggttctcatgacttggagaccgccctccgccgcctgtctctccgacgagaaaattacctctcggagcggcggttctttgaggaagagcaggaaagaaagcttcaggaactggccgagaaaggggagctccgctctgggtccctcacccccacggaatctatcatgtcccttggcacgcactcacgtttctccgagtttactgggttctcaggcatgtccttttctagccggtcatacctgcctgagaagctgcagatcgtaaagcctttagagggaagtgcaacactgcaccattggcaacagctggcccagccccacctgggcggcatcctggacccaaggccaggcgtggttactaaagggtttcggaccctcgacgtcgacctggacgaggtctactgtctgaatgatttcgaggaagatgataccggagaccacatctcactaccgagacttgccacgagtacccctgttcagcaccctgagactagtgcccaccatcctgggaaatgcatgtcccaaacgaacagcaccttcacattcaccacgtgtaggattcttcatccctcagatgagctgactcgagtgacaccttctctgaattcggccccgactcccgcttgcggcagcacatcccacctgaagagcacccctgtggctactccttgcacccccaggagattgtccctcgcagagtcctttaccaacacacgggagagtactaccaccatgtctaccagcctagggctcgtgtggctgctaaaagagagaggtatctccgcagccgtgtatgatccccagtcatgggaccgggcagggaggggcagtctgctgcacagctacacacccaaaatggccgtcatcccctctaccccacctaactcccccatgcagacaccaacgtcaagtcccccttcattcgaatttaaatgtacgtcccccccatatgacaacttcctggcatccaaaccggcgagcagcatactgcgggaggtcagagaaaagaacgtgcgcagctccgagtctcagaccgatgtctctgttagcaatcttaacctcgtcgacaaagtgagaagatttggcgttgcaaaggtcgtgaatagcggcagagcgcatgtgccaactttaactgaggagcagggacctcttctttgcggacccccagggcccgcccccgccctagtgcccagaggtctggtacctgaagggttaccgctgagatgccccaccgtaacatctgccataggtggacttcaacttaactccgggattcggagaaatcggagcttcccaacaatggttggaagctctatgcagatgaaggctccagtgacccttacgtcaggcattctgatgggagccaagctgtccaagcagacttcacttcgatag

SEQ ID NO: 33989 - DNA, 2862 bp, Artificial Sequence
  derived and/or modified sequence
atggcattggtgtttcagtttggacagcccgtgcgggctcaaccattgcccggtctctgtcacgggaagttaatccgcactaacgcttgcgacgtgtgtaacagcacggatttgcccgaagtggaaattatcagcctcctggaggagcaattgccacactacaaactgcgtgctgacactatttatgggtatgatcatgatgactggttacacactccgcttattagcccagacgcgaatattgatcttaccacggaacagattgaggaaacactgaaatatttcttgctctgtgctgaacgggtgggtcagatgaccaagacctacaacgacatcgatgcagtgacgcgcctgctcgaggagaaggagagggatctagagctggccgcaagaattgggcaatcgcttctcaagaaaaataaaactttgactgaaaggaacgagcttctcgaagagcaggtggagcacatcagggaggaagtgagtcagctccggcatgagcttagtatgaaagacgagctgctgcagttctacacgtctgccgcagaggaatcagagcccgaaagcgtgtgcagtaccccactgaagcgcaacgaaagcagcagtagtgtgcagaactactttcacctagattccctgcaaaaaaagcttaaggacttagaagaagaaaatgtcgtactgcgatccgaagccagccagcttaaaaccgagaccatcacatacgaggagaaggaacagcagctagtaaacgattgcgtgaaggaactacgggacgcaaatgttcagatcgcctctatctctgaagagcttgccaaaaaaacagaggacgccgcacggcaacaggaggagataacccatctgctatcacagattgtggacctacaaaagaaggccaaggcgtgtgctgttgaaaacgaggaattggtgcagcatcttggcgcagctaaggacgcccaacggcagctgacagccgagcttagggagctagaggataagtatgctgagtgcatggagatgttgcacgaagctcaggaagagcttaagaatcttagaaacaaaacaatgcccaataccacttctcgcagatatcactcgctagggctttttccgatggatagcctcgccgcagagattgagggcacaatgaggaaggaacttcagttggaagaggccgaatctccggacatcacccaccagaaacgtgttttcgaaaccgtccggaacatcaatcaggtggtgaagcagaggtctttgacaccatcccccatgaatattccaggatcaaaccaatctagcgccatgaactctctgcttagctcctgtgtttcaacccctcgctcaagcttttatggatcagatatcgggaacgtggtgctggataataaaaccaattctattatcctggaaaccgaggccgcagacctggggaacgacgagcgtagcaagaaacccggtacccccggtactcccggatctcacgatttggagaccgctctccggagactgtccctgagaagagaaaactacctcagcgagagaaggttttttgaagaagaacaagaacggaaattacaagaacttgccgagaagggcgagctgcgcagcggctcactgacgccaactgagagcattatgtccttggggactcacagccgtttcagcgagttcaccggctttagcggtatgtctttttcctcacggagttacctgcccgagaagctgcaaatagtgaaaccattggagggctccgctacacttcatcattggcagcaactcgcccagcctcaccttggtggtatcctcgaccccaggcccggagtggtgaccaaaggcttcaggaccctggatgtagatcttgatgaagtttactgcctgaacgacttcgaggaggatgatacgggcgatcacatctccctcccgagattggccaccagtaccccagtgcagcaccccgagacatccgcgcatcacccgggaaaatgtatgagtcagaccaactctaccttcacattcacgacctgtcggatcctgcacccctcagacgagttgaccagagtgacaccatcgctgaatagcgcaccaactcccgcatgcggatctacaagtcacctgaagagtacacctgtggccaccccttgtactccacgtcgcctgtctctggccgagtcttttaccaatacacgagagtctaccaccaccatgtcaacatccttaggcctggtctggctcctgaaggaacggggtatttccgctgccgtttatgacccccagtcctgggatcgcgcaggccgaggatcgctgctgcattcgtatacgcccaagatggccgttatcccgagtacaccccctaacagccctatgcagaccccaacctcaagccccccttcctttgaatttaagtgtacgagtcctccatatgacaatttcttggcaagcaagccagcctctagtatccttagggaagtgcgcgaaaagaatgtgaggagcagcgagtctcagaccgacgtgtccgtttccaatctcaacctggtggacaaagtccggcgatttggggtcgccaaggtggtcaactctggcagggcccatgtgcccacgttgacggaagaacaggggcctttgctctgtggacccccaggcccagcgcctgctctggtgccccgtggcttggtgccagagggccttccactgagatgcccaaccgtgacgtctgcaatcggcggattgcagctgaactcagggatccgcaggaatcggagctttccgacgatggtgggctcctccatgcaaatgaaggccccagtcactctgacctctgggattcttatgggcgcaaagctaagcaagcagacctccctccgttag

SEQ ID NO: 33990 - protein, 1683 aa, Artificial Sequence
  derived and/or modified sequence
MSSRRKRAPPVRVDEEKRQQLHWNMHEDRRNEPIIISDDDEQPCPGSDTSSAHYIILSDSLKEEVAHRDKKRCSKVVSFSKPIEKEETVGIFSPLSVKLNIVISPYHFDNSWKAFLGELTLQLLPAQSLIENFSERSITLMSSESSNQFLIYVHSKGEDVEKQKKEPMSICDKGILVESSFSGEMLEDLGWLQKKRRIKLYQKPEGNHIIKVGIYLLEAGLAKLDFLSDANSRMKKFNQLMKKVMEKLHNSIIPDVLEEDEDDPESEPEGQDIDELYHFVKQTHQQETQSIQVDVQHPALIPVLRPYQREAVNWMLQQECFRSSPATESALHFLWREIVTSEGLKLYYNPYTGCIIREYPNSGPQLLGGILADEMGLGKTVEVLALILTHTRQDVKQDALTLPEGKVVNYFIPSHYFGGKLKKTEIQNIEFEPKEKVQCPPTRVMILTAVKEMNGKKGVSILSIYKYVSSIYRYDVQRNRSLLKRMLKCLIFEGLVKQIKGHGFSGTFTLGKNYKEEDICDKTKKQAVGSPRKIQKETRKSGNKDTDSEYLPSDTSDDDDDPYYYYYKSRRNRSKLRKKLVPSTKKGKSQPFINPDSQGHCPATSDSGITDVAMSKSTCISEFNQEHETEDCAESLNHADSDVPPSNTMSPFNTSDYRFECICGELDQIDRKPRVQCLKCHLWQHAKCVNYDEKNLKIKPFYCPHCLVAMEPVSTRATLIISPSSICHQWVDEINRHVRSSSLRVLVYQGVKKDGFLQPHFLAEQDIVIITYDVLRSELNYVDIPHSNSEDGRRLRNQKRYMAIPSPLVAVEWWRICLDEAQMVECPTVKAAEMAQRLSGINRWCISGTPVQRGLEDLFGLVVFLGIEPYCVKHWWVRLLYRPYCKKNPQHLYSFIAKILWRSAKKDVIDQIQIPPQTEEIHWLHFSPVERHFYHRQHEVCCQDVVVKLRKISDWALKLSSLDRRTVTSILYPLLRLRQACCHPQAVRGEFLPLQKSTMTMEELLTSLQKKCGTECEEAHRQLVCALNGLAGIHIIKGEYALAAELYREVLRSSEEHKGKLKTDSLQRLHATHNLMELLIARHPGIPPTLRDGRLEEEAKQLREHYMSKCNTEVAEAQQALYPVQQTIHELQRKIHSNSPWWLNVIHRAIEFTIDEELVQRVRNEITSNYKQQTGKLSMSEKFRDCRGLQFLLTTQMEELNKCQKLVREAVKNLEGPPSRNVIESATVCHLRPARLPLNCCVFCKADELFTEYESKLFSNTVKGQTAIFEEMIEDEEGLVDDRAPTTTRGLWAISETERSMKAILSFAKSHRFDVEFVDEGSTSMDLFEAWKKEYKLLHEYWMALRNRVSAVDELAMATERLRVRDPREPKPNPPVLHIIEPHEVEQNRIKLLNDKAVATSQLQKKLGQLLYLTNLEKSQDKTSGGVNPEPCPICARQLGKQWAVLTCGHCFCNECISIIIEQYSVGSHRSSIKCAICRQTTSHKEISYVFTSEKANQEEDIPVKGSHSTKVEAVVRTLMKIQLRDPGAKALVFSTWQDVLDIISKALTDNNMEFAQISRVKTFQENLSAFKRDPQINILLLPLHTGSNGLTIIEATHVLLVEPILNPAHELQAIGRVHRIGQTKPTIVHRFLIKATIEERMQAMLKTAERSHTNSSAKHSEASVLTVADLADLFTKETEELE

SEQ ID NO: 33991 - protein, 660 aa, Artificial Sequence
  derived and/or modified sequence
MSSRRKRAPPVRVDEEKRQQLHWNMHEDRRNEPIIISDDDEQPCPGEDVEKQKKEPMSICDKGILVESSFSGEMLEDLGWLQKKRRIKLYQKPEGNHIIKVGIYLLEAGLAKLDFLSDANSRMKKFNQLMKKVMEKLHNSIIPDVLEEDEDDPESEPEGQDIDELYHFVKQTHQQETQSIQVDVQHPALIPVLRPYQREAVNWMLQQECFRSSPATESALHFLWREIVTSEGLKLYYNPYTGCIIREYPNSGPQLLGGILADEMGLGKTVEVLALILTHTRQDVKQDALTLPEGKVVNYFIPSHYFGGKLKKTEIQNIEFEPKEKVQCPPTRVMILTAVKEMNGKKGVSILSIYKYVSSIYRYDVQRNRSLLKRMLKCLIFEGLVKQIKGHGFSGTFTLGKNYKEEDICDKTKKQAVGSPRKIQKETRKSGNKDTDSEYLPSDTSDDDDDPYYYYYKSRRNRSKLRKKLVPSTKKGKSQPFINPDSQGHCPATSDSGITDVAMSKSTCISEFNQEHETEDCAESLNHADSDVPPSNTMSPFNTSDYRFECICGELDQIDRKPRVQCLKCHLWQHAKCVNYDEKNLKIKPFYCPHCLVAMEPVSTRATLIISPSSICHQWVDEINRHVRSSSLRVLVYQGVKKDGFLQPHFGRTGYSYHYL

SEQ ID NO: 33992 - DNA, 5052 bp, Artificial Sequence
  derived and/or modified sequence
atgtctagtcgtaggaaacgggcacctccggtgcgagtggacgaggagaagaggcagcagctgcattggaatatgcacgaggatagacgcaacgaaccaattataatctccgatgacgatgagcaaccgtgtcccggctcagacacctcttcagcgcattatatcattttgagcgactctcttaaggaagaggtcgcacacagggataagaaacgctgttccaaagtggtgagcttcagtaaaccaatcgaaaaggaagaaacagtggggattttctcccccctgtccgttaaattgaatatcgtgatttcgccttaccacttcgacaactcttggaaggcatttctgggtgagttgacgctgcaactacttccagctcagagcctgattgaaaacttctctgagaggagcatcaccctgatgagcagcgaatcatccaaccagtttctgatatatgtgcactcaaaaggagaagacgtggaaaagcaaaagaaagaaccaatgagcatctgcgacaagggcatcctggtggaatcatcctttagcggggaaatgctagaggatctcggatggctgcagaaaaaacggcgcatcaagctctatcaaaaacccgaagggaaccacataattaaggtaggcatttacctccttgaagctggcctggccaagctcgatttcctgtctgacgcgaacagtcgtatgaagaagttcaatcagctcatgaagaaggtgatggaaaaacttcataactcgattatcccagacgtgctcgaggaagacgaagacgatcccgaaagcgaacccgaaggacaagacattgacgaactatatcactttgtgaagcagacacaccagcaggaaactcagtcaatccaggtggatgtgcagcaccccgctttgattcccgtgcttcggccgtaccagagggaagccgttaactggatgctccagcaagaatgtttccgcagttctcctgccacagagtccgcccttcacttcttatggcgggagattgtgactagcgaagggctaaagctttattataacccatacaccgggtgtattattagagaataccctaattctggacctcagttgctagggggtatactggcggacgaaatggggctcggcaagacggtggaggtcctcgcactgattctgacccacactcggcaggacgtgaagcaagatgccctgaccctacctgaaggaaaagtagtaaactactttatcccctctcactactttgggggtaagttaaagaagaccgagatccagaacatcgaattcgaaccaaaggaaaaggttcagtgtccaccaactcgggtgatgatcctgaccgcagtaaaagaaatgaatggtaagaaaggagtgagtatattgtccatttataaatacgtatcctctatctacaggtacgacgtgcaaagaaaccgtagcttactgaagcggatgctgaagtgcctgatatttgaaggccttgttaaacagatcaagggccatggattctccgggacttttactctgggaaaaaactataaagaggaggatatttgcgataaaactaaaaagcaagcagttggttctcccaggaagatacagaaggagacccgcaaatctggcaacaaggataccgatagcgagtacctgccgtccgatacatctgacgacgatgatgacccctactactattactataaatcccgtaggaaccgttcaaaattgcgcaagaagctggtgccatccaccaagaaaggcaaatctcagccatttattaatccagactcacaaggtcactgcccagctacatccgatagtggcatcaccgatgtcgccatgtcaaagagtacatgtatctccgaatttaaccaagaacacgagaccgaggattgcgcagagtccctcaaccacgcagacagcgatgtaccaccttcgaataccatgtcacctttcaacacgtccgactataggttcgagtgcatctgtggggaacttgatcagatcgaccggaaacctagagtccagtgcctgaaatgccacctttggcagcacgccaagtgtgtgaattacgacgagaaaaaccttaagattaagccattttattgcccacattgtctggtcgctatggaaccagttagtaccagagctacactgataatcagcccatcatccatctgtcaccagtgggtggacgaaatcaacagacacgtgagatcctccagtctccgtgtcctggtttaccagggagtcaaaaaagatggcttcctgcagccccacttccttgccgaacaagatattgtcatcatcacctacgacgttctgcggtccgagctcaattacgtcgatatacctcactctaacagcgaggatggcagaaggctccgcaatcaaaagcgatatatggctatcccttcacctctagtcgccgtggaatggtggcgaatttgcctcgatgaggcgcagatggtggagtgtcccactgtcaaggccgctgagatggcccaacgactatctggaattaatcgctggtgcatcagtggcacgccagttcagcgtggcttggaagacctgtttggcctagtcgtgtttctcggtatcgagccctactgcgtgaaacattggtgggttcgactcctgtatagaccatactgtaagaagaatccccagcatctgtatagctttatcgctaagattttatggaggtcagctaaaaaagatgtcatcgatcagatccagatcccacctcagaccgaagagattcattggctccacttttctcccgtggagaggcacttctaccacaggcagcatgaggtatgctgccaagatgtggtggtcaagctccgtaagatcagcgattgggcactgaaactttcttcgctcgataggcgcactgtgaccagcattctttacccattgctgcgtctgcggcaggcctgttgccatccacaggccgttagaggggaattcctccccttacagaaaagtaccatgactatggaggagctgttgacatctctccagaaaaagtgtggaaccgaatgtgaggaggctcacagacaactggtgtgcgccctgaacgggctggccggcattcacattatcaagggcgagtacgccctcgcggcagaactttatagggaagtgctgcgctcctctgaggagcataaaggcaagttgaaaactgatagcctgcagcgtctccacgccacgcacaatctgatggagctcttgatcgcccgacaccccggcattcctccaacattacgcgacggccgcctcgaggaggaggcaaaacagctaagagaacactatatgagtaagtgcaacaccgaagttgccgaagcacagcaagccctgtatcctgtgcagcagactatccatgaattgcagcgtaaaattcattctaactccccctggtggttgaatgtgatccatcgtgccatcgagttcactattgacgaagaactggtgcagagagttcgtaacgagattacaagcaattacaagcagcagacgggcaaactcagcatgagcgaaaaatttagagactgcaggggccttcagtttcttctcacaacccagatggaggaacttaataagtgccaaaaactggtgagagaagctgtcaaaaacctcgaaggccctccttctagaaatgttattgaaagtgcaacagtatgccatcttagacccgctcgcctcccattaaattgctgtgtgttctgcaaggcagacgagctcttcacagaatatgagtcaaagttattctccaatactgttaagggccaaaccgcaatctttgaagagatgatcgaagacgaagaggggctggtcgacgatagagcccccactacaacaagaggcctttgggccatcagtgagaccgagcgcagcatgaaagccatactgagtttcgctaagagtcaccggttcgacgtagagttcgtagacgagggctctactagcatggacctcttcgaagcatggaaaaaggagtataagttgctgcacgagtactggatggccctgagaaatagagtttcagccgtggacgagctcgcgatggccaccgagcggctaagggttagggatccgagagaacctaagcctaatcctccagtgcttcacattatagaaccccatgaagttgagcagaaccgaattaagcttctgaacgacaaggcggtcgctactagccagttgcaaaaaaagctggggcagctcttgtacctgactaacctcgaaaaatcacaggacaaaacctcaggcggtgtcaaccccgagccctgtcctatatgtgcccggcagttaggcaagcagtgggccgtgttgacatgcggacattgcttctgcaacgagtgtatttccatcattatcgaacaatattctgtgggcagccaccgcagctctattaagtgcgctatctgccgtcagacaacctctcataaagagatttcttacgtcttcacatcagagaaggccaaccaggaggaagacatccctgtgaagggctcccatagcacaaaggtggaagccgttgttcggactctcatgaaaatacagctacgagacccaggagcaaaggccctcgtattcagcacctggcaggacgtcctggacattatctcaaaggctttaacagataataacatggagttcgctcagatctccagggtgaaaacttttcaggagaatctgtcagcgttcaagcgggacccacagatcaacatactgctcctgcccctgcataccggaagcaatggattaacgataatcgaagcgacgcacgtcctcctggtagaaccaatcttaaatccagctcacgaattgcaagccattggacgcgtgcacaggattgggcaaaccaagcctacaatagttcatcggttcctaatcaaagccactattgaggagcggatgcaggctatgctgaaaacggcagaacggtcacacaccaactctagtgctaagcattccgaagctagcgtcttgaccgttgctgatctggccgacctcttcaccaaggagacggaggagttagaatag

SEQ ID NO: 33993 - DNA, 5064 bp, Artificial Sequence
  derived and/or modified sequence
atgagctcacggcgtaagcgtgctccccccgttcgcgtcgatgaagaaaagcggcagcaactccactggaacatgcatgaggacagaaggaacgagccaattataatatccgacgatgacgagcagccatgtccagggagtgatacctcatcggcccactacatcattctctcagatagcctgaaagaggaagtggcacaccgagacaagaaaaggtgttccaaggtggtgagtttttctaagcccatcgagaaagaggaaacagtgggtatcttcagcccactctcagtcaagctgaacatcgttatctcaccataccatttcgataattcatggaaagcttttctgggagagctgactttgcagctgctgcccgctcagagcctgatcgagaatttcagcgagagatcaattactctaatgtcctcagagtcttcaaaccaatttctgatttacgtccactccaaaggagaagacgtagagaagcagaaaaaagagcctatgagcatttgtgataaaggtattctcgtagagtcatccttctcgggagaaatgttagaggatcttgggtggctccagaagaagcgacgaatcaagctgtatcaaaagcccgaaggaaaccacatcataaaagttggcatctacctcctggaggcagggctagcaaaactcgactttctctcagatgcgaattcccggatgaagaagttcaaccagctaatgaaaaaagtcatggagaagttgcacaactctatcattcctgacgtcttggaggaggacgaggatgatcctgaaagcgaacccgaaggccaggatatagacgaactctatcacttcgtcaagcaaacccaccagcaggaaacacaaagcatccaggtcgacgttcaacacccagctctgatccccgtgttgcggccatatcaacgcgaggccgttaattggatgctacagcaagagtgcttccggtcctcccccgcaacagagagtgccctgcactttctgtggagagagatagtgacctctgaaggcttgaaactctactacaacccttataccggttgtatcatccgcgagtatcccaatagcgggccacagcttctcggcggtattctggcagatgaaatgggactgggtaagacagtggaggtgctggcacttatactgacccacacccggcaagatgtcaaacaagatgctttgacgctgcccgagggaaaagtcgtgaactatttcatccccagccattattttggcggtaagctgaagaagaccgagattcagaacatcgaattcgaacccaaggaaaaggtccaatgtccgccaacccgggttatgatcctgactgctgtaaaggagatgaacgggaagaagggtgtctccatcctgtctatatacaagtacgtaagttcgatctaccggtatgacgtccagcgaaacagatcccttctgaagagaatgctcaagtgccttattttcgaggggctggtcaagcaaatcaagggccacggcttttctggaacatttacgctgggtaaaaattacaaggaggaagacatttgcgacaagaccaaaaagcaagctgtcggatctccaaggaagattcagaaggaaaccaggaagagcgggaacaaggatacagactctgaatacctgccttctgacacctccgatgatgatgatgatccatactactactactacaaatccaggaggaataggtccaagctacgaaaaaagctagtgccctcgactaagaagggcaagtctcagccattcataaaccccgattcacagggacattgtcccgcaacatcagatagcggcatcaccgatgtggcaatgtccaagtccacctgtatatcggagtttaaccaggaacatgaaaccgaagactgtgctgagtcacttaaccatgccgattctgacgtcccaccctcaaataccatgtcccctttcaacacatctgattaccgcttcgagtgtatctgtggagagttggaccagatcgaccggaaacctcgtgttcagtgcctaaagtgtcatctgtggcagcacgcgaagtgtgtgaattacgacgagaagaatctgaaaattaaaccgttctattgtcctcattgcttagtagccatggaaccagtcagcacacgagcaaccttgatcatttcaccctctagtatatgccaccagtgggtggatgagataaacagacatgtgaggtcctcttcactgagggtgcttgtgtaccaaggagtgaagaaggacggctttctgcagccacactttctcgctgaacaggatatcgtgatcatcacatatgatgtccttaggagcgagctgaactatgtggatatcccccattcaaattctgaggacgggagaaggctgcgtaaccagaaacggtacatggcaatcccaagtccacttgtggcggtggaatggtggcggatttgtctagatgaagcccagatggtagaatgtcccacagtcaaggctgcggagatggcccaaaggctctctggaattaatagatggtgcataagcggcactccagtgcagcggggcctggaagatctctttggactcgtggtgttcttgggcatcgagccttactgtgtcaaacactggtgggtccgactcttgtatagaccttattgtaagaaaaatccacaacatctttactcattcatcgccaagatcttatggcgtagtgccaagaaagacgtgattgatcagattcaaattcctccccagactgaagagattcactggctgcacttctctccagtcgaaagacacttttaccacagacagcatgaagtgtgctgtcaggacgtggttgtaaagttacggaaaatttcagattgggcccttaagctgagttccctggaccgtaggaccgtaacaagtatcctttacccgttactccggctccgccaggcttgctgccatccacaagcagtgaggggtgagtttctgccactccagaagtcttttgagcagagtacattctccttctccaccatgactatggaggagctacttaccagccttcagaagaagtgcggcacagaatgcgaggaagctcatcgccagctcgtgtgcgctctgaacggacttgcaggtatccatatcattaagggagaatatgctctggccgccgagctttatcgggaagtgctgcgcagcagcgaagaacacaagggaaaactaaagacagacagcctgcagaggttgcatgctactcataaccttatggaacttctaatcgcacgccacccaggaatcccccccacactgcgcgacgggagactggaggaggaggccaaacagctgcgcgagcattacatgtcaaagtgcaacactgaagtggccgaggcgcagcaggcactataccccgtgcagcagactattcatgagctccaacgaaaaatacactcgaacagtccttggtggctgaacgtgatacatcgggccattgagtttacaatagatgaagagctggtgcagcgggtacgaaatgagattacctctaactacaagcagcagacaggcaagctaagtatgtctgagaagggattgcagtttctgttgaccacccagatggaggaactgaacaaatgccagaaacttgtgcgggaggcagtaaaaaatctggaagggccaccttcccggaacgtgatcgagagcgctacagtctgtcacctgaggccagccagactcccccttaattgctgtgtattttgtaaagccgatgaactcttcacagagtacgaatccaaattgttttcaaatacagtgaaaggccagaccgctatctttgaggagatgatcgaagatgaggaaggtctggtcgacgatagagccccaactactactcgggggctctgggccatttcagaaaccgaacgttcgatgaaagccatcttaagcttcgccaaatctcataggttcgatgtggaatttgtggatgaggggtcgacaagtatggacctgtttgaggcatggaaaaaagagtataaacttctccacgagtactggatggctctacggaatcgggtgtcggctgtggacgagttagcaatggctacggagcggctgagagtccgggacccacgggagcccaagcccaacccacccgtgttgcacataatcgaaccacatgaagtggaacagaataggatcaagcttctgaatgacaaagccgttgctacatcacagttgcagaaaaaacttgggcagctcctgtatctgaccaatcttgagaagtcccaggacaagacttctggcggtgtcaatcctgaaccttgtcccatttgtgcccgtcagctaggcaagcagtgggcggtcctgacctgcggccattgtttctgcaacgagtgtatttctatcatcatagagcagtattccgtgggctcacataggtcctccattaagtgcgccatatgtaggcagaccacctcacacaaggagatcagctacgttttcaccagcgagaaggctaatcaagaagaggacatccctgtgaaggggagtcattctaccaaggtggaagcagtggtgcggactcttatgaaaatccagctcagggacccaggagcaaaggcacttgtgtttagcacttggcaagatgtgctagacatcatcagcaaggctttaacggacaataacatggaatttgctcaaatcagtagagttaagacattccaggaaaacctgtccgccttcaagagagatcctcagataaatattctcctcctgcctctccacacagggtcgaatggactcaccattattgaggccacccatgttctgctggtggagcctatcctcaatcccgcacacgagcttcaggctattggtcgggtccaccggattgggcagaccaagccaacgattgttcaccgcttccttatcaaagccactattgaagagaggatgcaagctatgcttaagacagcggaaagatcacacactaatagttcagcaaaacactcagaagctagcgtgctgaccgttgccgacctggccgacctgttcacaaaagagaccgaagagctggagtag

SEQ ID NO: 33994 - DNA, 5052 bp, Artificial Sequence
  derived and/or modified sequence
atgtcctctcggcgtaaacgtgcacctccggtgcgggtggatgaagagaaaaggcagcagctccactggaatatgcatgaagacaggcgcaacgaaccgatcattatctctgacgacgatgagcaaccatgccccggctcagatacaagctccgcccattatatcattctgtcggactccctcaaggaagaagtcgcacaccgcgacaagaagcgatgcagcaaggttgtctctttctcaaagcctatcgagaaagaagagacggtaggtatattctctccacttagtgtgaagctcaacatcgtgatttctccgtaccacttcgacaattcctggaaggccttcctgggagaacttactctgcaactcttgcctgcccagagcttgattgagaacttcagtgaaaggagtattactctgatgtcctcggaatccagtaatcagttcctgatctacgtgcactctaagggtgaggatgtggaaaaacagaagaaagagcccatgtctatttgcgacaagggaatcctagtcgaaagctcattcagtggggagatgctggaggatttgggatggctacagaaaaagcggagaataaaactgtatcaaaagcccgagggaaaccatattataaaggtcggaatctatctactggaggccgggctggcaaaacttgattttctatcagatgccaactcgaggatgaagaaattcaatcaactcatgaagaaggtgatggaaaagttgcacaatagtatcattccggatgtgctggaggaagatgaggatgaccctgaatctgagccagaggggcaagacattgatgaactgtaccatttcgtgaaacaaacgcaccagcaggagacacagtccattcaggtcgacgttcagcatcccgctttaattcccgttctccgtccttaccagagagaggccgtaaattggatgctgcagcaggagtgcttcagaagttcacccgccactgaatcagcactacatttcctctggcgtgagattgtgaccagcgagggcctgaaattgtactacaacccctatacaggatgtatcatccgagaatacccaaacagcggaccacagcttttaggcggcatattggccgacgagatgggcctgggtaagacggtagaggtgctagcactcatcttgacacacacgaggcaggacgtgaaacaggacgcccttactctcccagagggcaaagtggtgaattactttatcccaagtcactacttcggtggcaaactcaagaagacagagatccagaacattgagtttgagcctaaggaaaaagtgcagtgccccccgacccgagtgatgatcctgaccgcagtcaaagagatgaacggcaagaaaggggtgagcatcctttctatctacaagtatgtcagcagcatctaccggtacgatgttcagaggaataggtcattgcttaagcggatgctaaaatgcttaatttttgaggggttagtgaaacaaatcaagggccacggtttctcaggcacctttacgttgggtaaaaactacaaggaggaggatatctgtgataaaacaaagaagcaagcggttgggtcacccaggaagattcagaaggagactcggaaatctggtaataaagatactgattcagagtaccttcccagcgacacatcggatgatgatgatgatccctattactattattataaaagcagaagaaaccggtcaaagctgcgtaaaaagctggtcccttctacaaaaaaagggaaatcccaacctttcatcaatccggactcccaaggtcattgccctgccacatctgactcggggattacagatgttgcaatgtccaaatccacttgtatctctgaattcaatcaagaacacgaaaccgaggattgcgctgagagcctcaatcacgctgactcagatgtgccacccagtaatactatgagcccctttaatacttcagattataggtttgagtgcatctgcggtgagttggatcagatagatagaaagccacgggtgcaatgccttaagtgtcatttgtggcagcatgctaaatgtgtgaactacgacgagaagaatttgaagattaaaccgttttattgcccacattgcttggttgcaatggagcccgtgagcactagggcaaccctcatcatttccccctctagcatttgccatcagtgggtggacgagatcaaccgacatgttcgtagtagttctcttagggtgctggtgtatcaaggcgtgaaaaaggacggattcttacagcctcacttccttgccgaacaagatatcgtgatcattacttatgacgtactaaggtcagaacttaactacgttgatataccccactcaaattccgaggatggcagaagattgcggaatcaaaaacgatacatggccattccctcgcctctggtcgctgtcgagtggtggcgcatctgtcttgatgaggcccagatggtggagtgtcctaccgtcaaagctgccgagatggcccagagactgtctgggatcaacagatggtgcatctctggaacccccgtgcagcggggcctagaagatttgtttggcttagttgtgttcttgggaattgaaccatattgtgtgaaacactggtgggtgcgacttctgtatagaccatactgcaagaaaaaccctcagcatttgtactccttcattgccaagatattatggaggagcgctaagaaggatgtgatcgaccagattcagatcccaccacagacagaagagatccattggctacacttctcccctgttgagagacacttctatcaccgccagcacgaggtctgttgtcaagatgtagtggttaagctcaggaagatcagcgattgggcactgaaactctcctcgctggacaggcgtactgttactagcatactgtaccccctcctgcgcttgcggcaagcctgttgccatccccaggctgtccggggcgaattccttcctctccagaaatcgactatgaccatggaggagctgctgacctctctgcagaaaaagtgtggaacagaatgtgaggaggctcaccgacaattagtgtgtgcccttaacggcctggctggtatccacatcatcaaaggggagtatgcactggctgccgaattgtatcgtgaggtgcttcgaagttcagaggagcacaagggtaaattgaaaaccgattcccttcagcggctgcacgccacccacaatttaatggagcttctgatcgctcgccatcccggcatcccgcctactctccgagacggaaggttggaagaggaagcaaaacagttacgggagcactatatgtccaaatgtaacacagaggtggctgaggcccagcaagccctataccctgtccagcagaccatccacgaattgcagaggaaaattcactcaaactcaccatggtggctcaacgtgatacatagagcgattgagtttaccatagacgaggagctggtccagagggtaagaaacgaaatcacttcgaattataagcagcaaactggaaagctttccatgtctgaaaagtttcgcgattgtaggggcctccagtttctactgaccacccagatggaggagctcaacaagtgccagaagctcgtacgcgaggccgttaaaaatctggaaggccctccatctcgcaatgttatagaatcagcaaccgtatgtcatcttcgacctgcacgcctgcccctcaactgctgcgtattttgcaaagcagacgagttgtttacggaatatgagagcaaactgttctcaaacacagtcaaggggcagaccgccatctttgaagagatgattgaggacgaggagggtcttgtggacgatagggctcctaccaccacacgcggcctatgggccatctctgagaccgagcggagcatgaaggccattttgtcttttgccaaatcccatcgctttgacgtcgagtttgttgatgaaggtagcacatcaatggacctctttgaggcatggaagaaggaatacaaactgttgcacgagtactggatggccttgagaaatcgcgtgtcagccgtggatgagctggcaatggcgacagaacgtcttagagtacgcgatccacgcgagcccaagccgaacccccctgtcctgcacatcatcgaacctcacgaggtggaacagaatagaattaagctgctgaacgacaaagctgtggcaacctctcagctccagaagaaactggggcagctgctttaccttacaaacctggaaaagtcccaggacaagaccagcggcggagtcaatcccgagccttgcccaatctgcgctcgacagttggggaagcaatgggccgttcttacctgtggacactgcttttgcaatgaatgtattagtattattatagagcaatatagcgtgggatcacatcgcagctctatcaaatgtgccatctgtagacagacaacatctcataaggaaatttcttacgttttcacttcggaaaaggccaaccaggaggaagacatccccgtgaaaggcagtcactctacgaaggtcgaggcagtggtgagaacactgatgaaaatccagcttcgggaccccggggcaaaggcactggtgttcagtacttggcaagatgtactggatattatatccaaagctcttacagataacaatatggaatttgctcagatcagcagggtgaagaccttccaggagaatttgagcgctttcaaacgcgaccctcagatcaacattctgctgctgcctttgcacacaggctccaacggcttgaccatcatcgaagcgacgcatgtgctgttagttgagcctatattgaatcccgcgcacgaactgcaggctatcggccgcgtgcatcgcattgggcagacaaaacccactatagtgcatcgctttctgattaaggcaacaattgaggagagaatgcaggccatgctgaaaactgcagaaagaagtcacaccaattctagtgctaaacactccgaagcaagcgtgctgactgttgccgatctggccgacctgttcaccaaggagacagaggagctcgagtag

SEQ ID NO: 33995 - DNA, 5052 bp, Artificial Sequence
  derived and/or modified sequence
atgagcagcaggaggaagagggcccctcctgtgcgggtggatgaggagaagaggcagcagctgcactggaacatgcatgaagatagaagaaatgagcccatcatcatcagtgatgatgatgagcagccctgccccggcagtgacaccagcagcgcccactacatcatcctgagtgacagcctgaaggaggaggtggcccaccgggacaagaagcgctgcagcaaggtggtgtccttcagcaagcccatcgagaaggaggagaccgtgggcatcttcagccccctgtctgtgaagctgaacatcgtcatcagcccctaccactttgacaacagctggaaggccttcctgggggagctgaccctgcagctgctgcctgcccagagcctgattgagaacttcagcgagaggagcatcaccctgatgagcagcgagagcagcaaccagttcctgatctacgtgcacagcaagggggaggatgtggagaagcagaagaaggagcccatgagcatctgtgacaagggcatcctggtggagagcagcttcagcggggagatgctggaggacctgggctggctgcagaagaagaggcgcatcaagctgtaccagaagccagagggcaaccacatcatcaaggtgggcatctacctgctggaggccggcctggccaagctggacttcctgagtgatgccaacagcaggatgaagaagttcaaccagctgatgaagaaggtgatggagaagctgcacaacagcatcatcccagatgtgctggaggaggatgaagatgatcctgagagcgagcctgagggccaggacattgatgagctgtaccactttgtgaagcagacccaccagcaggagacccagagcatccaggtggatgtgcagcacccagccctgatccctgtgctgcggccctaccagcgggaggccgtgaactggatgctgcagcaggagtgcttccgcagcagccctgccacagaaagtgccctgcacttcctgtggagggagatcgtgaccagcgagggcctgaagctgtactacaacccctacacaggctgcatcatccgggagtaccccaacagcggcccccagctgctgggcggcatcctggctgatgagatgggcctgggcaagacagtggaggtgctggccctgatcctgacccacacccggcaggatgtgaagcaggatgccctgaccctgcctgagggcaaggtggtgaactacttcatccccagccactactttggaggcaagctgaagaagacagagatccagaacattgaatttgagcccaaggagaaggtgcagtgcccccccaccagggtgatgatcctgacagctgtgaaggagatgaatggcaagaagggcgtgtccatcctgagcatctacaagtatgtgagcagcatctaccgctatgatgtgcagaggaacagaagcctgctgaagaggatgctgaagtgcctgatctttgagggcctggtgaagcagatcaagggccacggcttcagcggcaccttcaccctgggcaagaactacaaggaggaggacatctgtgacaagaccaagaagcaggccgtgggcagccccaggaagatccagaaggagaccaggaagagcggcaacaaggacacagacagcgagtacctgcccagcgacaccagtgatgatgatgatgacccctactactactactacaagagcagaagaaacagaagcaagctgaggaagaagctggtgcccagcaccaagaagggcaagagccagcccttcatcaacccagacagccagggccactgcccagccaccagtgacagcggcatcacagatgtggccatgagcaagagcacctgcatcagcgagttcaaccaggagcatgaaacagaggactgtgccgagagcctgaaccacgccgacagtgatgtgccccccagcaacaccatgagccccttcaacaccagtgactacagatttgagtgcatctgtggggagctggaccagattgacaggaagccccgggtgcagtgcctgaagtgccacctgtggcagcacgccaagtgtgtgaactatgatgagaagaacctgaagatcaagcccttctactgcccccactgcctggtggccatggagcctgtgtccacccgggccaccctcatcatcagccccagcagcatctgccaccagtgggtggatgagatcaacagacatgtgcgcagcagcagcctgcgggtgctggtgtaccagggcgtgaagaaggatggcttcctgcagccccacttcctggccgagcaggacatcgtcatcatcacctatgatgtgctgcggtctgagctgaactacgtggacatcccccacagcaacagtgaagatggaagaaggctgaggaaccagaagcgctacatggccatccccagccccctggtggccgtggagtggtggaggatctgcctggatgaggcccagatggtggagtgccccaccgtgaaggctgctgagatggcccagaggctgagcggcatcaaccgctggtgcatcagcggcacccctgtgcagaggggcctggaggacctgtttggcctggtggtgttcctgggcatcgagccctactgtgtgaagcactggtgggtgcggctgctgtaccggccctactgcaagaagaacccccagcacctgtacagcttcatcgccaagatcctgtggaggtctgccaagaaggatgtgattgaccagatccagatccccccccagacagaggagatccactggctgcacttcagccctgtggagcggcacttctaccaccggcagcacgaggtgtgctgccaggatgtggtggtgaagctgaggaagatcagtgactgggccctgaagctgagcagcctggacagaagaacagtgaccagcatcctgtaccccctgctgcggctgcggcaggcctgctgccacccccaggccgtgcggggggagttcctgcccctgcagaagagcaccatgaccatggaggagctgctgaccagcctgcagaagaagtgtggcacagaatgtgaggaggcccaccggcagctggtgtgtgccctgaatggcctggccggcatccacatcatcaagggggagtatgccctggccgctgagctgtaccgggaggtgctgcggagcagcgaggagcacaagggcaagctgaagacagacagcctgcagaggctgcacgccacccacaacctgatggagctgctgattgcccggcaccctggcatcccccccaccctgagagatggccgcctggaggaggaggccaagcagctgcgggagcactacatgagcaagtgcaacacagaggtggccgaggcccagcaggccctgtaccctgtgcagcagaccatccacgagctgcagaggaagatccacagcaacagcccctggtggctgaatgtcatccaccgggccatcgagttcaccattgatgaggagctggtgcagagggtgagaaatgagatcaccagcaactacaagcagcagacaggcaagctgtccatgtctgagaagttccgggactgccggggcctgcagttcctgctgaccacccagatggaggagctgaacaagtgccagaagctggtgcgggaggccgtgaagaacctggagggcccccccagcagaaatgtgattgaaagtgccaccgtgtgccacctgcggcctgcccggctgcccctgaactgctgcgtgttctgcaaggcagatgagctgttcacagaatatgagagcaagctgttcagcaacacagtgaagggccagacagccatctttgaggagatgattgaagatgaggagggcctggtggatgaccgggcccccaccaccacccggggcctgtgggccatcagcgagacagagaggtccatgaaggccatcctgagctttgccaagagccacagatttgatgtggagtttgtggatgagggcagcacctccatggacctgtttgaggcctggaagaaggagtacaagctgctgcacgagtactggatggccctgaggaacagagtgtctgctgtggatgagctggccatggccacagagcggctgcgggtgcgggacccccgggagcccaagcccaacccccctgtgctgcacatcatcgagccccatgaggtggagcagaaccgcatcaagctgctgaatgacaaggctgtggccaccagccagctgcagaagaagctgggccagctgctgtacctgaccaacctggagaagagccaggacaagaccagcggcggcgtgaaccctgagccctgccccatctgtgcccggcagctgggcaagcagtgggccgtgctgacctgtggccactgcttctgcaatgaatgcatcagcatcatcatcgagcagtacagcgtgggcagccacaggagcagcatcaagtgtgccatctgccggcagaccaccagccacaaggagatctcctatgtgttcaccagcgagaaggccaaccaggaggaggacatccctgtgaagggcagccacagcaccaaggtggaggccgtggtgaggaccctgatgaagatccagctgcgggaccccggggccaaggccctggtgttcagcacctggcaggatgtgctggacatcatcagcaaggccctgacagacaacaacatggagtttgcccagatcagccgggtgaagaccttccaggagaacctgagcgccttcaagagggacccccagatcaacatcctgctgctgcccctgcacacaggcagcaatggcctgaccatcatcgaggccacccacgtgctgctggtggagcccatcctgaacccagcccacgagctgcaggccatcggccgggtgcacagaattggccagaccaagcccaccatcgtgcaccgcttcctgatcaaggccaccatcgaggagaggatgcaggccatgctgaagacagctgagaggagccacaccaacagcagcgccaagcacagcgaggcctctgtgctgactgtggccgacctggccgacctcttcaccaaggagacagaggagctggagtag

SEQ ID NO: 33996 - DNA, 5064 bp, Artificial Sequence
  derived and/or modified sequence
atgagcagcaggaggaagagggcccctcctgtgcgggtggatgaggagaagaggcagcagctgcactggaacatgcatgaagatagaagaaatgagcccatcatcatcagtgatgatgatgagcagccctgccccggcagtgacaccagcagcgcccactacatcatcctgagtgacagcctgaaggaggaggtggcccaccgggacaagaagcgctgcagcaaggtggtgtccttcagcaagcccatcgagaaggaggagaccgtgggcatcttcagccccctgtctgtgaagctgaacatcgtcatcagcccctaccactttgacaacagctggaaggccttcctgggggagctgaccctgcagctgctgcctgcccagagcctgattgagaacttcagcgagaggagcatcaccctgatgagcagcgagagcagcaaccagttcctgatctacgtgcacagcaagggggaggatgtggagaagcagaagaaggagcccatgagcatctgtgacaagggcatcctggtggagagcagcttcagcggggagatgctggaggacctgggctggctgcagaagaagaggcgcatcaagctgtaccagaagccagagggcaaccacatcatcaaggtgggcatctacctgctggaggccggcctggccaagctggacttcctgagtgatgccaacagcaggatgaagaagttcaaccagctgatgaagaaggtgatggagaagctgcacaacagcatcatcccagatgtgctggaggaggatgaagatgatcctgagagcgagcctgagggccaggacattgatgagctgtaccactttgtgaagcagacccaccagcaggagacccagagcatccaggtggatgtgcagcacccagccctgatccctgtgctgcggccctaccagcgggaggccgtgaactggatgctgcagcaggagtgcttccgcagcagccctgccacagaaagtgccctgcacttcctgtggagggagatcgtgaccagcgagggcctgaagctgtactacaacccctacacaggctgcatcatccgggagtaccccaacagcggcccccagctgctgggcggcatcctggctgatgagatgggcctgggcaagacagtggaggtgctggccctgatcctgacccacacccggcaggatgtgaagcaggatgccctgaccctgcctgagggcaaggtggtgaactacttcatccccagccactactttggaggcaagctgaagaagacagagatccagaacattgaatttgagcccaaggagaaggtgcagtgcccccccaccagggtgatgatcctgacagctgtgaaggagatgaatggcaagaagggcgtgtccatcctgagcatctacaagtatgtgagcagcatctaccgctatgatgtgcagaggaacagaagcctgctgaagaggatgctgaagtgcctgatctttgagggcctggtgaagcagatcaagggccacggcttcagcggcaccttcaccctgggcaagaactacaaggaggaggacatctgtgacaagaccaagaagcaggccgtgggcagccccaggaagatccagaaggagaccaggaagagcggcaacaaggacacagacagcgagtacctgcccagcgacaccagtgatgatgatgatgacccctactactactactacaagagcagaagaaacagaagcaagctgaggaagaagctggtgcccagcaccaagaagggcaagagccagcccttcatcaacccagacagccagggccactgcccagccaccagtgacagcggcatcacagatgtggccatgagcaagagcacctgcatcagcgagttcaaccaggagcatgaaacagaggactgtgccgagagcctgaaccacgccgacagtgatgtgccccccagcaacaccatgagccccttcaacaccagtgactacagatttgagtgcatctgtggggagctggaccagattgacaggaagccccgggtgcagtgcctgaagtgccacctgtggcagcacgccaagtgtgtgaactatgatgagaagaacctgaagatcaagcccttctactgcccccactgcctggtggccatggagcctgtgtccacccgggccaccctcatcatcagccccagcagcatctgccaccagtgggtggatgagatcaacagacatgtgcgcagcagcagcctgcgggtgctggtgtaccagggcgtgaagaaggatggcttcctgcagccccacttcctggccgagcaggacatcgtcatcatcacctatgatgtgctgcggtctgagctgaactacgtggacatcccccacagcaacagtgaagatggaagaaggctgaggaaccagaagcgctacatggccatccccagccccctggtggccgtggagtggtggaggatctgcctggatgaggcccagatggtggagtgccccaccgtgaaggctgctgagatggcccagaggctgagcggcatcaaccgctggtgcatcagcggcacccctgtgcagaggggcctggaggacctgtttggcctggtggtgttcctgggcatcgagccctactgtgtgaagcactggtgggtgcggctgctgtaccggccctactgcaagaagaacccccagcacctgtacagcttcatcgccaagatcctgtggaggtctgccaagaaggatgtgattgaccagatccagatccccccccagacagaggagatccactggctgcacttcagccctgtggagcggcacttctaccaccggcagcacgaggtgtgctgccaggatgtggtggtgaagctgaggaagatcagtgactgggccctgaagctgagcagcctggacagaagaacagtgaccagcatcctgtaccccctgctgcggctgcggcaggcctgctgccacccccaggccgtgcggggggagttcctgcccctgcagaagagctttgagcagagcaccttctccttcagcaccatgaccatggaggagctgctgaccagcctgcagaagaagtgtggcacagaatgtgaggaggcccaccggcagctggtgtgtgccctgaatggcctggccggcatccacatcatcaagggggagtatgccctggccgctgagctgtaccgggaggtgctgcggagcagcgaggagcacaagggcaagctgaagacagacagcctgcagaggctgcacgccacccacaacctgatggagctgctgattgcccggcaccctggcatcccccccaccctgagagatggccgcctggaggaggaggccaagcagctgcgggagcactacatgagcaagtgcaacacagaggtggccgaggcccagcaggccctgtaccctgtgcagcagaccatccacgagctgcagaggaagatccacagcaacagcccctggtggctgaatgtcatccaccgggccatcgagttcaccattgatgaggagctggtgcagagggtgagaaatgagatcaccagcaactacaagcagcagacaggcaagctgtccatgtctgagaagggcctgcagttcctgctgaccacccagatggaggagctgaacaagtgccagaagctggtgcgggaggccgtgaagaacctggagggcccccccagcagaaatgtgattgaaagtgccaccgtgtgccacctgcggcctgcccggctgcccctgaactgctgcgtgttctgcaaggcagatgagctgttcacagaatatgagagcaagctgttcagcaacacagtgaagggccagacagccatctttgaggagatgattgaagatgaggagggcctggtggatgaccgggcccccaccaccacccggggcctgtgggccatcagcgagacagagaggtccatgaaggccatcctgagctttgccaagagccacagatttgatgtggagtttgtggatgagggcagcacctccatggacctgtttgaggcctggaagaaggagtacaagctgctgcacgagtactggatggccctgaggaacagagtgtctgctgtggatgagctggccatggccacagagcggctgcgggtgcgggacccccgggagcccaagcccaacccccctgtgctgcacatcatcgagccccatgaggtggagcagaaccgcatcaagctgctgaatgacaaggctgtggccaccagccagctgcagaagaagctgggccagctgctgtacctgaccaacctggagaagagccaggacaagaccagcggcggcgtgaaccctgagccctgccccatctgtgcccggcagctgggcaagcagtgggccgtgctgacctgtggccactgcttctgcaatgaatgcatcagcatcatcatcgagcagtacagcgtgggcagccacaggagcagcatcaagtgtgccatctgccggcagaccaccagccacaaggagatctcctatgtgttcaccagcgagaaggccaaccaggaggaggacatccctgtgaagggcagccacagcaccaaggtggaggccgtggtgaggaccctgatgaagatccagctgcgggaccccggggccaaggccctggtgttcagcacctggcaggatgtgctggacatcatcagcaaggccctgacagacaacaacatggagtttgcccagatcagccgggtgaagaccttccaggagaacctgagcgccttcaagagggacccccagatcaacatcctgctgctgcccctgcacacaggcagcaatggcctgaccatcatcgaggccacccacgtgctgctggtggagcccatcctgaacccagcccacgagctgcaggccatcggccgggtgcacagaattggccagaccaagcccaccatcgtgcaccgcttcctgatcaaggccaccatcgaggagaggatgcaggccatgctgaagacagctgagaggagccacaccaacagcagcgccaagcacagcgaggcctctgtgctgactgtggccgacctggccgacctcttcaccaaggagacagaggagctggagtag

SEQ ID NO: 33997 - DNA, 5052 bp, Artificial Sequence
  derived and/or modified sequence
atgagcagccggcggaagcgggccccccccgtgcgggtggacgaggaaaaacgacaacagttacactggaacatgcatgaggatcgccggaacgaaccgatcatcatttctgatgacgatgagcaaccatgtcctggatccgacacatcaagtgctcactatattatcctttcagattccctgaaggaggaggtggctcaccgcgacaaaaagaggtgttccaaggtggtcagcttctccaaaccgatagagaaggaggaaacagtgggcatattctcacccctgtctgttaaacttaatatagtgatctctccataccacttcgataacagctggaaagccttccttggcgaactgactctccagctattaccggcacagtccttaattgagaactttagcgagagatcaattactctgatgtcctccgagtcctccaatcaattccttatctacgttcactcaaaaggagaggatgtggagaagcagaagaaggagcctatgtcgatctgcgacaagggtattcttgtggaaagctccttctctggtgagatgctagaagacctcggttggctccaaaaaaagagaagaatcaagctgtatcagaagcccgaaggcaaccatatcattaaagtaggaatctatttgttggaggctgggctggctaaacttgactttctatccgatgctaattctagaatgaagaagttcaaccaacttatgaagaaagtaatggagaagctgcacaatagcatcatcccagatgtgttggaagaggacgaggatgacccagagtcggagcccgagggccaggatatcgacgagctataccatttcgtaaaacagacacatcagcaggagacacagtccatccaggtcgacgtgcagcacccagcattgattccagttctgcgcccctaccagcgagaagcggtcaactggatgctgcagcaggaatgcttcaggtcttcccccgctacagaaagtgctctccacttcctgtggcgcgagatcgtgaccagcgagggattaaagttatattacaacccctatacaggctgcattattcgagagtatcctaattctggccctcagctgctcggggggatactcgccgacgaaatggggctgggaaaaacggtagaagtattagccctaatcctaacccacacccgccaggatgtgaagcaggacgcattgacactcccagagggtaaggtcgtgaactactttatccccagtcactatttcggcggtaagttgaagaagacagagatccagaacatagagttcgaacccaaagaaaaagtacaatgtcccccaacccgcgtaatgatcctgaccgccgtcaaagagatgaacggtaaaaaaggcgtctccatactatccatttacaagtatgtgtcatccatctatcgatacgacgtccagcgcaatcggagcttgttaaagcgaatgctgaagtgcctaatattcgaagggctggtgaagcagatcaaagggcatgggttctctggaactttcaccttggggaagaattataaggaggaggatatttgcgataaaaccaaaaagcaggctgtgggctccccccgcaagatacagaaagaaacccggaaaagtggtaataaggacacggactctgagtacctgccctcggacacttctgatgacgacgatgatccgtactattactactacaaatcccgcaggaatagatctaagctcaggaagaagcttgtccctagcacgaaaaaggggaagagccagccctttattaaccctgatagtcagggccactgtccggccaccagcgattctggaataactgacgtggctatgtcaaagtccacctgtatttctgaatttaaccaggagcatgaaactgaagactgtgcagaatctctgaatcatgcggattcagacgtaccgccttctaacaccatgtctccttttaatacaagcgattatcggttcgagtgtatctgcggggaactagatcagattgacaggaaaccacgcgttcaatgcctgaagtgtcacttgtggcagcacgccaaatgtgtaaactacgacgagaagaacctgaaaattaagcccttctactgcccacactgccttgtggctatggagcccgttagcacacgagccaccctgatcatctctcccagttccatatgtcatcaatgggtggatgagataaatcgtcacgtccgttcctcctctctgcgggttcttgtgtatcaaggtgtgaaaaaggatggatttctgcaaccacacttcctcgctgagcaggatatcgtgatcattacttatgacgttttaagatcggaactgaactatgtggatatacctcactctaactccgaagatgggcgccgtctgagaaaccagaaaaggtacatggccatcccctctccactggtggccgtggaatggtggcgtatctgtctggatgaggcacagatggttgagtgtcccaccgtaaaagccgcagaaatggcacagcgcttatcaggaatcaataggtggtgtatatccgggacacccgtgcagcggggcctggaggacctgttcggtctagttgttttcctaggtattgagccgtattgtgtgaagcactggtgggtccggctactttatcgcccatactgtaagaaaaatcctcagcacctgtatagctttatcgctaagatcctatggcgctcagccaagaaggatgtgatcgatcaaattcaaattcccccgcagactgaagagatccattggctccatttctcccccgtggagcggcacttctatcatcgccagcatgaggtctgctgtcaggacgtggtggtcaagctgaggaagatttccgactgggcccttaagctgagcagtctcgatagaaggaccgttacgtctatcttataccctttgctgcggctgagacaggcctgctgtcacccacaggcagttagaggggagtttcttcctcttcaaaagagcacaatgacgatggaggagctgctcacgtcactccagaagaaatgcggcactgaatgcgaggaagctcaccggcagctcgtttgtgccttgaacgggctggcaggcattcacataataaagggtgaatacgccctcgcagcggaattgtaccgagaggtgctacgcagttccgaggagcataagggaaaactgaaaacagacagcctccagcgcctacatgcaactcacaatctgatggagctattgattgcccggcaccccggcataccacctaccttgcgcgacggccggctggaggaagaggctaagcagctgagagagcactatatgagcaaatgcaacactgaagtggcggaggcccagcaggctctttatcccgtgcaacagactatccacgaattgcaacgaaagattcactcaaatagcccgtggtggctgaacgtgattcacagagctatcgagttcaccatagatgaggaacttgttcagagagtacggaacgagattaccagcaattacaaacagcagaccggaaagctgagtatgtctgagaaattccgggactgtagaggactgcaatttcttctcaccactcagatggaggagttgaacaagtgccagaagttagtgcgcgaggccgtgaaaaacttagaaggtcccccttcaagaaatgtcatcgaaagcgccactgtctgccatttgaggcccgccaggttaccgcttaattgctgcgtcttctgtaaagcagatgaactcttcacggagtatgaaagcaagcttttctctaacacagttaaaggccagactgctatctttgaagaaatgattgaggacgaagagggcctcgtagatgacagagctcctaccacaacaagggggctgtgggctatctctgaaacagagcggagcatgaaggcaatcctctccttcgccaagagccacagattcgacgtggagtttgtagatgaaggatccacatctatggatcttttcgaagcctggaagaaagaatataagctgctgcatgagtactggatggcgctcaggaaccgcgtctcagctgtcgatgaacttgccatggctactgagagactcagggtgagagatccacgggaacccaagcccaacccacccgtactgcacatcatcgagcctcatgaggtggaacagaatcgaataaagcttcttaatgataaagccgttgcaacttcccaactccagaagaaactgggccagctcctgtacctgacaaatctggaaaaaagccaggacaagacctcagggggagttaaccccgaaccctgtccgatatgcgctaggcagcttggtaagcagtgggccgtgctcacctgcgggcattgcttctgtaatgagtgcattagtattatcattgaacagtattccgtgggctctcaccggagctccattaaatgtgccatctgccggcagactacatcacataaagagatatcttatgtgttcacctcggaaaaggccaatcaagaggaggatatccctgtgaagggatctcacagcacaaaggtggaggctgtggtgcgcactctcatgaagatccagctaagagatcctggggccaaagccctcgtgttttcgacttggcaagatgtcctggacatcatcagcaaggcactcaccgacaacaacatggaattcgcccaaatcagcagagttaagacctttcaggaaaatctcagtgcgttcaaacgagaccctcagatcaacatcctgttgcttcctctccacaccgggtcaaacggactaaccatcatcgaggctacacatgtgctcctggtggagccaatcctgaacccggctcatgaattacaagccattggccgcgttcatcggatcggacagactaaacccactatcgtccaccgcttcttgataaaggccactatagaggagaggatgcaggccatgcttaagaccgctgagcgttcccataccaattctagtgccaagcactcagaggcctccgtgttgactgtggccgatctcgccgacctattcacaaaagagacagaggaactcgagtag

SEQ ID NO: 33998 - DNA, 5064 bp, Artificial Sequence
  derived and/or modified sequence
atgagcagccggcggaagcgggccccccccgtgcgggtggacgaggagaaaagacagcagctgcattggaatatgcacgaggaccggcggaatgaaccaataattatatcggatgacgatgaacagccttgcccagggagcgacacgagctccgctcattacatcatcctgagcgacagtttgaaagaggaggtggcccaccgtgacaagaaacgctgcagcaaggtggtcagttttagtaaacctatcgagaaggaagaaactgtgggcatatttagtcctctaagtgtgaagctgaacattgtgatatcaccatatcactttgacaattcctggaaagcatttctaggggaacttacactccagttactgcccgctcagagcctcattgagaactttagtgaacgatcaatcacactgatgtcctccgaatcctcaaatcagtttttaatctatgtgcacagcaagggagaagacgttgaaaaacaaaagaaagaacctatgagcatttgcgataaggggattctcgtggaatcctccttttccggcgaaatgctcgaggaccttggatggctccaaaagaaacgcagaataaaattgtatcagaagcctgagggaaaccatatcatcaaggtcggtatctacctactggaggccgggctggcaaagctggactttttatcagacgccaacagtcgcatgaagaagttcaatcagctgatgaagaaagtgatggagaaactccacaactcgatcatacccgatgtcttggaagaagacgaagacgacccagagtctgaaccagagggacaggacatagatgaactgtaccactttgtgaagcaaacccatcagcaggaaacacagagtatccaggttgacgtccagcacccagcacttatacccgtattacggccctatcagagagaggcagttaactggatgttacaacaggaatgcttccgcagcagtcctgctactgaaagcgctctccactttctttggcgagaaatcgttacatcagaggggctcaaactgtattacaatccttacaccggctgcattatccgcgagtacccgaactcgggcccacagctactggggggcatcctggctgatgagatgggcctggggaagacagtcgaggtcctcgccctgatattaacgcatactcggcaggatgtcaaacaggatgctcttaccctaccggaagggaaggtggttaactatttcataccatcccattatttcggggggaaactgaagaagacagagattcagaatatcgaattcgaacccaaagagaaggtgcaatgccctcccacgagagtgatgatcctgacagctgtgaaggagatgaatggtaagaaaggagtgtccattttgagcatatataaatatgtgagcagtatctatcgctatgatgtgcagcggaaccgctcgttgctgaagcggatgctcaaatgcctgattttcgagggtcttgttaaacaaattaaagggcatggtttcagtggaacgttcactcttggtaagaattataaagaagaagacatatgcgataaaaccaaaaaacaggccgtcggctccccacgaaagattcaaaaggaaaccaggaagagcggcaacaaggacactgattcggaatatctgccgtccgacacaagtgatgacgatgacgacccgtattattactattacaagtctcgccgtaatcgctccaagctgaggaaaaagctggtcccttctacaaaaaaggggaagagccaacccttcatcaaccctgactcccagggacactgccccgcgaccagtgacagcgggattaccgacgtggctatgagcaaatccacttgtatcagcgaatttaaccaggagcatgagactgaagattgtgccgaaagcttgaaccatgccgatagcgatgtgcccccctccaacacaatgtcccccttcaatacttctgactacagattcgagtgcatttgcggagagctggatcaaattgatcggaagcctagagtgcagtgtctcaagtgtcacctgtggcagcacgccaagtgcgtgaattacgacgaaaaaaatctgaaaattaaacccttctattgtccacactgtctggtcgcgatggagccggtgagcacccgcgcaaccctgattatttcaccctcatctatttgccaccagtgggtggatgagatcaatcgacatgtgagatcttcttccctccgggtgctggtttaccagggcgtcaaaaaggatgggttcttgcagccacattttctggcagaacaggacattgtcatcataacttacgatgtccttcggagcgaactcaattacgttgatatcccccatagtaactcagaggatggaaggcggctgaggaaccagaagagatacatggctatcccatcccccttagtcgctgtggaatggtggcggatatgcttagacgaagcccaaatggtggagtgtcccacagtgaaggccgccgaaatggcccagcgcttgagcggtattaatcgatggtgcatctcaggaacacctgttcagcggggactggaggacctgttcggtctcgtcgtcttccttggcatcgaaccatattgcgtgaagcactggtgggtgcggctgctatatcgcccctattgtaaaaaaaatccccagcatctgtatagtttcatcgcaaaaatattatggcgttccgcaaagaaagacgtcattgatcagatacaaattcctccgcagaccgaagagattcactggctgcacttcagtccagttgaacggcacttttatcaccgccagcatgaggtctgttgtcaagatgttgtggtcaagctcagaaaaattagcgattgggcacttaaactctctagcctcgataggagaacagtaacgtcaatcctctacccattacttcgactgaggcaagcttgctgccacccacaggccgtgaggggggagtttcttccactacaaaagagttttgaacagtctacattttccttctcaacaatgaccatggaagaactcctcacctcgctgcaaaagaagtgtgggactgagtgcgaggaggcccacaggcagttggtgtgtgcactcaatgggctagccgggatccatataatcaaaggggaatatgctctggccgcggaactgtacagggaagtgctgagatcgtccgaggaacacaagggcaagctcaagaccgattctctgcagcgactacacgcaacacacaacctgatggaacttcttatcgccaggcatcccggaatcccgcccacactcagggatgggagactagaggaggaggcgaagcaacttcgtgagcattatatgtctaaatgcaatacagaggtcgcggaggctcagcaggcgctgtaccccgttcagcagactatccacgagttgcaacgtaagatacacagcaattcaccctggtggctgaacgtaatacaccgcgcgattgaattcacaattgacgaagaactcgtccagcgcgtcagaaatgagattaccagtaattacaaacagcaaacaggcaagctctccatgagtgagaaagggctccaatttctgctgaccacccagatggaagagctaaacaaatgtcagaaactggtgcgggaggccgtaaagaatctcgagggcccaccgtccagaaatgtgatcgaatccgccaccgtctgccacctgaggccggccagattgccgctgaactgctgtgttttttgcaaagccgatgaactgttcacagaatacgaaagcaaactgttttcaaacaccgtaaagggacagactgcgatttttgaggagatgattgaggacgaagagggcttggtggatgaccgggcgccaactaccactagaggcctttgggctatctccgaaactgagcgcagtatgaaggccatcctgtccttcgccaaatcccaccgtttcgacgtcgaatttgtcgatgaagggtccacctccatggatctatttgaggcctggaaaaaagaatacaaattacttcacgaatattggatggctttgcgaaaccgcgtctctgccgtagatgagctggcaatggcgaccgagcgtcttagggtacgcgatccccgtgaacctaagccgaaccctcctgtgctacatataatcgaacctcacgaagtggagcagaatcgtattaaactgctcaacgataaggctgtcgccacatctcagttgcagaagaagctgggtcagcttctctatctgacgaatctggagaaatcccaggataagacgtccgggggtgtgaatccagaaccttgcccaatttgcgcaaggcaattgggaaagcagtgggcagtcctaacatgtggccattgtttctgcaacgagtgcatttccataatcattgaacagtatagtgtaggatcccaccggagcagcattaagtgtgcaatctgcaggcaaacaaccagtcacaaggaaatttcctacgtgttcacaagcgagaaggccaaccaggaagaggacatccccgtgaaagggtcccacagtacaaaagtggaggctgtcgtgcgcaccttaatgaaaatccagctccgggaccctggagcgaaagcccttgttttcagtacatggcaggacgttctggacatcatctccaaggccctgacagataacaacatggagtttgcccagatatcccgcgtcaaaacgtttcaagagaacctaagcgctttcaaacgggacccccagattaatatcctgctgctgccactacacacaggatctaatgggctgaccattatcgaggccacacacgtccttctagtggagcccatcctcaacccagcacacgaactccaagctattgggcgcgtgcacaggatcggacagacaaaacccacgatcgtgcatagattcctcatcaaggctactattgaagagcgcatgcaggccatgctaaagacagctgaacggtcccacaccaacagcagcgctaaacactccgaagcctcagtcctaaccgttgcagacctcgcagatctcttcacgaaggagaccgaagagctcgaatag

SEQ ID NO: 33999 - DNA, 5052 bp, Artificial Sequence
  derived and/or modified sequence
atgagcagccggcggaagcgggccccccccgtgcgggtggacgaggaaaaaagacagcaactgcattggaatatgcatgaggacagacgtaacgagcccattataatttctgacgatgatgagcagccctgccccggctctgacacatcttccgcacactacatcattctgtcggatagcctcaaagaagaggtggcacaccgggataagaagagatgcagtaaggttgtgagctttagcaaacccatagaaaaggaggaaacagtgggcatatttagcccgctgagcgtgaagctgaatattgtgatatctccttaccattttgacaatagttggaaggcattcctcggagaattaaccctccagctactccccgctcaatccctgatagaaaacttctcggagcgatcaatcactctgatgagcagcgagagttcaaaccagtttctaatttatgtgcatagcaagggcgaggatgtcgagaagcagaagaaggagccaatgtccatctgtgataaaggcattctcgtagaatcatcattctccggcgagatgctcgaagacctgggatggctgcaaaagaagcggagaattaagctgtaccagaaacccgagggaaaccatatcatcaaggtaggaatatatctcttggaagcggggctggctaaactagattttctgtcagacgccaattctcggatgaaaaaatttaaccagcttatgaaaaaagtcatggagaagcttcacaattctatcatccctgatgtgctagaggaagacgaggacgatccagaatctgaacctgagggccaagacatcgacgagctgtaccatttcgtgaaacagacacatcagcaggagacacaatcgattcaggtggatgtccagcacccagcccttatcccagtcctgcggccttatcaaagagaagccgtgaattggatgctccagcaggagtgtttccggtcatccccagccaccgagtctgctctccatttcctttggcgcgagatagtgacctctgagggcttaaagctgtactataatccttacacaggctgtatcatccgagagtaccccaactccggaccccaactcctcggcgggatcttagccgatgaaatgggcctgggcaagacagtcgaggtgttagcactgatcttgacccatacacggcaggatgttaaacaggacgccttaaccttgcctgagggcaaagtggtgaactactttatcccctcacactactttggcggaaaactcaagaagacagagattcaaaatattgaattcgaaccgaaggagaaagtgcaatgccccccaacccgggtgatgatcctgactgcagtgaaggagatgaacggtaaaaagggtgtctccatcctctccatatacaaatacgtttccagtatttataggtatgacgtccaaagaaatcggagtctcttaaagagaatgctgaagtgcttgattttcgagggactggtgaaacagattaagggtcatggtttttcaggaacctttacgctggggaaaaactataaggaagaggatatatgtgacaaaaccaagaagcaagccgtagggagcccgcgcaagatacagaaggagacgagaaagtctggtaataaggatacagattccgagtacctgccctccgacacgagcgatgatgacgacgatccctattactactactataagtcacggcggaacagaagcaaattgcgtaagaagctcgtaccctctacaaaaaaaggcaagtcccagccatttattaatccagattctcagggacactgccccgccacgagcgattccggaattactgatgtggcaatgtccaaaagcacgtgtatttcggagttcaaccaggaacacgagaccgaggactgcgccgaatcattgaatcacgccgattcagatgtgccaccctccaacaccatgtctccttttaacacttctgactatcgattcgaatgcatctgcggggagctcgatcagatagaccgaaaaccacgggtgcagtgtctgaaatgtcatctgtggcagcacgctaaatgcgtgaattacgatgaaaagaacctgaaaattaaacctttctactgcccacattgcctggtggcaatggagcctgtgtccacccgcgccacactgatcatatctcctagttccatttgtcatcagtgggtggatgagatcaacagacacgtgaggagctcatcactccgggtgttagtatatcagggtgtgaagaaggatggtttcctgcagccacacttcctggctgagcaagacatcgtgataattacctatgatgtgctcagaagtgaactgaattacgtggacatcccccattctaacagcgaggatggcagacgcctcaggaaccagaaacgatacatggcaatcccttcaccactggtagcagtggaatggtggcggatatgtctcgacgaagcgcaaatggtggagtgtcccacagtaaaggctgcggagatggctcagcgcctgagtggaataaatcgttggtgtatctccggaacaccagtacagcggggactggaagatctcttcggattagtggtcttcctgggcattgagccatactgcgtgaaacactggtgggtgcgcttgctgtataggccctattgtaagaaaaatccacaacatctatatagctttattgctaagatcctgtggcggagcgcaaaaaaggacgtgatagaccagatacagattccacctcagactgaggagatacattggctgcacttttcccctgtagagcgacatttctaccatcgacaacacgaagtttgttgtcaggatgtggtggtcaagttacgcaagatctcagactgggccctgaaactgtctagcctcgacagacggacggtgactagcattctgtatccgctgttgcgtctgcggcaagcttgttgtcacccccaagccgtacgcggtgaatttctgcctctgcaaaaatcgactatgacgatggaggagctgttgacttctctgcagaaaaagtgtggtaccgagtgtgaggaagcccatcgtcagctcgtgtgcgcactgaatggattagcggggatccatattatcaagggagagtatgccctggccgccgagctgtacagagaggtcctacggagctctgaggaacacaagggcaagctaaagactgattctctacagagactgcatgcaacccacaatctcatggaactgctaattgctcggcatcccgggatccctcccacgctgcgcgacgggcggctggaggaggaggccaaacagctccgtgaacactacatgagcaagtgcaataccgaagtcgcagaagcccaacaggccctgtaccccgttcaacagacaatacatgaactgcaacgcaaaatccattcaaactcaccatggtggctcaacgtgatccaccgggctatcgagtttacaatcgacgaggaactcgttcagcgtgtgcgaaacgaaattacctccaattataaacaacagactggcaagctgtcaatgtcagaaaaattccgcgactgccgcggcctgcagtttctgctgacaactcaaatggaggaacttaataagtgccagaaactggtcagggaggcggttaagaacctggaggggccaccgagcaggaacgttattgagtcagcgacagtgtgtcatctccggcccgcccgactgcccttaaattgttgcgtgttctgcaaagctgacgagttgttcaccgagtatgagtcgaagcttttttcgaatacagtgaagggacaaacggccatctttgaagagatgatcgaggacgaggagggcctcgtggacgacagagctcccaccacaacccgtggcctttgggccatcagcgagaccgaacgctcaatgaaggctattctctctttcgcaaagagccacagattcgatgtggagttcgttgatgaaggcagtactagcatggatttatttgaggcttggaagaaggaatacaaacttctacacgagtactggatggcccttcgcaatcgcgtttccgctgtcgacgagttagccatggccaccgagcggctgcgagtcagagacccccgagaacctaagccaaacccgccagttcttcatatcattgaaccacacgaggtagagcagaaccgcataaaattgctcaatgacaaagcagtggccacctcccagttgcagaaaaaactcggccagcttctgtacttaacaaacctggagaagagtcaggataaaaccagcggaggggttaacccagagccgtgtccgatctgtgcaaggcagctcgggaagcagtgggccgtgctaacctgcggtcattgtttctgtaacgagtgtatatcaattattatcgaacagtactctgtcggtagccatcgcagttccataaaatgtgccatttgccggcagacaaccagtcataaagaaattagttatgtgtttacatctgagaaggctaatcaggaggaggacattcccgttaaaggatcacacagcaccaaggtggaagcagttgtgcgcaccttaatgaagattcagctccgggacccaggagctaaagccctggtattcagcacttggcaggacgtgctggatatcatatctaaagctctgaccgataacaacatggagtttgcacagatctcaagggtgaagacattccaggagaacttgtcagcatttaagcgggacccacaaatcaatatcctcctgctccccctgcacactggcagcaacggtcttactatcatcgaggctacccacgttctgttagttgagccaatcctgaaccccgcccacgagttgcaggcaatcggacgcgtccacagaattggacaaaccaaacccacaatcgtacatcgctttctgatcaaagccaccatcgaggagcggatgcaggccatgcttaaaacagcagagagatcccacactaactctagcgcgaagcactctgaagcgtccgtcctgacagtggccgacttggccgatttattcaccaaagagacagaagaattagaatag

SEQ ID NO: 34000 - DNA, 6649 bp, Artificial Sequence
  derived and/or modified sequence
gtctttggcctccgggaccagggagggaggacgctggttgtcctggagcccgggaagctcaagggctgagagggagccgctgcgcgagtcttccccacctcttcccgatcccggactagcgaacttcggaccaccacgtccctccggggataaagtggggtcgtgggaaaggaggctgtgcttctcctcatgcactggggcctgcggtgtttgtctcgagcgtccaacacactaggatccgggagtccgtcgtcacgctccttggcctcgcggtcgcttgtttgctcggcctgctgggagcgatccggcgctgacagccccgctcagactccgggagccgcttgtgggtctttcggaagataactgaagttcacagttaccagccaagaaaacttgaaaatgagcagccgacggaaacgtgctcctccagtgagggtagatgaggaaaagaggcagcagcttcattggaatatgcatgaggacagaaggaatgaacctatcatcataagtgatgatgacgagcagccctgcccaggttcagatacctcttctgctcattatatcattctaagtgatagtctaaaggaagaagtggctcacagagataagaagaggtgttcaaaagtggtgagcttctcaaaaccaattgaaaaagaagagactgttggtattttttcccctttgtctgtaaagttaaatattgtgatttctccctatcattttgataattcctggaaagcatttctaggagaattaactcttcagcttcttcctgcacagagtttaattgaaaatttttccgaaaggagtattacattgatgagttcagagtcaagcaatcagttcctgatttatgttcattcaaaaggtgaagatgtagagaaacaaaaaaaagaaccgatgagtatttgtgacaagggtattctggtggagtcatccttcagtggtgaaatgttagaagatttggggtggctacaaaagaagagaagaataaaactctatcagaaaccagaaggaaatcacattatcaaggttggaatttatcttttggaagctggcctagcaaaactagacttcttgagtgatgcaaattcaagaatgaaaaagttcaatcagctcatgaagaaagtaatggaaaagttacacaattctattattccagatgtgttggaagaggatgaagatgatccggagagtgagccagagggacaagacattgacgagctgtatcactttgtgaaacaaacacatcagcaagaaacgcagtccatccaagtggatgtccagcatcctgcattgatccctgtgttgagaccctaccaaagagaggctgtcaattggatgctacaacaagagtgtttcagaagcagtcctgctactgaaagtgccctgcacttcttatggcgagagattgttacatctgagggtctgaaactctactataatccatatacaggctgcatcattcgtgagtacccaaattctgggccgcagttgcttggtggaattttagcagatgagatgggtcttggaaagacagtggaggttttggctctgattctgacacatactcgacaagatgtcaagcaagatgctctcactcttcccgagggaaaagtggtgaattattttattccgtcacattattttggaggaaaactgaaaaagacagaaatccagaatatcgaatttgaaccaaaagaaaaagttcaatgccctcctacacgtgtgatgatactgacagctgtgaaagaaatgaatggaaaaaaaggagtgtccatcctttccatctataagtatgtcagttctatatatagatacgatgttcaacggaacaggagtcttttgaaacggatgctgaaatgtttaatttttgaaggtctcgtgaaacagatcaaaggccatggtttttctgggacttttacattgggaaagaattacaaggaagaggatatatgtgataaaacaaaaaagcaggcagtagggagtccaaggaaaattcagaaagaaactagaaaatcagggaacaaggacacagattctgaatacttgccatcagacacctctgatgatgatgatgatccttactattattattataagtccaggagaaatcgcagtaaattgaggaaaaagcttgttccatccacaaaaaaaggaaaaagtcaaccatttatcaatcccgattcacaaggtcactgtccagctactagcgactctggaataactgatgttgctatgtctaaaagtacatgtatctctgaattcaaccaagaacatgaaacagaggactgtgctgaatctctaaatcatgctgatagtgatgtaccaccttctaataccatgagtccctttaacacctctgattaccgctttgagtgtatatgtggtgaacttgatcagatagatcgtaagcctcgtgttcaatgcctgaagtgtcacctgtggcaacatgcaaagtgtgtgaattatgatgagaaaaatctgaagatcaagcctttttactgcccccactgccttgttgcaatggaaccagtgtcaacaagagcaactctgatcatctctccaagttccatctgtcaccagtgggtggatgagatcaacaggcatgtgaggtcgtcatctcttcgagtcttggtatatcaaggagtgaagaaagatggctttttacaacctcattttttggcagaacaggatatagttatcattacctatgatgtactgcgttcagaattaaattatgtcgatatcccacatagcaatagtgaggatgggcgtcgcctacggaaccagaagcgctatatggctatcccgagccccctggtagctgtggagtggtggaggatctgccttgatgaagctcagatggttgagtgtcccacagtaaaagctgcagaaatggcccagcgtttgagtgggattaatcgatggtgtatcagtggcactccagtacagagaggattagaggatctttttgggttagtggtctttcttggtattgaaccttactgtgtcaaacactggtgggttcgacttctctatcggccttactgcaagaagaatcctcagcatctctacagctttattgccaagatactgtggaggtctgcaaagaaagatgtgattgaccaaatccaaataccaccacaaaccgaagaaatacactggctccacttttctccagtggaaaggcatttctatcaccgtcagcatgaggtgtgctgccaggatgtggtggtaaaactcaggaagatttctgactgggctctgaagctcagcagcctagacagaaggactgtcacctctatcctgtatccattgctgaggctcagacaggcctgctgtcacccacaggctgttcgtggagagttcttgccactccaaaaaagcaccatgacaatggaagagctgctgacatctttgcagaagaaatgtggaactgaatgtgaagaagcacatcgacagctagtttgtgctctcaatggcttagcaggcattcatattattaaaggtgagtatgccttggcagcagaattgtacagagaagtgttgcgctcctcggaggaacacaaaggaaaactcaaaactgattcacttcaaagacttcatgctacccataacttgatggaattgttgatagccaggcacccagggataccacctaccttgcgtgatggccgacttgaggaagaggccaaacagctgcgagagcactacatgagcaagtgtaatacagaagttgctgaagcccagcaagctttatatcctgtgcagcagaccatccatgagcttcaaagaaagattcattctaattctccttggtggctaaatgtgatccacagagcaatagaatttactattgatgaggagctagttcagcgagtgcgaaatgaaataaccagcaactacaagcaacaaactggcaagctttctatgtcagagaagttccgtgattgcagaggtcttcagttcttacttacaacacaaatggaagagctaaataaatgccagaagctagtaagagaggctgtaaaaaacctggagggacctccatctcgtaatgttattgagtctgcaacagtctgtcacctccgaccagccagacttcctctcaactgctgtgtcttttgtaaagctgatgaattgttcacagagtatgaatcaaagctattttccaacacagtcaaaggccagactgcaatatttgaggagatgatagaagatgaagaaggactggtggatgatcgagcacctaccaccacccggggtctctgggcaataagtgagacagagcgatctatgaaagcaatactatcatttgcaaaatcacataggtttgatgttgaatttgttgatgaaggaagcacttcaatggatctctttgaagcatggaagaaggaatataagttgcttcatgaatattggatggctctgaggaatcgtgtgtctgctgttgatgaacttgcaatggctacagaacgactaagagtgcgtgatcctagggagccaaagcctaatccgcctgttcttcatatcattgaaccacatgaggtagaacaaaaccgaataaaactactaaatgataaagctgttgctacatcacagcttcagaaaaaacttgggcagcttctttacctaactaatttggagaagtctcaagataaaacatcgggaggtgttaatccagaaccttgcccaatctgtgctcgacagctaggaaaacagtgggcggtactgacctgtggtcactgtttctgtaatgaatgcatttctataattattgaacaatacagcgtgggatctcacagaagctccattaagtgtgcaatctgccgccagaccacatctcacaaagaaatctcgtatgtctttacctcagagaaagcaaaccaggaggaggacatccctgtgaagggcagccattctacaaaagtggaagctgtggtcagaactctgatgaaaatacagcttagagatccaggggccaaagcactcgttttctcaacgtggcaagatgtattagatattatttcaaaagctcttactgacaacaacatggaatttgcacaaatcagtcgtgttaagacatttcaggagaacctttcagcatttaaacgtgatccccaaatcaatattttgctgctgcccctgcacacaggttctaatggattaactatcattgaagcaactcatgttctcttggtggagcccatattgaaccctgcccatgagcttcaggccatagggagggtgcaccgaattggacagacaaaacctactattgtacacagattcttaattaaagcaacaatagaagaaagaatgcaggcaatgctgaaaactgctgagagaagtcacacgaactcatcagcaaagcattcagaggcctctgtcttgactgtggctgacctggcagacctatttaccaaagaaactgaagagcttgaatgaactacacttgattcattccatggactttagtgtattaataaactttcatagctgtagagcaaagttacaagttttaaaaacccagtagataacagtaacactgttcctagttgaatgaatttgtttattgttctggttatacagtggcttagtacttattgagtccttttcaatatactgtttccaaaagatctataaagattcttaattttacactcctaataaaacatttattttttgtcccaaatagtatctatatctgatgatgcaagggaattaagagaggtaatgtgtacttttcttatgataagatcactcataaaacagttggaataagaaagtaaactagtctagttttatatgacctggtatattgaacaaacatagatctcagttttggaagggccttcagtatctttagcacatgattcaccaatatcttgttagtaatattttaagtagatggtgaattatattaacccattttttgagtaggcttataccataactttacacctagtaattttgcagtaatacaactccttacaataagttaatgttagacagttatttgtttcttctgcatcttgctactgaaaacaaaaacaatgaaaatattcatatttctattatgtgtaaagtggtgttagtgtaaacagttaactccaaatagattttttaatgtattaatgattaccttaaaattatctgctttccctactcttaatttttcttattgttaaagtttttatatgttgtaagattgatgtatctgtaaatattgcagtttttatgattttgttttattataacatggaaatatggcagggttttttttttaatcattattatactgatgtcttggattctttttctttcccatgttcttgtgtaactagactttttagccagtgatatctgaattcatggtagagttgttatttcactccagttgttcctcccttaagcacgagtctttgaccttttgaacaagagaatgccatgttcacataagcaaatcgttgcaagtgataataacgaagtgtttcttcttctgtgaggaattaatggactttgaaattgctgaataaggagtagcttgttacatcctagccatttgatgtaatacaaatgttcttatttggcttccttttctttgagccttcagagttttaaaggaccctctttgaccctcagg

SEQ ID NO: 34001 - DNA, 7343 bp, Artificial Sequence
  derived and/or modified sequence
gtctttggcctccgggaccagggagggaggacgctggttgtcctggagcccgggaagctcaagggctgagagggagccgctgcgcgagtcttccccacctcttcccgatcccggactagcgaacttcggaccaccacgtccctccggggataaagtggggtcgtgggaaaggaggctgtgcttctcctcatgcactggggcctgcggtgtttgtctcgagcgtccaacacactaggatccgggagtccgtcgtcacgctccttggcctcgcggtcgcttgtttgctcggcctgctgggagcgatccggcgctgacagccccgctcagactccgggagccgcttgtgggtctttcggaagataactgaagttcacagttaccagccaagaaaacttgaaaatgagcagccgacggaaacgtgctcctccagtgagggtagatgaggaaaagaggcagcagcttcattggaatatgcatgaggacagaaggaatgaacctatcatcataagtgatgatgacgagcagccctgcccaggttcagatacctcttctgctcattatatcattctaagtgatagtctaaaggaagaagtggctcacagagataagaagaggtgttcaaaagtggtgagcttctcaaaaccaattgaaaaagaagagactgttggtattttttcccctttgtctgtaaagttaaatattgtgatttctccctatcattttgataattcctggaaagcatttctaggagaattaactcttcagcttcttcctgcacagagtttaattgaaaatttttccgaaaggagtattacattgatgagttcagagtcaagcaatcagttcctgatttatgttcattcaaaaggtgaagatgtagagaaacaaaaaaaagaaccgatgagtatttgtgacaagggtattctggtggagtcatccttcagtggtgaaatgttagaagatttggggtggctacaaaagaagagaagaataaaactctatcagaaaccagaaggaaatcacattatcaaggttggaatttatcttttggaagctggcctagcaaaactagacttcttgagtgatgcaaattcaagaatgaaaaagttcaatcagctcatgaagaaagtaatggaaaagttacacaattctattattccagatgtgttggaagaggatgaagatgatccggagagtgagccagagggacaagacattgacgagctgtatcactttgtgaaacaaacacatcagcaagaaacgcagtccatccaagtggatgtccagcatcctgcattgatccctgtgttgagaccctaccaaagagaggctgtcaattggatgctacaacaagagtgtttcagaagcagtcctgctactgaaagtgccctgcacttcttatggcgagagattgttacatctgagggtctgaaactctactataatccatatacaggctgcatcattcgtgagtacccaaattctgggccgcagttgcttggtggaattttagcagatgagatgggtcttggaaagacagtggaggttttggctctgattctgacacatactcgacaagatgtcaagcaagatgctctcactcttcccgagggaaaagtggtgaattattttattccgtcacattattttggaggaaaactgaaaaagacagaaatccagaatatcgaatttgaaccaaaagaaaaagttcaatgccctcctacacgtgtgatgatactgacagctgtgaaagaaatgaatggaaaaaaaggagtgtccatcctttccatctataagtatgtcagttctatatatagatacgatgttcaacggaacaggagtcttttgaaacggatgctgaaatgtttaatttttgaaggtctcgtgaaacagatcaaaggccatggtttttctgggacttttacattgggaaagaattacaaggaagaggatatatgtgataaaacaaaaaagcaggcagtagggagtccaaggaaaattcagaaagaaactagaaaatcagggaacaaggacacagattctgaatacttgccatcagacacctctgatgatgatgatgatccttactattattattataagtccaggagaaatcgcagtaaattgaggaaaaagcttgttccatccacaaaaaaaggaaaaagtcaaccatttatcaatcccgattcacaaggtcactgtccagctactagcgactctggaataactgatgttgctatgtctaaaagtacatgtatctctgaattcaaccaagaacatgaaacagaggactgtgctgaatctctaaatcatgctgatagtgatgtaccaccttctaataccatgagtccctttaacacctctgattaccgctttgagtgtatatgtggtgaacttgatcagatagatcgtaagcctcgtgttcaatgcctgaagtgtcacctgtggcaacatgcaaagtgtgtgaattatgatgagaaaaatctgaagatcaagcctttttactgcccccactgccttgttgcaatggaaccagtgtcaacaagagcaactctgatcatctctccaagttccatctgtcaccagtgggtggatgagatcaacaggcatgtgaggtcgtcatctcttcgagtcttggtatatcaaggagtgaagaaagatggctttttacaacctcattttttggcagaacaggatatagttatcattacctatgatgtactgcgttcagaattaaattatgtcgatatcccacatagcaatagtgaggatgggcgtcgcctacggaaccagaagcgctatatggctatcccgagccccctggtagctgtggagtggtggaggatctgccttgatgaagctcagatggttgagtgtcccacagtaaaagctgcagaaatggcccagcgtttgagtgggattaatcgatggtgtatcagtggcactccagtacagagaggattagaggatctttttgggttagtggtctttcttggtattgaaccttactgtgtcaaacactggtgggttcgacttctctatcggccttactgcaagaagaatcctcagcatctctacagctttattgccaagatactgtggaggtctgcaaagaaagatgtgattgaccaaatccaaataccaccacaaaccgaagaaatacactggctccacttttctccagtggaaaggcatttctatcaccgtcagcatgaggtgtgctgccaggatgtggtggtaaaactcaggaagatttctgactgggctctgaagctcagcagcctagacagaaggactgtcacctctatcctgtatccattgctgaggctcagacaggcctgctgtcacccacaggctgttcgtggagagttcttgccactccaaaaaagttttgaacagtctaccttttcttttagcaccatgacaatggaagagctgctgacatctttgcagaagaaatgtggaactgaatgtgaagaagcacatcgacagctagtttgtgctctcaatggcttagcaggcattcatattattaaaggtgagtatgccttggcagcagaattgtacagagaagtgttgcgctcctcggaggaacacaaaggaaaactcaaaactgattcacttcaaagacttcatgctacccataacttgatggaattgttgatagccaggcacccagggataccacctaccttgcgtgatggccgacttgaggaagaggccaaacagctgcgagagcactacatgagcaagtgtaatacagaagttgctgaagcccagcaagctttatatcctgtgcagcagaccatccatgagcttcaaagaaagattcattctaattctccttggtggctaaatgtgatccacagagcaatagaatttactattgatgaggagctagttcagcgagtgcgaaatgaaataaccagcaactacaagcaacaaactggcaagctttctatgtcagagaaaggtcttcagttcttacttacaacacaaatggaagagctaaataaatgccagaagctagtaagagaggctgtaaaaaacctggagggacctccatctcgtaatgttattgagtctgcaacagtctgtcacctccgaccagccagacttcctctcaactgctgtgtcttttgtaaagctgatgaattgttcacagagtatgaatcaaagctattttccaacacagtcaaaggccagactgcaatatttgaggagatgatagaagatgaagaaggactggtggatgatcgagcacctaccaccacccggggtctctgggcaataagtgagacagagcgatctatgaaagcaatactatcatttgcaaaatcacataggtttgatgttgaatttgttgatgaaggaagcacttcaatggatctctttgaagcatggaagaaggaatataagttgcttcatgaatattggatggctctgaggaatcgtgtgtctgctgttgatgaacttgcaatggctacagaacgactaagagtgcgtgatcctagggagccaaagcctaatccgcctgttcttcatatcattgaaccacatgaggtagaacaaaaccgaataaaactactaaatgataaagctgttgctacatcacagcttcagaaaaaacttgggcagcttctttacctaactaatttggagaagtctcaagataaaacatcgggaggtgttaatccagaaccttgcccaatctgtgctcgacagctaggaaaacagtgggcggtactgacctgtggtcactgtttctgtaatgaatgcatttctataattattgaacaatacagcgtgggatctcacagaagctccattaagtgtgcaatctgccgccagaccacatctcacaaagaaatctcgtatgtctttacctcagagaaagcaaaccaggaggaggacatccctgtgaagggcagccattctacaaaagtggaagctgtggtcagaactctgatgaaaatacagcttagagatccaggggccaaagcactcgttttctcaacgtggcaagatgtattagatattatttcaaaagctcttactgacaacaacatggaatttgcacaaatcagtcgtgttaagacatttcaggagaacctttcagcatttaaacgtgatccccaaatcaatattttgctgctgcccctgcacacaggttctaatggattaactatcattgaagcaactcatgttctcttggtggagcccatattgaaccctgcccatgagcttcaggccatagggagggtgcaccgaattggacagacaaaacctactattgtacacagattcttaattaaagcaacaatagaagaaagaatgcaggcaatgctgaaaactgctgagagaagtcacacgaactcatcagcaaagcattcagaggcctctgtcttgactgtggctgacctggcagacctatttaccaaagaaactgaagagcttgaatgaactacacttgattcattccatggactttagtgtattaataaactttcatagctgtagagcaaagttacaagttttaaaaacccagtagataacagtaacactgttcctagttgaatgaatttgtttattgttctggttatacagtggcttagtacttattgagtccttttcaatatactgtttccaaaagatctataaagattcttaattttacactcctaataaaacatttattttttgtcccaaatagtatctatatctgatgatgcaagggaattaagagaggtaatgtgtacttttcttatgataagatcactcataaaacagttggaataagaaagtaaactagtctagttttatatgacctggtatattgaacaaacatagatctcagttttggaagggccttcagtatctttagcacatgattcaccaatatcttgttagtaatattttaagtagatggtgaattatattaacccattttttgagtaggcttataccataactttacacctagtaattttgcagtaatacaactccttacaataagttaatgttagacagttatttgtttcttctgcatcttgctactgaaaacaaaaacaatgaaaatattcatatttctattatgtgtaaagtggtgttagtgtaaacagttaactccaaatagattttttaatgtattaatgattaccttaaaattatctgctttccctactcttaatttttcttattgttaaagtttttatatgttgtaagattgatgtatctgtaaatattgcagtttttatgattttgttttattataacatggaaatatggcagggttttttttttaatcattattatactgatgtcttggattctttttctttcccatgttcttgtgtaactagactttttagccagtgatatctgaattcatggtagagttgttatttcactccagttgttcctcccttaagcacgagtctttgaccttttgaacaagagaatgccatgttcacataagcaaatcgttgcaagtgataataacgaagtgtttcttcttctgtgaggaattaatggactttgaaattgctgaataaggagtagcttgttacatcctagccatttgatgtaatacaaatgttcttatttggcttccttttctttgagccttcagagttttaaaggaccctctttgaccctcaggacttattagctcccagttagctgcctggaaaactcatagaaccattccctagatcccatttgtccgagaggctttggtgcttagttaaggtgcattttcttactctaggtttatagagtgatgtaattcaactgaagaaaacacacacatgcttttggtgcttattcttcagttaaaaggaggtatccattgattcttttatatgaaattaaatcaaactgttatttttatagctcttcacatattaaaaagagctttcatgtacatttacgtgtttaatttacccaacaatcttgtgaagttgatataattaatatctttactgttttaaaggtagagaactgaagttcagatatattgaaactttcttaggacatgtagcaagtaaacagtggagcccaggtcccctgactccatatcttacattcttttactaataacatgtcatgctgagattcagaaggcccatgcttataatttaaaaatgagactatttcagtatttctttgtgtttgttttctactattcctttctgagctatgttttagagaaaacaatttgatatgcttcaattttgtaaaatcaaattacatatatataaaaaaacctatctgtattagacaaaaactgtttttatttatttctgtaagatatccattaaataaatattttagtggaaatg

SEQ ID NO: 34002 - DNA, 7201 bp, Artificial Sequence
  derived and/or modified sequence
gtgctctgacgagcgcgttcgccttgaccccacgctacagcgcgcgcccggcagctaggcgctgtggtttctgggtctcccgggggacccctacacgttccggcaaaaagcgctcgtgcccacctcaagcccatgttcggtgggtggcgaatgcgtgcccgtgatctgctgggtctgtagaggagcgcaggcctggtgcaaacagactcaagaggctcggagaaccagcttggagttcacagttaccagccaagaaaacttgaaaatgagcagccgacggaaacgtgctcctccagtgagggtagatgaggaaaagaggcagcagcttcattggaatatgcatgaggacagaaggaatgaacctatcatcataagtgatgatgacgagcagccctgcccaggttcagatacctcttctgctcattatatcattctaagtgatagtctaaaggaagaagtggctcacagagataagaagaggtgttcaaaagtggtgagcttctcaaaaccaattgaaaaagaagagactgttggtattttttcccctttgtctgtaaagttaaatattgtgatttctccctatcattttgataattcctggaaagcatttctaggagaattaactcttcagcttcttcctgcacagagtttaattgaaaatttttccgaaaggagtattacattgatgagttcagagtcaagcaatcagttcctgatttatgttcattcaaaaggtgaagatgtagagaaacaaaaaaaagaaccgatgagtatttgtgacaagggtattctggtggagtcatccttcagtggtgaaatgttagaagatttggggtggctacaaaagaagagaagaataaaactctatcagaaaccagaaggaaatcacattatcaaggttggaatttatcttttggaagctggcctagcaaaactagacttcttgagtgatgcaaattcaagaatgaaaaagttcaatcagctcatgaagaaagtaatggaaaagttacacaattctattattccagatgtgttggaagaggatgaagatgatccggagagtgagccagagggacaagacattgacgagctgtatcactttgtgaaacaaacacatcagcaagaaacgcagtccatccaagtggatgtccagcatcctgcattgatccctgtgttgagaccctaccaaagagaggctgtcaattggatgctacaacaagagtgtttcagaagcagtcctgctactgaaagtgccctgcacttcttatggcgagagattgttacatctgagggtctgaaactctactataatccatatacaggctgcatcattcgtgagtacccaaattctgggccgcagttgcttggtggaattttagcagatgagatgggtcttggaaagacagtggaggttttggctctgattctgacacatactcgacaagatgtcaagcaagatgctctcactcttcccgagggaaaagtggtgaattattttattccgtcacattattttggaggaaaactgaaaaagacagaaatccagaatatcgaatttgaaccaaaagaaaaagttcaatgccctcctacacgtgtgatgatactgacagctgtgaaagaaatgaatggaaaaaaaggagtgtccatcctttccatctataagtatgtcagttctatatatagatacgatgttcaacggaacaggagtcttttgaaacggatgctgaaatgtttaatttttgaaggtctcgtgaaacagatcaaaggccatggtttttctgggacttttacattgggaaagaattacaaggaagaggatatatgtgataaaacaaaaaagcaggcagtagggagtccaaggaaaattcagaaagaaactagaaaatcagggaacaaggacacagattctgaatacttgccatcagacacctctgatgatgatgatgatccttactattattattataagtccaggagaaatcgcagtaaattgaggaaaaagcttgttccatccacaaaaaaaggaaaaagtcaaccatttatcaatcccgattcacaaggtcactgtccagctactagcgactctggaataactgatgttgctatgtctaaaagtacatgtatctctgaattcaaccaagaacatgaaacagaggactgtgctgaatctctaaatcatgctgatagtgatgtaccaccttctaataccatgagtccctttaacacctctgattaccgctttgagtgtatatgtggtgaacttgatcagatagatcgtaagcctcgtgttcaatgcctgaagtgtcacctgtggcaacatgcaaagtgtgtgaattatgatgagaaaaatctgaagatcaagcctttttactgcccccactgccttgttgcaatggaaccagtgtcaacaagagcaactctgatcatctctccaagttccatctgtcaccagtgggtggatgagatcaacaggcatgtgaggtcgtcatctcttcgagtcttggtatatcaaggagtgaagaaagatggctttttacaacctcattttttggcagaacaggatatagttatcattacctatgatgtactgcgttcagaattaaattatgtcgatatcccacatagcaatagtgaggatgggcgtcgcctacggaaccagaagcgctatatggctatcccgagccccctggtagctgtggagtggtggaggatctgccttgatgaagctcagatggttgagtgtcccacagtaaaagctgcagaaatggcccagcgtttgagtgggattaatcgatggtgtatcagtggcactccagtacagagaggattagaggatctttttgggttagtggtctttcttggtattgaaccttactgtgtcaaacactggtgggttcgacttctctatcggccttactgcaagaagaatcctcagcatctctacagctttattgccaagatactgtggaggtctgcaaagaaagatgtgattgaccaaatccaaataccaccacaaaccgaagaaatacactggctccacttttctccagtggaaaggcatttctatcaccgtcagcatgaggtgtgctgccaggatgtggtggtaaaactcaggaagatttctgactgggctctgaagctcagcagcctagacagaaggactgtcacctctatcctgtatccattgctgaggctcagacaggcctgctgtcacccacaggctgttcgtggagagttcttgccactccaaaaaagcaccatgacaatggaagagctgctgacatctttgcagaagaaatgtggaactgaatgtgaagaagcacatcgacagctagtttgtgctctcaatggcttagcaggcattcatattattaaaggtgagtatgccttggcagcagaattgtacagagaagtgttgcgctcctcggaggaacacaaaggaaaactcaaaactgattcacttcaaagacttcatgctacccataacttgatggaattgttgatagccaggcacccagggataccacctaccttgcgtgatggccgacttgaggaagaggccaaacagctgcgagagcactacatgagcaagtgtaatacagaagttgctgaagcccagcaagctttatatcctgtgcagcagaccatccatgagcttcaaagaaagattcattctaattctccttggtggctaaatgtgatccacagagcaatagaatttactattgatgaggagctagttcagcgagtgcgaaatgaaataaccagcaactacaagcaacaaactggcaagctttctatgtcagagaagttccgtgattgcagaggtcttcagttcttacttacaacacaaatggaagagctaaataaatgccagaagctagtaagagaggctgtaaaaaacctggagggacctccatctcgtaatgttattgagtctgcaacagtctgtcacctccgaccagccagacttcctctcaactgctgtgtcttttgtaaagctgatgaattgttcacagagtatgaatcaaagctattttccaacacagtcaaaggccagactgcaatatttgaggagatgatagaagatgaagaaggactggtggatgatcgagcacctaccaccacccggggtctctgggcaataagtgagacagagcgatctatgaaagcaatactatcatttgcaaaatcacataggtttgatgttgaatttgttgatgaaggaagcacttcaatggatctctttgaagcatggaagaaggaatataagttgcttcatgaatattggatggctctgaggaatcgtgtgtctgctgttgatgaacttgcaatggctacagaacgactaagagtgcgtgatcctagggagccaaagcctaatccgcctgttcttcatatcattgaaccacatgaggtagaacaaaaccgaataaaactactaaatgataaagctgttgctacatcacagcttcagaaaaaacttgggcagcttctttacctaactaatttggagaagtctcaagataaaacatcgggaggtgttaatccagaaccttgcccaatctgtgctcgacagctaggaaaacagtgggcggtactgacctgtggtcactgtttctgtaatgaatgcatttctataattattgaacaatacagcgtgggatctcacagaagctccattaagtgtgcaatctgccgccagaccacatctcacaaagaaatctcgtatgtctttacctcagagaaagcaaaccaggaggaggacatccctgtgaagggcagccattctacaaaagtggaagctgtggtcagaactctgatgaaaatacagcttagagatccaggggccaaagcactcgttttctcaacgtggcaagatgtattagatattatttcaaaagctcttactgacaacaacatggaatttgcacaaatcagtcgtgttaagacatttcaggagaacctttcagcatttaaacgtgatccccaaatcaatattttgctgctgcccctgcacacaggttctaatggattaactatcattgaagcaactcatgttctcttggtggagcccatattgaaccctgcccatgagcttcaggccatagggagggtgcaccgaattggacagacaaaacctactattgtacacagattcttaattaaagcaacaatagaagaaagaatgcaggcaatgctgaaaactgctgagagaagtcacacgaactcatcagcaaagcattcagaggcctctgtcttgactgtggctgacctggcagacctatttaccaaagaaactgaagagcttgaatgaactacacttgattcattccatggactttagtgtattaataaactttcatagctgtagagcaaagttacaagttttaaaaacccagtagataacagtaacactgttcctagttgaatgaatttgtttattgttctggttatacagtggcttagtacttattgagtccttttcaatatactgtttccaaaagatctataaagattcttaattttacactcctaataaaacatttattttttgtcccaaatagtatctatatctgatgatgcaagggaattaagagaggtaatgtgtacttttcttatgataagatcactcataaaacagttggaataagaaagtaaactagtctagttttatatgacctggtatattgaacaaacatagatctcagttttggaagggccttcagtatctttagcacatgattcaccaatatcttgttagtaatattttaagtagatggtgaattatattaacccattttttgagtaggcttataccataactttacacctagtaattttgcagtaatacaactccttacaataagttaatgttagacagttatttgtttcttctgcatcttgctactgaaaacaaaaacaatgaaaatattcatatttctattatgtgtaaagtggtgttagtgtaaacagttaactccaaatagattttttaatgtattaatgattaccttaaaattatctgctttccctactcttaatttttcttattgttaaagtttttatatgttgtaagattgatgtatctgtaaatattgcagtttttatgattttgttttattataacatggaaatatggcagggttttttttttaatcattattatactgatgtcttggattctttttctttcccatgttcttgtgtaactagactttttagccagtgatatctgaattcatggtagagttgttatttcactccagttgttcctcccttaagcacgagtctttgaccttttgaacaagagaatgccatgttcacataagcaaatcgttgcaagtgataataacgaagtgtttcttcttctgtgaggaattaatggactttgaaattgctgaataaggagtagcttgttacatcctagccatttgatgtaatacaaatgttcttatttggcttccttttctttgagccttcagagttttaaaggaccctctttgaccctcaggacttattagctcccagttagctgcctggaaaactcatagaaccattccctagatcccatttgtccgagaggctttggtgcttagttaaggtgcattttcttactctaggtttatagagtgatgtaattcaactgaagaaaacacacacatgcttttggtgcttattcttcagttaaaaggaggtatccattgattcttttatatgaaattaaatcaaactgttatttttatagctcttcacatattaaaaagagctttcatgtacatttacgtgtttaatttacccaacaatcttgtgaagttgatataattaatatctttactgttttaaaggtagagaactgaagttcagatatattgaaactttcttaggacatgtagcaagtaaacagtggagcccaggtcccctgactccatatcttacattcttttactaataacatgtcatgctgagattcagaaggcccatgcttataatttaaaaatgagactatttcagtatttctttgtgtttgttttctactattcctttctgagctatgttttagagaaaacaatttgatatgcttcaattttgtaaaatcaaattacatatatataaaaaaacctatctgtattagacaaaaactgtttttatttatttctgtaagatatccattaaataaatattttagtggaaatgaaaa

SEQ ID NO: 34003 - DNA, 5052 bp, Artificial Sequence
  derived and/or modified sequence
atgagctccaggcgcaagcgggcacctcctgttcgagtggacgaggaaaagagacagcagcttcactggaatatgcatgaggaccggagaaacgagccaatcatcatttccgacgatgatgaacagccttgcccgggaagcgacactagtagcgcacactacatcattctatctgattctctcaaggaggaagtcgctcacagagacaaaaagaggtgcagcaaagtggtgagcttttcaaagcccattgaaaaggaggagaccgtgggtatcttcagtcccctgtcagtgaagctgaacatagtgatcagcccctatcactttgataattcttggaaggcattcctgggggagctcacgctccaactgctccctgcccaatctctgatcgaaaatttttcagagcgctccatcaccctgatgagctctgagtccagcaatcagtttctgatctacgttcactcaaagggcgaagatgtcgaaaaacaaaaaaaagagcccatgtctatctgtgacaaaggaattcttgtcgaatctagctttagcggcgagatgctggaagatctaggatggctgcagaagaagcgtcgcatcaaactgtaccagaaacccgaagggaatcacatcattaaagtcggtatttacctcttggaggccggactagccaaacttgatttcttatctgatgcaaattctcgtatgaaaaagttcaaccagctgatgaagaaggtgatggaaaaactgcacaatagtattataccggacgtgttggaagaagacgaagatgatcctgaatctgaaccggaagggcaagatattgacgaattgtatcacttcgttaaacagacccatcaacaggagacgcagtcgattcaggtagacgtgcagcaccccgctctgattcccgtactacgcccttaccagagggaagctgtcaactggatgctgcaacaggagtgctttcgctctagccccgcaaccgagagcgcgctgcactttctctggcgtgagatagttacaagcgaggggcttaagctctattacaacccatacaccgggtgcattatcagagaatatcccaacagcggaccccaacttctgggtggcatcttagctgatgagatgggccttggcaaaacagtggaggttttggcccttatcctcactcacaccaggcaggatgtgaagcaagatgcactgacattgcccgagggaaaagtggtgaattactttattccctctcactactttggcggtaaactgaagaagacggagattcaaaatattgaatttgagcctaaagagaaggtacaatgccctccaacacgtgtgatgattttgacagctgtgaaggaaatgaacgggaagaaaggtgtctctattctcagcatatacaagtacgtgtcatctatctatcgatacgacgtgcagaggaacagatccctgctgaagagaatgcttaaatgcttgatttttgagggcttggtgaagcagatcaagggacacggcttctcaggcacatttaccctgggcaaaaattacaaagaagaagacatttgtgacaaaaccaaaaaacaggccgtcgggtccccaagaaagatccagaaggaaacacgtaagtccggaaacaaagacactgatagtgagtacctgcctagcgatacatccgacgacgacgacgacccatactactattactataagtctagaagaaatcgctctaagctaagaaagaagctcgtgccttccaccaagaagggaaaatcacagccgttcatcaatcccgattcccagggccactgccccgctacaagcgatagtgggattaccgatgtagctatgagtaaatccacttgcatcagcgagttcaaccaggagcacgagactgaagattgcgcggaatctttgaatcacgcggactctgacgtgcccccatccaataccatgagcccatttaacacaagtgattataggtttgagtgtatctgcggcgagctcgatcagattgatcgcaaacccagggtccagtgtctgaagtgccacctatggcagcatgctaaatgcgtgaactacgacgagaaaaaccttaagattaagcccttttattgtccacattgcctcgtagccatggagccagtctcaacgcgagcaacccttatcatttcaccctcaagcatttgccaccagtgggtggatgagattaatcggcacgtccggagtagctcactgcgagtgctggtataccagggagttaagaaagacggcttcctccagccacactttctggccgagcaggatatcgtcatcatcacttacgatgtacttcgatccgaattaaactacgtggatattccgcactccaactcagaggacggtagacggcttaggaaccagaagagatatatggctattccctcccctctggttgcggtggaatggtggagaatttgcttagatgaagcacagatggtcgaatgccctaccgtgaaagccgcagaaatggctcaaagacttagtggtatcaacagatggtgcatcagcgggactcccgtgcagcggggtctcgaggacttattcggcctggtggtgtttcttggaattgagccctattgcgtgaagcattggtgggtgcgcctcctgtatagaccttactgtaagaaaaacccacaacacctgtactctttcatcgcgaaaatcctctggcgtagcgccaagaaggacgtgatcgaccagatccaaataccgcctcagaccgaggagatacactggttacacttctctccagttgaacggcatttctaccaccgccagcatgaggtgtgttgccaggatgtggtcgtgaagctcagaaagatatctgattgggccctcaagctctcttccttggaccgcaggactgtgactagcatcttgtaccccctcttgcgactgcgccaggcctgttgccacccccaggctgtccgtggcgagtttctcccactgcagaagtctaccatgaccatggaggagctgctgacttccctgcagaaaaaatgcggtaccgagtgtgaagaggcccatcgtcaactagtgtgcgcgcttaatggactggccggaatccatatcattaagggcgagtatgcccttgccgctgaactctatagagaggtgttgcggtcctcagaagaacataagggcaagcttaagacggatagtttgcaaagactccatgccacacacaatttgatggaacttcttattgcacggcatcccggaattccacctaccttgagggatgggcgtctcgaagaggaggccaagcagctcagggagcactatatgtcgaagtgtaatacggaagtcgccgaggcccagcaggccctataccccgtccagcagaccatccacgagttgcaacgcaaaattcacagtaattccccatggtggctcaatgtgattcatagggctatcgagtttacaattgacgaagaactggtgcaaagagtccggaacgaaatcaccagtaactataagcagcagacaggtaagctgtccatgtccgagaagtttagggattgtcgaggcttacagtttctcttgactacccagatggaagaactcaataagtgtcagaagctggttagggaggcagtcaaaaatttagaaggacctccatccaggaatgtgatcgagtccgccactgtgtgccacttgcgacctgctaggctcccactgaactgttgcgtcttttgtaaggccgacgagctgtttactgagtatgaaagtaagctgtttagcaatacagtgaaagggcagacagctatctttgaagaaatgattgaggatgaagagggcctggtcgatgacagagctcctacgactaccagaggactgtgggccatctccgaaacagagcgctcaatgaaggccatcttatccttcgccaaatcacatagatttgacgtggaattcgttgacgaagggagcacctccatggacctttttgaggcctggaagaaggagtataagttacttcacgagtattggatggcactgcgtaaccgcgtgagcgccgtggatgaacttgcaatggccacagagagactccgggtacgagatcctagggagccaaagcctaatccaccagtgttgcacatcatcgaacctcacgaggtcgagcagaaccgtatcaaacttctcaacgataaagccgtagcgacctctcaactgcagaagaagctgggacagctgctctacctgaccaacctggagaaatctcaggataagaccagcggtggggtgaatcccgagccctgccctatttgcgcccgacagttaggaaagcagtgggcagtgctgacatgcggccattgcttctgtaatgagtgtatctcaattattattgaacaatacagtgtgggatcccacaggagttccattaaatgcgccatttgtcggcagacaacatcccataaggagattagctatgttttcaccagcgagaaggccaatcaggaggaagacatcccagtgaaggggagtcacagcacgaaggttgaagccgtggtgcgcactctgatgaaaatccagctgcgggatcccggagccaaagcactagtcttttctacctggcaggacgtcttggacattatctctaaagctctgactgacaacaacatggagttcgcacagatatcaagggtgaagaccttccaggaaaatctcagtgcattcaagagggatccccagattaacatcctccttttgccactccacactggctccaacggtctaactatcatcgaagcaacacatgtactgcttgtggagcctatcctgaatcccgctcatgagctccaagccatcggccgtgtccatagaattggtcaaacgaaaccaaccatcgtacacagattcttaatcaaagcaacaattgaagaacgcatgcaagcaatgttaaaaaccgccgagcgttcacacaccaacagtagcgcaaagcactctgaggcctccgtgcttactgtggccgaccttgccgacctgtttactaaggagactgaagagctcgagtag

SEQ ID NO: 34004 - DNA, 5063 bp, Artificial Sequence
  derived and/or modified sequence
atgagtagcaggaggaagcgggctccacctgtccgcgtcgacgaagaaaagcggcagcagctgcactggaatatgcatgaggatcggaggaacgagccaattattattagcgacgatgacgaacagccctgtccaggcagtgacacctcttcagcccactatattatcctgtctgattcgctgaaagaggaggttgcccatagagataagaaaagatgttctaaggtggtttctttcagcaagcccatcgaaaaagaggagacagttggaatctttagcccattaagcgttaaacttaacatcgtgatctccccctaccattttgacaactcctggaaggcttttctcggtgagcttacacttcagctgctgcctgcgcagtcactgatagaaaacttttccgagcggagcataacacttatgtctagcgagtcctccaatcagttcctgatttatgtccattctaaaggggaggatgtagagaagcagaagaaagaaccaatgtccatatgtgataaagggattctggtggaatccagcttcagcggcgagatgcttgaggatctcggttggttacagaaaaagagacggattaaactataccaaaaacccgagggaaatcacattattaaggttggaatttacctgcttgaagcaggattggccaaactggactttctgtccgatgccaacagccgcatgaaaaagttcaatcagctgatgaaaaaggtcatggaaaaattacacaattctataattccggacgtgttagaggaggatgaggatgacccagagagtgagcctgagggtcaggatattgatgagctgtatcacttcgtgaaacagacccatcagcaggaaacccagagcattcaggtcgatgttcagcaccccgcattaatacctgtactgagaccatatcagagggaggctgttaactggatgcttcaacaggaatgctttagatcctccccagcgaccgagtctgcattgcattttctttggcgagagattgtaacttccgagggcctgaagctttactataatccttatacgggttgtatcatccgggagtacccgaattccggccctcagctgctgggcggaatcctggcggacgagatgggccttggaaagacagtggaggtgctcgccctcattctaacacatactcggcaggatgtgaagcaggacgctctgaccctgcctgaaggtaaagtggtgaactattttataccctcacactactttggcggaaaactcaaaaagactgaaatacagaacattgagtttgaaccaaaagaaaaggtccagtgcccacccacccgagtcatgatacttacagcagtaaaagaaatgaacggaaagaagggcgttagcattctgagtatttataagtacgttagctctatctatcggtacgacgtccagcgaaatagatctcttctcaaaaggatgctcaagtgtcttatcttcgaagggctcgtgaagcagattaaggggcatggattctccggaacatttacactcggcaaaaactacaaggaggaggatatttgtgataaaacgaagaaacaggccgtgggtagcccccgaaagattcagaaggagaccaggaaaagcgggaacaaagacactgattctgagtatttaccttctgacaccagtgacgacgatgatgatccgtactactactactacaaaagcagacgtaacagatctaagttgcggaaaaaacttgtgcctagcactaagaaaggcaaatctcagccctttatcaaccctgatagtcaggggcattgtcccgcaacctctgattccggcattaccgacgtagcgatgagtaagagcacatgtatatccgagttcaatcaggaacacgaaaccgaggattgcgccgaatccttgaatcacgccgactcagacgtgccccctagcaatacaatgagcccctttaacaccagcgactataggttcgaatgcatatgcggcgagctggaccagatcgataggaagccaagggttcaatgcctgaaatgtcacctttggcagcacgcaaagtgcgtgaattacgacgaaaaaaatttgaagataaagcctttctattgcccacactgcctggtggcaatggagcccgtgtcaacgagagcgactctcattatctctccttcttctatctgccaccaatgggtcgatgaaattaacagacacgtaaggagtagcagccttcgcgttctggtctatcagggcgtcaagaaggacggattcctgcagccacacttcctggcagagcaggatattgttattatcacctacgacgtgctccgctcagagctaaattacgtggacattccacatagtaactccgaagacggcagacggttacggaaccaaaaacgatatatggccataccttctccactcgttgctgtggagtggtggcgaatttgcctggacgaggcccaaatggtggaatgccccaccgtgaaagctgccgagatggcccaaagattgtctggcatcaaccgatggtgtatcagcggtactcctgtgcagcggggactggaggatctgttcggcctggttgtgttcctgggcattgaaccttactgcgtgaagcactggtgggtgcgactcctgtatcgaccatattgcaaaaagaaccctcaacacctttattccttcattgctaaaatcctttggagatcggccaaaaaagatgtaatagaccagatacagataccaccacagacagaggagatacactggctgcacttttcacctgtggaaaggcacttctatcacaggcaacatgaggtctgctgtcaggacgtcgttgtgaagctgcgaaagatctcagattgggctctcaagctgtctagcttagaccgtagaaccgttacaagcatcctctatcccctgctcaggctcaggcaagcctgctgccatccacaggccgtcaggggtgaatttctccctctccagaagtccttcgagcagagtaccttttctttcagcacaatgactatggaggagcttctgaccagcctgcagaagaaatgtggcacggagtgcgaagaagctcacaggcaactagtttgtgcactgaacggcctcgccggtattcacataattaagggcgaatacgctctggcagctgagctgtacagggaggtgctgaggagctcagaggaacataaaggaaagcttaaaaccgacagtctgcagcgtctccatgccacgcataacttgatggaattgctgatcgcaagacacccaggtattccaccgactctccgggatgggaggctggaagaggaagccaaacagctgcgcgaacactacatgagtaagtgtaacacagaggtagccgaggcacagcaagctttatacccagtgcagcagaccatccacgagctccagcgtaaaatacattccaactctccttggtggcttaatgtgatacatcgtgccattgaattcaccattgacgaggaactcgtacaaagagtgaggaatgagattacctcaaattacaagcagcagactggaaaattaagcatgagcgagaaggggttgcagtttctgctaactacccagatggaagagctcaacaagtgccagaagctagtgcgggaggctgtcaaaaacctagaggggccaccctccagaaacgtgatcgagtcagcaactgtgtgccatctgagaccggcaaggctaccattgaactgctgtgtcttttgcaaagccgatgagctctttacagagtacgaatccaagctattttccaatacagtcaaagggcaaactgcaattttcgaagagatgattgaagacgaggaggggctggtcgatgatcgggcaccaaccactacccgcggattatgggctatctccgagactgaacgctcaatgaaggccattttgagcttcgccaagagccatagatttgatgtcgaatttgtcgatgaagggtctaccagcatggacttgtttgaggcctggaagaaggaatataaacttttacacgaatactggatggctctgagaaatcgggtttctgccgtcgatgaactggctatggccaccgagcgcctcagggttcgggaccctcgcgagcccaaacccaaccccccagtgctccacatcattgaaccccatgaggtcgaacagaaccggataaagctgctcaatgataaagcagttgcaacctctcagctgcagaagaagctcggacagttattgtacctgaccaacctggagaagtcccaagacaagacgagcggtggggtgaacccagaaccttgcccaatttgcgcccgtcagctgggaaagcagtgggccgttctgacatgtggccattgcttctgtaacgaatgcatctcaattatcatagaacagtactctgtcggaagccacagatctagcataaaatgcgccatttgcagacagacaacatctcacaaggagatcagctacgtgtttacgagcgagaaggccaatcaagaggaggatattccggtgaaggggagtcattcaaccaaggtcgaggccgtggtccgcacactgatgaagatccagcttcgtgaccctggagcaaaggccctagtgttctccacatggcaggatgtgctcgatataatatctaaagccctcaccgacaataacatggaatttgcccaaatcagccgggtgaagacatttcaagaaaacctgtccgcctttaaacgcgaccctcagattaacatccttctgcttcccttgcacaccggaagcaatggcctcaccatcattgaagccactcatgttctgctggtagagcccatcctcaatcccgcacacgagctgcaggccataggaagagtacaccgcatcgggcagacgaagcctacgatcgtacataggttcctcatcaaagctactatcgaggagaggatgcaggcgatgctgaagactgccgaacggtcacacacgaattcttcagccaagcattccgaggctagtgtccttaccgtggctgacctcgccgatttgtttaccaaggagacagaggaattggagta

SEQ ID NO: 34005 - DNA, 5052 bp, Artificial Sequence
  derived and/or modified sequence
atgagtagccggagaaaaagggctccaccagtccgcgtggacgaggagaagaggcagcagctgcattggaacatgcacgaggacagacggaacgaacctatcattatctcagacgatgacgagcagccttgtcccggtagtgatacaagttcagctcactatataatactgagcgacagtctgaaagaggaagtggcccaccgagacaaaaagcgctgctccaaggttgtctctttctccaagccaattgagaaagaggaaacagtcggaatcttctcacctctctccgtaaagctaaacatagtgattagcccttaccacttcgacaatagctggaaggccttcctgggcgagttaacgcttcagctactgcctgctcagagtctgatcgaaaatttctctgagcggagcatcacgctcatgagctcggagagctctaatcaatttctgatatatgtgcactcaaaaggcgaggacgtggagaaacagaagaaggagcctatgtccatctgcgataaaggaatattagtcgaaagttcgttcagcggggaaatgctggaggatttgggttggcttcagaagaagcgacgaattaagttataccaaaagccagagggaaaccacatcatcaaggtgggtatttacctgttggaggccggactggcaaagctggatttcctgtctgatgccaattcgcggatgaagaagttcaaccagctcatgaaaaaagtgatggaaaagctccacaattctatcatccccgacgtgctcgaagaggatgaagacgatccggagtcagagcctgaaggccaagatattgatgaattgtatcacttcgtgaaacaaacacaccaacaggaaacccagtctatccaggtggacgtccaacaccctgctcttatccccgtgttacggccttaccagagggaggccgttaactggatgctgcagcaggagtgctttcgctcaagtccagcaacagagtccgcgcttcattttctttggagagaaatcgttactagtgagggactgaagctatactacaatccgtacaccggatgtatcatccgggaataccctaattctggacctcagctgttgggcggtatcctggcggacgaaatgggcctgggaaaaacggtggaggtactcgcactcatcctgacacatacccgtcaggatgtgaaacaggacgccctgactctcccagaggggaaagtggtaaactatttcatcccaagtcattattttggaggaaagctcaagaagactgaaatacagaacatcgaatttgaacccaaagaaaaggtccagtgccctccaacccgcgtgatgatcctgacagctgtgaaagaaatgaacggtaagaaaggcgtctcaatccttagtatctataaatatgtcagtagcatctacagatacgacgtgcagagaaaccggtccttgcttaaaaggatgctgaaatgcctgatctttgaaggcctggtcaagcagattaagggacacggttttagtgggacctttactctaggcaaaaattataaggaggaggacatctgcgataaaacaaaaaaacaggccgtgggctccccaagaaaaatacaaaaagaaacaagaaagagtggaaacaaggatacagattcagagtacctacccagcgacacttccgacgatgacgacgacccctactattattattataagtcaagacgaaacaggagtaagctcaggaaaaagcttgtgccctctacaaagaaaggcaagagccagccatttataaatccggactcgcaggggcactgccccgctacttccgatagtggcataaccgatgtggcaatgtcaaaatcaacctgcatcagtgaattcaaccaggaacacgagaccgaagactgtgccgagtccctgaaccatgccgattcagacgtccccccttctaacaccatgtctccttttaacaccagcgattatagattcgaatgtatttgcggagaacttgatcagatagacagaaaacctagggttcagtgtcttaagtgccacctgtggcagcatgccaagtgcgtaaactatgacgagaaaaatcttaagatcaaaccattctattgtccgcattgtctggtggcaatggagcctgtgtcaactagagccacactgattatttcaccgtcaagcatttgccatcagtgggtggacgagatcaacaggcacgtgaggagcagtagtttgcgagtccttgtgtaccagggcgtgaagaaggacggttttctccagcctcactttctggcagaacaagatatcgtgataatcacgtacgacgtcctgcgctcggagctcaactatgtggatatccctcactcaaactcggaggatggtcgtagactgcggaatcaaaaaagatacatggccatcccatctcctctggtcgcggtggagtggtggagaatttgcttggacgaagcccaaatggtcgaatgtcccacagtgaaagcagccgaaatggctcagcgcctcagcggcataaatagatggtgcatttcaggcacgccagtccaacgcggtcttgaggatctctttggccttgtggtcttcttagggatcgaaccatattgcgttaagcattggtgggtgcgactgctataccgaccctactgtaagaagaacccccagcatctctactctttcatcgccaagatcctgtggcgcagcgcaaagaaggacgtgatcgaccagattcagatacccccacagacggaggagatccattggctgcatttttccccagtcgagagacacttttaccacaggcagcatgaggtgtgttgccaggacgtggtagtgaagctcaggaagatttcagactgggccctcaagttgtccagtctggacaggcggacagttacgtccatcctctaccccttgctgcgtctccgccaggcctgttgtcacccccaagctgtgagaggagagtttctacccttgcagaaatcgacgatgactatggaggagttactgacttcgctgcagaaaaaatgtgggaccgaatgtgaggaggcccatagacaactcgtgtgcgccctgaatggcctggcagggatccatatcatcaagggcgaatacgcgctcgcggctgagctttatcgcgaggtgctccgctccagcgaggagcacaagggcaaattgaagacggacagcctgcagcggctgcacgctactcataacctcatggagcttctcatcgcgaggcaccccggtattccccctactcttcgcgatggaaggctggaggaggaagctaaacagctccgagaacactacatgtctaaatgcaacacagaggtcgctgaagcgcagcaggctctttacccagtacagcagactatccacgaactacagaggaagatccacagcaacagcccttggtggctgaacgtgattcaccgagctattgagtttacaatcgacgaggagctggtgcagagggtgaggaacgagatcacatcaaattacaagcagcagactggaaagctcagtatgtccgagaagttccgcgattgcagaggcttgcagttccttctgactacacagatggaagagttgaacaagtgccagaagctcgttcgcgaggctgttaagaacctagagggacccccttctaggaacgtaatcgagtcggctacggtgtgccatctccggcctgcgagactccccctgaactgctgtgtcttttgtaaagcagatgaactgttcacagagtatgaatccaaactgttttcaaataccgtcaaggggcaaaccgctatttttgaagaaatgatcgaagacgaggaggggttggttgatgatagggctcctaccacgaccaggggactgtgggccattagtgagacggaaagaagcatgaaggctatattaagctttgctaagtcacatcggttcgacgttgagtttgtggatgaaggatcaactagcatggacttgttcgaagcttggaagaaggaatacaagctgctgcacgagtactggatggctctgcgtaatcgcgtgtcagcagtggacgaactcgccatggctaccgagagactgagggtgagagacccacgggaacccaaaccaaatccacctgtcctgcacattatcgaacctcacgaggtagagcaaaacagaataaagctgttgaatgacaaggccgtggctacttcgcaattgcagaagaaactgggccagcttctgtatctgaccaacctggaaaaatcgcaagataaaaccagcgggggtgtgaatcctgagccatgtcctatctgcgccagacagttgggtaaacagtgggccgtgcttacctgcggtcactgtttctgtaatgagtgcatcagcataatcatcgaacagtactccgtgggcagccaccgttcgtccattaagtgtgccatttgccgtcagaccacaagtcacaaagagatctcatatgtcttcacttcagaaaaagccaaccaggaggaggacattccagtgaaaggatcccactctacaaaggtagaggcagtggtgaggaccttgatgaagatccagcttagagacccaggcgcaaaggccctggtcttcagcacatggcaggatgtcctcgacataatctctaaggccctgactgacaacaacatggaatttgctcagattagcagagtgaagacattccaggagaatctgagcgcctttaagagggatcctcagatcaacatcctgcttctcccactccatactgggagcaacggccttacaattatcgaggccacacacgtactccttgtcgaaccaatactgaatcctgctcatgagctccaggcaattgggagggtgcaccgtattggtcaaactaaaccaactatcgtgcacagatttctgattaaagccactatcgaggagcggatgcaggcgatgctgaagactgcggaacgatcgcacactaattcctctgccaagcattctgaggcatccgttctgacggttgcagatttggcggatctgtttacgaaagaaaccgaggaactggagtag

SEQ ID NO: 34006 - DNA, 5052 bp, Artificial Sequence
  derived and/or modified sequence
atgagcagcagaagaaagagagccccccccgtgagagtggacgaggagaagagacagcagctgcactggaacatgcacgaggacagaagaaacgagcccatcatcatcagcgacgacgacgagcagccctgccccggcagcgacaccagcagcgcccactacatcatcctgagcgacagcctgaaggaggaggtggcccacagagacaagaagagatgcagcaaggtggtgagcttcagcaagcccatcgagaaggaggagaccgtgggcatcttcagccccctgagcgtgaagctgaacatcgtgatcagcccctaccacttcgacaacagctggaaggccttcctgggcgagctgaccctgcagctgctgcccgcccagagcctgatcgagaacttcagcgagagaagcatcaccctgatgagcagcgagagcagcaaccagttcctgatctacgtgcacagcaagggcgaggacgtggagaagcagaagaaggagcccatgagcatctgcgacaagggcatcctggtggagagcagcttcagcggcgagatgctggaggacctgggctggctgcagaagaagagaagaatcaagctgtaccagaagcccgagggcaaccacatcatcaaggtgggcatctacctgctggaggccggcctggccaagctggacttcctgagcgacgccaacagcagaatgaagaagttcaaccagctgatgaagaaggtgatggagaagctgcacaacagcatcatccccgacgtgctggaggaggacgaggacgaccccgagagcgagcccgagggccaggacatcgacgagctgtaccacttcgtgaagcagacccaccagcaggagacccagagcatccaggtggacgtgcagcaccccgccctgatccccgtgctgagaccctaccagagagaggccgtgaactggatgctgcagcaggagtgcttcagaagcagccccgccaccgagagcgccctgcacttcctgtggagagagatcgtgaccagcgagggcctgaagctgtactacaacccctacaccggctgcatcatcagagagtaccccaacagcggcccccagctgctgggcggcatcctggccgacgagatgggcctgggcaagaccgtggaggtgctggccctgatcctgacccacaccagacaggacgtgaagcaggacgccctgaccctgcccgagggcaaggtggtgaactacttcatccccagccactacttcggcggcaagctgaagaagaccgagatccagaacatcgagttcgagcccaaggagaaggtgcagtgcccccccaccagagtgatgatcctgaccgccgtgaaggagatgaacggcaagaagggcgtgagcatcctgagcatctacaagtacgtgagcagcatctacagatacgacgtgcagagaaacagaagcctgctgaagagaatgctgaagtgcctgatcttcgagggcctggtgaagcagatcaagggccacggcttcagcggcaccttcaccctgggcaagaactacaaggaggaggacatctgcgacaagaccaagaagcaggccgtgggcagccccagaaagatccagaaggagaccagaaagagcggcaacaaggacaccgacagcgagtacctgcccagcgacaccagcgacgacgacgacgacccctactactactactacaagagcagaagaaacagaagcaagctgagaaagaagctggtgcccagcaccaagaagggcaagagccagcccttcatcaaccccgacagccagggccactgccccgccaccagcgacagcggcatcaccgacgtggccatgagcaagagcacctgcatcagcgagttcaaccaggagcacgagaccgaggactgcgccgagagcctgaaccacgccgacagcgacgtgccccccagcaacaccatgagccccttcaacaccagcgactacagattcgagtgcatctgcggcgagctggaccagatcgacagaaagcccagagtgcagtgcctgaagtgccacctgtggcagcacgccaagtgcgtgaactacgacgagaagaacctgaagatcaagcccttctactgcccccactgcctggtggccatggagcccgtgagcaccagagccaccctgatcatcagccccagcagcatctgccaccagtgggtggacgagatcaacagacacgtgagaagcagcagcctgagagtgctggtgtaccagggcgtgaagaaggacggcttcctgcagccccacttcctggccgagcaggacatcgtgatcatcacctacgacgtgctgagaagcgagctgaactacgtggacatcccccacagcaacagcgaggacggcagaagactgagaaaccagaagagatacatggccatccccagccccctggtggccgtggagtggtggagaatctgcctggacgaggcccagatggtggagtgccccaccgtgaaggccgccgagatggcccagagactgagcggcatcaacagatggtgcatcagcggcacccccgtgcagagaggcctggaggacctgttcggcctggtggtgttcctgggcatcgagccctactgcgtgaagcactggtgggtgagactgctgtacagaccctactgcaagaagaacccccagcacctgtacagcttcatcgccaagatcctgtggagaagcgccaagaaggacgtgatcgaccagatccagatccccccccagaccgaggagatccactggctgcacttcagccccgtggagagacacttctaccacagacagcacgaggtgtgctgccaggacgtggtggtgaagctgagaaagatcagcgactgggccctgaagctgagcagcctggacagaagaaccgtgaccagcatcctgtaccccctgctgagactgagacaggcctgctgccacccccaggccgtgagaggcgagttcctgcccctgcagaagagcaccatgaccatggaggagctgctgaccagcctgcagaagaagtgcggcaccgagtgcgaggaggcccacagacagctggtgtgcgccctgaacggcctggccggcatccacatcatcaagggcgagtacgccctggccgccgagctgtacagagaggtgctgagaagcagcgaggagcacaagggcaagctgaagaccgacagcctgcagagactgcacgccacccacaacctgatggagctgctgatcgccagacaccccggcatcccccccaccctgagagacggcagactggaggaggaggccaagcagctgagagagcactacatgagcaagtgcaacaccgaggtggccgaggcccagcaggccctgtaccccgtgcagcagaccatccacgagctgcagagaaagatccacagcaacagcccctggtggctgaacgtgatccacagagccatcgagttcaccatcgacgaggagctggtgcagagagtgagaaacgagatcaccagcaactacaagcagcagaccggcaagctgagcatgagcgagaagttcagagactgcagaggcctgcagttcctgctgaccacccagatggaggagctgaacaagtgccagaagctggtgagagaggccgtgaagaacctggagggcccccccagcagaaacgtgatcgagagcgccaccgtgtgccacctgagacccgccagactgcccctgaactgctgcgtgttctgcaaggccgacgagctgttcaccgagtacgagagcaagctgttcagcaacaccgtgaagggccagaccgccatcttcgaggagatgatcgaggacgaggagggcctggtggacgacagagcccccaccaccaccagaggcctgtgggccatcagcgagaccgagagaagcatgaaggccatcctgagcttcgccaagagccacagattcgacgtggagttcgtggacgagggcagcaccagcatggacctgttcgaggcctggaagaaggagtacaagctgctgcacgagtactggatggccctgagaaacagagtgagcgccgtggacgagctggccatggccaccgagagactgagagtgagagaccccagagagcccaagcccaacccccccgtgctgcacatcatcgagccccacgaggtggagcagaacagaatcaagctgctgaacgacaaggccgtggccaccagccagctgcagaagaagctgggccagctgctgtacctgaccaacctggagaagagccaggacaagaccagcggcggcgtgaaccccgagccctgccccatctgcgccagacagctgggcaagcagtgggccgtgctgacctgcggccactgcttctgcaacgagtgcatcagcatcatcatcgagcagtacagcgtgggcagccacagaagcagcatcaagtgcgccatctgcagacagaccaccagccacaaggagatcagctacgtgttcaccagcgagaaggccaaccaggaggaggacatccccgtgaagggcagccacagcaccaaggtggaggccgtggtgagaaccctgatgaagatccagctgagagaccccggcgccaaggccctggtgttcagcacctggcaggacgtgctggacatcatcagcaaggccctgaccgacaacaacatggagttcgcccagatcagcagagtgaagaccttccaggagaacctgagcgccttcaagagagacccccagatcaacatcctgctgctgcccctgcacaccggcagcaacggcctgaccatcatcgaggccacccacgtgctgctggtggagcccatcctgaaccccgcccacgagctgcaggccatcggcagagtgcacagaatcggccagaccaagcccaccatcgtgcacagattcctgatcaaggccaccatcgaggagagaatgcaggccatgctgaagaccgccgagagaagccacaccaacagcagcgccaagcacagcgaggccagcgtgctgaccgtggccgacctggccgacctgttcaccaaggagaccgaggagctggagtag

SEQ ID NO: 34007 - DNA, 5064 bp, Artificial Sequence
  derived and/or modified sequence
atgagcagcagaagaaagagagccccccccgtgagagtggacgaggagaagagacagcagctgcactggaacatgcacgaggacagaagaaacgagcccatcatcatcagcgacgacgacgagcagccctgccccggcagcgacaccagcagcgcccactacatcatcctgagcgacagcctgaaggaggaggtggcccacagagacaagaagagatgcagcaaggtggtgagcttcagcaagcccatcgagaaggaggagaccgtgggcatcttcagccccctgagcgtgaagctgaacatcgtgatcagcccctaccacttcgacaacagctggaaggccttcctgggcgagctgaccctgcagctgctgcccgcccagagcctgatcgagaacttcagcgagagaagcatcaccctgatgagcagcgagagcagcaaccagttcctgatctacgtgcacagcaagggcgaggacgtggagaagcagaagaaggagcccatgagcatctgcgacaagggcatcctggtggagagcagcttcagcggcgagatgctggaggacctgggctggctgcagaagaagagaagaatcaagctgtaccagaagcccgagggcaaccacatcatcaaggtgggcatctacctgctggaggccggcctggccaagctggacttcctgagcgacgccaacagcagaatgaagaagttcaaccagctgatgaagaaggtgatggagaagctgcacaacagcatcatccccgacgtgctggaggaggacgaggacgaccccgagagcgagcccgagggccaggacatcgacgagctgtaccacttcgtgaagcagacccaccagcaggagacccagagcatccaggtggacgtgcagcaccccgccctgatccccgtgctgagaccctaccagagagaggccgtgaactggatgctgcagcaggagtgcttcagaagcagccccgccaccgagagcgccctgcacttcctgtggagagagatcgtgaccagcgagggcctgaagctgtactacaacccctacaccggctgcatcatcagagagtaccccaacagcggcccccagctgctgggcggcatcctggccgacgagatgggcctgggcaagaccgtggaggtgctggccctgatcctgacccacaccagacaggacgtgaagcaggacgccctgaccctgcccgagggcaaggtggtgaactacttcatccccagccactacttcggcggcaagctgaagaagaccgagatccagaacatcgagttcgagcccaaggagaaggtgcagtgcccccccaccagagtgatgatcctgaccgccgtgaaggagatgaacggcaagaagggcgtgagcatcctgagcatctacaagtacgtgagcagcatctacagatacgacgtgcagagaaacagaagcctgctgaagagaatgctgaagtgcctgatcttcgagggcctggtgaagcagatcaagggccacggcttcagcggcaccttcaccctgggcaagaactacaaggaggaggacatctgcgacaagaccaagaagcaggccgtgggcagccccagaaagatccagaaggagaccagaaagagcggcaacaaggacaccgacagcgagtacctgcccagcgacaccagcgacgacgacgacgacccctactactactactacaagagcagaagaaacagaagcaagctgagaaagaagctggtgcccagcaccaagaagggcaagagccagcccttcatcaaccccgacagccagggccactgccccgccaccagcgacagcggcatcaccgacgtggccatgagcaagagcacctgcatcagcgagttcaaccaggagcacgagaccgaggactgcgccgagagcctgaaccacgccgacagcgacgtgccccccagcaacaccatgagccccttcaacaccagcgactacagattcgagtgcatctgcggcgagctggaccagatcgacagaaagcccagagtgcagtgcctgaagtgccacctgtggcagcacgccaagtgcgtgaactacgacgagaagaacctgaagatcaagcccttctactgcccccactgcctggtggccatggagcccgtgagcaccagagccaccctgatcatcagccccagcagcatctgccaccagtgggtggacgagatcaacagacacgtgagaagcagcagcctgagagtgctggtgtaccagggcgtgaagaaggacggcttcctgcagccccacttcctggccgagcaggacatcgtgatcatcacctacgacgtgctgagaagcgagctgaactacgtggacatcccccacagcaacagcgaggacggcagaagactgagaaaccagaagagatacatggccatccccagccccctggtggccgtggagtggtggagaatctgcctggacgaggcccagatggtggagtgccccaccgtgaaggccgccgagatggcccagagactgagcggcatcaacagatggtgcatcagcggcacccccgtgcagagaggcctggaggacctgttcggcctggtggtgttcctgggcatcgagccctactgcgtgaagcactggtgggtgagactgctgtacagaccctactgcaagaagaacccccagcacctgtacagcttcatcgccaagatcctgtggagaagcgccaagaaggacgtgatcgaccagatccagatccccccccagaccgaggagatccactggctgcacttcagccccgtggagagacacttctaccacagacagcacgaggtgtgctgccaggacgtggtggtgaagctgagaaagatcagcgactgggccctgaagctgagcagcctggacagaagaaccgtgaccagcatcctgtaccccctgctgagactgagacaggcctgctgccacccccaggccgtgagaggcgagttcctgcccctgcagaagagcttcgagcagagcaccttcagcttcagcaccatgaccatggaggagctgctgaccagcctgcagaagaagtgcggcaccgagtgcgaggaggcccacagacagctggtgtgcgccctgaacggcctggccggcatccacatcatcaagggcgagtacgccctggccgccgagctgtacagagaggtgctgagaagcagcgaggagcacaagggcaagctgaagaccgacagcctgcagagactgcacgccacccacaacctgatggagctgctgatcgccagacaccccggcatcccccccaccctgagagacggcagactggaggaggaggccaagcagctgagagagcactacatgagcaagtgcaacaccgaggtggccgaggcccagcaggccctgtaccccgtgcagcagaccatccacgagctgcagagaaagatccacagcaacagcccctggtggctgaacgtgatccacagagccatcgagttcaccatcgacgaggagctggtgcagagagtgagaaacgagatcaccagcaactacaagcagcagaccggcaagctgagcatgagcgagaagggcctgcagttcctgctgaccacccagatggaggagctgaacaagtgccagaagctggtgagagaggccgtgaagaacctggagggcccccccagcagaaacgtgatcgagagcgccaccgtgtgccacctgagacccgccagactgcccctgaactgctgcgtgttctgcaaggccgacgagctgttcaccgagtacgagagcaagctgttcagcaacaccgtgaagggccagaccgccatcttcgaggagatgatcgaggacgaggagggcctggtggacgacagagcccccaccaccaccagaggcctgtgggccatcagcgagaccgagagaagcatgaaggccatcctgagcttcgccaagagccacagattcgacgtggagttcgtggacgagggcagcaccagcatggacctgttcgaggcctggaagaaggagtacaagctgctgcacgagtactggatggccctgagaaacagagtgagcgccgtggacgagctggccatggccaccgagagactgagagtgagagaccccagagagcccaagcccaacccccccgtgctgcacatcatcgagccccacgaggtggagcagaacagaatcaagctgctgaacgacaaggccgtggccaccagccagctgcagaagaagctgggccagctgctgtacctgaccaacctggagaagagccaggacaagaccagcggcggcgtgaaccccgagccctgccccatctgcgccagacagctgggcaagcagtgggccgtgctgacctgcggccactgcttctgcaacgagtgcatcagcatcatcatcgagcagtacagcgtgggcagccacagaagcagcatcaagtgcgccatctgcagacagaccaccagccacaaggagatcagctacgtgttcaccagcgagaaggccaaccaggaggaggacatccccgtgaagggcagccacagcaccaaggtggaggccgtggtgagaaccctgatgaagatccagctgagagaccccggcgccaaggccctggtgttcagcacctggcaggacgtgctggacatcatcagcaaggccctgaccgacaacaacatggagttcgcccagatcagcagagtgaagaccttccaggagaacctgagcgccttcaagagagacccccagatcaacatcctgctgctgcccctgcacaccggcagcaacggcctgaccatcatcgaggccacccacgtgctgctggtggagcccatcctgaaccccgcccacgagctgcaggccatcggcagagtgcacagaatcggccagaccaagcccaccatcgtgcacagattcctgatcaaggccaccatcgaggagagaatgcaggccatgctgaagaccgccgagagaagccacaccaacagcagcgccaagcacagcgaggccagcgtgctgaccgtggccgacctggccgacctgttcaccaaggagaccgaggagctggagtag

SEQ ID NO: 34008 - protein, 352 aa, Artificial Sequence
  derived and/or modified sequence
MFAAATKSFVKQVGDGGRLVPVPSLSEADKYQPLSLVVKKKRCFLFPRYKFTSTPFTLKDILLGDREISAGISSYQLLNYEDESDVSLYGRRGNHIVNDVGINVAGSDSIAVKASFGIVTKHEVEVSTLLKEITTRKINFDHSLIRQSRSSRKAVLCVVMESIRTTRQCSLSVHAGIRGEAMRFHFMDEQNPKGRDKAIVFPAHTTIAFSVFELFIYLDGAFDLCVTSVSKGGFEREETATFALLYRLRNILFERNRRVMDVISRSQLYLDDLFSDYYDKPLSMTDISLKEGTHIRVNLLNHNIPKGPCILCGMGNFKRETVYGCFQCSVDGQKYVRLHAVPCFDIWHKRMK

SEQ ID NO: 34009 - DNA, 1059 bp, Artificial Sequence
  derived and/or modified sequence
atgtttgcagcagccacgaagagcttcgtgaaacaagtgggagacggtgggagactagtcccagttccctctctgagcgaagctgacaaataccaacctctatcactcgtggtgaaaaagaagcgttgctttctgtttcccaggtacaaatttacctcaactccatttacactgaaggacatcctgctgggcgacagagagattagcgccggcatcagtagttatcagttgctgaactacgaggacgaatcagatgtgtcactgtatggacggcgtggtaaccacattgtgaacgacgtcgggattaacgttgctggttcagatagcatcgctgtcaaggcctcctttgggatcgtgaccaagcacgaggtggaagtctcaaccctcctgaaggaaatcaccacccgaaagattaatttcgatcattccttgattagacagtcacgttcaagtcggaaagcagtgttgtgcgtggtaatggagagtattcgtaccacgcgccagtgttcactgagtgtgcacgcaggaatccgcggcgaagcaatgcgctttcattttatggacgagcagaatccaaaaggccgcgacaaggctatcgtgttcccggcccacacaaccatcgcgttctctgtcttcgaacttttcatttatcttgatggagccttcgatttatgcgtcaccagtgtgagcaaaggcggttttgaaagagaggagacagccacattcgccctactgtacaggctccggaacatcctatttgagagaaaccgaagagttatggacgtgatcagtaggagccagttatacctcgatgaccttttcagcgactattacgacaagcctcttagcatgacagatattagcttaaaagaaggcacccacattagggtcaacttgctcaatcacaacatccctaagggtccatgcattctgtgcggtatggggaatttcaaaagagaaactgtgtacggttgctttcagtgctcagtggacggacagaagtacgtacgtttgcatgcggtgccttgttttgacatctggcacaagcgtatgaaatag

SEQ ID NO: 34010 - DNA, 1059 bp, Artificial Sequence
  derived and/or modified sequence
atgttcgccgccgcaaccaagtcctttgtgaagcaggtcggggatggaggaagacttgtccctgttcctagtctctccgaagcagacaagtatcagccactgagtctggtggttaagaagaagagatgcttcctcttcccccggtataagtttacctccacccccttcaccttgaaggacatcctcctgggagatagagaaatctctgcaggtatttcctcttatcagctcctgaactacgaggacgagagcgacgtttcactttatggccgtcggggtaatcatatcgttaatgacgtggggatcaacgttgccggctcggacagcattgcagtcaaggcctcttttggaattgtcaccaagcacgaggttgaggtttccacactcctcaaggagattacaactaggaagattaatttcgaccacagtttaattcgccagtctcgctccagcaggaaggccgttctgtgtgtggtgatggaatctatcaggactactaggcagtgctcactgagcgtgcacgctggaattcgcggggaggccatgagatttcacttcatggatgaacagaaccccaagggcagggataaggcgatcgtgtttcccgcccacactactatcgctttttctgtattcgagctgttcatctatctagacggagccttcgacctttgtgtgacaagtgtatctaaaggaggattcgagagggaggaaaccgctacgttcgctctcctgtatcgcctccgtaacattctgtttgaaagaaatcgtcgtgttatggacgtgatttcccgcagccagctctacctagatgatctattttccgattactatgataagcccctgagcatgaccgacataagtctcaaagaaggtacgcatatcagagttaacctgctgaatcacaacattccaaaggggccatgcatcctgtgtggcatgggaaactttaaaagggagactgtgtatggatgctttcaatgctccgtcgacggccagaaatatgtacggctgcatgctgtgccgtgtttcgacatctggcataaacggatgaaatag

SEQ ID NO: 34011 - DNA, 1059 bp, Artificial Sequence
  derived and/or modified sequence
atgtttgctgctgccaccaagagctttgtgaagcaggtgggagatggcggccgcctggtgcctgtgcccagcctgtctgaggccgacaagtaccagcccctgagcctggtggtgaagaagaagcgctgcttcctgttcccccgctacaagttcaccagcacccccttcaccctgaaggacatcctgctgggggaccgggagatctctgctggcatcagcagctaccagctgctgaactatgaagatgaaagtgatgtgtccctgtatggaagaagaggcaaccacatcgtgaatgatgtgggcatcaacgtggccggcagtgacagcattgctgtgaaggccagctttggcatcgtgaccaagcatgaggtggaggtgtccaccctgctgaaggagatcaccaccaggaagatcaactttgaccacagcctcatccggcagagccgcagcagcaggaaggctgtgctgtgtgtggtgatggagagcatccgcaccacccggcagtgcagcctgtctgtgcatgctggcatccggggggaggccatgaggttccacttcatggatgagcagaaccccaagggccgggacaaggccatcgtgtttcctgcccacaccaccatcgccttctctgtgtttgagctgttcatctacctggatggagcctttgacctgtgtgtgacctctgtgtccaaaggaggctttgagcgggaggagacagccacctttgccctgctgtaccgcctgaggaacatcctgtttgaaagaaacagaagagtgatggatgtgatcagccgcagccagctgtacctggatgacctcttcagtgactactatgacaagcccctgtccatgacagacatcagcctgaaggagggcacccacatccgggtgaacctgctgaaccacaacatccccaagggcccctgcatcctgtgtggcatgggcaacttcaagcgggagaccgtgtatggctgcttccagtgcagcgtggatggccagaagtatgtgcggctgcatgctgtgccctgctttgacatctggcacaagaggatgaagtag

SEQ ID NO: 34012 - DNA, 1059 bp, Artificial Sequence
  derived and/or modified sequence
atgttcgccgccgccaccaagagcttcgtgaagcaggtgggcgacgggggaaggctcgtgccagtgccatctctgtctgaggcagacaagtatcagcccctctccctcgtcgtcaagaaaaagagatgtttcctatttccccgctacaagtttacttccaccccgtttaccctcaaggacatcctgctcggagatcgcgagatcagcgccggaatcagttcataccagctgctgaattacgaggatgagtccgatgtgagtctgtacggaagacggggtaaccacattgtaaatgacgttgggatcaacgtggccgggtcagattctattgcggtgaaggccagcttcggtattgtaaccaagcatgaagtcgaagtcagcactctcctgaaggaaattaccacacgcaagatcaatttcgatcactctttgattagacagtctcggtcatcacggaaagccgtcctgtgtgtcgtaatggagagtatcaggacaacgcgacagtgttcgctgagcgtccacgctggaatccgcggggaggctatgcggttccacttcatggacgaacagaatcctaaggggcgtgacaaggctatcgtgtttcctgctcatacaactattgcgttcagcgtgtttgaattgtttatctatctggatggggcgttcgacttatgcgtgacatcagtgtcaaagggcgggtttgagcgggaagaaacagccaccttcgctctcctctacagattgcggaacatcctattcgagcggaaccgccgagtcatggacgtcatcagtaggtcccaattgtacctagatgatctgtttagtgattattacgataaaccactctctatgacggatatctcactgaaggaaggcacccacattcgggtcaatcttctgaaccacaacatccctaaaggtccgtgcatcctttgtgggatggggaactttaaaagggagaccgtctacggatgcttccagtgctcagtggacgggcagaagtatgtgcgcttacatgctgtcccatgcttcgatatttggcacaagaggatgaaatag

SEQ ID NO: 34013 - DNA, 1059 bp, Artificial Sequence
  derived and/or modified sequence
atgttcgccgccgccaccaagagcttcgtgaagcaggtgggcgacgggggaagactggtcccagtgccaagccttagcgaagccgacaagtaccagcctctctccttggttgtgaagaagaaacgttgctttctgtttcccaggtataaatttacgagtactccctttaccctgaaggatatcttgctcggtgaccgcgagatctctgctggcattagtagttaccagttgctgaattacgaagacgagagcgacgtgtcactgtatgggcgcaggggaaaccacatcgtcaatgatgttggcatcaatgtggctggcagcgattccattgccgttaaggcctcattcggaattgtgacaaaacatgaagtagaagtgagcacattactgaaagagataaccaccaggaaaatcaacttcgatcatagtcttatccgccagtcacgctcctctagaaaagcagtcctctgtgtcgtgatggaatcaattcgcacaacaaggcagtgtagcctgtccgtgcatgccgggatacggggtgaagcgatgaggttccattttatggacgagcaaaatccaaagggacgcgataaggctatcgtcttcccagcccacaccactattgcgttttcagtttttgaactgttcatctatcttgacggggcctttgacctgtgtgtgacctccgtctctaagggcgggttcgaacgagaggaaacagcaaccttcgccttgctctaccggctgagaaacatcttatttgaaaggaatcgccgggttatggatgtaatatcaagatctcaactgtacttggacgatctgttcagcgactattatgacaaacccttgtccatgactgacatcagtcttaaagaaggaacccacataagagttaacctgctgaaccataacatccccaaaggaccttgcatcctctgtggaatgggcaatttcaagcgggagacagtgtacgggtgtttccagtgtagcgtggacggtcaaaaatatgtccgacttcacgcagtaccctgtttcgacatatggcacaaacgcatgaagtag

SEQ ID NO: 34014 - DNA, 1059 bp, Artificial Sequence
  derived and/or modified sequence
atgttcgccgctgctacaaaatcttttgtaaagcaagtaggggatggaggcaggttagtgcctgttccctcattgagcgaagcggataaatatcaacctctgtcactggtagtgaaaaaaaagcgttgcttcctgttcccgaggtataaattcacgtccacaccgtttactttaaaggatattctcttgggcgaccgggaaatatcggcaggaataagctcataccaactgctcaactacgaagacgagtcggacgtcagtctgtatggccgaaggggaaaccatatagttaatgatgttggaatcaacgtggcgggatcagacagcatagccgtgaaggcctccttcggcatcgtgacaaaacacgaagtggaagtctcaacactgctcaaagaaatcaccacccgcaaaattaattttgatcacagcctaatacgacagtcccgttcctctagaaaggctgtgctctgtgttgttatggaaagtatcaggaccacacggcagtgctcgctctctgtgcacgccggaatcagaggggaggccatgcggtttcacttcatggacgagcaaaaccccaaaggcagagacaaagccatcgtgttccctgcccatacaacaattgcattctcagtgtttgagctcttcatctatttagatggtgccttcgatctttgtgtgactagtgtgtctaagggtgggtttgaacgcgaggagacagcaacattcgcgctgctttatcgattgagaaacatcttgttcgagaggaaccgacgggtaatggacgtaatctccaggagtcaattgtatctggacgacctgttctcggactactacgataaacctctgtccatgacagacatttctttaaaagaaggcacacacattcgggtgaatctcctcaaccacaatatccctaaggggccatgcatcctgtgtggcatgggtaattttaagcgcgagactgtgtatggctgcttccaatgctctgtggacggtcagaaatatgtacggctccacgctgtaccctgtttcgatatctggcacaagaggatgaagtag

SEQ ID NO: 34015 - DNA, 1059 bp, Artificial Sequence
  derived and/or modified sequence
atgtttgctgctgctaccaagtcctttgtcaagcaagtgggcgacggcggacggctcgtgcccgtcccatccctgtctgaggctgacaagtaccagcccctgtctctggttgtcaaaaaaaaacggtgtttccttttccctagatacaagtttacttccactcccttcactcttaaggacatcctccttggcgaccgggagatttccgcaggtatctcatcctaccagctcttgaattatgaggacgaaagcgatgtctcactgtacggcaggaggggtaatcacattgtgaatgatgtcggaatcaatgttgctggtagcgattcgatcgcagtcaaggcatcatttgggattgtgacaaagcacgaggtagaggtgtcaaccctacttaaggaaattaccacccgaaaaatcaactttgatcattctctgattagacagtcccggtctagcaggaaggccgtactgtgtgtcgtgatggagtctatcaggaccacacggcagtgctccctgtctgttcacgcaggaatccgcggtgaagcaatgcggttccacttcatggatgaacagaatccaaaggggagggataaagccattgtattcccagctcacaccactattgcgttctctgtttttgagctcttcatctatctcgacggagcattcgacttgtgcgtcaccagcgtctctaagggtggctttgagcgggaggagactgcgacctttgcgttgttgtaccgactgcgtaacatattatttgagcgaaacaggcgagtcatggacgtaatcagcagaagccagctttacctggatgacttatttagtgattactacgataagcctctgagtatgacagacatctctctcaaggagggaacccatattagggtgaaccttttgaaccacaacatcccaaaaggaccatgcatcctctgtgggatgggtaacttcaaaagagaaactgtctatggttgctttcagtgttccgtcgatggacagaagtatgtcaggttgcacgctgtcccctgctttgatatttggcataagaggatgaaatag

SEQ ID NO: 34016 - DNA, 1059 bp, Artificial Sequence
  derived and/or modified sequence
atgttcgccgccgccaccaagagcttcgtgaagcaggtgggcgacggcggcagactggtgcccgtgcccagcctgagcgaggccgacaagtaccagcccctgagcctggtggtgaagaagaagagatgcttcctgttccccagatacaagttcaccagcacccccttcaccctgaaggacatcctgctgggcgacagagagatcagcgccggcatcagcagctaccagctgctgaactacgaggacgagagcgacgtgagcctgtacggcagaagaggcaaccacatcgtgaacgacgtgggcatcaacgtggccggcagcgacagcatcgccgtgaaggccagcttcggcatcgtgaccaagcacgaggtggaggtgagcaccctgctgaaggagatcaccaccagaaagatcaacttcgaccacagcctgatcagacagagcagaagcagcagaaaggccgtgctgtgcgtggtgatggagagcatcagaaccaccagacagtgcagcctgagcgtgcacgccggcatcagaggcgaggccatgagattccacttcatggacgagcagaaccccaagggcagagacaaggccatcgtgttccccgcccacaccaccatcgccttcagcgtgttcgagctgttcatctacctggacggcgccttcgacctgtgcgtgaccagcgtgagcaagggcggcttcgagagagaggagaccgccaccttcgccctgctgtacagactgagaaacatcctgttcgagagaaacagaagagtgatggacgtgatcagcagaagccagctgtacctggacgacctgttcagcgactactacgacaagcccctgagcatgaccgacatcagcctgaaggagggcacccacatcagagtgaacctgctgaaccacaacatccccaagggcccctgcatcctgtgcggcatgggcaacttcaagagagagaccgtgtacggctgcttccagtgcagcgtggacggccagaagtacgtgagactgcacgccgtgccctgcttcgacatctggcacaagagaatgaagtag

SEQ ID NO: 34017 - DNA, 1202 bp, Artificial Sequence
  derived and/or modified sequence
aaactacttggtgaaaccatgctttgtatttttaagatgtataattatatttaaaaacaagcaatgcttaattttgtgcctgattttcctctttaaaaatggatttatctgggggttgcagttgatgacgttttgattttaatatgtttgctgctgctaccaagagctttgtcaagcaagttggagatggagggagattagttcctgttccaagcctcagtgaagctgacaaatatcaacctctaagtctggtggtaaaaaagaagcgatgctttctgtttcctagatataaatttacttcaacaccttttacactgaaagatattctcctaggagacagagaaatttcagctggtatttcatcttatcaattactgaattatgaagatgaatcagatgtttcactctatggaaggcgaggtaaccatattgtaaatgacgttgggattaacgttgctggatcagattccattgcagtgaaagcttcatttggtatagtaaccaaacatgaagtggaagtatcaacattactcaaagaaattactacacgaaaaattaactttgaccacagcttgatacgtcagtcaaggagcagcagaaaggcagtattgtgtgtggtcatggagagcatccgaaccacacgacagtgctcactgtctgtgcatgctggaattcgaggggaagcaatgcggtttcactttatggatgaacagaatcccaagggaagggacaaagctattgttttcccagcacatacaaccatagctttcagtgtttttgaactcttcatatacctggatggtgcctttgacctttgtgtcacttcagtgtcaaaaggaggatttgaaagggaagaaacggcaacatttgcactgctgtacaggttgagaaatatcctatttgaaagaaatagaagagtgatggatgtcatttctcgttcacagctttacttggatgatcttttttctgactactatgacaaacctctcagcatgactgatatttcactcaaagaagggacccatatccgagttaacttacttaatcacaacattcccaaagggccttgcatactctgtggaatggggaacttcaaaagggagacagtttatgggtgctttcagtgttctgttgatggtcagaagtatgtgagacttcatgcagttccttgttttgatatttggcacaagaggatgaaataa

SEQ ID NO: 34018 - DNA, 1531 bp, Artificial Sequence
  derived and/or modified sequence
tttcttgccgggagagagggattagagggattgtccggcgtgggtctagggtcgttgaggcctaaagttaagcctttgtggggaggacggattgggggctgggtcactttaagaaaaagattctaaaattacgaaggcagaattccagggagtctcccgggcctggtcctgaagcttgagaccccggatatatacgctccagggggctgcggtgcgctcttcgggtccccgagccctgtgtttaggaacacgcggggacgtccaaacacccgctcctctcccgccgggcgggctcctttgtcttctgggctttcgtcgcgagatggaacgctggttgatgacgttttgattttaatatgtttgctgctgctaccaagagctttgtcaagcaagttggagatggagggagattagttcctgttccaagcctcagtgaagctgacaaatatcaacctctaagtctggtggtaaaaaagaagcgatgctttctgtttcctagatataaatttacttcaacaccttttacactgaaagatattctcctaggagacagagaaatttcagctggtatttcatcttatcaattactgaattatgaagatgaatcagatgtttcactctatggaaggcgaggtaaccatattgtaaatgacgttgggattaacgttgctggatcagattccattgcagtgaaagcttcatttggtatagtaaccaaacatgaagtggaagtatcaacattactcaaagaaattactacacgaaaaattaactttgaccacagcttgatacgtcagtcaaggagcagcagaaaggcagtattgtgtgtggtcatggagagcatccgaaccacacgacagtgctcactgtctgtgcatgctggaattcgaggggaagcaatgcggtttcactttatggatgaacagaatcccaagggaagggacaaagctattgttttcccagcacatacaaccatagctttcagtgtttttgaactcttcatatacctggatggtgcctttgacctttgtgtcacttcagtgtcaaaaggaggatttgaaagggaagaaacggcaacatttgcactgctgtacaggttgagaaatatcctatttgaaagaaatagaagagtgatggatgtcatttctcgttcacagctttacttggatgatcttttttctgactactatgacaaacctctcagcatgactgatatttcactcaaagaagggacccatatccgagttaacttacttaatcacaacattcccaaagggccttgcatactctgtggaatggggaacttcaaaagggagacagtttatgggtgctttcagtgttctgttgatggtcagaagtatgtgagacttcatgcagttccttgttttgatatttggcacaagaggatgaaataaaatgaaaaatgaatacaccgtgttggtgttttaggtgcagttgtgccacaaaccttccctaaattatctaggtttgctttgatgaattaaattaaaatgagaaaagcaaaaagaaa

SEQ ID NO: 34019 - protein, 159 aa, Artificial Sequence
  derived and/or modified sequence
MRLEELKRLQNPLEQVNDGKYSFENHQLAMDAENNIEKYPLNLQPLESKVKIIQRAWREYLQRQEPLGKRSPSPPSVSSEKLSSSVSMNTFSDSSTPFARAPVGKIHPYISWRLQSPGDKLPGGRKVILLYLDQLARPTGFIHTLKEPQIERLGFLTLQ

SEQ ID NO: 34020 - DNA, 480 bp, Artificial Sequence
  derived and/or modified sequence
atgagactggaggagctgaagcggctgcagaatccacttgagcaagtaaacgacggaaagtactcctttgaaaatcaccagctagccatggacgctgaaaacaatatcgagaaatacccactgaatctgcaaccgcttgaaagcaaggtgaaaattatacagcgtgcctggcgtgaatatctgcagcgccaagagcctctgggaaagaggagcccttctcctccttcggtaagtagcgagaagctgtcttcatccgtatcaatgaacactttctctgattcaagcaccccttttgccagagcgccggtggggaagattcatccatacatctcctggcgattgcagagccccggggataagttaccaggcgggagaaaggtgattcttttgtacctcgatcagttggctcgccctacagggtttatccatacactgaaggagccccagatcgaacgcttgggcttccttactctgcagtag

SEQ ID NO: 34021 - DNA, 885 bp, Artificial Sequence
  derived and/or modified sequence
tcacattcccccacagtcacattgcgctctgtgattctgaggaatacagtgtgccagcatccgatccagtctcctttcacctgcaggtgttccagaaacttcaaaatgcgtctggaagaactgaaaagattgcagaatcctctagaacaagttaatgatggaaaatattcatttgaaaatcaccagctggccatggatgcagagaataatattgaaaagtatcccctcaatctacagcccttggaatcaaaggtgaaaatcattcagcgagcatggcgagagtacctgcagcggcaggagcccctggggaagaggagcccgtccccaccctctgtctcctcagagaagctgagcagctctgtcagcatgaacaccttctccgacagcagcacaccctttgccagggcccctgttgggaagattcatccttacatctcttggaggttgcagtcacctggggacaagttgcctggtggaaggaaggtgattcttctctaccttgaccagcttgccagacccactgggttcatacatactctcaaggagccccagatagaaagacttggttttctcaccctccagtgaatggacctcaagtttatggagggaataggatgatccctggcctacactgactaagcctgtcatcaagaaatgagcttcctctaacaaccatgagtccatttggaacttctgtgttaaaagccttcagtccaagtcaaatgttgtcagtgagctgtgtccctggggagttctttatgccctgcctcttgcttgatcttttccaggttgttgaacctcagccctctttctctgggtttaatctattgctgttactgcctagacaattttctatcttctcatatctgatcaactgactgtctt

SEQ ID NO: 34022 - DNA, 480 bp, Artificial Sequence
  derived and/or modified sequence
atgaggctggaggagctgaagaggctgcagaaccccctggagcaggtgaatgatggcaagtacagctttgagaaccaccagctggccatggatgctgagaacaacatcgagaagtaccccctgaacctgcagcccctggagagcaaggtgaagatcatccagagggcctggagggagtacctgcagaggcaggagcccctgggcaagaggagccccagcccccccagcgtgtcctctgagaagctgagcagctctgtgtccatgaacaccttcagtgacagcagcaccccatttgcccgggcccctgtgggcaagatccacccctacatctcctggaggctgcagagccctggggacaagctgcccggcggcaggaaggtgatcctgctgtacctggaccagctggcccggcccaccggcttcatccacaccctgaaggagccccagatcgagcggctgggcttcctgaccctgcagtag

SEQ ID NO: 34023 - DNA, 480 bp, Artificial Sequence
  derived and/or modified sequence
atgcggctggaggagctgaagcggctgcagaaccccctggagcaggtgaacgacggtaagtactcctttgaaaaccatcagctggccatggacgccgaaaacaacatcgagaaatatcctctaaacctgcagccgcttgagtcgaaagtgaagataatccagagggcgtggagggagtacctgcagagacaggagcccctggggaagaggagtcctagcccacctagcgtgtcatccgaaaaattgtcttcttcagtatcaatgaatacattctcagattccagcaccccttttgctagggctccagtgggtaagattcacccatacatcagctggcgactccagtcccccggcgacaagctgccaggcgggagaaaggttatcctgctgtacctggaccagctggcaaggcctaccggctttatccatacactaaaggagccacagatagaacgactcggtttcttgaccctccagtag

SEQ ID NO: 34024 - DNA, 480 bp, Artificial Sequence
  derived and/or modified sequence
atgcggctggaggagcttaaacggttgcagaatccgttggagcaagtaaacgatggaaagtactcatttgagaaccaccaactggcaatggacgctgaaaacaatatagagaagtaccccctgaacctgcagccccttgaaagcaaggtgaagatcattcagagggcctggcgggagtatttgcaaagacaggagccgttaggtaagcggtctccatctccacctagcgtcagctcggaaaagctgagcagttccgttagtatgaatactttttccgattccagtaccccattcgctcgtgcacccgtggggaagatccatccctatatttcgtggcgtctgcagtccccaggagacaaactcccgggaggccgaaaagtgatattgctatacctcgaccaactcgcacgacccaccggattcattcacaccctgaaggagccccagattgagaggctggggtttctgacactgcagtag

SEQ ID NO: 34025 - DNA, 480 bp, Artificial Sequence
  derived and/or modified sequence
atgagactggaggagctgaagagactgcagaaccccctggagcaggtgaacgacggcaagtacagcttcgagaaccaccagctggccatggacgccgagaacaacatcgagaagtaccccctgaacctgcagcccctggagagcaaggtgaagatcatccagagagcctggagagagtacctgcagagacaggagcccctgggcaagagaagccccagcccccccagcgtgagcagcgagaagctgagcagcagcgtgagcatgaacaccttcagcgacagcagcacccccttcgccagagcccccgtgggcaagatccacccctacatcagctggagactgcagagccccggcgacaagctgcccggcggcagaaaggtgatcctgctgtacctggaccagctggccagacccaccggcttcatccacaccctgaaggagccccagatcgagagactgggcttcctgaccctgcagtag

SEQ ID NO: 34026 - protein, 112 aa, Artificial Sequence
  derived and/or modified sequence
MRLEELKRLQNPLEQVNDGKYSFENHQLAMDAENNIEKYPLNLQPLESKVKIIQRAWREYLQRQEPLGKRSPSPPSVSSEKLSSSVSMNTFSDSSTPVSVMFLFLCPDLTFN

SEQ ID NO: 34027 - DNA, 339 bp, Artificial Sequence
  derived and/or modified sequence
atgaggctggaagaattaaagcggttgcaaaatccactagaacaggtgaacgatgggaaatactcattcgaaaatcatcagctggccatggatgccgagaataacatcgagaaatacccattgaatctgcagcccttagagtccaaagttaagattatccaacgcgcttggcgagaatatctgcagcgtcaggagcccctggggaagaggagtccaagccctcccagtgtctcatctgaaaaactctctagttcagttagcatgaacacgttctcggacagctctacacctgtctctgtgatgtttctgttcctgtgtcctgatctgacattcaactag

SEQ ID NO: 34028 - DNA, 1460 bp, Artificial Sequence
  derived and/or modified sequence
tcacattcccccacagtcacattgcgctctgtgattctgaggaatacagtgtgccagcatccgatccagtctcctttcacctgcaggtgttccagaaacttcaaaatgcgtctggaagaactgaaaagattgcagaatcctctagaacaagttaatgatggaaaatattcatttgaaaatcaccagctggccatggatgcagagaataatattgaaaagtatcccctcaatctacagcccttggaatcaaaggtgaaaatcattcagcgagcatggcgagagtacctgcagcggcaggagcccctggggaagaggagcccgtccccaccctctgtctcctcagagaagctgagcagctctgtcagcatgaacaccttctccgacagcagcacacccgtgagtgtcatgtttctttttctatgtcctgacttgacattcaactgaaagcctagactttggttctaagagagaaatcttgggatgtgagcaggtggtttgtgacagtgaagatctatgtagcttatttgctacccaggaacccatggtgagagttttgtcacctcaaaataaagacacaattcataagcacaaagtgaactttatcaagtctggagaaaatagattgcatttatgtgttctcatttctctattatggaggtatcttttttgcttttctttataatagcatatttcttttagtatgtgctgtgtgtttcttttattgtgtggtgctaatatgatagaagataagattggttataaggagtagaaagagaacttttaccagaagaattgaaagtggtcacacactcaggggttgcaacttaaatgtctccaggggccaggtaagtcaccctcatgactgaggtggctgagctgtgcccctggctacacggagaacatagacctcacctgaagggcagcgcacttggctcctgacaatgtgacaccatgtggcgatacaggcaggcatggccaaatgtgattttctttcttcaggacatgtcagaaatctgcatttttaagtgttagcagccagtaagaaaatttaaaaggtaaagtaagcatgcctacagaccacaattgacctacaggccaccagtttaagaaatctgagatagagagttaaggaataagggaatctgctggaagtctttatttttaaaaaacaccaaaagtgggaagaaatcagtgatgagggatttatgaaccaggattttgtggatttaagcattgtgataatttgtaaccagtcactgaaatgctgaaaagttagagaaatgaagtaattacacaagtatattacttccaaaaatttttcttttacttttggttatcatgtttattctgtggtaaaaaggtttcccaacactcaacgcaatgtattctttttgggatcaggtaaaagttactgtatttgaaatgttttcagatggttgcattgcatattcttcaataaa

SEQ ID NO: 34029 - DNA, 339 bp, Artificial Sequence
  derived and/or modified sequence
atgaggctggaggagctgaagaggctgcagaaccccctggagcaggtgaatgatggcaagtacagctttgagaaccaccagctggccatggatgctgagaacaacatcgagaagtaccccctgaacctgcagcccctggagagcaaggtgaagatcatccagagggcctggagggagtacctgcagaggcaggagcccctgggcaagaggagccccagcccccccagcgtgtcctctgagaagctgagcagctctgtgtccatgaacaccttcagtgacagcagcacccctgtgtctgtgatgttcctgttcctgtgcccagacctgaccttcaactag

SEQ ID NO: 34030 - DNA, 339 bp, Artificial Sequence
  derived and/or modified sequence
atgcggctggaggagctgaagcggctgcagaaccccctggagcaggttaatgacgggaagtatagcttcgagaaccaccagctcgcaatggatgcggagaacaacatcgagaaatatccgttaaacctacaaccgctggaaagcaaagtgaaaattatccagcgtgcctggagagaatatcttcagaggcaggaaccactgggcaagcgaagtccctcccccccctccgtgtcatccgaaaagctctcgagttcagtgagcatgaacacgttcagtgatagcagcactcccgtgtcagttatgttcctgttcctttgtcccgacctcaccttcaactag

SEQ ID NO: 34031 - DNA, 339 bp, Artificial Sequence
  derived and/or modified sequence
atgcgcctggaggagttaaaaaggctgcaaaatcccttagagcaggtaaatgacggtaagtactcttttgaaaatcaccagctggcgatggatgctgagaacaatatagaaaagtatcctctcaacctgcagccattggagtccaaagtgaaaataatacaacgggcttggcgggagtatctccaaagacaggaaccgctgggaaaaagaagtccaagccccccaagcgtttcctcagagaaacttagctctagtgtgagcatgaatacgttttcggacagcagcacccccgtgagtgtcatgttcctattcctgtgtcccgacctcacttttaattag

SEQ ID NO: 34032 - DNA, 339 bp, Artificial Sequence
  derived and/or modified sequence
atgagactggaggagctgaagagactgcagaaccccctggagcaggtgaacgacggcaagtacagcttcgagaaccaccagctggccatggacgccgagaacaacatcgagaagtaccccctgaacctgcagcccctggagagcaaggtgaagatcatccagagagcctggagagagtacctgcagagacaggagcccctgggcaagagaagccccagcccccccagcgtgagcagcgagaagctgagcagcagcgtgagcatgaacaccttcagcgacagcagcacccccgtgagcgtgatgttcctgttcctgtgccccgacctgaccttcaactag

SEQ ID NO: 34033 - protein, 5033 aa, Artificial Sequence
  derived and/or modified sequence
MGDAEGEDEVQFLRTDDEVVLQCSATVLKEQLKLCLAAEGFGNRLCFLEPTSNAQNVPPDLAICCFVLEQSLSVRALQEMLANTVEAGVESSQGGGHRTLLYGHAILLRHAHSRMYLSCLTTSRSMTDKLAFDVGLQEDATGEACWWTMHPASKQRSEGEKVRVGDDIILVSVSSERYLHLSTASGELQVDASFMQTLWNMNPICSRCEEGFVTGGHVLRLFHGHMDECLTISPADSDDQRRLVYYEGGAVCTHARSLWRLEPLRISWSGSHLRWGQPLRVRHVTTGQYLALTEDQGLVVVDASKAHTKATSFCFRISKEKLDVAPKRDVEGMGPPEIKYGESLCFVQHVASGLWLTYAAPDPKALRLGVLKKKAMLHQEGHMDDALSLTRCQQEESQAARMIHSTNGLYNQFIKSLDSFSGKPRGSGPPAGTALPIEGVILSLQDLIIYFEPPSEDLQHEEKQSKLRSLRNRQSLFQEEGMLSMVLNCIDRLNVYTTAAHFAEFAGEEAAESWKEIVNLLYELLASLIRGNRSNCALFSTNLDWLVSKLDRLEASSGILEVLYCVLIESPEVLNIIQENHIKSIISLLDKHGRNHKVLDVLCSLCVCNGVAVRSNQDLITENLLPGRELLLQTNLINYVTSIRPNIFVGRAEGTTQYSKWYFEVMVDEVTPFLTAQATHLRVGWALTEGYTPYPGAGEGWGGNGVGDDLYSYGFDGLHLWTGHVARPVTSPGQHLLAPEDVISCCLDLSVPSISFRINGCPVQGVFESFNLDGLFFPVVSFSAGVKVRFLLGGRHGEFKFLPPPGYAPCHEAVLPRERLHLEPIKEYRREGPRGPHLVGPSRCLSHTDFVPCPVDTVQIVLPPHLERIREKLAENIHELWALTRIEQGWTYGPVRDDNKRLHPCLVDFHSLPEPERNYNLQMSGETLKTLLALGCHVGMADEKAEDNLKKTKLPKTYMMSNGYKPAPLDLSHVRLTPAQTTLVDRLAENGHNVWARDRVGQGWSYSAVQDIPARRNPRLVPYRLLDEATKRSNRDSLCQAVRTLLGYGYNIEPPDQEPSQVENQSRCDRVRIFRAEKSYTVQSGRWYFEFEAVTTGEMRVGWARPELRPDVELGADELAYVFNGHRGQRWHLGSEPFGRPWQPGDVVGCMIDLTENTIIFTLNGEVLMSDSGSETAFREIEIGDGFLPVCSLGPGQVGHLNLGQDVSSLRFFAICGLQEGFEPFAINMQRPVTTWFSKGLPQFEPVPLEHPHYEVSRVDGTVDTPPCLRLTHRTWGSQNSLVEMLFLRLSLPVQFHQHFRCTAGATPLAPPGLQPPAEDEARAAEPDPDYENLRRSAGGWSEAENGKEGTAKEGAPGGTPQAGGEAQPARAENEKDATTEKNKKRGFLFKAKKVAMMTQPPATPTLPRLPHDVVPADNRDDPEIILNTTTYYYSVRVFAGQEPSCVWAGWVTPDYHQHDMSFDLSKVRVVTVTMGDEQGNVHSSLKCSNCYMVWGGDFVSPGQQGRISHTDLVIGCLVDLATGLMTFTANGKESNTFFQVEPNTKLFPAVFVLPTHQNVIQFELGKQKNIMPLSAAMFQSERKNPAPQCPPRLEMQMLMPVSWSRMPNHFLQVETRRAGERLGWAVQCQEPLTMMALHIPEENRCMDILELSERLDLQRFHSHTLRLYRAVCALGNNRVAHALCSHVDQAQLLHALEDAHLPGPLRAGYYDLLISIHLESACRSRRSMLSEYIVPLTPETRAITLFPPGRSTENGHPRHGLPGVGVTTSLRPPHHFSPPCFVAALPAAGAAEAPARLSPAIPLEALRDKALRMLGEAVRDGGQHARDPVGGSVEFQFVPVLKLVSTLLVMGIFGDEDVKQILKMIEPEVFTEEEEEEDEEEEGEEEDEEEKEEDEEETAQEKEDEEKEEEEAAEGEKEEGLEEGLLQMKLPESVKLQMCHLLEYFCDQELQHRVESLAAFAERYVDKLQANQRSRYGLLIKAFSMTAAETARRTREFRSPPQEQINMLLQFKDGTDEEDCPLPEEIRQDLLDFHQDLLAHCGIQLDGEEEEPEEETTLGSRLMSLLEKVRLVKKKEEKPEEERSAEESKPRSLQELVSHMVVRWAQEDFVQSPELVRAMFSLLHRQYDGLGELLRALPRAYTISPSSVEDTMSLLECLGQIRSLLIVQMGPQEENLMIQSIGNIMNNKVFYQHPNLMRALGMHETVMEVMVNVLGGGESKEIRFPKMVTSCCRFLCYFCRISRQNQRSMFDHLSYLLENSGIGLGMQGSTPLDVAAASVIDNNELALALQEQDLEKVVSYLAGCGLQSCPMLVAKGYPDIGWNPCGGERYLDFLRFAVFVNGESVEENANVVVRLLIRKPECFGPALRGEGGSGLLAAIEEAIRISEDPARDGPGIRRDRRREHFGEEPPEENRVHLGHAIMSFYAALIDLLGRCAPEMHLIQAGKGEALRIRAILRSLVPLEDLVGIISLPLQIPTLGKDGALVQPKMSASFVPDHKASMVLFLDRVYGIENQDFLLHVLDVGFLPDMRAAASLDTATFSTTEMALALNRYLCLAVLPLITKCAPLFAGTEHRAIMVDSMLHTVYRLSRGRSLTKAQRDVIEDCLMSLCRYIRPSMLQHLLRRLVFDVPILNEFAKMPLKLLTNHYERCWKYYCLPTGWANFGVTSEEELHLTRKLFWGIFDSLAHKKYDPELYRMAMPCLCAIAGALPPDYVDASYSSKAEKKATVDAEGNFDPRPVETLNVIIPEKLDSFINKFAEYTHEKWAFDKIQNNWSYGENIDEELKTHPMLRPYKTFSEKDKEIYRWPIKESLKAMIAWEWTIEKAREGEEEKTEKKKTRKISQSAQTYDPREGYNPQPPDLSAVTLSRELQAMAEQLAENYHNTWGRKKKQELEAKGGGTHPLLVPYDTLTAKEKARDREKAQELLKFLQMNGYAVTRGLKDMELDSSSIEKRFAFGFLQQLLRWMDISQEFIAHLEAVVSSGRVEKSPHEQEIKFFAKILLPLINQYFTNHCLYFLSTPAKVLGSGGHASNKEKEMITSLFCKLAALVRHRVSLFGTDAPAVVNCLHILARSLDARTVMKSGPEIVKAGLRSFFESASEDIEKMVENLRLGKVSQARTQVKGVGQNLTYTTVALLPVLTTLFQHIAQHQFGDDVILDDVQVSCYRTLCSIYSLGTTKNTYVEKLRPALGECLARLAAAMPVAFLEPQLNEYNACSVYTTKSPRERAILGLPNSVEEMCPDIPVLERLMADIGGLAESGARYTEMPHVIEITLPMLCSYLPRWWERGPEAPPSALPAGAPPPCTAVTSDHLNSLLGNILRIIVNNLGIDEASWMKRLAVFAQPIVSRARPELLQSHFIPTIGRLRKRAGKVVSEEEQLRLEAKAEAQEGELLVRDEFSVLCRDLYALYPLLIRYVDNNRAQWLTEPNPSAEELFRMVGEIFIYWSKSHNFKREEQNFVVQNEINNMSFLTADNKSKMAKSGGSDQERTKKKRRGDRYSVQTSLIVATLKKMLPIGLNMCAPTDQDLITLAKTRYALKDTDEEVREFLHNNLHLQGKVEGSPSLRWQMALYRGVPGREEDADDPEKIVRRVQEVSAVLYYLDQTEHPYKSKKAVWHKLLSKQRRRAVVACFRMTPLYNLPTHRACNMFLESYKAAWILTEDHSFEDRMIDDLSKAGEQEEEEEEVEEKKPDPLHQLVLHFSRTALTEKSKLDEDYLYMAYADIMAKSCHLEEGGENGEAEEEVEVSFEEKQMEKQRLLYQQARLHTRGAAEMVLQMISACKGETGAMVSSTLKLGISILNGGNAEVQQKMLDYLKDKKEVGFFQSIQALMQTCSVLDLNAFERQNKAEGLGMVNEDGTVINRQNGEKVMADDEFTQDLFRFLQLLCEGHNNDFQNYLRTQTGNTTTINIIICTVDYLLRLQESISDFYWYYSGKDVIEEQGKRNFSKAMSVAKQVFNSLTEYIQGPCTGNQQSLAHSRLWDAVVGFLHVFAHMMMKLAQDSSQIELLKELLDLQKDMVVMLLSLLEGNVVNGMIARQMVDMLVESSSNVEMILKFFDMFLKLKDIVGSEAFQDYVTDPRGLISKKDFQKAMDSQKQFSGPEIQFLLSCSEADENEMINCEEFANRFQEPARDIGFNVAVLLTNLSEHVPHDPRLHNFLELAESILEYFRPYLGRIEIMGASRRIERIYFEISETNRAQWEMPQVKESKRQFIFDVVNEGGEAEKMELFVSFCEDTIFEMQIAAQISEPEGEPETDEDEGAGAAEAGAEGAEEGAAGLEGTAATAAAGATARVVAAAGRALRGLSYRSLRRRVRRLRRLTAREAATAVAALLWAAVTRAGAAGAGAAAGALGLLWGSLFGGGLVEGAKKVTVTELLAGMPDPTSDEVHGEQPAGPGGDADGEGASEGAGDAAEGAGDEEEAVHEAGPGGADGAVAVTDGGPFRPEGAGGLGDMGDTTPAEPPTPEGSPILKRKLGVDGVEEELPPEPEPEPEPELEPEKADAENGEKEEVPEPTPEPPKKQAPPSPPPKKEEAGGEFWGELEVQRVKFLNYLSRNFYTLRFLALFLAFAINFILLFYKVSDSPPGEDDMEGSAAGDVSGAGSGGSSGWGLGAGEEAEGDEDENMVYYFLEESTGYMEPALRCLSLLHTLVAFLCIIGYNCLKVPLVIFKREKELARKLEFDGLYITEQPEDDDVKGQWDRLVLNTPSFPSNYWDKFVKRKVLDKHGDIYGRERIAELLGMDLATLEITAHNERKPNPPPGLLTWLMSIDVKYQIWKFGVIFTDNSFLYLGWYMVMSLLGHYNNFFFAAHLLDIAMGVKTLRTILSSVTHNGKQLVMTVGLLAVVVYLYTVVAFNFFRKFYNKSEDEDEPDMKCDDMMTCYLFHMYVGVRAGGGIGDEIEDPAGDEYELYRVVFDITFFFFVIVILLAIIQGLIIDAFGELRDQQEQVKEDMETKCFICGIGSDYFDTTPHGFETHTLEEHNLANYMFFLMYLINKDETEHTGQESYVWKMYQERCWDFFPAGDCFRKQYEDQLS

SEQ ID NO: 34034 - DNA, 15102 bp, Artificial Sequence
  derived and/or modified sequence
atgggagatgctgagggagaagatgaggtccagtttctgcgaaccgatgatgaggttgtgctacagtgctcagccacagtgctaaaggagcagctaaagctctgcttggcagcagaggggtttggcaatcgcttgtgttttctggagccaacaagcaatgcccagaacgtgcccccggacctcgctatctgctgcttcgttcttgagcagtcattgtccgtcagggcattgcaggaaatgctggccaatactgtggaagcaggggtggaaagttcccagggcggagggcataggactctgttgtacgggcatgctatcctgctgaggcatgctcactcccggatgtatcttagttgcctcactacatcccgaagcatgactgataaactggcttttgacgttgggttgcaggaggacgccactggagaggcatgttggtggactatgcatccggcatctaagcaacgcagcgagggagagaaggtgagggtgggggacgacattattttggtcagtgtatcatccgagcggtatcttcacctgagcacagcatccggcgaacttcaggtggacgcatcattcatgcaaaccttgtggaacatgaatcccatttgctcccggtgcgaagagggcttcgtcaccggcggccacgtgttgcgactttttcatggacatatggacgaatgtctcacaatttccccagccgactccgacgaccaaaggcgtctggtatattatgaggggggagctgtgtgcactcacgcccgaagtctgtggagactggagcccctcaggatcagctggagtggaagccaccttcgatgggggcagcctctgcgagttcgccacgtgactacaggtcagtacctggccctgacggaggaccagggcctggttgtggtagacgcgtcaaaggcacataccaaagccaccagcttctgcttccggatttctaaggaaaagctcgatgtagccccaaagcgggatgtggagggcatgggacctccagaaattaagtacggcgagagcctatgtttcgtacagcacgttgcgtctggcctgtggctgacatatgctgcccccgaccctaaggcattaaggctgggcgtgcttaagaaaaaagcgatgttacaccaggaagggcatatggatgatgccctgagtctaacacggtgtcagcaagaagagtcacaagctgcccgtatgattcattctacaaatggactgtacaatcagttcataaagtctctcgattctttctccggtaaacctagggggtctggaccacctgccggtactgccctccctatcgaaggtgtcatcctatctctccaggatcttatcatttactttgagcccccttctgaagacctacaacatgaggagaagcagtccaaacttagatctcttagaaatcggcaatcgttgtttcaagaggaggggatgctttccatggtcctgaattgcatagacaggcttaatgtgtacaccaccgccgctcattttgcagagtttgctggagaggaagctgcggaatcttggaaagaaattgtgaatctgctgtacgaactccttgctagtctgattcgagggaaccgcagcaactgcgcgttattctctactaacctcgactggctggtctccaagctggaccgcctggaggcttcaagcggcatcctggaggttctgtactgcgtgctgattgaatctccggaggtcctgaacattatccaagaaaatcatattaagagtataattagccttctcgacaaacacgggagaaatcacaaagtcttggacgtcctgtgctccctctgcgtgtgtaatggagtcgccgtcaggtcaaaccaagacttaattaccgagaaccttttacctggccgcgaacttttgctccaaaccaacttgatcaattacgtcactagcattcgcccaaatatctttgtagggagggccgaaggcacgactcaatattcgaaatggtacttcgaggttatggtagacgaggtcacaccatttttgactgcacaggcgacccatctgagggtcggatgggcccttacagagggctacacaccttaccctggcgccggtgaaggctggggaggaaacggcgttggcgacgatctgtacagctatggtttcgacggcctccatttatggactggacatgtcgccaggcccgtaactagcccaggacagcacctgctggcgccagaagacgtgatctcatgttgtctcgatctttccgtgccttctatttccttcagaatcaacggatgcccagtgcagggtgtttttgaatctttcaatctggatggtctcttctttcctgtagtgtcgttcagcgctggcgtcaaagtacggttcctactgggagggcggcatggtgaattcaaatttctacctcctccagggtatgcgccttgccacgaggctgttttgccccgcgagagactgcacttggagcctatcaaggagtacaggagggaaggccctcggggaccacacctggtcgggccatctcgctgtttgtctcacaccgatttcgtgccgtgccctgttgatacggtgcagattgtactgccgccacatctcgaacgtattagagagaagctggcggaaaatattcacgagctgtgggccctcaccaggatagagcaggggtggacctacgggccagtgcgggacgacaacaaacggctgcacccctgtctggtagatttccattccctaccagaacccgaaaggaattacaacctgcaaatgagtggagaaactcttaagacactcttagcactaggttgtcacgtgggcatggctgatgagaaggcagaggacaacctgaagaaaactaaactgccaaagacctatatgatgtccaatggctataaaccagcaccgctggacttgtcccatgttcgtcttaccccagcacaaactaccttggtggaccgccttgctgaaaatggacacaatgtatgggcgagagatcgagtgggccagggttggtcctatagtgcggttcaggatattcccgccaggcggaatcctaggcttgtaccctatcgccttctggacgaggcaacgaagagatccaatagggatagcctctgccaagccgttcgaactctgctggggtacggctataacatcgaaccccccgaccaggaaccttcccaggtggaaaatcaatcccgttgcgaccgtgtgcgtatcttccgagctgagaaatcatatacagttcagagcggcagatggtatttcgagttcgaagccgtgacgacgggggagatgagagttggatgggccaggcccgagctgcggccagatgtggagctgggggctgatgagctggcttatgtctttaatgggcaccggggccaacgttggcatctgggctccgagccttttggacggccatggcagccgggggacgtggtgggttgcatgattgacctgacagagaatactattatattcacattaaacggagaagtactcatgtctgactccgggtccgagaccgcatttcgggaaatcgagataggtgatgggttcctgcccgtgtgttcactgggacctggccaggtaggccatctgaacctgggccaggatgtgtcttctttgcggtttttcgccatatgcggactgcaagagggtttcgagccatttgcaattaatatgcagcggccggttaccacatggttttccaagggtctgcctcagtttgagcccgtcccgctagaacatcctcactatgaagtctcccgtgtggatggaacagtggacacacccccttgtttgaggctgactcacagaacctgggggagccagaattcccttgtggaaatgctgtttctcagactgagtctccctgtgcagttccatcagcactttcgctgcacagccggagcaacccccctggcgccacccggattgcagccgcccgccgaagacgaagcccgggcagccgagcccgaccccgactacgaaaatctgagaagatctgccgggggctggagcgaagccgagaatgggaaagagggcaccgccaaggagggcgccccaggcgggaccccgcaggccgggggagaagctcagcctgcccgcgcagagaacgagaaggacgccaccactgaaaagaacaaaaaaagagggttccttttcaaggccaagaaggtcgcaatgatgacacagcctcctgcaaccccgaccttgccacgacttccacatgacgtggtgcctgccgataatagagacgatccagagattattctaaacacgaccacatattattactctgtaagagtgttcgcagggcaggagcctagctgtgtttgggctgggtgggttacgcctgattaccatcagcacgatatgtcttttgacctctcgaaagttcgcgtcgtcacagtaaccatgggtgatgagcaaggaaacgtgcattctagcctgaaatgtagcaactgctacatggtttgggggggtgactttgtcagcccaggtcagcaaggtcggatctcccacaccgatctagttatcggatgccttgtggacctggccactgggctgatgacctttactgccaatgggaaagagtctaatacattctttcaggtcgagcctaacacgaaactgttccctgctgttttcgttctgccaactcatcagaacgttattcaatttgagctgggtaagcaaaaaaatatcatgcccctaagcgccgccatgttccagagtgagcgcaagaatcccgcaccacagtgcccgccccggctagagatgcaaatgctcatgcccgtgagctggtctcgtatgccgaatcattttctgcaggtggaaactagacgagccggcgagcgactggggtgggccgtgcaatgtcaggaacctttgactatgatggctctccatatccctgaggagaacagatgtatggatattctggagcttagcgagcggctggatttacagcgattccactctcataccctccgtctttacagagccgtgtgtgctctcggtaacaatcgtgtcgcgcacgcactgtgttctcacgtggaccaggcccagttgttgcacgccttggaggatgcccacctccctgggcctctacgggcaggctactatgatctgctcatcagtattcaccttgagagcgcatgcaggtctcgacggagtatgcttagtgagtatatagtgccattgacaccggagacaagggctatcacgctctttccccccggaagatccaccgaaaacgggcacccccgacacgggctcccaggagttggtgtgacgaccagtctgaggcccccccaccattttagccccccctgctttgtcgcagccctgcccgcagcgggagcggccgaagcaccggcaagactcagccctgccatcccgctggaagctttgagagacaaggccttgcgcatgctgggcgaggcagtcagggatggaggacagcatgcccgagacccagtgggggggagcgtggaatttcagtttgtaccggtgctgaaactggtcagcaccctactggtaatgggtatctttggagacgaggacgtgaagcagatcttgaagatgattgagccagaagttttcaccgaggaggaggaggaggaggacgaggaagaagagggagaagaggaagacgaggaggagaaggaggaagatgaagaggaaaccgcccaggagaaggaggatgaggagaaggaagaggaggaagcagcggagggcgagaaggaggaggggctggaggagggcctgctccagatgaagttacctgaaagcgtcaaactgcagatgtgccacctcctggaatacttttgcgaccaggagttacagcatagggtggagagcttagctgccttcgccgagagatatgtcgataagctgcaggctaaccaaaggtccaggtatggtctgttgatcaaggcgttctcgatgaccgccgcggagaccgcccgccggacgagagagttcagaagccctcctcaggaacagatcaatatgctcttacagttcaaagacggcactgatgaagaggattgtcctctgcccgaggaaatccgccaggacctgttagactttcaccaggatctcctggcccactgcggcattcaacttgatggcgaagaggaggaacccgaagaggagacaaccttgggctcacgccttatgagtctcctggaaaaggtgcggctggtgaaaaagaaggaggaaaagcccgaggaagaaagaagtgccgaggaaagcaaaccccggtccctgcaagagttagtgtctcacatggtagtgagatgggcccaggaagatttcgtgcagagccctgaactcgtacgcgccatgtttagtttgctgcaccgccagtatgacggcctgggggaactgctgagggccctcccccgcgcctatacaatctccccttcttccgtggaggataccatgtccctgttggaatgcttgggacaaattcgctcattactgatcgtccagatggggcctcaggaggaaaatctcatgatacaatctatcggcaacattatgaacaacaaagtgttttaccaacatccaaacctgatgcgcgccctgggaatgcacgagactgttatggaggtgatggtgaacgtcctcggcggcggggaaagcaaggaaatcagattcccaaagatggttacttcttgttgtaggttcctctgctacttctgccggatcagtcgccaaaaccagagatctatgttcgatcacctgtcttacttactggagaatagcggcatcggactgggcatgcagggatccaccccactggatgtggcagcggccagcgtgattgacaataacgaattggccctggcacttcaggagcaggacctggagaaagttgtgagttacctggccgggtgtgggctgcagtcctgcccaatgctggtcgcaaagggatatccagacataggttggaacccatgcggaggagaacgctatttggattttctccggtttgcggtctttgtgaacggagagtccgtagaagagaacgctaatgtggtggtaaggctactcatccgcaagcccgagtgtttcgggcccgcgctccgcggggaggggggaagcggcctgctggctgctatcgaagaggctatcagaatttccgaagatccagcacgtgatggtccgggtattcgtagggacaggagaagggagcactttggagaagagcctcccgaggaaaacagagttcacctaggccacgcaatcatgagcttctacgctgctctgattgatctgttaggtcgctgtgcccctgaaatgcacctgattcaggctggcaagggtgaagcccttcgaatcagggcaatcctcaggagtctggttccactggaagacctggtgggaatcatctcactgcctctgcaaatccccacgctgggaaaagacggcgctctagtccagccgaagatgagcgcgtcatttgtccccgatcataaggcctccatggtcctgttcctggatcgcgtgtatggcattgagaaccaggacttccttctgcacgttctggatgtcgggtttctaccggacatgcgcgcggctgcttctctagacacagcgacattcagcacgaccgagatggcgctggccctcaaccggtatctatgcctggcggtactaccactcatcaccaaatgtgcccccttgttcgcaggaaccgaacaccgggcaatcatggtggatagtatgctccacactgtgtaccgcctatctcggggtagatccctgacaaaagctcagcgggacgtgattgaggactgtttgatgagtctgtgtagatatattcggcctagcatgcttcagcacctacttcgcagactggtgttcgatgtgccaatcctcaacgagtttgcaaagatgccacttaaactactcactaatcactacgagagatgctggaagtattattgtctaccaacaggctgggccaactttggtgtgacatctgaggaggaactccatttgacccgtaaactcttttggggtattttcgatagcctggctcacaaaaaatatgacccagaattgtatagaatggccatgccttgcctgtgcgcaatagctggcgcactgcccccagattacgtcgacgcttcctattccagcaaggccgagaagaaagcaacagtcgacgctgaaggaaatttcgaccctcgcccagtggagaccctgaatgttataattcccgagaagctggattcattcattaacaagtttgctgaatacactcacgagaaatgggctttcgataaaatccagaataactggagttatggtgagaatatcgacgaggaacttaaaactcatcctatgttgcgaccttacaagaccttttccgaaaaggacaaggagatctatcggtggcctattaaagagtctctgaaggcaatgattgcttgggaatggacgattgagaaagcaagggaaggcgaagaagaaaagacagagaagaaaaagacccggaagatttcccagtctgctcagacatatgacccaagggaggggtataaccctcaaccaccggatctgagcgccgtgactctcagccgcgagctgcaagccatggcggaacagctggccgaaaattaccacaacacctggggacggaaaaagaagcaggaattagaggcaaagggaggtgggacacatccactgctcgtcccctacgatacgctgaccgccaaagaaaaggcgcgcgaccgagaaaaagcgcaagaactcttaaaattcctacaaatgaacgggtatgcagtgacccggggccttaaagatatggagctcgactcctcaagcatcgaaaagcgctttgccttcggattcttgcagcagctcctgcgatggatggacataagccaggagttcatcgcacacctcgaagctgtcgtgtcttctggccgcgtcgagaagtctccgcacgagcaagaaatcaaattctttgcaaagatactgctaccactcattaaccagtatttcacaaaccactgcctttactttctttcaaccccggcgaaggtacttgggagcggggggcatgctagtaacaaagagaaggagatgatcaccagcctgttctgtaagttagcggctctggtaaggcatcgggtgtcccttttcgggacagatgcccctgcagttgtgaactgtctgcatattctggcaaggtcactggatgccagaactgttatgaaaagcgggccagaaattgttaaagccggactacgcagcttcttcgaatccgccagtgaagatatcgagaagatggtggagaaccttagactcggcaaagtcagccaggcccggacccaggttaaaggcgtgggacagaacttgacatacaccaccgttgcgctcctaccggtcctcaccactcttttccagcacatcgctcagcaccagtttggtgatgatgttattctggatgacgtccaggtgtcctgttatagaacactttgttctatctacagtctgggtaccaccaaaaatacttacgtggagaagctgaggcccgctctcggggagtgtctcgcacgcctggcagcggctatgccagtggctttcttggagcctcagctaaacgaatacaatgcatgttccgtttacactacaaagtcaccccgcgagagggctatcctcggcttgcctaacagcgtggaggagatgtgccccgacattcccgtgttggaaaggctgatggctgatattgggggactcgccgagtccggcgcccgctataccgagatgcctcatgtaattgaaataaccctccctatgctctgttcctatctgccaaggtggtgggaaagagggccggaggcgccgcccagcgcacttccggctggtgctccaccaccctgtaccgcagtcacgagtgatcatctcaactccttgctcggcaacatcttgaggattattgtcaacaatctaggcattgacgaagctagctggatgaagcggttggctgtgttcgcccagccaattgtttcacgggccaggccagaacttttgcagagccatttcatccctactatcggccggctcaggaaacgcgctggtaaagttgtgtccgaggaggagcagttgcggttggaggccaaagccgaggcgcaggaaggggagctgctggtgcgcgatgaatttagcgtcttgtgccgagatctgtatgctctgtaccccctcctcatacgttatgtagataacaatagagctcagtggctcactgagccgaatccctccgcagaagaactcttcaggatggtcggtgagattttcatctattggtcaaagagtcataacttcaaaagagaggagcaaaacttcgtcgtgcagaatgagattaacaatatgtcctttttgaccgccgacaataaatctaaaatggctaaatccggcggcagtgaccaggagcggacaaaaaagaaaagacggggcgaccggtactccgtgcagacatccctaatagttgccacactgaaaaagatgttgcccatagggctgaatatgtgcgctcctaccgatcaagaccttattaccctggcaaagacacgatacgccctgaaagacacggatgaagaggtccgagagtttctgcataataatctgcacctccagggaaaagtggaaggctcaccgtcgctccgatggcaaatggctctgtataggggtgttccaggccgcgaggaagacgcggatgatcccgagaaaattgtgagaagggtgcaggaagtttcggcagtgctgtattatctggaccaaacggaacatccgtacaaaagtaaaaaagctgtgtggcataagttgctttctaaacaacgaagaagagctgtggttgcctgtttccggatgacacctctgtacaatctgcctactcaccgggcctgtaatatgtttcttgagtcttataaggccgcttggatattgactgaagaccactcgtttgaagatcgcatgattgatgacctaagtaaggccggcgagcaagaagaggaggaggaagaggtcgaagagaaaaagcccgacccgctgcatcagttagtgcttcatttcagtcggacggccttgacagagaagtctaagttggacgaggactatctctacatggcctatgccgatatcatggccaaaagctgccacctcgaggagggcggcgaaaacggagaagccgaggaagaggtggaagtctccttcgaggaaaagcagatggagaagcagaggttgctctaccagcaggccagactgcacacaaggggtgcagcagaaatggtgcttcagatgatcagcgcttgcaaaggtgagaccggagcaatggtatcgagcacactaaaactcggcatatctattttgaacgggggtaatgccgaagtccagcagaaaatgctggattatttgaaagataagaaagaggtaggcttcttccaaagcatccaggccctcatgcagacgtgttcagtcttggatctgaacgcctttgaacggcaaaataaggccgagggtctaggaatggttaacgaggatggcaccgtgatcaacagacaaaatggggagaaagtgatggctgacgacgaatttacccaggatctgttcagattcctgcagctgctatgtgaaggtcacaataacgacttccagaattacctgcgaacccaaactggaaacactactactatcaatattatcatctgcaccgttgattatctactcagattacaggagtcaatatccgatttttattggtattatagcggcaaagacgtaatagaagagcaagggaaaagaaattttagcaaagcaatgagtgtggccaagcaggtgttcaactcgctgactgaatatatccaggggccctgcactggcaaccagcagagccttgcacacagccggctctgggacgctgtggtgggttttttgcatgtgtttgctcacatgatgatgaaactggctcaggatagctctcaaatcgagctcctgaaggagctgttagatctccaaaaggatatggtcgttatgctcctttccttgctagagggtaacgtcgtcaacggtatgatagcccgccaaatggtggacatgctggtcgaatcttcttccaacgtagaaatgattttgaaattttttgatatgtttctgaaattaaaagacatcgtaggcagcgaggcttttcaagactatgttaccgatcctaggggactcatctcaaagaaagacttccagaaggccatggactcacagaagcagttcagtggtccagaaattcagttcttgctgtcatgttccgaagctgatgagaacgaaatgattaattgcgaggagttcgctaatcgctttcaagagcccgcaagagacattggttttaatgttgcagtgttattgactaacctgtcagagcatgtcccccatgatccacggttacacaatttcctcgagctcgctgagagtatactggagtactttagaccgtacctgggacgaatagaaatcatgggggcaagccggagaatcgagcgaatctacttcgagatttcagagacaaacagggctcagtgggagatgccccaggttaaggagagtaagagacagttcatctttgatgtggtgaatgaaggtggagaggccgagaagatggaactgtttgtttcgttttgcgaagataccatcttcgaaatgcagatcgctgctcagatcagcgagcccgaaggggagccagaaactgatgaggacgagggggcgggggcagcggaagctggagccgagggggcggaggagggagctgcagggctcgagggaactgccgctacagctgccgcaggtgcgacggcccgggtagtggccgcggccgggagagctctgagagggttaagttacagatctcttcgcaggagagtccgccggctccgccgtctgactgcacgggaggccgcaacggctgtcgctgccctgctctgggctgctgtcactagggctggcgctgcgggcgccggcgcagcagccggcgctcttggtctgttgtgggggagcttattcggtgggggtctggtggagggcgccaagaaggtgacggtaacagagctgctggcagggatgccggaccccacatcagacgaggttcacggtgagcagcctgccggacctggcggagacgctgatggcgagggagcaagtgaaggagccggggatgcagcagagggcgccggagatgaggaagaagcagtccacgaagctggcccagggggcgccgatggagctgtggcagttaccgatggcggacccttccggccagaaggcgctggaggcctgggcgacatgggggataccactccagccgagccacccaccccagagggctccccaatcctgaaaagaaagctgggagtcgatggcgtcgaagaggagcttcccccagaaccagagcctgagccagagcccgaattagaacctgaaaaagcagacgcagagaacggcgaaaaggaggaagtcccggaacccacccctgaaccacctaaaaagcaggcacctcctagccccccacctaaaaaggaggaagctggcggcgaattctggggcgagcttgaggtgcagagggtgaagtttctgaactatctgagcaggaacttttacactctgcggtttctagcactcttcctggcattcgccattaacttcatattgctgttctacaaagtcagcgactctccccctggcgaggacgacatggagggatcggctgctggagatgtcagtggcgccggtagcggaggcagttctggatggggactgggggctggagaagaggctgagggcgacgaggacgagaacatggtctattattttctggaggagtccacaggttatatggagccagctctgcggtgtctaagcctactccatacactggtggccttcttgtgcatcattggttataactgccttaaagtcccccttgtgatcttcaagcgagaaaaagagctggctcggaaattggagtttgatggactgtacatcaccgaacaacccgaagacgatgacgtgaaagggcaatgggatcggctggtcctgaacactccatccttcccaagcaactactgggacaaatttgtaaagcgcaaggttctggacaaacacggcgacatttacggccgcgagcggatcgccgagctgctggggatggatctcgccacgcttgaaatcacggcccacaacgagcggaaacccaatcctccgcctggtctgctcacttggctgatgagtatcgatgtgaagtaccaaatctggaagttcggagtaatatttactgacaactcatttctttatctaggctggtatatggttatgagcctgcttggccactacaacaatttcttcttcgcagcacaccttctggatattgcgatgggagtaaagactctgaggacgattttatcctccgtgacacacaacggtaaacagctggtaatgacagtcggcctcctggccgtcgttgtatacctgtatacagtggtcgcttttaacttttttcgcaagttctataataagagcgaagatgaggacgaacctgacatgaaatgtgatgatatgatgacgtgttacctattccatatgtatgtcggggtacgtgccggaggtgggatcggcgacgagattgaggatccggcaggagatgagtacgaactttatcgcgtggtctttgacattacatttttttttttcgtcatagttatattgctggccatcatacaaggtcttatcatcgacgctttcggggagttgcgagatcaacaggagcaggtcaaggaggatatggagacgaaatgcttcatttgtggtatcgggtctgactacttcgataccacgcctcatggttttgagacccacacgctcgaagagcacaacttagcaaactatatgttttttttgatgtatctgattaacaaagatgagaccgagcatacaggacaggaaagctatgtatggaagatgtaccaggagaggtgttgggacttctttcctgccggggattgttttaggaaacagtatgaggatcagctgagctag

SEQ ID NO: 34035 - DNA, 15102 bp, Artificial Sequence
  derived and/or modified sequence
atgggagatgctgaaggagaagatgaggtgcagttcctgaggacagatgatgaggtggtgctgcagtgcagcgccaccgtgctgaaggagcagctgaagctgtgcctggccgctgagggctttggaaaccggctgtgcttcctggagcccaccagcaatgcccagaatgtgcccccagacctggccatctgctgctttgtgctggagcagagcctgtctgtgcgggccctgcaggagatgctggccaacacagtggaggccggcgtggagagcagccagggcggcggccacaggaccctgctgtatggccacgccatcctgctgcggcatgcccacagcaggatgtacctgagctgcctgaccaccagccgctccatgacagacaagctggcctttgatgtgggcctgcaggaggatgccactggagaggcctgctggtggaccatgcacccagccagcaagcagaggtctgagggggagaaggtgcgggtgggagatgacatcatcctggtgtctgtgtcctctgagcgctacctgcacctgagcacagccagcggggagctgcaggtggatgccagcttcatgcagaccctgtggaacatgaaccccatctgcagccgctgtgaggagggctttgtgactggaggccacgtgctgcggctcttccacggccacatggatgagtgcctgaccatcagccctgctgacagtgatgaccagaggcggctggtgtactatgagggcggcgctgtgtgcacccacgcccggagcctgtggaggctggagcccctgcgcatctcctggagcggcagccacctgcgctggggccagcccctgcgggtgagacatgtgaccaccggccagtacctggccctgacagaggaccagggcctggtggtggtggatgccagcaaggcccacaccaaggccaccagcttctgcttccgcatcagcaaggagaagctggatgtggcccccaagagagatgtggagggcatgggccccccagagatcaagtacggggagagcctgtgctttgtgcagcacgtggccagcggcctgtggctgacctatgctgccccagaccccaaggccctgcggctgggcgtgctgaagaagaaggccatgctgcaccaggagggccacatggatgatgccctgagcctgacccgctgccagcaggaggagagccaggccgccaggatgatccacagcaccaacggcctgtacaaccagttcatcaagagcctggacagcttcagcggcaagccccggggcagcggccccccagctggaacagccctgcccattgaaggagtcatcctgagcctgcaggacctgatcatctactttgagcccccatctgaggacctgcagcacgaggagaagcagagcaagctgcggagcctgaggaaccggcagagcctcttccaggaggagggcatgctgtccatggtgctgaactgcatcgaccggctgaatgtgtacaccacagctgcccactttgctgagtttgctggggaggaggccgctgagagctggaaggagatcgtgaacctgctgtatgagctgctggccagcctcatccggggcaacagaagcaactgtgccctcttcagcaccaacctggactggctggtgtccaagctggaccggctggaggccagcagcggcatcctggaggtgctgtactgtgtgctgattgagagccctgaggtgctgaacatcatccaggagaaccacatcaagagcatcatcagcctgctggacaagcacggcaggaaccacaaggtgctggatgtgctgtgcagcctgtgtgtgtgcaatggagtggccgtgcgcagcaaccaggacctgatcacagagaacctgctgcccggccgggagctgctgctgcagaccaacctgatcaactacgtgaccagcatccggcccaacatctttgtgggccgggcagagggcaccacccagtacagcaagtggtactttgaggtgatggtggatgaggtgacccccttcctgacagcccaggccacccacctgcgggtgggctgggccctgacagagggctacaccccctacccaggagctggggagggctggggcggcaatggagtgggagatgacctgtacagctatggctttgatggcctgcacctgtggacaggccacgtggcccggcctgtgaccagccctggccagcacctgctggccccagaagatgtgatcagctgctgcctggacctgtctgtgcccagcatctccttccgcatcaatggctgccctgtgcagggcgtgtttgagagcttcaacctggatggcctcttcttccctgtggtgtccttctctgctggggtgaaggtgcgcttcctgctgggcggccgccacggggagttcaagttcctgcccccacctggctacgccccctgccatgaagctgtgctgccccgggagcggctgcacctggagcccatcaaggagtacagaagagagggcccccggggcccccacctggtgggccccagccgctgcctgagccacacagactttgtgccctgccctgtggacacagtgcagatcgtgctgcccccccacctggagcgcatccgggagaagctggccgagaacatccacgagctgtgggccctgacccgcatcgagcagggctggacctacggccctgtgagagatgacaacaagaggctgcacccctgcctggtggacttccacagcctgcctgagcctgagaggaactacaacctgcagatgtctggagagaccctgaagaccctgctggccctgggctgccacgtgggcatggctgatgagaaggccgaggacaacctgaagaagaccaagctgcccaagacctacatgatgagcaatggctacaagccagcccccctggacctgagccacgtgcggctgaccccagcccagaccaccctggtggaccggctggctgaaaatggccacaacgtgtgggcccgggacagagtgggccagggctggagctacagcgctgtgcaggacatcccagcccggaggaacccccggctggtgccctaccgcctgctggatgaggccaccaagaggagcaacagagacagcctgtgccaggccgtgaggaccctgctgggctacggctacaacatcgagcccccagaccaggagcccagccaggtggagaaccagagccgctgtgacagagtgcgcatcttccgggcagagaagagctacacagtgcagagcggccgctggtactttgaatttgaagctgtgaccaccggggagatgagggtgggctgggcccggcctgagctgcggccagatgtggagctgggcgcagatgagctggcctacgtgttcaacggccaccggggccagcgctggcacctgggcagcgagcccttcggccggccctggcagcctggagatgtggtgggctgcatgattgacctgacagagaacaccatcatcttcaccctgaatggagaggtgctgatgtctgacagcggcagcgagacagccttccgggagattgaaattggagatggcttcctgcctgtgtgcagcctgggccctggccaggtgggccacctgaacctgggccaggatgtgagcagcctgcgcttctttgccatctgtggcctgcaggagggctttgagccctttgccatcaacatgcagaggcctgtgaccacctggttcagcaagggcctgccccagtttgagcctgtgcccctggagcacccccactatgaggtgtcccgggtggatggcaccgtggacaccccaccctgcctgcggctgacccacaggacctggggcagccagaacagcctggtggagatgctgttcctgcggctgagcctgcctgtgcagttccaccagcacttccgctgcacagctggggccacccccctggcccctcctggcctgcagcccccagcagaagatgaggcccgggctgctgagccagaccctgactatgagaacctgcggcgctctgctgggggctggagcgaggctgaaaatggcaaggagggcacagccaaggagggcgcccctgggggcaccccccaggccggcggggaggcccagcctgcccgggcagaaaatgagaaggatgccaccacagagaagaacaagaagaggggcttcctgttcaaggccaagaaggtggccatgatgacccagcccccagccacccccaccctgccccggctgccccatgatgtggtgcctgctgacaacagagatgatcctgagatcatcctgaacaccaccacctactactacagcgtgcgggtgtttgctggccaggagcccagctgtgtgtgggccggctgggtgaccccagactaccaccagcacgacatgagctttgacctgagcaaggtgcgggtggtgacagtgaccatgggagatgagcagggcaatgtgcacagcagcctgaagtgcagcaactgctacatggtgtggggcggggactttgtgtccccaggccagcagggccgcatcagccacacagacctggtgattggctgcctggtggacctggccaccggcctgatgaccttcaccgccaacgggaaggagagcaacaccttcttccaggtggagcccaacaccaagctgtttcctgctgtgtttgtgctgcccacccaccagaatgtcatccagtttgagctgggcaagcagaagaacatcatgcccctgtctgctgccatgttccagagcgagaggaagaacccagccccccagtgccccccccggctggagatgcagatgctgatgcctgtgtcctggagcaggatgcccaaccacttcctgcaggtggagaccaggagagctggggagcggctgggctgggccgtgcagtgccaggagcccctgaccatgatggccctgcacatcccagaagaaaatcgctgcatggacatcctggagctgtctgagcggctggacctgcagcgcttccacagccacaccctgcggctgtacagagctgtgtgtgccctgggcaacaacagagtggcccacgccctgtgcagccacgtggaccaggcccagctgctgcacgccctggaggatgcccacctgcccggccccctgcgggccggctactatgacctgctgatcagcatccacctggagagcgcctgccgcagccgccgctccatgctgtctgagtacatcgtgcccctgaccccagagacccgggccatcaccctcttccccccaggccgcagcacagaaaatggccaccccaggcatggcctgcccggggtgggcgtgaccaccagcctgcggcccccccaccacttcagccccccctgctttgtggccgccctgcctgctgctggagctgctgaggccccagcccggctgagccctgccatccccctggaggccctgcgggacaaggccctgaggatgctgggggaggccgtgagagatggcggccagcacgcccgggaccctgtgggcggctctgtggagttccagtttgtgcctgtgctgaagctggtgtccaccctgctggtgatgggcatctttggagatgaagatgtgaagcagatcctgaagatgattgagcctgaggtgttcacagaggaggaggaggaggaggatgaggaggaggagggggaggaggaggatgaggaggagaaggaggaggatgaggaggagacagcccaggagaaggaggatgaggagaaggaggaggaggaggccgctgagggggagaaggaggagggcctggaggagggcctgctgcagatgaagctgcctgagagcgtgaagctgcagatgtgccacctgctggagtacttctgtgaccaggagctgcagcaccgggtggagagcctggccgcctttgctgagagatatgtggacaagctgcaggccaaccagaggagccgctatggcctgctgatcaaggccttctccatgacagctgctgagacagcccggaggacccgggagttccgcagccccccccaggagcagatcaacatgctgctgcagttcaaggatggaacagatgaggaggactgccccctgcctgaggagatccggcaggacctgctggacttccaccaggacctgctggcccactgcggcatccagctggatggagaggaggaggagcctgaggaggagaccaccctgggcagccggctgatgagcctgctggagaaggtgcggctggtgaagaagaaggaggagaagccagaggaggagaggtctgctgaggagagcaagcccaggagcctgcaggagctggtgagccacatggtggtgcgctgggcccaggaggactttgtgcagagccctgagctggtgcgggccatgttcagcctgctgcaccggcagtatgatggcctgggggagctgctgcgggccctgccccgggcctacaccatcagccccagctctgtggaggacaccatgagcctgctggagtgcctgggccagatccgcagcctgctgattgtgcagatgggcccccaggaggagaacctgatgatccagagcatcggcaacatcatgaacaacaaggtgttctaccagcaccccaacctgatgagggccctgggcatgcatgagaccgtgatggaggtgatggtgaatgtgctgggcggcggggagagcaaggagatccgcttccccaagatggtgaccagctgctgccgcttcctgtgctacttctgccgcatcagccggcagaaccagaggtccatgtttgaccacctgagctacctgctggagaacagcggcatcggcctgggcatgcagggcagcacccccctggatgtggccgccgcctctgtgattgacaacaatgagctggccctggccctgcaggagcaggacctggagaaggtggtgtcctacctggccggctgcggcctgcagagctgccccatgctggtggccaagggctacccagacatcggctggaacccctgtggcggggagcgctacctggacttcctgcgctttgctgtgtttgtgaatggagagagcgtggaggagaatgccaacgtggtggtgcggctgctgatcaggaagccagagtgcttcggccctgccctgcggggggagggcggcagcggcctgctggccgccatcgaggaggccatccgcatcagcgaggaccctgccagagatggccctggcatccggcgggacagaagaagagagcactttggagaggagcccccagaagaaaatagagtgcacctgggccacgccatcatgtccttctatgctgccctgattgacctgctgggccgctgtgcccctgagatgcacctgatccaggccgggaaaggagaggccctgcgcatccgggccatcctgcggagcctggtgcccctggaggacctggtgggcatcatcagcctgcccctgcagatccccaccctgggcaaggatggagccctggtgcagcccaagatgtctgccagctttgtgcctgaccacaaggcctccatggtgctcttcctggacagagtgtatggaattgagaaccaggacttcctgctgcacgtgctggatgtgggcttcctgcctgacatgagagctgctgccagcctggacacagccaccttcagcaccacagagatggccctggccctgaaccgctacctgtgcctggccgtgctgcccctcatcaccaagtgtgcccccctgtttgctggaacagagcaccgggccatcatggtggacagcatgctgcacacagtgtaccgcctgagccggggccgcagcctgaccaaggcccagagagatgtgattgaggactgcctgatgagcctgtgccgctacatccggcccagcatgctgcagcacctgctgcggcggctggtgtttgatgtgcccatcctgaatgaatttgccaagatgcccctgaagctgctgaccaaccactatgagcgctgctggaagtactactgcctgcccaccggctgggccaactttggagtgaccagcgaggaggagctgcacctgaccaggaagctgttctggggcatctttgacagcctggcccacaagaagtatgaccctgagctgtacaggatggccatgccctgcctgtgtgccatcgccggggccctgcccccagactatgtggatgccagctacagcagcaaggccgagaagaaggccaccgtggatgctgagggcaactttgaccccaggcctgtggagaccctgaatgtcatcatccctgagaagctggacagcttcatcaacaagtttgctgagtacacccatgagaagtgggcctttgacaagatccagaacaactggagctatggagaaaatattgatgaggagctgaagacccaccccatgctgcggccctacaagaccttcagcgagaaggacaaggagatctaccgctggcccatcaaggagagcctgaaggccatgattgcctgggagtggaccatcgagaaggcccgggagggggaggaggagaagacagagaagaagaagaccaggaagatcagccagagcgcccagacctatgacccccgggagggctacaacccccagcccccagacctgtctgctgtgaccctgagccgggagctgcaggccatggccgagcagctggccgagaactaccacaacacctggggcaggaagaagaagcaggagctggaggccaagggcggcggcacccaccccctgctggtgccctatgacaccctgacagccaaggagaaggcccgggaccgggagaaggcccaggagctgctgaagttcctgcagatgaatggctatgctgtgacccggggcctgaaggacatggagctggacagcagcagcattgagaagagatttgccttcggcttcctgcagcagctgctgcgctggatggacatcagccaggagttcatcgcccacctggaggccgtggtgagcagcggccgggtggagaagagcccccatgagcaggagatcaagttctttgccaagatcctgctgcccctcatcaaccagtacttcaccaaccactgcctgtacttcctgagcaccccagccaaggtgctgggcagcggcggccacgccagcaacaaggagaaggagatgatcaccagcctcttctgcaagctggccgccctggtgcgccaccgggtgtccctgtttggaacagatgccccagctgtggtgaactgcctgcacatcctggcccggagcctggatgccaggacagtgatgaagagcggccctgagatcgtgaaggccggcctgcggagcttctttgagagcgcctctgaagatattgagaagatggtggagaacctgcggctgggcaaggtgtcccaggcccggacccaggtgaagggcgtgggccagaacctgacctacaccaccgtggccctgctgcctgtgctgaccaccctcttccagcacatcgcccagcaccagtttggagatgatgtgatcctggatgatgtgcaggtgtcctgctaccgcaccctgtgcagcatctacagcctgggcaccaccaagaacacctacgtggagaagctgcggcctgccctgggggagtgcctggcccggctggccgccgccatgcctgtggccttcctggagccccagctgaatgagtacaatgcctgcagcgtgtacaccaccaagagcccccgggagcgggccatcctgggcctgcccaacagcgtggaggagatgtgcccagacatccctgtgctggagcggctgatggctgacattggaggcctggccgagagcggggcccgctacacagagatgccccacgtgattgagatcaccctgcccatgctgtgcagctacctgccccgctggtgggagcggggccctgaggccccacccagcgccctgcctgctggggcccccccaccctgcacagctgtgaccagtgaccacctgaacagcctgctgggcaacatcctgcgcatcatcgtgaacaacctgggcattgatgaggcctcctggatgaagaggctggccgtgtttgcccagcccatcgtgtcccgggcccggcctgagctgctgcagagccacttcatccccaccatcggccgcctgaggaagagagctgggaaggtggtgtctgaggaggagcagctgcggctggaggccaaggccgaggcccaggagggggagctgctggtgagagatgagttctctgtgctgtgccgggacctgtatgccctgtaccccctgctgatccgctacgtggacaacaacagagcccagtggctgacagagcccaaccccagcgctgaggagctgttcaggatggtgggggagatcttcatctactggagcaagagccacaacttcaagcgggaggagcagaactttgtggtgcagaatgagatcaacaacatgtccttcctgacagctgacaacaagagcaagatggccaagagcggcggcagtgaccaggagaggaccaagaagaagagaagaggagaccgctacagcgtgcagaccagcctgattgtggccaccctgaagaagatgctgcccatcggcctgaacatgtgtgcccccacagaccaggacctgatcaccctggccaagaccaggtatgccctgaaggacacagatgaggaggtgcgggagttcctgcacaacaacctgcacctgcagggcaaggtggagggcagccccagcctgcgctggcagatggccctgtacagaggagtgcccggccgggaggaggatgctgatgatcctgagaagatcgtgagaagagtgcaggaggtgtctgctgtgctgtactacctggaccagacagagcacccctacaagagcaagaaggctgtgtggcacaagctgctgagcaagcagaggcggcgggctgtggtggcctgcttcaggatgacccccctgtacaacctgcccacccaccgggcctgcaacatgttcctggagagctacaaggccgcctggatcctgacagaggaccacagctttgaggacaggatgattgatgacctgagcaaggccggggagcaggaggaggaggaggaggaggtggaggagaagaagccagaccccctgcaccagctggtgctgcacttcagcaggacagccctgacagagaagagcaagctggatgaggactacctgtacatggcctatgctgacatcatggccaagagctgccacctggaggagggcggagaaaatggagaggccgaggaggaggtggaggtgtcctttgaggagaagcagatggagaagcagaggctgctgtaccagcaggcccggctgcacaccagaggagctgctgagatggtgctgcagatgatcagcgcctgcaagggggagaccggggccatggtgagcagcaccctgaagctgggcatcagcatcctgaatggaggaaatgctgaggtgcagcagaagatgctggactacctgaaggacaagaaggaggtgggcttcttccagagcatccaggccctgatgcagacctgcagcgtgctggacctgaatgcctttgagcggcagaacaaggccgagggcctgggcatggtgaatgaagatggcaccgtcatcaaccggcagaatggagagaaggtgatggctgatgatgagttcacccaggacctcttccgcttcctgcagctgctgtgtgagggccacaacaatgacttccagaactacctgcggacccagacaggcaacaccaccaccatcaacatcatcatctgcaccgtggactacctgctgcggctgcaggagagcatcagtgacttctactggtactacagcggcaaggatgtgattgaggagcagggcaagaggaacttcagcaaggccatgtctgtggccaagcaggtgttcaacagcctgacagagtacatccagggcccctgcaccggcaaccagcagagcctggcccacagccggctgtgggatgctgtggtgggcttcctgcacgtgtttgcccacatgatgatgaagctggcccaggacagcagccagatcgagctgctgaaggagctgctggacctgcagaaggacatggtggtgatgctgctgagcctgctggagggcaatgtggtgaatggcatgattgcccggcagatggtggacatgctggtggagagcagcagcaatgtggagatgatcctgaagttctttgacatgttcctgaagctgaaggacatcgtgggcagcgaggccttccaggactatgtgacagacccccggggcctcatcagcaagaaggacttccagaaggccatggacagccagaagcagttcagcggccctgagatccagttcctgctgagctgcagcgaggctgatgaaaatgagatgatcaactgtgaggagtttgccaaccgcttccaggagcccgcccgggacatcggcttcaacgtggccgtgctgctgaccaacctgtctgaacatgtgccccatgacccccggctgcacaacttcctggagctggccgagagcatcctggagtacttccggccctacctgggcagaattgagatcatgggcgccagccgccgcatcgagcgcatctactttgagatcagcgagaccaacagagcccagtgggagatgccccaggtgaaggagagcaagaggcagttcatctttgatgtggtgaatgaaggaggagaggccgagaagatggagctgtttgtgtccttctgtgaggacaccatctttgagatgcagattgctgcccagatcagcgagcctgagggggagcctgagacagatgaagatgaaggagctggagctgctgaggccggggctgagggcgctgaggagggcgctgctggcctggagggcacagctgccacagctgctgctggggccacagcccgggtggtggccgccgccggccgggccctgcggggcctgagctaccgcagcctgcggcggcgggtgcggcggctgcggcggctgacagcccgggaggccgccacagctgtggccgccctgctgtgggccgctgtgacccgggccggggctgctggagctggagctgctgctggggccctgggcctgctgtggggcagcctgtttggaggcggcctggtggagggcgccaagaaggtgacagtgacagagctgctggccggcatgccagaccccaccagtgatgaggtgcatggagagcagcctgctggccctggaggagatgctgatggagagggcgccagcgagggcgctggagatgctgctgagggcgctggagatgaggaggaggccgtgcatgaggccggccctgggggcgcagatggagctgtggccgtgacagatggcggccccttccggcctgagggcgctgggggcctgggggacatgggagacaccaccccagctgagccccccaccccagagggcagccccatcctgaagaggaagctgggcgtggatggagtggaggaggagctgcccccagagcctgagcctgagcctgagcctgagctggagcctgagaaggcagatgctgaaaatggagagaaggaggaggtgcctgagcccaccccagagccccccaagaagcaggccccacccagccccccacccaagaaggaggaggccggcggggagttctggggcgagctggaggtgcagagggtgaagttcctgaactacctgagcaggaacttctacaccctgcgcttcctggccctcttcctggcctttgccatcaacttcatcctgctcttctacaaggtgtctgacagccccccaggagaagatgacatggagggcagcgctgctggagatgtgtctggagctggcagcggcggcagcagcggctggggcctgggcgctggggaggaggccgagggagatgaagatgagaacatggtgtactacttcctggaggagagcacaggctacatggagcccgccctgcgctgcctgagcctgctgcacaccctggtggccttcctgtgcatcatcggctacaactgcctgaaggtgcccctggtgatcttcaagcgggagaaggagctggccaggaagctggagtttgatggcctgtacatcacagagcagccagaagatgatgatgtgaagggccagtgggaccggctggtgctgaacacccccagcttccccagcaactactgggacaagtttgtgaagaggaaggtgctggacaagcacggggacatctacggccgggagagaattgctgagctgctgggcatggacctggccaccctggagatcacagcccacaatgaaaggaagcccaaccccccacctggcctgctgacctggctgatgagcattgatgtgaagtaccagatctggaagtttggagtcatcttcacagacaacagcttcctgtacctgggctggtacatggtgatgagcctgctgggccactacaacaacttcttctttgctgcccacctgctggacatcgccatgggcgtgaagaccctgcggaccatcctgagctctgtgacccacaacgggaagcagctggtgatgacagtgggcctgctggccgtggtggtgtacctgtacacagtggtggccttcaacttcttcaggaagttctacaacaagtcagaagatgaagatgagccagacatgaagtgtgatgacatgatgacctgctacctgttccacatgtatgtgggcgtgcgggccggcggcggcattggagatgaaattgaggaccctgctggagatgaatatgagctgtacagagtggtgtttgacatcaccttcttcttctttgtgattgtcatcctgctggccatcatccagggcctcatcattgatgccttcggggagctgcgggaccagcaggagcaggtgaaggaggacatggagaccaagtgcttcatctgtggcattggaagtgactactttgacaccacccctcatggctttgagacccacaccctggaggagcacaacctggccaactacatgttcttcctgatgtacctgatcaacaaggatgaaacagagcacacaggccaggagagctatgtgtggaagatgtaccaggagcgctgctgggacttcttccctgctggggactgcttcaggaagcagtatgaggaccagctgtcctag

SEQ ID NO: 34036 - DNA, 15102 bp, Artificial Sequence
  derived and/or modified sequence
atgggcgacgccgagggcgaggacgaggtgcagttcctgcggaccgacgatgaggtggtgctccaatgttccgctactgttttaaaagagcagctgaaactgtgtttggcagctgaaggcttcggtaatagactgtgtttcttggagcctacaagtaacgctcagaatgttcctcccgatttggcaatatgttgcttcgtgctggaacagtctctcagtgttagggcactacaggagatgctagctaacacggtggaggcaggcgtcgagagcagccagggtgggggacatcgtacgttactgtatggacacgctatcctgctgagacacgcccatagcagaatgtacttgagttgtctgacgacatcccgcagtatgactgataagctcgcttttgacgtgggtcttcaggaggacgctaccggtgaagcctgttggtggacaatgcaccctgccagtaagcagcgcagcgagggggagaaggtccgtgtgggcgatgacataatcctcgttagtgtgtcctcagagcggtacctgcatctcagtaccgcaagcggtgagttacaagtcgatgcaagctttatgcaaactctttggaacatgaatccaatttgttcacggtgtgaggagggtttcgtgactggggggcatgtgctgagactcttccatggacatatggatgaatgtctgactatctctccagcagattctgatgaccagcgacgcctggtttattacgagggaggcgccgtgtgtacccacgcccgaagcctgtggcggctggagcctctgcgcatctcttggtcaggaagtcatcttagatggggccagcctctcagggttcggcacgtgacaacgggccaatatcttgcacttacagaggatcagggtctggtggtggtcgacgcttctaaggctcataccaaagccacaagcttttgcttccggattagcaaggagaaactcgatgtggcccccaaaagagacgtcgagggaatgggacctcccgaaatcaagtacggagagtcactgtgtttcgtccaacacgtggcttctggtctctggctcacctatgctgcaccagaccccaaagccctgcgcctgggggtgcttaagaaaaaagcaatgctccaccaggagggccacatggacgacgctttatcattgacaaggtgccagcaggaggagagccaggccgctcggatgatccatagcaccaatgggctgtacaaccagtttattaaatccctggattctttttctggcaagcctcgaggcagcggcccaccagcaggcaccgccctgcccattgagggggttatactgtccctccaggacctgatcatttatttcgagcctccaagtgaggacctccagcacgaggagaaacaaagcaagctaagaagcctgaggaaccggcagtccctgtttcaggaagagggaatgctgagcatggtgctcaactgtatagacagactgaatgtgtacactaccgcagcccacttcgccgaattcgctggcgaggaggccgccgagagctggaaagagattgtgaacctgctttatgagctcttggctagcctaataagaggtaacagaagtaattgtgcgctgttctcgaccaacctcgactggctagtgtccaaactagatagactcgaagccagtagcgggattctcgaagtcctgtactgtgtgctcatagaatcgccagaagttctcaatatcattcaggaaaatcacataaagtctataatatcacttctggacaaacacgggcggaaccataaggtgctcgacgtcttatgcagtctgtgcgtttgtaacggcgttgccgtcagatcaaaccaagatcttatcaccgaaaatcttttgcccggtagggagctgctgcttcagacgaatctgatcaactatgtgaccagtatacgcccaaatatcttcgtcggtcgtgcagagggaactacccagtactctaagtggtactttgaggtgatggtggatgaggtgaccccgtttctcacggcccaggccacccatctcagggtcgggtgggctctgacggaaggttacacaccttacccgggagctggcgagggctggggaggcaacggcgttggcgacgatttatacagctacgggttcgatggcctccatctttggaccggtcacgtggcaaggcctgttacctcccccgggcagcatctgctggctccggaagatgtgatttcatgctgtcttgatctgtcagtcccctcaattagttttcgcattaatggctgcccagtccagggagtgttcgaatctttcaacctggatggcctttttttccccgttgtaagcttctccgccggggttaaggtgaggtttcttctgggaggccggcacggagagtttaagttccttcctccgcccggctacgcaccctgccacgaggcagtgctccctcgagagcgactgcatctggaacctatcaaggaataccggcgtgagggcccccgaggtcctcacctggtgggtccatcccgatgtttatcacacacagacttcgtgccatgtcccgtggacacggtgcagatagtcctgcctccacacctagagagaatacgggaaaaactcgcagagaatatccacgaactgtgggctctgaccagaatcgaacagggctggacctacggccccgtgagggacgataacaagcgtcttcacccatgcctggttgacttccattctttgcccgagccagagagaaactacaatctgcaaatgtcaggggagacgcttaaaactcttctcgcattaggctgccacgtagggatggccgatgagaaggccgaagacaatctcaaaaagactaagcttcccaagacatacatgatgtcaaatggttataagcccgctcccctggacctttcacacgtgcgtcttacccctgcgcagaccaccctggtggatcggctggctgaaaacgggcacaacgtttgggcacgagatagggtgggacaggggtggtcctatagtgccgtgcaggacatacctgcgaggcggaaccccagacttgtcccctatcgcctactcgacgaagcgacaaagcgaagcaaccgtgactcgctctgtcaggcggttcggacgctgctgggatatggttacaatatagagcctcctgatcaagagccctcacaagtggaaaaccagagtaggtgcgaccgtgtgcggatcttccgcgccgaaaaaagctatacagttcaaagcgggcgctggtacttcgagttcgaggcagtaacaactggagagatgcgggtggggtgggctcgtcctgagcttcgccctgacgtggagctgggcgccgacgaactggcttatgtgttcaacggacatcggggccagaggtggcacctgggtagtgagccattcggaagaccgtggcagccaggggacgtcgttgggtgcatgattgatctgacagagaataccatcatcttcaccctgaatggcgaagttctgatgtctgatagtggatctgaaactgcctttagggaaatagaaataggcgacggattcctgcccgtgtgttctctgggcccaggtcaggtcggtcacctgaacctggggcaagacgttagctctctgcgattcttcgctatctgtggactacaggaagggtttgagccttttgccattaatatgcagcgccccgtgactacttggttcagcaagggtttgccccagttcgaacccgtacccctcgagcatccccattatgaggtgtcgcgcgttgatggaactgttgacacacctccttgcttgagactcactcatcgaacttggggctcccagaacagccttgtcgagatgttgtttttaagacttagcctcccagtgcagttccatcaacacttccggtgcaccgccggggcaacgccattggcaccaccaggactgcagccccctgccgaagacgaagcgcgtgctgcagagcctgacccagactacgaaaatctgcggcgcagcgccggcgggtggtctgaggccgaaaatgggaaagagggcaccgctaaggagggtgcccccggcggaacaccccaggccgggggcgaggctcagccagcaagagctgagaatgagaaagacgccaccacggaaaaaaataaaaagcgaggtttcttatttaaggccaaaaaagtggcgatgatgacccaacctccagctacacccactctaccaaggctgccccacgatgttgtgcctgctgacaacagagacgaccccgaaatcatcctgaacaccactacatactattacagcgtgagggtgttcgccggacaggagccttcatgcgtctgggccggatgggtgacaccagactatcatcagcatgacatgagctttgacctgtctaaagttagagtggtgacagttactatgggggatgagcagggtaatgtacattcctctttgaaatgctctaactgctatatggtttggggtggcgattttgtctcgcctggccagcaggggagaatttcacatactgacctggtcatagggtgccttgtggacctggccactggcctcatgacgttcacagccaacggcaaggagtcaaacacattttttcaagtagagcctaatacaaaactttttccagctgtcttcgtgctccctacccatcagaacgttatacagtttgaacttggcaagcagaaaaacatcatgccactctctgcagccatgtttcagtctgaaaggaaaaatccggctccccagtgcccaccacggctggagatgcagatgctcatgcccgtttcttggtctcggatgcctaaccacttcctgcaagttgaaacacggagggcaggtgaacgtctgggctgggctgtgcagtgccaagagccactgacaatgatggctctgcacatcccagaggagaaccgctgcatggatatcctggagctctcagagcgtctggacctgcaacgctttcatagccacacactgcggttatatcgcgccgtgtgcgctctgggcaataatagggtagcccacgcgttatgctcgcacgttgatcaggcccaactgctccacgctcttgaggacgcgcaccttccaggtcctttaagggccggctattatgacctgctaatctccatccacctggagtccgcttgccgctcaaggcggtcgatgcttagtgagtacatcgtgccgttgactcccgaaactcgagcaattaccctgtttccccccggaaggtcaacagagaacggacacccgaggcacggtttgccgggagtgggcgtcacaactagcttacgtccgccacaccatttttctcctccctgcttcgtagctgctttgcctgctgcaggagcagctgaagccccagccagattgtcacctgcaataccccttgaagctctccgggacaaggcgctcagaatgctaggggaggccgttcgagatggaggtcagcacgccagggatccggtcggcggatcagttgagtttcagtttgtgccggtgctgaagctagtgtctacactcctggtgatgggcatcttcggtgatgaggacgtgaaacagatcctcaaaatgattgagcctgaggtgtttaccgaagaggaagaggaggaagacgaggaggaagaaggggaagaggaggacgaggaagagaaagaggaggatgaggaagaaacagcacaggagaaagaagatgaggaaaaggaggaggaagaagccgcagaaggagaaaaggaagaagggttggaagagggtctcctccagatgaagctgccagaatccgtgaagcttcagatgtgccacctgctagaatacttctgcgaccaggaactccaacacagggttgagtccctcgcagccttcgccgagagatacgtggataaacttcaggccaaccagcgctctaggtacggactgcttatcaaagcattttcaatgactgctgccgagaccgccaggcgcacacgcgagtttcgctcacccccgcaggaacaaataaacatgctcctgcaatttaaggatggtaccgatgaagaggactgccctctgcctgaggagatcaggcaggatctgttggatttccatcaggacctgctggcccactgcggcatccaactggacggtgaggaggaagaacccgaagaggaaacaacgctggggtcaaggcttatgagccttctggaaaaagttagattggtgaagaaaaaggaggagaaacctgaggaggagaggtctgcagaggagagtaagcccagatctctacaggagctcgtgagccatatggttgtcagatgggcccaagaggactttgttcagagtccagagctggtgcgggccatgttctctttgctgcatagacaatacgatggattgggggaacttctccgtgccctgcctcgagcctataccataagcccttcctcagtagaagacactatgagcctgctggagtgtcttggtcagatccgttctttattaatcgtccagatgggaccacaggaagagaacctgatgatacagtctatcggaaacattatgaataacaaggtgttttaccagcatcctaacctgatgcgtgcccttggaatgcatgagactgtgatggaggtgatggtcaacgttttgggtggtggggaatccaaagagatcagatttccaaaaatggttactagttgctgtcgctttctctgctacttttgcagaattagcaggcagaaccagcggagtatgttcgaccatctctcataccttctggagaattccgggatcggactcgggatgcaaggctccaccccactcgatgtagccgctgcatctgtaattgacaataacgaattagccctggctctgcaggagcaggacctggagaaggtggtctcatatctcgcaggctgtggactccaaagctgcccaatgctagtggccaagggttaccccgatatcgggtggaatccctgtggcggcgagagatacctcgatttcctgagattcgccgtgttcgtgaacggcgagtctgtcgaggaaaacgcaaacgtcgtggtgcgcctgcttatcaggaaacctgagtgtttcggtccagcactgcgtggagagggtgggtcaggcctgctggcagccatcgaagaagcgataaggattagtgaagatccagccagagacggcccgggaatccggagggataggagacgggagcactttggcgaagaacctccggaggaaaatcgggtgcatttgggccacgcgattatgtcgttttacgccgcactcattgaccttttgggcagatgtgcccctgagatgcatttgatccaagctgggaagggggaggcgctccgaatcagagcaatattacgatctctggtgcccttagaggacctggtgggtataatcagcttacccctgcagattcccacacttggaaaagacggcgcgttagtacagcctaagatgtcagcctcattcgtgcctgaccataaggcttcaatggtgctattcctagatagagtgtacggtattgagaaccaggattttctactgcacgtgctggacgtcgggttccttcccgatatgcgggccgctgcttctctggatacggccacattctctacgacagaaatggccttggcacttaaccgctacctctgtctcgcagtgctaccattgattaccaaatgtgccccgctgttcgctggaacggaacacagagccatcatggtcgactcgatgctgcacaccgtctataggctctctagggggagatcactaactaaggcccagcgtgatgtcatagaggactgtctgatgagtctgtgtcggtacatcaggccatccatgctgcagcatcttcttaggcggttggtttttgacgtgccaatccttaacgagttcgcgaaaatgccattaaaactgttgacaaatcactacgaaaggtgctggaaatactattgcttacctaccgggtgggccaattttggggttacctcagaagaagaacttcatcttacacgaaaactcttttggggtatatttgacagtctcgcgcacaaaaaatacgacccagagctttaccggatggccatgccttgcctatgtgcaatcgcaggagcccttcctcctgattacgttgatgctagctatagttccaaagccgaaaaaaaggcgactgtcgatgcagagggaaacttcgacccacgtccagttgagaccctgaatgtaattatccccgaaaagctcgatagcttcatcaacaagtttgccgaatacacacatgagaagtgggcatttgacaagatccagaacaattggtcatacggcgaaaatatagatgaggagctcaaaacgcacccgatgctgaggccctataagacattctccgaaaaggataaagaaatttataggtggccaattaaggagagcctaaaggcgatgatcgcttgggagtggaccatcgagaaggcccgggaaggagaggaagagaaaactgaaaagaagaagactcggaagatctcacagtctgcccagacatatgacccccgtgaaggatataaccctcagccaccggacctgtcagcagtgacactgtcaagagaactgcaggcaatggctgaacagctcgcagagaattaccataatacgtggggtagaaagaaaaagcaggaacttgaagctaaaggtggcggaacacatcccttacttgtaccctacgacactctgacagctaaagagaaagcccgcgatagagagaaggcacaggaacttttaaagttcttgcagatgaacgggtatgccgtgacccggggcctgaaagacatggagttagatagcagttcaatcgaaaagcgcttcgcgttcggcttcctgcagcagttactgcggtggatggatatcagtcaggaatttatcgcccacctggaggctgttgttagttccggccgggttgaaaaatccccgcacgagcaagagatcaagttctttgcaaaaattttactgcccctaataaatcagtacttcacaaaccactgcctgtacttcctgtccaccccagcaaaagtccttggatcggggggtcatgccagcaacaaagaaaaagaaatgatcacttcattattctgcaaattggctgccttggtgcggcaccgcgtctctctgttcgggactgatgctcctgcagtcgtgaactgcctgcacattttggccaggagcctggatgcacgcacggtgatgaaatctgggccagagatcgttaaggcagggctgcgatcgttttttgagagcgcgagcgaggatattgagaaaatggtggaaaacctcagactgggaaaagtatcacaggcacgaacccaggtgaagggagtgggacagaatctcacctacacaacagtggctctcctcccagtgttaaccactctcttccagcacattgcccagcatcagttcggggacgatgtaatcctggatgacgttcaagtgagctgctatagaactctgtgttcaatttattctctgggtactacaaagaacacatatgtggaaaagcttagaccggctctcggcgaatgtctggccaggctggccgcggctatgcctgtagcattcttggagccacaacttaatgagtacaatgcctgctcagtttacaccaccaagagcccccgtgaaagggcaatcctgggcctcccaaattcagtggaagagatgtgccctgatatccccgtgctcgaacggctcatggctgacatcggtgggctagccgagtcaggagctagatacaccgaaatgccacatgtgatagaaattacactgccgatgctttgctcctatctgcctcgttggtgggagaggggcccagaggcccctccatctgccctgccagccggtgcccccccaccttgcacagccgttacaagcgatcacctaaactctctgttggggaatattcttcgaatcatcgtgaataacttgggaatcgacgaagccagttggatgaaaaggctggcagtttttgcccaaccgattgtctctcgagcacgaccggagttgctgcagtctcacttcatcccgactatcggcaggcttaggaaaagggctggtaaggtggtctccgaagaagaacaactgaggctcgaagcaaaagcagaggcacaagagggtgagcttcttgtacgcgatgagttctcggtcctctgccgcgatctttacgccctgtatccactcctgattcggtatgtcgataacaaccgcgcacagtggctgacagagccaaacccaagtgccgaagagttgttccgcatggtaggcgagatttttatttactggtccaaatcccacaattttaaacgggaggaacaaaatttcgtggtgcaaaatgaaattaataatatgagctttctaactgcggataataagtctaaaatggccaagagcgggggttccgatcaagaacgcacaaagaaaaagcgccgcggtgatagatattccgtccaaaccagtctgattgttgctaccctcaagaagatgctgcctataggtctcaacatgtgcgcacccactgaccaggacctcatcactctggcgaaaacaagatacgcactcaaggacactgacgaagaggttagagaattccttcataataacttgcacctgcaggggaaagtagagggaagtcccagcctaagatggcaaatggccctctatcggggtgtgcccggcagagaagaggatgctgatgaccctgagaagattgtcaggagggtacaggaagtcagcgcagtcctgtactatttggaccagaccgaacatccctataagtctaaaaaggccgtctggcacaagcttcttagcaagcaaaggcgccgcgctgtcgtagcatgctttcgaatgacaccactatataatctccctacgcaccgggcctgcaacatgtttctggagagttacaaggcagcctggattcttacagaagaccattcatttgaagaccggatgatcgacgacctgtccaaggccggagaacaggaggaggaggaggaggaggtagaggagaagaaaccagaccctctccaccagctcgtgcttcattttagtcgtaccgctttgactgaaaagagcaaactagatgaagattacctctacatggcttatgctgacattatggcaaagtcctgccatctcgaggagggcggtgagaacggggaagctgaggaggaggtggaagtgagcttcgaggagaaacagatggagaagcagagactgctgtatcagcaagcccgcctgcacacaagaggagctgctgaaatggtcctgcaaatgatatcagcctgcaaaggagagacgggcgctatggtttctagcactctcaaactggggatcagtattctcaatggaggaaatgccgaggtccaacagaagatgctcgactaccttaaggataaaaaggaggtgggattttttcagtctatccaggccctgatgcagacttgtagcgtgcttgatttgaacgcatttgagaggcaaaataaagcagagggactgggaatggtgaatgaggacgggacagtgataaaccgccaaaacggagagaaagttatggccgacgacgaattcacccaagatctcttccgatttctacagctcctgtgtgagggccataataatgacttccagaattaccttcggactcagacaggcaacactactactataaatatcattatttgcactgtggattaccttctgagactgcaggaaagcatctcggacttttattggtactatagtggtaaagacgtgatcgaggagcagggaaagcgtaatttctccaaagctatgagcgtggccaaacaggtgttcaacagccttacagaatacattcagggaccttgcaccggcaaccagcagtccctggcacattcacgcctatgggacgccgttgtgggattcctccatgttttcgcccacatgatgatgaaactcgcccaggattcatcacagatagaactgcttaaggagctcctggaccttcagaaggacatggtagtgatgctacttagtttgctggaaggcaatgtagtgaacggaatgatcgcgcgccaaatggtggacatgttagttgaatcatcatctaacgtagagatgatcctgaaattcttcgatatgttcttaaaactgaaggacatagtgggtagcgaagcctttcaggattacgtaacagacccacgcggccttattagcaagaaagactttcagaaagcaatggactcccaaaagcagttcagtgggccagagatccaattcctgctgtcatgctctgaagcagatgaaaatgagatgatcaattgcgaagagttcgccaatcgtttccaggaacctgctcgtgatatcggtttcaacgtggccgtcctccttacaaacctatccgaacacgtgccgcatgacccacgcctgcataactttctcgagttagcagagagcatcctcgagtactttagaccatacctgggacggattgagattatgggggcatcccggcgtattgaacggatatattttgaaatttcagaaactaatcgggcccagtgggagatgccacaggtcaaagagagcaagcgccagtttatcttcgacgtagtgaatgaaggcggcgaggccgaaaaaatggaactttttgtgtccttctgtgaggacaccatattcgagatgcagattgccgcccagatctcagagcctgagggagagcccgagacagatgaggacgaaggtgccggcgcggccgaagcaggagctgagggtgctgaggaaggcgctgccggactggagggtaccgctgcaacagcagcagcaggcgcaacagccagggtcgtggcagccgcaggcagggctcttcggggcctatcataccggagcctccggcgccgtgtacgtcgcttacggcgcctcacagcaagggaggccgccacagcagtggcggccttgctctgggctgcagttaccagagccggcgccgcgggtgctggagcagcagctggcgcgctgggcctgttgtgggggagtctgttcggcgggggacttgtcgagggagctaagaaggtgaccgtcaccgagctgctggcaggcatgcccgatccaactagcgatgaggtgcacggggagcagcctgccgggcctgggggagatgccgacggtgaaggcgcatccgaaggggccggcgatgccgccgagggcgccggggatgaagaggaggccgtccacgaagccgggccaggaggggctgacggggctgtggctgtgactgatgggggacccttccgccctgaaggggccggcggcctcggagatatgggagatactacccccgccgaaccccccacccccgagggatcaccaatactaaaaaggaagctcggcgtggacggcgttgaggaggaattgcctcctgagcctgagcctgagcccgaacccgaactggagcctgagaaggccgacgcagaaaacggtgaaaaggaggaagtgcccgagcctacgcctgagccccccaagaagcaagcccccccatcaccaccccctaagaaggaggaagcaggtggagagttctggggagagcttgaggtacagcgggtgaagtttcttaactacctctccagaaatttttacaccctgaggttcctggcgctgttcctagctttcgccattaacttcattttattattctacaaggtgtccgactccccaccaggtgaggacgatatggaaggcagcgcagccggcgacgtgagcggcgcgggatccggcgggagtagtggctggggcttaggagcaggagaagaggcggagggggacgaggatgaaaatatggtatattactttctggaagagagcactggttacatggaaccagcattaaggtgtctgagtttgttgcacactctcgttgcgttcctctgcataatcggctacaactgtcttaaggtgcctctggtgatcttcaagcgcgaaaaagagctggcaagaaagcttgaattcgacggcctctatatcacggagcagcccgaggatgatgacgtcaagggccagtgggataggctggtgctgaataccccatcctttccaagcaattactgggacaaattcgttaagcggaaagtgctcgacaagcacggagatatttacggtcgggagcgcatcgctgagcttcttgggatggatcttgccacgttagagatcactgcccataacgaaaggaaaccaaaccctccacccggtttactcacctggttgatgagcatagatgtcaagtatcaaatttggaagtttggtgtcattttcacagataacagtttcctgtacctgggttggtacatggtcatgagcttactcggacactacaataatttttttttcgccgcgcacctgttggacattgcaatgggcgtgaagacattgagaactatcctttcgtctgtgacccacaatggtaaacagctggtgatgaccgttgggttactcgccgttgtcgtctacctttataccgtggtggcctttaacttcttccgtaaattttataataaatcggaagatgaagacgagccagatatgaagtgcgatgacatgatgacgtgttatcttttccatatgtatgtaggcgtgagagccggtgggggcattggggacgagatcgaggacccagcgggtgacgaatatgagttatatagggtcgtgtttgacattacttttttcttttttgtgatcgtgatcctgctggcaatcattcaaggactcattattgacgcgttcggagaacttcgcgatcagcaggaacaggtcaaggaggacatggaaactaagtgctttatctgtgggattgggtctgattacttcgacactacaccacatggcttcgagacacacacattggaagaacacaatcttgcaaactatatgtttttccttatgtatctcataaacaaggacgagactgagcataccggtcaagaaagctatgtgtggaagatgtatcaggagaggtgctgggattttttccctgccggtgactgctttcgcaagcagtacgaggaccagctgtcatag

SEQ ID NO: 34037 - DNA, 15102 bp, Artificial Sequence
  derived and/or modified sequence
atgggggacgctgagggcgaggacgaggtccaatttctgaggactgatgacgaggtggtgttgcagtgttccgcaaccgtgttgaaggagcagctcaagttgtgcctggcagcggaaggcttcgggaaccggctgtgctttctggagcccaccagcaacgctcagaacgtgcctccagacctggcaatctgctgtttcgtgctggagcagtctctgtcagtgagggccctccaagagatgttagctaatacggtcgaggcaggcgtggaaagttcccaaggcggtgggcatcgcactctcttgtacgggcacgctatactgctacgacatgcacactcccgaatgtacctgtcctgtttgaccacctccagatcaatgacagataagctggctttcgacgtgggcctgcaagaagatgccacaggcgaagcttgctggtggacaatgcaccctgctagtaaacagcgatccgagggagagaaagttagggtcggcgacgacattattcttgtatcagtatcttcggagcggtatctccatctttctaccgccagcggcgagctccaagtggacgcttccttcatgcagaccctctggaatatgaatccgatctgttcaagatgtgaggaaggttttgtaacaggcggtcatgtgctgcgtctatttcacggccatatggatgagtgcttgaccataagccccgctgattccgatgaccagagaaggctcgtctactatgagggaggtgcagtctgtacccacgctcgcagcctttggcggctagaacctctgcgtataagttggtctggaagtcatctcagatggggacagccactaagagtacgccacgtcaccacaggccagtacctggccctgacagaagaccagggcctcgtggtggtggacgcatctaaggctcacactaaagccacgagtttttgttttaggatctctaaagagaaattagacgtagcacccaagcgcgatgttgagggcatgggcccaccggaaattaaatacggtgaatccctgtgctttgtacagcatgtcgcatccgggctgtggctgacatacgcagcccctgaccctaaagctttgcggttgggcgtcctgaagaaaaaggccatgctgcatcaggaagggcacatggatgacgccctctcactgaccaggtgccagcaggaagagtcacaggccgcacgcatgattcactctacgaacggcttatataaccagttcattaagagcttagactcattcagtggaaagccacgaggatccgggcctcctgctggcaccgccctgcctattgaaggggtgatcctgagcctacaggacctgatcatctactttgagcccccttccgaggacctgcagcacgaggagaagcagagcaaattacggtccctacgcaaccgtcagtctttgtttcaagaggagggaatgctttcaatggtcctcaattgcatcgatcgattaaatgtctatacaactgccgcacacttcgcagagttcgctggagaggaggccgcagagagctggaaggagattgtaaacttgctctatgagcttctggcctccttaatacggggaaatcggtcaaattgtgctttgttcagcacaaacctcgactggctcgttagcaagcttgatagactggaagcatcttccggtatcctggaggtattgtactgtgtgctgatagagagccctgaggtgctgaatattatccaggagaaccacatcaaatctattatttccttgcttgataagcacgggaggaaccataaagtcttggacgtactctgctcactgtgcgtgtgcaatggagtggctgtgcggagtaatcaggaccttatcaccgagaacttgctgcctgggagggagctgctactgcagacaaatttaattaactatgttaccagcattcgcccaaacattttcgtcggaagggctgaaggtaccacccagtacagtaagtggtatttcgaagtcatggttgatgaggtgactcccttcttaactgctcaggcaactcaccttagagttggttgggctctgactgagggatataccccttatccaggggctggggagggttgggggggaaacggagtcggggacgacttatactcgtacggattcgatgggctgcatctctggacgggacatgtggccaggcctgtgacctcccccggtcagcacctgcttgccccagaggatgttatcagttgctgtcttgatctatccgttcccagcataagcttcaggatcaacggatgtccggtgcagggtgtgtttgagagcttcaacctcgatggcctattttttccagtggtatccttcagcgccggtgtgaaggtgcgctttctcctgggaggaagacacggagaattcaagttcttgccaccccctggttacgccccatgccacgaagcagtcctgccaagagaacggctgcacttggagcctattaaggaatatcgccgagaaggccctcgaggtccacacctggtaggtccctctaggtgtctgtcgcacactgattttgtcccatgccccgtggacaccgtgcaaatcgtccttcccccacacctggaacgcattcgcgaaaagcttgcagagaatatccatgagctgtgggccttaaccaggatagaacagggctggacatacggccctgtgagggatgacaataaaagattgcatccatgcctggtggacttccactcccttccagaaccggaacgcaactataacctccaaatgtctggtgagactctgaagaccctcctcgctctaggatgtcacgtggggatggcggatgagaaggcagaggacaacctgaaaaagaccaaacttcctaaaacatatatgatgagcaacggatataaacccgctcccctggatctgtctcacgtgagacttactccagcacaaactacactcgtggacaggcttgccgagaacggccataacgtgtgggccagggatcgggtaggacaagggtggtcttactcggccgtccaagacattcctgccagaaggaatcccagactcgtcccctatcgcctgctggatgaggccactaaacggtcgaacagagattcactgtgtcaggcagtcagaactttgctcggctatgggtacaacatagagcccccagatcaggagccctctcaggtcgagaaccagtcccgctgcgacagagtccgcatctttcgcgcagaaaagagttataccgtgcagtccggccgatggtacttcgaatttgaggcagtcacaacaggagaaatgcgagtcggatgggcgcgtccggagctgaggcctgacgtcgagctgggcgctgatgagcttgcatacgtcttcaatggacatagaggccagcggtggcaccttggctccgaaccgtttgggagaccgtggcagccaggtgatgttgttggctgcatgattgacctgacggagaatacaataatctttaccttaaatggtgaggttctgatgtcagacagcggcagtgagaccgcattccgcgaaatcgagataggcgatggcttccttcctgtatgctccctcggacctggacaggtcgggcatctaaaccttgggcaggacgtgtctagcttacggttctttgccatatgtggcctgcaggagggtttcgaaccatttgctatcaacatgcagaggccggtgacaacctggttctctaaggggttaccccaatttgagcccgtgcctcttgagcatcctcattacgaagtgagcagagtggatggcacggtcgacaccccaccttgcctacgattaacgcaccgcacttggggctctcagaatagcttggtcgaaatgctgtttctgcggctttcactgcctgttcagtttcatcagcacttccggtgtactgctggagctactcccctggccccacccggactgcagcccccagcagaggatgaggcgagggccgctgagccagaccccgactatgaaaaccttcgccgtagcgccggaggctggtctgaggcagaaaacgggaaagagggcacagccaaggagggcgctcctggcggaacacctcaagccggaggcgaggcccagccggctcgagcagaaaacgagaaggatgccaccacagaaaagaataagaaaaggggtttcctttttaaagccaagaaggtcgccatgatgacgcagcctccagcaaccccaaccttgcctcgactgccccatgacgtggttccagccgataatcgggatgatccagagattatactgaataccacaacatactattacagtgttcgggtgtttgcaggacaggagcccagttgcgtgtgggctggctgggtgacacccgattatcaccaacacgatatgtcatttgatctgtccaaggtgcgcgtggtaactgtcacaatgggtgatgaacaaggtaatgtgcacagctccctgaagtgctcaaattgctacatggtttggggaggagacttcgtgagccctgggcagcagggcaggatctcacatacagatctcgtcattggttgccttgtggatttggccaccggcctgatgacctttacagccaacggcaaggaaagcaacacgttcttccaggttgagccaaacaccaaactgttccccgcagtgttcgtgctgccgacccaccagaacgtgatccagttcgagctggggaagcagaagaatataatgcccttgtcagccgcaatgtttcagtccgagagaaaaaatcctgcccctcagtgtccccctagacttgaaatgcaaatgctcatgcctgtgtcctggtcccgaatgccaaaccacttccttcaggtggagactcggagggctggagagaggctgggttgggctgtgcagtgccaagagcctctcaccatgatggccttgcatatacccgaggagaatcgttgcatggacatcttagagctctcagagagactggacctgcagcgtttccattcccacacactgagattataccgggcagtctgcgcacttggcaacaatagggtcgcccacgcactttgtagccatgtagatcaagcccagctgctccacgctctggaggacgcccacctccccggacccctgcgggctggatactacgatttactgatttcaatccatctggaatcagcttgcagaagtcgtcggagcatgttgtctgagtacattgtgcccctcactccagagacacgcgctataacactctttccaccaggcaggtccaccgagaatggacaccccaggcacggtctgcccggtgtaggggtcacaaccagtctccggcctccccaccatttttcacctccatgctttgtggctgcactgccagccgctggggctgcagaagcccctgcgagacttagcccggcaattccactggaggccctgagagacaaagctctccggatgctgggcgaagctgtgcgggacggtggtcaacatgcacgcgatccggttggaggctcagtggaattccagtttgtacctgtcctgaagctcgtgagtactctgcttgtcatgggaatctttggggacgaggacgtgaagcagatcctgaagatgatcgaacccgaggtgtttacagaggaggaagaggaggaagacgaggaggaagaaggcgaggaagaggacgaggaagagaaggaggaagacgaagaggaaactgcccaggagaaggaggacgaagagaaggaggaagaagaggcggctgagggggagaaggaagaagggctggaggaaggtctcctgcaaatgaagcttccagaatccgtcaagctgcagatgtgccacttgctcgaatatttttgcgaccaggagctccagcaccgcgttgagtctctcgcagcattcgccgagaggtacgtggacaaactgcaggccaaccaaaggtcacggtacgggctcctgataaaagctttcagcatgaccgccgctgaaacagctaggaggaccagagagttcagatcccctccccaggagcagatcaatatgctcctccaatttaaggacggaaccgacgaggaggattgtcctctgcccgaggaaattcgacaggatctgctggactttcaccaggatctgctcgcccattgtggaatccagctggacggagaggaagaagagcccgaagaggagactactctgggcagtaggcttatgtctctgctggaaaaagtgaggctggtgaaaaagaaggaggaaaaacccgaggaggagaggtctgctgaggagagcaaacccaggtctttgcaggagctagttagtcacatggttgtgcgctgggcgcaggaggacttcgttcaatctcctgaactcgtccgcgctatgttctccctgctacaccgccagtatgatggcctgggcgagcttcttagggccctcccacgcgcttataccatctccccatcctctgtcgaggacactatgagcctgctggagtgcttagggcagatccgctccctcctgatagttcaaatggggcctcaggaggagaacctgatgatccagtcaatcggaaacataatgaacaataaagtcttttaccagcacccaaacttaatgcgggctctcgggatgcatgaaacagttatggaggtgatggtgaacgttctaggagggggagagtcaaaagaaataagatttccgaagatggtgacttcatgttgtagattcctctgctatttctgccgaatatctcggcagaaccagcggtctatgttcgaccacttatcttaccttcttgaaaactctggaatcgggttggggatgcaagggagtacgcccctagacgtggccgctgcctccgtgatcgataacaatgagctcgcgctggcactgcaagagcaggatttggagaaagtggtctcatatcttgcaggatgcggtctgcagagttgccccatgttggttgcaaagggctacccagatattgggtggaacccttgtgggggagaaaggtatttggactttttgcgcttcgcagtgtttgtaaatggtgagtctgtggaagagaatgcaaacgtcgtagtgaggctgcttattcggaaacctgagtgtttcggaccggcacttcgtggagaaggcggtagtgggctgcttgctgccattgaggaagccattaggatttccgaagaccccgctagagacgggcctggtattcggcgtgatcggagaagggagcatttcggtgaagaaccacctgaagaaaacagggtgcacctgggtcatgcgattatgtccttttacgccgcactcattgatcttttagggaggtgtgcacccgagatgcatcttatccaggctggaaagggggaggcccttcgcatccgcgctattctgcggagtctggtacctctggaggatttagttggcatcatctccctgccgctgcagatccctactcttggcaaagacggagcattagtgcaaccgaagatgtcagccagcttcgtacccgatcataaagcgtctatggtgctgttcctggatcgcgtgtacggcatcgagaaccaggacttcttgctgcacgtactggacgttggattcctgccagacatgagggcagcggcttccttagatacagccacgtttagtacaaccgaaatggcattggcgctaaacaggtatctgtgcttggcagtactgcctctgatcactaaatgcgcccctctgtttgccggaactgaacaccgtgccattatggtggattcgatgttgcacaccgtctatagactgagcaggggacggagcttgaccaaggctcaaagagatgttatcgaggattgcttgatgtcactgtgcagatacatcaggccctcaatgctgcagcacctcctccgcaggctggtgttcgacgttccaattttgaacgaattcgcgaagatgcccctgaagttgttgactaaccattacgaacgctgttggaagtactattgtttaccaacagggtgggctaacttcggcgtgacttccgaagaagagttgcacctcactagaaaactattctggggcatttttgattcattggcccataagaagtacgaccctgaactgtaccgaatggccatgccttgcctgtgtgccattgcaggcgctctacctcctgattatgtcgacgcttcttattcatcaaaagccgagaaaaaagccactgtggatgcagagggtaactttgatcctaggccggttgagacactgaacgtcatcatcccggagaagctcgatagttttattaacaagtttgccgaatacacgcacgagaaatgggcattcgacaagatacagaataattggtcctacggtgagaatatcgacgaggagctcaagacacatccgatgctgcgcccttacaaaaccttctccgaaaaagacaaagagatctaccgatggccgatcaaggagtccctgaaggctatgatcgcatgggagtggaccattgagaaggctcgagagggagaagaagaaaagaccgagaaaaagaagacacgcaagatcagccagtctgctcagacctatgatccgagggaaggatacaacccccagccacctgacctgagcgccgtcacgcttagcagagagttgcaggcgatggctgaacaattggctgagaattaccacaatacatggggcagaaaaaaaaagcaggaactggaagcaaagggaggcggaacccaccccctgctagtcccctacgatactttgacagccaaggagaaagccagggaccgcgaaaaggcccaggagctgctgaaattccttcagatgaacgggtatgctgtgacccggggattgaaagatatggagctggactccagcagcatcgagaagagattcgcatttgggtttttacaacagctgctgcgttggatggatattagccaggagtttatagcccaccttgaagcggttgtttcttccgggcgagtagagaagagccctcacgaacaagagatcaagttttttgccaaaatattactgccattgataaatcagtactttactaaccattgtctgtacttcctttcaaccccggcaaaagtcctgggcagcggcggacacgcctcaaacaaggaaaaggaaatgatcacctccctgttctgcaagcttgcagctcttgtgcggcaccgggtgtccctttttggcacagacgccccagctgtagtgaactgccttcacatccttgctaggagtctggacgccaggacggtgatgaagagtggcccagaaatcgtgaaggctgggttacggagcttctttgagagtgcgtccgaagacatcgaaaagatggtagagaacttgcgattgggcaaggtttcccaggcaagaacccaagtgaaaggggtcggacaaaacctcacatatactaccgtagcactgctgccagtgctcaccactcttttccagcacatcgctcaacatcagttcggagacgacgtcattctagatgacgtacaggtaagttgttaccgaactctttgttctatctactctctgggtaccacaaaaaacacatacgttgagaaattaagaccagcccttggtgagtgtctggcccgtcttgccgcagctatgcccgttgctttcctcgagcctcagctcaacgaatacaacgcttgttcagtctatacgacgaagtccccacgagagcgggcaatcctcggactgccgaacagcgtcgaagagatgtgtccggacatacctgtgctggagcgattgatggcggacatcggcggattggccgagtctggggcacgatacactgaaatgcctcacgtgattgagattacgctgcccatgctctgcagctacctgcccagatggtgggagagaggcccagaagctccgccaagcgccctccctgctggagctcctccaccctgcaccgccgtgacgtccgaccacttgaattccttactcggtaatatcttgcgaattattgtcaataacctcggtatcgacgaggcgtcttggatgaaaaggcttgcagtgttcgctcagccaatcgtcagtcgtgccaggcctgaactcctgcaaagccattttatccctaccatcgggagattgagaaaaagggcgggaaaagtagtgagtgaagaagaacagttgcggctcgaggcaaaagctgaagcccaggaaggcgagttgctcgtcagggatgagttctcagtgctctgcagggacctgtacgcattatatccacttctgatccgttacgtagacaataatagggctcagtggctgacggagcctaacccatctgccgaagagttatttaggatggttggcgagatctttatctattggagcaaatcacacaattttaagcgggaggagcagaatttcgtcgtccaaaatgaaatcaacaacatgtcattccttacggccgacaacaagtctaaaatggcaaaatcagggggatccgatcaggagagaactaaaaaaaagcgcagaggtgatagatattccgtccagacaagtctgatagttgctaccctcaagaaaatgctgccaattgggctaaatatgtgtgcgccaacagaccaggatctcataaccctcgctaagaccagatacgccttaaaggacacagacgaggaggtgagagagttcctacacaacaatctgcacctccagggcaaggttgagggatccccctctctgcgctggcaaatggccctgtatcggggtgtccctgggagagaagaagacgcagacgatcctgagaaaatagttagaagggtccaggaagtgtccgcggtgctttactatttggaccaaaccgaacatccttataaatctaagaaagctgtgtggcacaagctcctgtctaaacagagacgacgggcagtagttgcgtgctttagaatgacacctctgtacaatctccccactcatagggcatgtaacatgttcctggaatcatataaagctgcatggattctgacagaagaccattcatttgaggaccgcatgattgatgatctctctaaggccggagagcaggaggaggaggaagaggaagtcgaggagaaaaaacctgaccccctccaccagcttgtactgcacttctccagaactgcgctgaccgaaaagtccaaattggatgaggactacctctatatggcctatgctgatattatggctaaaagctgtcacctagaggaagggggagagaacggagaggcagaggaagaggtcgaagtgtctttcgaagagaagcagatggaaaaacagcggttattgtatcagcaggctagattacatacacggggtgccgctgaaatggtattacagatgatttcagcctgtaagggggagaccggagccatggtatcatcaacacttaaactgggcatctctattcttaacggtggtaatgccgaggttcaacagaagatgctcgactatctgaaagataagaaggaagtaggatttttccagtcaatccaagcgctgatgcagacatgctctgtgctcgacctcaacgcttttgaacgacagaacaaggcagagggcttaggcatggtgaacgaagacgggaccgtaattaatcgacagaacggagaaaaagtgatggctgacgatgaattcacacaggacctgtttcggtttctacagttattatgcgaggggcacaacaacgattttcagaactacctccgcactcagacaggaaatacgaccaccatcaatatcattatttgcacggtggattacctgcttagattacaggaaagtatatcggacttctattggtactacagcggcaaagacgtcattgaagaacaagggaaacgaaatttttccaaagccatgtctgttgcgaagcaagtgttcaacagcctcactgagtacatccagggcccatgcactggcaaccagcagagcctagctcattctagattgtgggatgctgtggtgggctttctgcatgttttcgcccacatgatgatgaagctcgctcaggattcaagccaaattgaacttctgaaagagttgctggacctgcagaaggatatggtggtgatgttgcttagcctcttggaaggaaatgtggtgaacggtatgatcgctcggcagatggtagacatgctggttgagtcttctagcaacgtggaaatgatccttaaattctttgatatgttcctaaaactgaaggatatagttggctccgaggctttccaggattatgtgacagatcccagaggcttgatatcgaaaaaagattttcagaaggctatggatagccagaagcagttcagcgggccagagatccagtttctgctaagttgttccgaggccgacgagaatgaaatgataaattgcgaggagtttgcaaaccggttccaggagcctgccagggatattggtttcaatgtcgccgttctactgaccaacctgagcgaacatgttcctcatgaccctcggttacacaatttcttagagctggcagaaagtattctcgagtactttaggccctatctgggcagaatcgaaataatgggggcttcacgccgaatcgaacgaatttactttgagatttccgagactaatagagcacagtgggaaatgcctcaggtgaaggagtccaaaagacagttcatttttgacgtcgtcaatgaggggggtgaagcagagaaaatggaactctttgtgagtttctgcgaggacacaattttcgagatgcagatagccgcacagatcagcgaacccgagggggaacctgagaccgatgaagacgaaggagcaggggctgccgaggccggagccgagggtgccgaagaaggagcagccggactggagggcaccgcagcaaccgcagcagctggtgctacagcgagggtggtagccgctgccggtcgcgctctaagaggcctgtcgtaccggagtttacggaggagagtacgcagactgcgacggcttaccgccagagaggccgctacagccgttgcagccttactttgggcagctgtgaccagggccggagcagccggtgctggtgcagccgctggcgctctggggctgctatggggttccctttttggtggaggactagtggagggcgctaaaaaagtaaccgtcaccgaactacttgccggaatgcctgatcctacctcagacgaggtgcacggagagcaacccgctgggccaggcggagatgccgacggcgaaggggcaagtgagggagccggtgatgccgctgagggcgcaggtgacgaagaggaagctgttcacgaggcaggccctggtggtgccgacggcgctgtcgcagtgactgatgggggacccttcaggcccgagggagctggcggactcggagatatgggcgatacgacccccgcagagcctccaacccccgagggcagtcccatcctcaagcgaaagctcggtgtggatggggtggaagaggaactgcccccagagccagagccagagcccgaaccagaactcgaacctgagaaggccgacgcggaaaatggcgagaaggaagaagtaccagaacccacaccggagccgcctaagaagcaggctccccctagcccaccaccaaagaaagaagaggctggaggggaattctggggggaacttgaggtacagcgggttaagttcctcaattatctgagcagaaacttttacacacttcgatttctagctctgtttcttgcatttgccatcaatttcatcctactattctacaaggtgagtgattcgcctcctggcgaagacgacatggaaggctctgctgccggtgatgtgtccggggcaggttctggcggatcgtccggatggggcctgggtgctggcgaagaggctgagggtgacgaggacgaaaatatggtgtactatttccttgaagagtctacaggatacatggaaccagctcttcgctgcctgtccttgctacacacgttggttgccttcctttgtattatcggatacaactgtttgaaggttcccctcgtgatttttaagagagaaaaggagctcgcgcgaaagttagagttcgatggtctgtatattaccgaacaacctgaggacgatgacgtaaagggccagtgggacaggctagtgttgaacactccaagcttccctagcaattattgggacaaattcgtgaaaagaaaggtactcgacaaacatggtgacatatatggccgtgagcgcatagccgagcttctcggcatggacctagccaccctggaaattactgctcataacgagcgaaagcctaacccgcctccgggacttctgacgtggctgatgtcgatcgacgtcaagtaccagatttggaaatttggcgtgatcttcaccgacaattcctttctgtatcttggttggtatatggtcatgagcctccttggacattacaacaatttcttctttgcggcacatcttctggacatcgctatgggtgtgaagaccctgaggaccatattgagttccgtcacgcacaatggcaaacagctggtgatgactgtcggcctgctggcagtggtggtgtatctgtacacagtggtcgcattcaacttctttcgaaaattttataacaaaagtgaggatgaagacgagccggatatgaagtgcgacgatatgatgacttgctatctgttccacatgtatgtcggcgtaagggccggagggggaatcggcgatgagattgaggaccctgccggtgatgaatacgagctctaccgagtggtattcgatatcacattcttcttcttcgtgattgttatcttgctagccatcatccaggggctgattatagatgctttcggcgagctgcgcgatcagcaggagcaggtgaaggaggatatggagacaaaatgcttcatatgcggcattgggtcagattactttgataccacaccccatggcttcgagactcatactctcgaggaacataatctcgctaattatatgttttttctcatgtatcttatcaacaaggatgaaacagagcatacaggccaggagagttacgtgtggaagatgtatcaggagcgctgctgggacttctttcccgctggtgattgcttcaggaaacagtacgaggaccagctgtcataa

SEQ ID NO: 34038 - DNA, 15376 bp, Artificial Sequence
  derived and/or modified sequence
tctacctcgcgggtgcctctggtgtctccagaggtctccgaccccagcccgcccccagccctcccgcccagcccgcagccccctccctctgttccccgacctcagaccctgggcttccgacctcgacatcatgggtgacgcagaaggcgaagacgaggtccagttcctgcggacggacgatgaggtggtcctgcagtgcagcgctaccgtgctcaaggagcagctcaagctctgcctggccgccgagggcttcggcaaccgcctgtgcttcctggagcccactagcaacgcgcagaatgtgccccccgatctggccatctgttgcttcgtcctggagcagtccctgtctgtgcgagccctgcaggagatgctggctaacacggtggaggctggcgtggagtcatcccagggcgggggacacaggacgctcctgtatggccatgccatcctgctccggcatgcacacagccgcatgtatctgagctgcctcaccacctcccgctccatgactgacaagctggccttcgatgtgggactgcaggaggacgcaacaggagaggcttgctggtggaccatgcacccagcctccaagcagaggtctgaaggagaaaaggtccgcgttggggatgacatcatccttgtcagtgtctcctccgagcgctacctgcacctgtcgaccgccagtggggagctccaggttgacgcttccttcatgcagacactatggaacatgaaccccatctgctcccgctgcgaagagggcttcgtgacgggaggtcacgtcctccgcctctttcatggacatatggatgagtgtctgaccatttcccctgctgacagtgatgaccagcgcagacttgtctactatgaggggggagctgtgtgcactcatgcccgctccctctggaggctggagccactgagaatcagctggagtgggagccacctgcgctggggccagccactccgagtccggcatgtcactaccgggcagtacctagcgctcaccgaggaccagggcctggtggtggttgacgccagcaaggctcacaccaaggctacctccttctgcttccgcatctccaaggagaagctggatgtggcccccaagcgggatgtggagggcatgggcccccctgagatcaagtacggggagtcactgtgcttcgtgcagcatgtggcctcaggactgtggctcacctatgctgctccagaccccaaggccctgcggctcggcgtgctcaagaagaaggccatgctgcaccaggagggccacatggacgacgcactgtcgctgacccgctgccagcaggaggagtcccaggccgcccgcatgatccacagcaccaatggcctatacaaccagttcatcaagagcctggacagcttcagcgggaagccacggggctcggggccacccgctggcacggcgctgcccatcgagggcgttatcctgagcctgcaggacctcatcatctacttcgagcctccctccgaggacttgcagcacgaggagaagcagagcaagctgcgaagcctgcgcaaccgccagagcctcttccaggaggaggggatgctctccatggtcctgaattgcatagaccgcctaaatgtctacaccactgctgcccactttgctgagtttgcaggggaggaggcagccgagtcctggaaagagattgtgaatcttctctatgaactcctagcttctctaatccgtggcaatcgtagcaactgtgccctcttctccacaaacttggactggctggtcagcaagctggatcggctggaggcctcgtctggcatcctggaggtcctgtactgtgtcctcattgagagtccagaggttctgaacatcatccaggagaatcacatcaagtccatcatctccctcctggacaagcatgggaggaaccacaaggtcctggacgtgctatgctccctgtgtgtgtgtaatggtgtggctgtacgctccaaccaagatcttattactgagaacttgctgcctggccgtgagcttctgctgcagacaaacctcatcaactatgtcaccagcatccgccccaacatctttgtgggccgagcggaaggcaccacgcagtacagcaaatggtactttgaggtgatggtggacgaggtgactccatttctgacagctcaggccacccacttgcgggtgggctgggccctcaccgagggctacaccccctaccctggggccggcgagggctggggcggcaacggggtcggcgatgacctctattcctacggctttgatggactgcatctctggacaggacacgtggcacgcccagtgacttccccagggcagcacctcctggcccctgaagacgtgatcagctgctgcctggacctcagcgtgccgtccatctccttccgcatcaacggctgccccgtgcagggtgtctttgagtccttcaacctggacgggctcttcttccctgttgtcagcttctcggctggtgtcaaggtgcggttcctccttggtggccgccatggtgaattcaagttcctgcccccacctggctatgctccatgccatgaggctgtgctccctcgagagcgactccatcttgaacccatcaaggagtatcgacgggaggggccccgggggcctcacctggtgggccccagtcgctgcctctcacacaccgacttcgtgccctgccctgtggacactgtccagattgtcctgccgccccatctggagcgcattcgggagaagctggcggagaacatccacgagctctgggcgctaacccgcatcgagcagggctggacctacggcccggttcgggatgacaacaagaggctgcacccgtgtcttgtggacttccacagccttccagagcctgagaggaactacaacctgcagatgtctggggagacgctcaagactctgctggctctgggctgccacgtgggcatggcggatgagaaggcggaggacaacctgaagaagacaaaactccccaagacgtatatgatgagcaatgggtacaagccggctccgctggacctgagccacgtgcggctgacgccggcgcagacgacactggtggaccgtctggcagaaaatgggcacaacgtgtgggcccgagaccgcgtgggccagggctggagctacagcgcagtgcaggacatcccagcgcgccgaaaccctcggctggtgccctaccgcctgctggatgaagccaccaagcgcagcaaccgggacagcctctgccaggccgtgcgcaccctcctgggctacggctacaacatcgagcctcctgaccaggagcccagtcaggtggagaaccagtctcgttgtgaccgggtgcgcatcttccgggcagagaaatcctatacagtgcagagcggccgctggtacttcgagtttgaagcagtcaccacaggcgagatgcgcgtgggctgggcgaggcccgagctgaggcctgatgtagagctgggagctgacgagctggcctatgtcttcaatgggcaccgcggccagcgctggcacttgggcagtgaaccatttgggcgcccctggcagccgggcgatgtcgttggctgtatgatcgacctcacagagaacaccattatcttcaccctcaatggcgaggtcctcatgtctgactcaggctccgaaacagccttccgggagattgagattggggacggcttcctgcccgtctgcagcttgggacctggccaggtgggtcatctgaacctgggccaggacgtgagctctctgaggttctttgccatctgtggcctccaggaaggcttcgagccatttgccatcaacatgcagcgcccagtcaccacctggttcagcaaaggcctgccccagtttgagccagtgccccttgaacaccctcactatgaggtatcccgagtggacggcactgtggacacgcccccctgcctgcgcctgacccaccgcacctggggctcccagaacagcctggtggagatgcttttcctgcggctgagcctcccagtccagttccaccagcacttccgctgcactgcaggggccaccccgctggcacctcctggcctgcagccccccgccgaggacgaggcccgggcggcggaacccgaccctgactacgaaaacctgcgccgctcagctgggggctggagcgaggcagagaacggcaaagaagggactgcgaaggagggcgcccccgggggcaccccgcaggcggggggagaggcgcagcccgccagggcggagaatgagaaggatgccaccaccgagaagaacaagaagagaggcttcttattcaaggccaagaaggtcgccatgatgacccagccaccggccacccccacgctgccccgactccctcacgacgtggtgcctgcagacaaccgcgatgaccccgagatcatcctcaacaccaccacgtactattactccgtgagggtctttgctggacaggagcccagctgcgtgtgggcgggctgggtcacccctgactaccatcagcacgacatgagcttcgacctcagcaaggtccgggtcgtgacggtgaccatgggggatgaacaaggcaacgtccacagcagcctcaagtgtagcaactgctacatggtgtggggcggagactttgtgagtcccgggcagcagggccggatcagccacacggaccttgtcattgggtgcctggtggacttggccactggcttaatgacctttacagccaatggcaaagagagcaacacctttttccaggtggaacccaacactaagctatttcctgccgtcttcgtcctgcccacccaccagaacgtcatccagtttgagctggggaagcagaagaacatcatgccgttgtcagccgccatgttccaaagcgagcgcaagaacccggccccgcagtgcccaccgcggctggagatgcagatgctgatgccagtgtcctggagccgcatgcccaaccacttcctgcaggtggagacgaggcgtgccggcgagcggctgggctgggccgtgcagtgccaggagccgctgaccatgatggcgctgcacatccccgaggagaaccggtgcatggacatcctggagctgtcggagcgcctggacctgcagcgcttccactcgcacaccctgcgcctctaccgcgctgtgtgcgccctgggcaacaatcgcgtggcgcacgctctgtgcagccacgtagaccaagctcagctgctgcacgccctggaggacgcgcacctgccaggcccactgcgcgcaggctactatgacctcctcatcagcatccacctcgaaagtgcctgccgcagccgccgctccatgctctctgaatacatcgtgcccctcacgcctgagacccgcgccatcacgctcttccctcctggaaggagcacagaaaatggtcacccccggcatggcctgccgggagttggagtcaccacttcgctgaggcccccgcatcatttctcgcccccctgtttcgtggccgctctgccagctgctggggcagcagaggccccggcccgcctcagccctgccatcccgctggaggccctgcgggacaaggcactgaggatgctgggggaggcggtgcgcgacggtgggcagcacgctcgcgaccccgtcgggggctccgtggagttccagtttgtgcctgtgctcaagctcgtgtccaccctgctggtgatgggcatctttggcgatgaggatgtgaaacagatcttgaagatgattgagcctgaggtcttcactgaggaagaagaggaggaggacgaggaggaagagggtgaagaggaagatgaggaggagaaggaggaggatgaggaggaaacagcacaggaaaaggaagatgaggaaaaagaggaagaggaggcagcagaaggggagaaagaagaaggcttggaggaagggctgctccagatgaagttgccagagtctgtgaagttacagatgtgccacctgctggagtatttctgtgaccaagagctgcagcaccgtgtggagtccctggcagcctttgcggagcgctatgtggacaagctccaggccaaccagcggagccgctatggcctcctcataaaagccttcagcatgaccgcagcagagactgcaagacgtacccgcgagttccgctccccaccccaggaacagatcaatatgctattgcaattcaaagatggtacagatgaggaagactgtcctctccctgaagagattcgacaggatttgcttgactttcatcaagacctgctggcacactgtggaattcagctagatggagaggaggaggaaccagaggaagagaccaccctgggcagccgcctcatgagcctgttggagaaagtgcggctggtgaagaagaaggaagagaaacctgaggaggagcggtcagcagaggagagcaaaccccggtccctgcaggagctggtgtcccacatggtggtgcgctgggcccaagaggacttcgtgcagagccccgagctggtgcgggccatgttcagcctcctgcaccggcagtacgacgggctgggtgagctgctgcgtgccctgccgcgggcgtacaccatctcaccgtcctccgtggaagacaccatgagcctgctcgagtgcctcggccagatccgctcgctgctcatcgtgcagatgggcccccaggaggagaacctcatgatccagagcatcgggaacatcatgaacaacaaagtcttctaccaacacccgaacctgatgagggcgctgggcatgcacgagacggtcatggaggtcatggtcaacgtcctcgggggcggcgagtccaaggagatccgcttccccaagatggtgacaagctgctgccgcttcctctgctatttctgccgaatcagccggcagaaccagcgctccatgtttgaccacctgagctacctgctggagaacagtggcatcggcctgggcatgcagggctccacgcccctggacgtggctgctgcctccgtcattgacaacaatgagctggccttggcattgcaggagcaggacctggaaaaggttgtgtcctacctggcaggctgtggcctccagagctgccccatgcttgtggccaaagggtacccagacattggctggaacccctgtggtggagagcgctacctggacttcctgcgctttgctgtcttcgtcaacggcgagagcgtggaggagaacgccaatgtggtggtgcggctgctcatccggaagcctgagtgcttcggacccgccctgcggggtgagggtggctcagggctgctggctgccatcgaagaggccatccgcatctccgaggaccctgcgagggatggcccaggcatccgcagggaccggcggcgcgagcactttggtgaggaaccgcctgaagaaaaccgggtgcacctgggacacgccatcatgtccttctatgccgccttgatcgacctgctcggacgctgtgcaccagagatgcatctaatccaagccggcaagggtgaggccctgcggatccgcgccatcctccgctcccttgtgcccttggaggaccttgtgggcatcatcagcctcccactgcagattcccaccctgggcaaagatggggctctggtgcagccaaagatgtcagcatccttcgtgccggaccacaaggcgtccatggtgctcttcctggaccgtgtgtatggcatcgagaaccaggacttcttgctgcacgtgctggacgtggggttcctgcccgacatgagggcagccgcctcgctggacacggccactttcagcaccaccgagatggcgctggcgctgaaccgctacctgtgcctggccgtgctgccgctcatcaccaagtgtgcgccgctctttgcgggcacagaacaccgcgccatcatggtggactctatgctgcataccgtgtaccgcctgtctcggggtcgttcgctcaccaaggcgcagcgtgacgtcatcgaggactgcctcatgtcgctctgcaggtacatccgcccgtcgatgctgcagcacctgttgcgccgcctggtgttcgacgtgcccatcctcaacgagttcgccaagatgccactcaagctcctcaccaaccactatgagcgctgttggaagtactactgcctacccacgggctgggccaacttcggggtcacctcagaggaggagctgcacctcacacggaaactcttctggggcatctttgactctctggcccataagaaatacgacccggagctgtaccgcatggccatgccttgtctgtgcgccattgccggggctctgccccccgactatgtggatgcctcatactcatctaaggcagagaaaaaggccacagtggatgctgaaggcaactttgatccccggcctgtggagaccctcaatgtgatcatcccggagaagctggactccttcattaacaagtttgcggagtacacacacgagaagtgggccttcgacaagatccagaacaactggtcctatggagagaacatagacgaggagctgaagacccaccccatgctgaggccctacaagaccttttcagagaaggacaaagagatttaccgctggcccatcaaggagtccctgaaggccatgattgcctgggaatggacgatagagaaggccagggagggtgaggaggagaagacggaaaagaaaaaaacgcggaagatatcacaaagtgcccagacctatgatcctcgagaaggctacaaccctcagccccccgaccttagtgctgttaccctgtcccgggagctgcaggccatggcagaacaactggcagaaaattaccacaacacgtggggacggaagaagaagcaggagctggaagccaaaggcggtgggacccaccccctgctggtcccctacgacacgctcacggccaaggagaaggcacgagatcgagagaaggcccaggagctactgaaattcctgcagatgaatggctacgcggttacaagaggccttaaggacatggaactggactcgtcttccattgaaaagcggtttgcctttggcttcctgcagcagctgctgcgctggatggacatttctcaggagttcattgcccacctggaggctgtggtcagcagtgggcgagtggaaaagtccccacatgaacaggagattaaattctttgccaagatcctgctccctttgatcaaccagtacttcaccaaccactgcctctatttcttgtccactccggctaaagtgctgggcagcggtggccacgcctctaacaaggagaaggaaatgatcaccagcctcttctgcaaacttgctgctctcgtccgccaccgagtctctctctttgggacagacgccccagctgtggtcaactgtcttcacatcctggcccgctccctggatgccaggacagtgatgaagtcaggccctgagatcgtgaaggctggcctccgctccttcttcgagagtgcctcggaggacatcgagaagatggtggagaacctgcggctgggcaaggtgtcgcaggcgcgcacccaggtgaaaggcgtgggccagaacctcacctacaccactgtggcactgctgccggtcctcaccaccctcttccagcacatcgcccagcaccagttcggagatgacgtcatcctggacgacgtccaggtctcttgctaccgaacgctgtgcagtatctactccctgggaaccaccaagaacacttatgtggaaaagcttcggccagccctcggggagtgcctggcccgtctggcagcagccatgccggtggcgttcctggagccgcagctgaacgagtacaacgcctgctccgtgtacaccaccaagtctccgcgggagcgggccatcctggggctccccaacagtgtggaggagatgtgtcccgacatcccggtgctggagcggctcatggcagacattggggggctggccgagtcaggtgcccgctacacagagatgccgcatgtcatcgagatcacgctgcccatgctatgcagctacctgccccgatggtgggagcgcgggcccgaggcacccccttccgccctgcccgccggcgcccccccaccctgcacagctgtcacctctgaccacctcaactccctgctggggaatatcctgagaatcatcgtcaacaacctgggcattgacgaggcctcctggatgaagcggctggctgtgttcgcacagcccattgtgagccgtgcacggccggagctcctgcagtcccacttcatcccaactatcgggcggctgcgcaagagggcagggaaggtggtgtccgaggaggagcagctgcgcctggaggccaaggcggaggcccaggagggcgagctgctggtgcgggacgagttctctgtgctctgccgggacctctacgccctgtatccgctgctcatccgctacgtggacaacaacagggcgcagtggctgacggagccgaatcccagcgcggaggagctgttcaggatggtgggcgagatcttcatctactggtccaagtcccacaacttcaagcgcgaggagcagaactttgtggtccagaatgagatcaacaacatgtccttcctgactgctgacaacaaaagcaaaatggctaagtccggtggctcggaccaggaacgcaccaagaagaagcgccggggggaccggtactctgtgcagacgtcactgatcgtggccacactgaagaagatgctgcccatcggcctgaatatgtgtgcgcccaccgaccaagacctcatcacgctggccaagacccgttacgccctgaaagacacagatgaggaggtccgggaatttctgcacaacaaccttcaccttcagggaaaggtcgaaggctccccgtctctgcgctggcagatggctctgtaccggggcgtcccgggtcgcgaggaggacgccgatgaccccgagaaaatcgtgcgcagagtccaggaagtgtcagccgtgctctactacctggaccagaccgagcacccttacaagtctaagaaggccgtgtggcacaagcttttgtccaaacagcgccggcgggcagtcgtggcctgtttccgtatgacgcccctgtacaacctgcccacgcaccgggcatgtaacatgttcctggagagctacaaggctgcatggatcctgactgaagaccacagttttgaggaccgcatgatagatgacctttcaaaagctggggagcaggaggaggaggaggaagaggtggaagagaagaagccagaccccctgcaccagttggtcctgcacttcagccgcactgccctgacggaaaagagcaaactggatgaggattacctgtacatggcctatgctgatatcatggcaaagagctgccacctggaggagggaggggagaacggtgaagctgaagaggaggttgaggtctcctttgaggagaaacagatggagaagcagaggctcttgtaccagcaagcacggctgcacacccggggggcggccgagatggtgctgcagatgatcagtgcctgcaaaggagagacaggtgccatggtgtcctccaccctgaagctgggcatctccatcctcaatggaggcaatgctgaggtccagcagaaaatgctggattatcttaaggacaagaaggaagttggcttcttccagagtatccaggcactgatgcaaacatgcagcgtcctggatctcaatgcctttgagagacagaacaaggccgaggggctgggcatggtgaatgaggatggcactgtcatcaatcgccagaacggagagaaggtcatggcggatgatgaattcacacaagacctgttccgattcctacaattgctctgtgaggggcacaataatgatttccagaactacctacggacacagacagggaacacgaccactattaacatcatcatttgcactgtggactacctcctgcggctgcaggaatccatcagcgacttctactggtactactcgggcaaggatgtcattgaagagcagggcaagaggaacttctccaaagccatgtcggtggctaagcaggtgttcaacagcctcactgagtacatccagggtccctgcaccgggaaccagcagagcctggcgcacagtcgcctatgggacgcagtggtgggattcctgcacgtgttcgcccacatgatgatgaagctcgctcaggactcaagccagatcgagctgctgaaggagctgctggatctgcagaaggacatggtggtgatgttgctgtcgctactagaagggaacgtggtgaacggcatgatcgcccggcagatggtggacatgctcgtggaatcctcatccaatgtggagatgatcctcaagttcttcgacatgttcctgaaactcaaggacattgtgggctctgaagccttccaggactacgtaacggatccccgtggcctcatctccaagaaggacttccagaaggccatggacagccagaagcagttcagcggtccagaaatccagttcctgctttcgtgctccgaagcggatgagaacgaaatgatcaactgcgaagagttcgccaaccgcttccaggagccagcacgcgacatcggcttcaacgtggcggtgctgctgaccaacctgtcggagcatgtgccgcatgaccctcgcctgcacaacttcctggagctggccgagagcatccttgagtacttccgcccctacctgggccgcatcgagatcatgggcgcgtcacgccgcatcgagcgcatctacttcgagatctcagagaccaaccgcgcccagtgggagatgccccaggtgaaggagtccaagcgccagttcatcttcgacgtggtgaacgagggcggcgaggctgagaagatggagctcttcgtgagtttctgcgaggacaccatcttcgagatgcagatcgccgcgcagatctcggagcccgagggcgagccggagaccgacgaggacgagggcgcgggcgcggcggaggcgggcgcggaaggcgcggaggagggcgcggcggggctcgagggcacggcggccacggcggcggcgggggcgacggcgcgggttgtggcggccgcaggccgggccctgcgaggcctcagctaccgcagcctgcggcggcgcgtgcggcggctgcggcggcttacggcccgcgaggcggccaccgcagtggcggcgctgctctgggcagcagtgacgcgcgctggggccgctggcgcgggggcggcggcgggcgcgctgggcctgctctggggctcgctgttcggcggcggcctggtggagggcgccaagaaggtgacggtgaccgagctcctggcaggcatgcccgaccccaccagcgacgaggtgcacggcgagcagccggccgggccgggcggagacgcagacggcgagggtgccagcgagggcgctggagacgccgcggagggcgctggagacgaggaggaggcggtgcacgaggccgggccgggcggtgccgacggggcggtggccgtgaccgatgggggccccttccggcccgaaggggctggcggtctcggggacatgggggacacgacgcctgcggaaccgcccacacccgagggctctcccatcctcaagaggaaattgggggtggatggagtggaggaggagctcccgccagagccagagcccgagccggaaccagagctggagccggagaaagccgatgccgagaatggggagaaggaagaagttcccgagcccacaccagagccccccaagaagcaagcacctccctcaccccctccaaagaaggaggaagctggaggcgaattctggggagaactggaggtgcagagggtgaagttcctgaactacctgtcccggaacttttacaccctgcggttccttgccctcttcttggcatttgccatcaacttcatcttgctgttttataaggtctcagactctccaccaggggaggacgacatggaaggctcagctgctggggatgtgtcaggtgcaggctctggtggcagctctggctggggcttgggggccggagaggaggcagagggcgatgaggatgagaacatggtgtactacttcctggaggaaagcacaggctacatggaacccgccctgcggtgtctgagcctcctgcatacactggtggcctttctctgcatcattggctataattgtctcaaggtgcccctggtaatctttaagcgggagaaggagctggcccggaagctggagtttgatggcctgtacatcacggagcagcctgaggacgatgacgtgaaggggcagtgggaccgactggtgctcaacacgccgtctttccctagcaactactgggacaagtttgtcaagcgcaaggtcctggacaaacatggggacatctacgggcgggagcggattgctgagctactgggcatggacctggccacactagagatcacagcccacaatgagcgcaagcccaacccgccgccagggctgctgacctggctcatgtccatcgatgtcaagtaccagatctggaagttcggggtcatcttcacagacaactccttcctgtacctgggctggtatatggtgatgtccctcttgggacactacaacaacttcttctttgctgcccatctcctggacatcgccatgggggtcaagacgctgcgcaccatcctgtcctctgtcacccacaatgggaaacagctggtgatgaccgtgggccttctggcggtggtcgtctacctgtacaccgtggtggccttcaacttcttccgcaagttctacaacaagagcgaggatgaggatgaacctgacatgaagtgtgatgacatgatgacgtgttacctgtttcacatgtacgtgggtgtccgggctggcggaggcattggggacgagatcgaggaccccgcgggtgacgaatacgagctctacagggtggtcttcgacatcaccttcttcttcttcgtcatcgtcatcctgttggccatcatccagggtctgatcatcgacgcttttggtgagctccgagaccaacaagagcaagtgaaggaggatatggagaccaagtgcttcatctgtggaatcggcagtgactactttgatacgacaccgcatggcttcgagactcacacgctggaggagcacaacctggccaattacatgtttttcctgatgtatttgataaacaaggatgagacagaacacacgggtcaggagtcttatgtctggaagatgtaccaagagagatgttgggatttcttcccagctggtgattgtttccgtaagcagtatgaggaccagcttagctgacacacccccagctggccctccacccccacctcaagtgccttattctcacagcaagccccttagtccccaagcccctccccctaaggcagctgggggagaggtgacctagtactggaaaataaatctgtgctacgccccccagca

SEQ ID NO: 34039 - DNA, 15102 bp, Artificial Sequence
  derived and/or modified sequence
atgggcgacgccgagggcgaggacgaggtgcagttcctgagaaccgacgacgaggtggtgctgcagtgcagcgccaccgtgctgaaggagcagctgaagctgtgcctggccgccgagggcttcggcaacagactgtgcttcctggagcccaccagcaacgcccagaacgtgccccccgacctggccatctgctgcttcgtgctggagcagagcctgagcgtgagagccctgcaggagatgctggccaacaccgtggaggccggcgtggagagcagccagggcggcggccacagaaccctgctgtacggccacgccatcctgctgagacacgcccacagcagaatgtacctgagctgcctgaccaccagcagaagcatgaccgacaagctggccttcgacgtgggcctgcaggaggacgccaccggcgaggcctgctggtggaccatgcaccccgccagcaagcagagaagcgagggcgagaaggtgagagtgggcgacgacatcatcctggtgagcgtgagcagcgagagatacctgcacctgagcaccgccagcggcgagctgcaggtggacgccagcttcatgcagaccctgtggaacatgaaccccatctgcagcagatgcgaggagggcttcgtgaccggcggccacgtgctgagactgttccacggccacatggacgagtgcctgaccatcagccccgccgacagcgacgaccagagaagactggtgtactacgagggcggcgccgtgtgcacccacgccagaagcctgtggagactggagcccctgagaatcagctggagcggcagccacctgagatggggccagcccctgagagtgagacacgtgaccaccggccagtacctggccctgaccgaggaccagggcctggtggtggtggacgccagcaaggcccacaccaaggccaccagcttctgcttcagaatcagcaaggagaagctggacgtggcccccaagagagacgtggagggcatgggcccccccgagatcaagtacggcgagagcctgtgcttcgtgcagcacgtggccagcggcctgtggctgacctacgccgcccccgaccccaaggccctgagactgggcgtgctgaagaagaaggccatgctgcaccaggagggccacatggacgacgccctgagcctgaccagatgccagcaggaggagagccaggccgccagaatgatccacagcaccaacggcctgtacaaccagttcatcaagagcctggacagcttcagcggcaagcccagaggcagcggcccccccgccggcaccgccctgcccatcgagggcgtgatcctgagcctgcaggacctgatcatctacttcgagccccccagcgaggacctgcagcacgaggagaagcagagcaagctgagaagcctgagaaacagacagagcctgttccaggaggagggcatgctgagcatggtgctgaactgcatcgacagactgaacgtgtacaccaccgccgcccacttcgccgagttcgccggcgaggaggccgccgagagctggaaggagatcgtgaacctgctgtacgagctgctggccagcctgatcagaggcaacagaagcaactgcgccctgttcagcaccaacctggactggctggtgagcaagctggacagactggaggccagcagcggcatcctggaggtgctgtactgcgtgctgatcgagagccccgaggtgctgaacatcatccaggagaaccacatcaagagcatcatcagcctgctggacaagcacggcagaaaccacaaggtgctggacgtgctgtgcagcctgtgcgtgtgcaacggcgtggccgtgagaagcaaccaggacctgatcaccgagaacctgctgcccggcagagagctgctgctgcagaccaacctgatcaactacgtgaccagcatcagacccaacatcttcgtgggcagagccgagggcaccacccagtacagcaagtggtacttcgaggtgatggtggacgaggtgacccccttcctgaccgcccaggccacccacctgagagtgggctgggccctgaccgagggctacaccccctaccccggcgccggcgagggctggggcggcaacggcgtgggcgacgacctgtacagctacggcttcgacggcctgcacctgtggaccggccacgtggccagacccgtgaccagccccggccagcacctgctggcccccgaggacgtgatcagctgctgcctggacctgagcgtgcccagcatcagcttcagaatcaacggctgccccgtgcagggcgtgttcgagagcttcaacctggacggcctgttcttccccgtggtgagcttcagcgccggcgtgaaggtgagattcctgctgggcggcagacacggcgagttcaagttcctgcccccccccggctacgccccctgccacgaggccgtgctgcccagagagagactgcacctggagcccatcaaggagtacagaagagagggccccagaggcccccacctggtgggccccagcagatgcctgagccacaccgacttcgtgccctgccccgtggacaccgtgcagatcgtgctgcccccccacctggagagaatcagagagaagctggccgagaacatccacgagctgtgggccctgaccagaatcgagcagggctggacctacggccccgtgagagacgacaacaagagactgcacccctgcctggtggacttccacagcctgcccgagcccgagagaaactacaacctgcagatgagcggcgagaccctgaagaccctgctggccctgggctgccacgtgggcatggccgacgagaaggccgaggacaacctgaagaagaccaagctgcccaagacctacatgatgagcaacggctacaagcccgcccccctggacctgagccacgtgagactgacccccgcccagaccaccctggtggacagactggccgagaacggccacaacgtgtgggccagagacagagtgggccagggctggagctacagcgccgtgcaggacatccccgccagaagaaaccccagactggtgccctacagactgctggacgaggccaccaagagaagcaacagagacagcctgtgccaggccgtgagaaccctgctgggctacggctacaacatcgagccccccgaccaggagcccagccaggtggagaaccagagcagatgcgacagagtgagaatcttcagagccgagaagagctacaccgtgcagagcggcagatggtacttcgagttcgaggccgtgaccaccggcgagatgagagtgggctgggccagacccgagctgagacccgacgtggagctgggcgccgacgagctggcctacgtgttcaacggccacagaggccagagatggcacctgggcagcgagcccttcggcagaccctggcagcccggcgacgtggtgggctgcatgatcgacctgaccgagaacaccatcatcttcaccctgaacggcgaggtgctgatgagcgacagcggcagcgagaccgccttcagagagatcgagatcggcgacggcttcctgcccgtgtgcagcctgggccccggccaggtgggccacctgaacctgggccaggacgtgagcagcctgagattcttcgccatctgcggcctgcaggagggcttcgagcccttcgccatcaacatgcagagacccgtgaccacctggttcagcaagggcctgccccagttcgagcccgtgcccctggagcacccccactacgaggtgagcagagtggacggcaccgtggacacccccccctgcctgagactgacccacagaacctggggcagccagaacagcctggtggagatgctgttcctgagactgagcctgcccgtgcagttccaccagcacttcagatgcaccgccggcgccacccccctggccccccccggcctgcagccccccgccgaggacgaggccagagccgccgagcccgaccccgactacgagaacctgagaagaagcgccggcggctggagcgaggccgagaacggcaaggagggcaccgccaaggagggcgcccccggcggcaccccccaggccggcggcgaggcccagcccgccagagccgagaacgagaaggacgccaccaccgagaagaacaagaagagaggcttcctgttcaaggccaagaaggtggccatgatgacccagccccccgccacccccaccctgcccagactgccccacgacgtggtgcccgccgacaacagagacgaccccgagatcatcctgaacaccaccacctactactacagcgtgagagtgttcgccggccaggagcccagctgcgtgtgggccggctgggtgacccccgactaccaccagcacgacatgagcttcgacctgagcaaggtgagagtggtgaccgtgaccatgggcgacgagcagggcaacgtgcacagcagcctgaagtgcagcaactgctacatggtgtggggcggcgacttcgtgagccccggccagcagggcagaatcagccacaccgacctggtgatcggctgcctggtggacctggccaccggcctgatgaccttcaccgccaacggcaaggagagcaacaccttcttccaggtggagcccaacaccaagctgttccccgccgtgttcgtgctgcccacccaccagaacgtgatccagttcgagctgggcaagcagaagaacatcatgcccctgagcgccgccatgttccagagcgagagaaagaaccccgccccccagtgcccccccagactggagatgcagatgctgatgcccgtgagctggagcagaatgcccaaccacttcctgcaggtggagaccagaagagccggcgagagactgggctgggccgtgcagtgccaggagcccctgaccatgatggccctgcacatccccgaggagaacagatgcatggacatcctggagctgagcgagagactggacctgcagagattccacagccacaccctgagactgtacagagccgtgtgcgccctgggcaacaacagagtggcccacgccctgtgcagccacgtggaccaggcccagctgctgcacgccctggaggacgcccacctgcccggccccctgagagccggctactacgacctgctgatcagcatccacctggagagcgcctgcagaagcagaagaagcatgctgagcgagtacatcgtgcccctgacccccgagaccagagccatcaccctgttcccccccggcagaagcaccgagaacggccaccccagacacggcctgcccggcgtgggcgtgaccaccagcctgagacccccccaccacttcagccccccctgcttcgtggccgccctgcccgccgccggcgccgccgaggcccccgccagactgagccccgccatccccctggaggccctgagagacaaggccctgagaatgctgggcgaggccgtgagagacggcggccagcacgccagagaccccgtgggcggcagcgtggagttccagttcgtgcccgtgctgaagctggtgagcaccctgctggtgatgggcatcttcggcgacgaggacgtgaagcagatcctgaagatgatcgagcccgaggtgttcaccgaggaggaggaggaggaggacgaggaggaggagggcgaggaggaggacgaggaggagaaggaggaggacgaggaggagaccgcccaggagaaggaggacgaggagaaggaggaggaggaggccgccgagggcgagaaggaggagggcctggaggagggcctgctgcagatgaagctgcccgagagcgtgaagctgcagatgtgccacctgctggagtacttctgcgaccaggagctgcagcacagagtggagagcctggccgccttcgccgagagatacgtggacaagctgcaggccaaccagagaagcagatacggcctgctgatcaaggccttcagcatgaccgccgccgagaccgccagaagaaccagagagttcagaagccccccccaggagcagatcaacatgctgctgcagttcaaggacggcaccgacgaggaggactgccccctgcccgaggagatcagacaggacctgctggacttccaccaggacctgctggcccactgcggcatccagctggacggcgaggaggaggagcccgaggaggagaccaccctgggcagcagactgatgagcctgctggagaaggtgagactggtgaagaagaaggaggagaagcccgaggaggagagaagcgccgaggagagcaagcccagaagcctgcaggagctggtgagccacatggtggtgagatgggcccaggaggacttcgtgcagagccccgagctggtgagagccatgttcagcctgctgcacagacagtacgacggcctgggcgagctgctgagagccctgcccagagcctacaccatcagccccagcagcgtggaggacaccatgagcctgctggagtgcctgggccagatcagaagcctgctgatcgtgcagatgggcccccaggaggagaacctgatgatccagagcatcggcaacatcatgaacaacaaggtgttctaccagcaccccaacctgatgagagccctgggcatgcacgagaccgtgatggaggtgatggtgaacgtgctgggcggcggcgagagcaaggagatcagattccccaagatggtgaccagctgctgcagattcctgtgctacttctgcagaatcagcagacagaaccagagaagcatgttcgaccacctgagctacctgctggagaacagcggcatcggcctgggcatgcagggcagcacccccctggacgtggccgccgccagcgtgatcgacaacaacgagctggccctggccctgcaggagcaggacctggagaaggtggtgagctacctggccggctgcggcctgcagagctgccccatgctggtggccaagggctaccccgacatcggctggaacccctgcggcggcgagagatacctggacttcctgagattcgccgtgttcgtgaacggcgagagcgtggaggagaacgccaacgtggtggtgagactgctgatcagaaagcccgagtgcttcggccccgccctgagaggcgagggcggcagcggcctgctggccgccatcgaggaggccatcagaatcagcgaggaccccgccagagacggccccggcatcagaagagacagaagaagagagcacttcggcgaggagccccccgaggagaacagagtgcacctgggccacgccatcatgagcttctacgccgccctgatcgacctgctgggcagatgcgcccccgagatgcacctgatccaggccggcaagggcgaggccctgagaatcagagccatcctgagaagcctggtgcccctggaggacctggtgggcatcatcagcctgcccctgcagatccccaccctgggcaaggacggcgccctggtgcagcccaagatgagcgccagcttcgtgcccgaccacaaggccagcatggtgctgttcctggacagagtgtacggcatcgagaaccaggacttcctgctgcacgtgctggacgtgggcttcctgcccgacatgagagccgccgccagcctggacaccgccaccttcagcaccaccgagatggccctggccctgaacagatacctgtgcctggccgtgctgcccctgatcaccaagtgcgcccccctgttcgccggcaccgagcacagagccatcatggtggacagcatgctgcacaccgtgtacagactgagcagaggcagaagcctgaccaaggcccagagagacgtgatcgaggactgcctgatgagcctgtgcagatacatcagacccagcatgctgcagcacctgctgagaagactggtgttcgacgtgcccatcctgaacgagttcgccaagatgcccctgaagctgctgaccaaccactacgagagatgctggaagtactactgcctgcccaccggctgggccaacttcggcgtgaccagcgaggaggagctgcacctgaccagaaagctgttctggggcatcttcgacagcctggcccacaagaagtacgaccccgagctgtacagaatggccatgccctgcctgtgcgccatcgccggcgccctgccccccgactacgtggacgccagctacagcagcaaggccgagaagaaggccaccgtggacgccgagggcaacttcgaccccagacccgtggagaccctgaacgtgatcatccccgagaagctggacagcttcatcaacaagttcgccgagtacacccacgagaagtgggccttcgacaagatccagaacaactggagctacggcgagaacatcgacgaggagctgaagacccaccccatgctgagaccctacaagaccttcagcgagaaggacaaggagatctacagatggcccatcaaggagagcctgaaggccatgatcgcctgggagtggaccatcgagaaggccagagagggcgaggaggagaagaccgagaagaagaagaccagaaagatcagccagagcgcccagacctacgaccccagagagggctacaacccccagccccccgacctgagcgccgtgaccctgagcagagagctgcaggccatggccgagcagctggccgagaactaccacaacacctggggcagaaagaagaagcaggagctggaggccaagggcggcggcacccaccccctgctggtgccctacgacaccctgaccgccaaggagaaggccagagacagagagaaggcccaggagctgctgaagttcctgcagatgaacggctacgccgtgaccagaggcctgaaggacatggagctggacagcagcagcatcgagaagagattcgccttcggcttcctgcagcagctgctgagatggatggacatcagccaggagttcatcgcccacctggaggccgtggtgagcagcggcagagtggagaagagcccccacgagcaggagatcaagttcttcgccaagatcctgctgcccctgatcaaccagtacttcaccaaccactgcctgtacttcctgagcacccccgccaaggtgctgggcagcggcggccacgccagcaacaaggagaaggagatgatcaccagcctgttctgcaagctggccgccctggtgagacacagagtgagcctgttcggcaccgacgcccccgccgtggtgaactgcctgcacatcctggccagaagcctggacgccagaaccgtgatgaagagcggccccgagatcgtgaaggccggcctgagaagcttcttcgagagcgccagcgaggacatcgagaagatggtggagaacctgagactgggcaaggtgagccaggccagaacccaggtgaagggcgtgggccagaacctgacctacaccaccgtggccctgctgcccgtgctgaccaccctgttccagcacatcgcccagcaccagttcggcgacgacgtgatcctggacgacgtgcaggtgagctgctacagaaccctgtgcagcatctacagcctgggcaccaccaagaacacctacgtggagaagctgagacccgccctgggcgagtgcctggccagactggccgccgccatgcccgtggccttcctggagccccagctgaacgagtacaacgcctgcagcgtgtacaccaccaagagccccagagagagagccatcctgggcctgcccaacagcgtggaggagatgtgccccgacatccccgtgctggagagactgatggccgacatcggcggcctggccgagagcggcgccagatacaccgagatgccccacgtgatcgagatcaccctgcccatgctgtgcagctacctgcccagatggtgggagagaggccccgaggccccccccagcgccctgcccgccggcgccccccccccctgcaccgccgtgaccagcgaccacctgaacagcctgctgggcaacatcctgagaatcatcgtgaacaacctgggcatcgacgaggccagctggatgaagagactggccgtgttcgcccagcccatcgtgagcagagccagacccgagctgctgcagagccacttcatccccaccatcggcagactgagaaagagagccggcaaggtggtgagcgaggaggagcagctgagactggaggccaaggccgaggcccaggagggcgagctgctggtgagagacgagttcagcgtgctgtgcagagacctgtacgccctgtaccccctgctgatcagatacgtggacaacaacagagcccagtggctgaccgagcccaaccccagcgccgaggagctgttcagaatggtgggcgagatcttcatctactggagcaagagccacaacttcaagagagaggagcagaacttcgtggtgcagaacgagatcaacaacatgagcttcctgaccgccgacaacaagagcaagatggccaagagcggcggcagcgaccaggagagaaccaagaagaagagaagaggcgacagatacagcgtgcagaccagcctgatcgtggccaccctgaagaagatgctgcccatcggcctgaacatgtgcgcccccaccgaccaggacctgatcaccctggccaagaccagatacgccctgaaggacaccgacgaggaggtgagagagttcctgcacaacaacctgcacctgcagggcaaggtggagggcagccccagcctgagatggcagatggccctgtacagaggcgtgcccggcagagaggaggacgccgacgaccccgagaagatcgtgagaagagtgcaggaggtgagcgccgtgctgtactacctggaccagaccgagcacccctacaagagcaagaaggccgtgtggcacaagctgctgagcaagcagagaagaagagccgtggtggcctgcttcagaatgacccccctgtacaacctgcccacccacagagcctgcaacatgttcctggagagctacaaggccgcctggatcctgaccgaggaccacagcttcgaggacagaatgatcgacgacctgagcaaggccggcgagcaggaggaggaggaggaggaggtggaggagaagaagcccgaccccctgcaccagctggtgctgcacttcagcagaaccgccctgaccgagaagagcaagctggacgaggactacctgtacatggcctacgccgacatcatggccaagagctgccacctggaggagggcggcgagaacggcgaggccgaggaggaggtggaggtgagcttcgaggagaagcagatggagaagcagagactgctgtaccagcaggccagactgcacaccagaggcgccgccgagatggtgctgcagatgatcagcgcctgcaagggcgagaccggcgccatggtgagcagcaccctgaagctgggcatcagcatcctgaacggcggcaacgccgaggtgcagcagaagatgctggactacctgaaggacaagaaggaggtgggcttcttccagagcatccaggccctgatgcagacctgcagcgtgctggacctgaacgccttcgagagacagaacaaggccgagggcctgggcatggtgaacgaggacggcaccgtgatcaacagacagaacggcgagaaggtgatggccgacgacgagttcacccaggacctgttcagattcctgcagctgctgtgcgagggccacaacaacgacttccagaactacctgagaacccagaccggcaacaccaccaccatcaacatcatcatctgcaccgtggactacctgctgagactgcaggagagcatcagcgacttctactggtactacagcggcaaggacgtgatcgaggagcagggcaagagaaacttcagcaaggccatgagcgtggccaagcaggtgttcaacagcctgaccgagtacatccagggcccctgcaccggcaaccagcagagcctggcccacagcagactgtgggacgccgtggtgggcttcctgcacgtgttcgcccacatgatgatgaagctggcccaggacagcagccagatcgagctgctgaaggagctgctggacctgcagaaggacatggtggtgatgctgctgagcctgctggagggcaacgtggtgaacggcatgatcgccagacagatggtggacatgctggtggagagcagcagcaacgtggagatgatcctgaagttcttcgacatgttcctgaagctgaaggacatcgtgggcagcgaggccttccaggactacgtgaccgaccccagaggcctgatcagcaagaaggacttccagaaggccatggacagccagaagcagttcagcggccccgagatccagttcctgctgagctgcagcgaggccgacgagaacgagatgatcaactgcgaggagttcgccaacagattccaggagcccgccagagacatcggcttcaacgtggccgtgctgctgaccaacctgagcgagcacgtgccccacgaccccagactgcacaacttcctggagctggccgagagcatcctggagtacttcagaccctacctgggcagaatcgagatcatgggcgccagcagaagaatcgagagaatctacttcgagatcagcgagaccaacagagcccagtgggagatgccccaggtgaaggagagcaagagacagttcatcttcgacgtggtgaacgagggcggcgaggccgagaagatggagctgttcgtgagcttctgcgaggacaccatcttcgagatgcagatcgccgcccagatcagcgagcccgagggcgagcccgagaccgacgaggacgagggcgccggcgccgccgaggccggcgccgagggcgccgaggagggcgccgccggcctggagggcaccgccgccaccgccgccgccggcgccaccgccagagtggtggccgccgccggcagagccctgagaggcctgagctacagaagcctgagaagaagagtgagaagactgagaagactgaccgccagagaggccgccaccgccgtggccgccctgctgtgggccgccgtgaccagagccggcgccgccggcgccggcgccgccgccggcgccctgggcctgctgtggggcagcctgttcggcggcggcctggtggagggcgccaagaaggtgaccgtgaccgagctgctggccggcatgcccgaccccaccagcgacgaggtgcacggcgagcagcccgccggccccggcggcgacgccgacggcgagggcgccagcgagggcgccggcgacgccgccgagggcgccggcgacgaggaggaggccgtgcacgaggccggccccggcggcgccgacggcgccgtggccgtgaccgacggcggccccttcagacccgagggcgccggcggcctgggcgacatgggcgacaccacccccgccgagccccccacccccgagggcagccccatcctgaagagaaagctgggcgtggacggcgtggaggaggagctgccccccgagcccgagcccgagcccgagcccgagctggagcccgagaaggccgacgccgagaacggcgagaaggaggaggtgcccgagcccacccccgagccccccaagaagcaggccccccccagccccccccccaagaaggaggaggccggcggcgagttctggggcgagctggaggtgcagagagtgaagttcctgaactacctgagcagaaacttctacaccctgagattcctggccctgttcctggccttcgccatcaacttcatcctgctgttctacaaggtgagcgacagcccccccggcgaggacgacatggagggcagcgccgccggcgacgtgagcggcgccggcagcggcggcagcagcggctggggcctgggcgccggcgaggaggccgagggcgacgaggacgagaacatggtgtactacttcctggaggagagcaccggctacatggagcccgccctgagatgcctgagcctgctgcacaccctggtggccttcctgtgcatcatcggctacaactgcctgaaggtgcccctggtgatcttcaagagagagaaggagctggccagaaagctggagttcgacggcctgtacatcaccgagcagcccgaggacgacgacgtgaagggccagtgggacagactggtgctgaacacccccagcttccccagcaactactgggacaagttcgtgaagagaaaggtgctggacaagcacggcgacatctacggcagagagagaatcgccgagctgctgggcatggacctggccaccctggagatcaccgcccacaacgagagaaagcccaaccccccccccggcctgctgacctggctgatgagcatcgacgtgaagtaccagatctggaagttcggcgtgatcttcaccgacaacagcttcctgtacctgggctggtacatggtgatgagcctgctgggccactacaacaacttcttcttcgccgcccacctgctggacatcgccatgggcgtgaagaccctgagaaccatcctgagcagcgtgacccacaacggcaagcagctggtgatgaccgtgggcctgctggccgtggtggtgtacctgtacaccgtggtggccttcaacttcttcagaaagttctacaacaagagcgaggacgaggacgagcccgacatgaagtgcgacgacatgatgacctgctacctgttccacatgtacgtgggcgtgagagccggcggcggcatcggcgacgagatcgaggaccccgccggcgacgagtacgagctgtacagagtggtgttcgacatcaccttcttcttcttcgtgatcgtgatcctgctggccatcatccagggcctgatcatcgacgccttcggcgagctgagagaccagcaggagcaggtgaaggaggacatggagaccaagtgcttcatctgcggcatcggcagcgactacttcgacaccaccccccacggcttcgagacccacaccctggaggagcacaacctggccaactacatgttcttcctgatgtacctgatcaacaaggacgagaccgagcacaccggccaggagagctacgtgtggaagatgtaccaggagagatgctgggacttcttccccgccggcgactgcttcagaaagcagtacgaggaccagctgagctag

SEQ ID NO: 34040 - protein, 538 aa, Artificial Sequence
  derived and/or modified sequence
MARAAALLPSRSPPTPLLWPLLLLLLLETGAQDVRVQVLPEVRGQLGGTVELPCHLLPPVPGLYISLVTWQRPDAPANHQNVAAFHPKMGPSFPSPKPGSERLSFVSAKQSTGQDTEAELQDATLALHGLTVEDEGNYTCEFATFPKGSVRGMTWLRVIAKPKNQAEAQKVTFSQDPTTVALCISKEGRPPARISWLSSLDWEAKETQVSGTLAGTVTVTSRFTLVPSGRADGVTVTCKVEHESFEEPALIPVTLSVRYPPEVSISGYDDNWYLGRTDATLSCDVRSNPEPTGYDWSTTSGTFPTSAVAQGSQLVIHAVDSLFNTTFVCTVTNAVGMGRAEQVIFVRETPNTAGAGATGGIIGGIIAAIIATAVAATGILICRQQRKEQTLQGAEEDEDLEGPPSYKPPTPKAKLEAQEMPSQLFTLGASEHSPLKTPYFDAGASCTEQEMPRYHELPTLEERSGPLHPGATSLGSPIPVPPGPPAVEDVSLDLEDEEGEEEEEYLDKINPIYDALSYSSPSDSYQGKGFVMSRAMYV

SEQ ID NO: 34041 - DNA, 1617 bp, Artificial Sequence
  derived and/or modified sequence
atggccagagccgccgcattactaccatcccggtcaccgccaactcctttgctctggcctctcctgcttctcctactgttagaaacaggcgcacaggacgtgcgggtgcaagtcctgcctgaagtgcgtggtcaactcggaggtaccgtcgagctcccctgccacctcctgccccctgttccaggcctgtacatctctctggtgacatggcagaggcctgacgctccagccaaccaccaaaacgtagctgcattccatcccaagatgggtccaagtttccccagcccgaagccaggaagcgagagactgtcctttgtttcggctaaacaaagtactggacaggacacagaagccgagctgcaagacgctactcttgcactccatggtttaacggtcgaggatgaaggaaactacacgtgtgaatttgctaccttccctaaggggtctgttaggggaatgacctggctgagagttatcgcaaagcctaagaatcaggcagaggcacagaaagtcacgttcagccaagatcccacaacagtggcgttatgcatctccaaagagggaagaccacccgcaaggatttcttggttatcaagcctcgattgggaggccaaggagactcaagtgtccggaaccctcgccggaactgtgaccgtcacatcccgcttcacgctggtccccagcgggcgggcggacggagtcaccgtcacttgcaaagtggaacacgagtccttcgaggagcctgccctaattcctgtcaccttgtccgtgcggtacccccctgaagtttctattagcgggtatgacgataactggtacctgggcagaactgacgcaacactgagttgtgacgtgagaagcaatcctgagccgacaggctatgattggagcactaccagcggcacatttccaactagtgccgtggcacaaggcagccaactggtaatacatgcagtggacagcttattcaacaccacattcgtgtgtacggtgaccaacgctgttggcatgggccgggctgagcaggtaatattcgtacgcgagacaccgaataccgctggcgcgggggcaactggcgggatcatagggggcatcatagcagcgatcatcgccactgcagtggccgccaccggaatcctgatctgtcgccagcagaggaaggaacagacgctccaaggcgcagaggaagatgaggaccttgagggacccccctcctacaagcccccgacccccaaagccaagctggaggctcaggaaatgccatcccagcttttcacccttggcgcctcagagcattctcctttaaaaaccccttactttgacgcgggagcttcttgcaccgagcaggaaatgccacgatatcacgaactgccaacactggaagaaaggtctggacctttgcatcctggggccaccagtctcggaagcccaatacccgtgcctcccggaccacccgccgtggaggacgtttccttggaccttgaggacgaagaaggcgaggaggaggaagagtatctcgataagattaaccccatatacgatgcactctcctattctagtccttccgacagctaccaggggaaaggattcgttatgtctcgggcgatgtatgtgtag

SEQ ID NO: 34042 - DNA, 1617 bp, Artificial Sequence
  derived and/or modified sequence
atggcccgggctgctgccctgctgcccagccgcagcccccccacccccctgctgtggcccctgctgctgctgctgctgctggagactggagcccaggatgtgcgggtgcaggtgctgcctgaggtgcggggccagctgggcggcaccgtggagctgccctgccacctgctgccccctgtgcccggcctgtacatcagcctggtgacctggcagaggccagatgccccagccaaccaccagaatgtggccgccttccaccccaagatgggccccagcttccccagccccaagccaggcagcgagcggctgagctttgtgtctgccaagcagagcacaggccaggacacagaggccgagctgcaggatgccaccctggccctgcacggcctgactgtggaggatgagggcaactacacctgtgaatttgccaccttccccaagggctctgtgcggggcatgacctggctgcgggtgattgccaagcccaagaaccaggccgaggcccagaaggtgaccttcagccaggaccccaccaccgtggccctgtgcatcagcaaggagggccggcccccagcccgcatctcctggctgagcagcctggactgggaggccaaggagacccaggtgtctggcaccctggccggcaccgtgacagtgaccagccgcttcaccctggtgcccagcggccgggcagatggagtgacagtgacctgcaaggtggagcacgagagctttgaggagcccgccctgatccctgtgaccctgtctgtgcgctacccacctgaggtgtccatcagcggctatgatgacaactggtacctgggccgcacagatgccaccctgagctgtgatgtgcgcagcaaccctgagcccaccggctatgactggagcaccaccagcggcaccttccccaccagcgctgtggcccagggcagccagctggtgattcatgctgtggacagcctcttcaacaccacctttgtgtgcaccgtgaccaatgctgtgggcatgggccgggcagagcaggtgatctttgtgcgggagacccccaacacagctggagctggggccaccggcggcatcatcggcggcatcatcgccgccatcatcgccacagctgtggccgccaccggcatcctgatctgccggcagcagaggaaggagcagaccctgcagggcgctgaggaggatgaggacctggagggccccccatcctacaagccacccacccccaaggccaagctggaggcccaggagatgcccagccagctgttcaccctgggcgccagcgagcacagccccctgaagaccccctactttgatgctggggccagctgcacagagcaggagatgccccgctaccacgagctgcccaccctggaggagaggagcggccccctgcaccctggggccaccagcctgggcagccccatccctgtgcccccaggccccccagctgtggaggatgtgtccctggacctggaggatgaggagggggaggaggaggaggagtacctggacaagatcaaccccatctatgatgccctgagctacagcagccccagcgacagctaccagggcaagggctttgtgatgagccgggccatgtatgtgtag

SEQ ID NO: 34043 - DNA, 1617 bp, Artificial Sequence
  derived and/or modified sequence
atggcccgggccgccgccctgctgcccagccggagcccccccacccctctcctttggcccctattattgttgctgctgctcgaaactggcgcccaggatgtcagggtgcaggtactgccagaagtccgcggccaactcggtggtactgtggagttgccctgccatcttttaccaccagtccccgggctctatatatcccttgtcacatggcagagacctgacgctcccgcaaaccaccaaaacgtagctgccttccacccaaagatggggccctcgtttccgtcacctaaaccaggtagtgaaaggttgtcctttgtgagcgctaagcagagcaccggccaggacaccgaggccgagctgcaagacgccacacttgctctacacggattgacagtagaagacgaaggcaactatacctgcgaatttgccacatttccgaagggcagtgtacgcggcatgacctggttaagggtaattgctaagccaaagaatcaggcagaagcacagaaagtaacattttcccaggatcccaccacagtggctctctgcatctccaaggaaggtcgcccccctgcaagaattagctggctgagctctttagattgggaggctaaggagactcaggtctccgggacgctggctggaacagtcacagtgacctctaggtttacactcgtgccttcaggacgcgccgatggagttaccgtgacatgtaaggtggaacacgagtcttttgaagagccagcccttatccctgttaccctatctgtgcggtaccccccagaggtgagcatctctggctatgatgataattggtaccttggaagaacagatgcgacattgtcctgcgacgttcgctccaatcctgagccaaccggttacgactggtccacaacgtcaggcacatttcccacaagcgctgtggcccagggaagtcaactagtaatccatgccgtggattcactgtttaatactacgttcgtatgtactgtgaccaatgccgtaggcatgggcagagccgaacaagtgattttcgtgcgggagacccccaatactgcaggcgctggcgctaccggcggtattataggggggattatcgcagcgattattgccaccgctgtggccgcaacggggattcttatatgtcgccagcagagaaaagagcagacactccagggggccgaagaggacgaagatcttgagggccctcctagctataagccccccactccaaaggccaagctggaggctcaagagatgccctctcaactgtttactctcggtgcatccgagcacagtcccctgaaaacgccatattttgacgctggggcttcctgcaccgagcaagaaatgccgagataccatgagctgcccacccttgaggaacgctcagggcccctccacccaggggctacctcactgggaagtcccatcccagtacctccggggcccccagctgtagaagacgtgtctctagatctagaagacgaggagggcgaagaggaggaagaatatttggataaaatcaacccaatttacgacgcactgagctacagtagtccctccgactcttaccagggcaagggattcgtgatgagtagggcaatgtacgtttag

SEQ ID NO: 34044 - DNA, 2856 bp, Artificial Sequence
  derived and/or modified sequence
agaattctttggcaggggcgaccttagaatcctggggaggagcgagaatggaatcccggggaggaacaggggtggaatccggggggcggggtcagaacgccaggagggggcggggccggagccagggtcggcttgactcgggggagcagcgggtggatcctgtgacgtcagcgggttcgaaccgccggagctgagcgagaggccgggggtgccgagccgggcggggagagctgggccgggagagcagaacagggaggctagagcgcagcgggaaccggcccggagccggagccggagccccacaggcacctactaaaccgcccagccgatcggcccccacagagtggcccgcgggcctccggccgggcccagtcccctcccgggccctccatggcccgggccgctgccctcctgccgtcgagatcgccgccgacgccgctgctgtggccgctgctgctgctgctgctcctggaaaccggagcccaggatgtgcgagttcaagtgctacccgaggtgcgaggccagctcgggggcaccgtggagctgccgtgccacctgctgccacctgttcctggactgtacatctccctggtgacctggcagcgcccagatgcacctgcgaaccaccagaatgtggccgccttccaccctaagatgggtcccagcttccccagcccgaagcctggcagcgagcggctgtccttcgtctctgccaagcagagcactgggcaagacacagaggcagagctccaggacgccacgctggccctccacgggctcacggtggaggacgagggcaactacacttgcgagtttgccaccttccccaaggggtccgtccgagggatgacctggctcagagtcatagccaagcccaagaaccaagctgaggcccagaaggtcacgttcagccaggaccctacgacagtggccctctgcatctccaaagagggccgcccacctgcccggatctcctggctctcatccctggactgggaagccaaagagactcaggtgtcagggaccctggccggaactgtcactgtcaccagccgcttcaccttggtgccctcgggccgagcagatggtgtcacggtcacctgcaaagtggagcatgagagcttcgaggaaccagccctgatacctgtgaccctctctgtacgctaccctcctgaagtgtccatctccggctatgatgacaactggtacctcggccgtactgatgccaccctgagctgtgacgtccgcagcaacccagagcccacgggctatgactggagcacgacctcaggcaccttcccgacctccgcagtggcccagggctcccagctggtcatccacgcagtggacagtctgttcaataccaccttcgtctgcacagtcaccaatgccgtgggcatgggccgcgctgagcaggtcatctttgtccgagagacccccaacacagcaggcgcaggggccacaggcggcatcatcgggggcatcatcgccgccatcattgctactgctgtggctgccacgggcatccttatctgccggcagcagcggaaggagcagacgctgcagggggcagaggaggacgaagacctggagggacctccctcctacaagccaccaaccccaaaagcgaagctggaggcacaggagatgccctcccagctcttcactctgggggcctcggagcacagcccactcaagaccccctactttgatgctggcgcctcatgcactgagcaggaaatgcctcgataccatgagctgcccaccttggaagaacggtcaggacccttgcaccctggagccacaagcctggggtcccccatcccggtgcctccagggccacctgctgtggaagacgtttccctggatctagaggatgaggagggggaggaggaggaagagtatctggacaagatcaaccccatctatgatgctctgtcctatagcagcccctctgattcctaccagggcaaaggctttgtcatgtcccgggccatgtatgtgtgagctgccatgcgcctggcgtctcacatctcacctgttgatcccttagctttcttgccaaggatctagtgccccctgacctctggccaggccactgtcagttaacacatatgcattccatttgtgatgtctaccttggtggctccactatgacccctaacccatgagcccagagaaattcaccgtgataatggaatcctggcaaccttatctcatgaggcaggaggtggggaaggtgcttctgcacaacctctgatcccaaggactcctctcccagactgtgaccttagaccatacctctcaccccccaatgcctcgactcccccaaaatcacaaagaagaccctagacctataatttgtcttcaggtagtaaattcccaataggtctgctggagtgggcgctgagggctccctgctgctcagacctgagccctccaggcagcagggtcccacttaccccctccccaccctgttccccaaaggtgggaaagaggggattccccagcccaaggcagggttttcccagcaccctcctgtaagcagaagtctcagggtccagacccttccctgagcccccacccccaccccaattcctgcctaccaagcaagcagccccagcctagggtcagacagggtgagcctcatacagactgtgccttgatggccccagccttgggagaagaatttactgttaacctggaagactactgaatcattttacccttgcccagtggaataggacctaaacatcccccttccggggaaagtgggtcatctgaattgggggtagcaattgatactgttttgtaaactacatttcctacaaaatatgaatttatactttgaccagg

SEQ ID NO: 34045 - DNA, 1617 bp, Artificial Sequence
  derived and/or modified sequence
atggctagggccgctgcgttactgccaagcagatcaccacccactccactgctgtggcccttgctactcttgttgctgcttgagaccggcgcacaggatgtcagggtgcaggtgctcccagaagtccgcggacagctaggcggtacggtggagctaccatgtcacttgctgccacccgtgccagggctgtatatcagcctggtgacatggcagagacctgatgccccagccaatcaccagaacgtggcagccttccaccctaagatggggccttccttcccctcccccaagcctggatctgaaagactctcctttgtgtctgcaaaacagtccacgggccaggatacagaggccgagctgcaggacgctacgcttgccttgcacgggttaacagttgaggatgaaggaaattacacgtgcgagttcgctacatttccgaagggcagtgtaagggggatgacctggctgcgcgtaatcgcgaagcctaagaatcaagccgaagctcaaaaagtgacattctcacaggacccgacgaccgtggccctgtgcatctctaaagagggccgaccaccagccagaattagctggctttcttccctggattgggaggcaaaagagacacaggtgtctggcacattggcgggtacagtcactgtgacatctagattcacactggtcccctctggaagagccgacggggtgactgtcacgtgtaaagtggagcacgaatccttcgaggaacctgcattaatccccgtgacactgtccgtacggtacccccctgaggtctctataagcgggtacgatgacaactggtatttgggcagaaccgacgctaccctgagctgtgacgtgagatctaaccctgaacctactggttatgattggtccacaactagcggtacatttcccacgtcagccgtcgcacaaggcagccaactagtgatccacgcggtggactccttgttcaacacgactttcgtatgcactgtaactaacgccgttggcatgggaagggccgaacaagttatctttgtacgtgaaacgccaaatacagccggagctggagccactggagggatcatcgggggtatcatagctgccattatcgcaaccgccgttgccgctacagggatcttgatatgccgccagcagcgcaaagaacaaactctgcaaggtgcggaggaggacgaggatctcgagggacctccatcctacaagccacccacacccaaagctaagctggaggcccaggagatgccaagccagctctttacactgggggcttctgagcatagtccactgaaaacaccatatttcgacgctggagcgagctgcactgagcaggagatgccacgttaccacgagttgcccacgctggaagagcgaagcggccctctccatcctggtgccacctcgcttggctcgccaatcccagttccaccaggcccacctgcagtagaggatgtttccctagacctggaggacgaagagggggaggaggaggaggagtacctcgacaagatcaatccaatatatgacgcgctgagctatagttccccgtcagactcctatcaaggtaaaggatttgtcatgagcagggccatgtacgtctag

SEQ ID NO: 34046 - DNA, 1617 bp, Artificial Sequence
  derived and/or modified sequence
atggccagagccgccgccctgctgcccagcagaagcccccccacccccctgctgtggcccctgctgctgctgctgctgctggagaccggcgcccaggacgtgagagtgcaggtgctgcccgaggtgagaggccagctgggcggcaccgtggagctgccctgccacctgctgccccccgtgcccggcctgtacatcagcctggtgacctggcagagacccgacgcccccgccaaccaccagaacgtggccgccttccaccccaagatgggccccagcttccccagccccaagcccggcagcgagagactgagcttcgtgagcgccaagcagagcaccggccaggacaccgaggccgagctgcaggacgccaccctggccctgcacggcctgaccgtggaggacgagggcaactacacctgcgagttcgccaccttccccaagggcagcgtgagaggcatgacctggctgagagtgatcgccaagcccaagaaccaggccgaggcccagaaggtgaccttcagccaggaccccaccaccgtggccctgtgcatcagcaaggagggcagaccccccgccagaatcagctggctgagcagcctggactgggaggccaaggagacccaggtgagcggcaccctggccggcaccgtgaccgtgaccagcagattcaccctggtgcccagcggcagagccgacggcgtgaccgtgacctgcaaggtggagcacgagagcttcgaggagcccgccctgatccccgtgaccctgagcgtgagatacccccccgaggtgagcatcagcggctacgacgacaactggtacctgggcagaaccgacgccaccctgagctgcgacgtgagaagcaaccccgagcccaccggctacgactggagcaccaccagcggcaccttccccaccagcgccgtggcccagggcagccagctggtgatccacgccgtggacagcctgttcaacaccaccttcgtgtgcaccgtgaccaacgccgtgggcatgggcagagccgagcaggtgatcttcgtgagagagacccccaacaccgccggcgccggcgccaccggcggcatcatcggcggcatcatcgccgccatcatcgccaccgccgtggccgccaccggcatcctgatctgcagacagcagagaaaggagcagaccctgcagggcgccgaggaggacgaggacctggagggcccccccagctacaagccccccacccccaaggccaagctggaggcccaggagatgcccagccagctgttcaccctgggcgccagcgagcacagccccctgaagaccccctacttcgacgccggcgccagctgcaccgagcaggagatgcccagataccacgagctgcccaccctggaggagagaagcggccccctgcaccccggcgccaccagcctgggcagccccatccccgtgccccccggcccccccgccgtggaggacgtgagcctggacctggaggacgaggagggcgaggaggaggaggagtacctggacaagatcaaccccatctacgacgccctgagctacagcagccccagcgacagctaccagggcaagggcttcgtgatgagcagagccatgtacgtgtag

SEQ ID NO: 34047 - protein, 443 aa, Artificial Sequence
  derived and/or modified sequence
MYDCMETFAPGPRRLYGAAGPGAGLLRRATGGSCFAGLESFAWPQPASLQSVETQSTSSEEMVPSSPSPPPPPRVYKPCFVCNDKSSGYHYGVSSCEGCKGFFRRSIQKNMVYTCHRDKNCIINKVTRNRCQYCRLQKCFEVGMSKEAVRNDRNKKKKEVKEEGSPDSYELSPQLEELITKVSKAHQETFPSLCQLGKYTTNSSADHRVQLDLGLWDKFSELATKCIIKIVEFAKRLPGFTGLSIADQITLLKAACLDILMLRICTRYTPEQDTMTFSDGLTLNRTQMHNAGFGPLTDLVFAFAGQLLPLEMDDTETGLLSAICLICGDRMDLEEPEKVDKLQEPLLEALRLYARRRRPSQPYMFPRMLMKITDLRGISTKGAERAITLKMEIPGPMPPLIREMLENPEMFEDDSSQPGPHPNASSEDEVPGGQGKGGLKSPA

SEQ ID NO: 34048 - DNA, 2740 bp, Artificial Sequence
  derived and/or modified sequence
ccccagtgctagctgccgaagcacccagataagagctggacggaggctaaagcggcagccccagcttcgcgccccgcccagtccctttcccctgctggggatcccccctcttccccgcccaccccttacccgcatgcagcccagcgccctatgctagccctccccctccccccctgctggagcggggcgccgccgggggaggagggggaatcggctgcgggtccttggtgtttccagcacccagtttcccttcaagccgggtcgcgatgtacgactgtatggaaacgtttgccccgggtccgcgacggctgtacggggcggccgggcccggggccggcttgctgcgcagagccaccggcggctcctgtttcgccggacttgaatcttttgcctggccgcaacccgccagcctgcaatcggtggagacacagagcaccagctcagaggagatggtgcccagctcgccctcgccccctccgcctcctcgggtctacaagccatgcttcgtgtgcaatgacaagtcctctggctaccactatggggtcagctcttgtgaaggctgcaagggcttctttcgccgaagcatccagaagaacatggtgtacacgtgtcaccgcgacaaaaactgtatcatcaacaaggtgaccaggaatcgctgccagtactgccggctacagaagtgcttcgaagtgggcatgtccaaggaagctgtgcgaaatgaccggaacaagaagaagaaagaggtgaaggaagaagggtcacctgacagctatgagctgagccctcagttagaagagctcatcaccaaggtcagcaaagcccatcaggagactttcccctcgctctgccagctgggcaagtataccacgaactccagtgcagaccaccgcgtgcagctggatctggggctgtgggacaagttcagtgagctggctaccaagtgcatcatcaagatcgtggagtttgccaagcggttgcctggctttacagggctcagcattgctgaccagatcactctgctcaaagctgcctgcctagatatcctgatgctgcgtatctgcacaaggtacaccccagagcaggacaccatgaccttctccgacgggctgaccctgaaccggacccagatgcacaatgccggcttcgggcccctcacagaccttgtctttgcctttgctgggcagctcctgcccctggagatggatgacaccgagacagggctgctcagcgccatctgcctcatctgcggagaccgcatggacctggaggagcccgaaaaagtggacaagctgcaggagccactgctggaagccctgaggctgtacgcccggcgccggcggcccagccagccctacatgttcccaaggatgctaatgaaaatcaccgacctccggggcatcagcactaagggagctgaaagggccattactctgaagatggagattccaggcccgatgcctcccttaatccgagagatgctggagaaccctgaaatgtttgaggatgactcctcgcagcctggtccccaccccaatgcctctagcgaggatgaggttcctgggggccagggcaaagggggcctgaagtccccagcctgaccagggcccctgacctccccgctgtgggggttggggcttcaggcagcagactgaccatctcccagaccgccagtgactgggggaggacctgctctgccctctccccaccccttccaatgagctccttgtttttgccaaagtttctaggggtgcctctgtgttcatccccttcctgatctaaccggctccctcgccagtcccgggggcctgccctgctcccaccaggagagagggcaaagggatgagcctgggtttggactctaaaatctcagcactgccccatgggtcctagacttcccagggcaagaggaagaccctgccattccacagccccttcctctgccaggtgcttggctctctgagagcaaacaggaacactagagaccaaaaaggggacaaaggagaagggctgagcccaccttcttgctcctacccttggtgcctaatgctgtgtgatgcacctgcagggtgtgtgctagcctctgtgccccgtccttgtgccaggtcaaggtgggggcaggctgggccctgcatttctggggcaggaacagagggtgaaagggacagatagatgcaggtccattctgcacctcttggctcgggtgcagagttcaccctgtgccctccgttataagtccctcccccagccctgtcatgtgccttgggctcctcctgccctccatctcagccattggggcagggaccctcctacactacagaggggccaggggatccctctctccctagtgccttccaccctttactccccagagcagcttggcccagggaggggggatgctgcttagctgatcccgccctgacccagaggaagcctctatttatttattagcttttgtttacaccgtggaattgaccccttcctccaggggtcttgggtgggggagcccagggcccctgtgacccctcctttcttcctccaatccccagtttgtatttagctgccaaataagattcccattggctccctgtgttctcttggggggtcagggtgctgtcccctcccctctgtttacatctcccctctaccccgctgtatcgcatattgctgagttttctatttttgcaaaataaagtgatggaaactcaaaaaaaaaaaaaaaaaaaaaaaaaaaaaaaaaaaa

SEQ ID NO: 34049 - DNA, 1332 bp, Artificial Sequence
  derived and/or modified sequence
atgtacgattgtatggaaacattcgcacctggcccccgacgcctctacggcgccgcagggccaggcgccggcctgttaagacgtgcaacagggggatcctgttttgccgggctcgagagttttgcctggccccagccagccagtctccagtcggtcgaaacccagtccaccagctcggaagaaatggtacctagctcaccttccccccctcccccaccccgggtgtataagccttgtttcgtgtgtaatgataagtcctctggataccactatggcgtctctagctgcgaggggtgtaagggattcttccgccgcagtatacagaagaacatggtgtatacctgtcatcgggacaaaaattgcatcattaacaaggtgacccgcaacagatgtcagtattgtaggctgcagaaatgcttcgaagtcgggatgtcaaaggaagcagtgagaaatgatcgcaataaaaaaaaaaaggaggtgaaggaagaggggtcaccggattcatatgagctgagccctcaactggaagaactgattacgaaggtctccaaggcacaccaggaaactttcccatcactgtgtcagctcggcaagtatactacgaacagtagtgctgatcaccgagttcaactcgatctgggcctgtgggataagttttcagagctcgcgaccaaatgcatcattaagatcgtggaattcgctaagcgccttccaggcttcactggtctaagtattgcagaccagatcaccctcctgaaagcagcctgtctggacatattgatgctccgcatttgcacacggtatactcctgaacaggatacaatgactttttctgatggtctaacgctgaaccgcacacagatgcataatgcaggattcggtcctttgaccgacctggtgtttgccttcgctgggcagctccttccactagagatggacgataccgagaccggtctcttgagtgccatttgtctcatctgcggggacaggatggacctggaggaaccggaaaaggtggacaagttacaggaaccgctgctggaggcgctccggctctacgctcgcagacgccgaccctcgcagccatacatgttcccccggatgctgatgaagattaccgacttgaggggcatcagcactaagggggctgaacgcgctatcactcttaaaatggagattcccgggcctatgcctcctctgatcagagaaatgcttgagaaccccgaaatgtttgaggacgacagttcccagccaggcccacaccccaacgccagcagtgaagacgaagtgcctggcggccagggaaagggcggtctgaaaagccctgcatag

SEQ ID NO: 34050 - DNA, 1332 bp, Artificial Sequence
  derived and/or modified sequence
atgtatgactgcatggagacctttgcccctggcccccggcggctgtatggagctgctggccctggagctggcctgctgcggcgggccaccggcggcagctgctttgctggcctggagagctttgcctggccccagcctgccagcctgcagagcgtggagacccagagcaccagcagcgaggagatggtgcccagcagccccagccccccacctccaccccgggtgtacaagccctgctttgtgtgcaatgacaagagcagcggctaccactatggagtgagcagctgtgagggctgcaagggcttcttccgccgcagcatccagaagaacatggtgtacacctgccaccgggacaagaactgcatcatcaacaaggtgaccaggaaccgctgccagtactgccgcctgcagaagtgctttgaggtgggcatgagcaaggaggccgtgagaaatgacaggaacaagaagaagaaggaggtgaaggaggagggcagcccagacagctatgagctgagcccccagctggaggagctgatcaccaaggtgtccaaggcccaccaggagaccttccccagcctgtgccagctgggcaagtacaccaccaacagcagcgctgaccaccgggtgcagctggacctgggcctgtgggacaagttcagcgagctggccaccaagtgcatcatcaagatcgtggagtttgccaagaggctgcccggcttcaccggcctgagcattgctgaccagatcaccctgctgaaggccgcctgcctggacatcctgatgctgcgcatctgcacccgctacaccccagagcaggacaccatgaccttcagtgatggcctgaccctgaacagaacccagatgcacaatgccggcttcggccccctgacagacctggtgtttgcctttgctggccagctgctgcccctggagatggatgacacagaaacaggcctgctgagcgccatctgcctgatctgtggggacaggatggacctggaggagcctgagaaggtggacaagctgcaggagcccctgctggaggccctgcggctgtatgccaggagaagaagacccagccagccctacatgttccccaggatgctgatgaagatcacagacctgcggggcatcagcaccaagggagctgagcgggccatcaccctgaagatggagatccctggccccatgccacccctcatccgggagatgctggagaaccctgagatgtttgaagatgacagcagccagcccggcccccaccccaatgccagcagtgaagatgaggtgcctgggggccagggcaagggcggcctgaagagccctgcctag

SEQ ID NO: 34051 - DNA, 1332 bp, Artificial Sequence
  derived and/or modified sequence
atgtacgactgcatggagaccttcgcccccggcccccggcggctgtacggcgccgcaggccccggcgctggcctgttgaggagggcaacgggtggttcatgctttgcagggctggagtcatttgcatggccccagccggcgtccctgcagtctgtggagacccaaagcactagcagtgaggagatggtgccgagttcaccttctcccccccccccacctagggtgtacaagccatgttttgtttgtaatgacaaatcctctggatatcattatggtgtgagcagctgtgaaggctgcaagggcttttttcgccggtcgattcagaagaatatggtgtacacatgtcatcgggacaagaactgcatcatcaataaggttactagaaataggtgccagtactgccgactgcaaaagtgttttgaggtaggaatgtctaaggaagccgtgagaaacgatagaaacaaaaaaaaaaaagaagtcaaagaagagggcagtcctgatagctacgagctgtctccacaacttgaggagctgataacaaaagttagtaaagcccaccaggaaacctttccgtctctgtgtcagctggggaagtacactacaaacagctcagctgatcatcgagtccaactcgacctaggtctttgggataaattctccgaattggccacaaagtgtattattaagattgtcgagtttgctaaacgcctccctgggtttaccgggttgagtatcgccgaccagattacactactgaaagccgcgtgccttgacattttgatgctgcgtatctgcacccgttacaccccagaacaggacacaatgacattctccgatggtctcacccttaataggacccagatgcacaacgcaggctttggccctctcacagacctagttttcgcttttgccgggcagctactgcctcttgaaatggacgacacagaaacaggcctcctatccgccatttgcctcatctgtggagatcgcatggacctggaggagcctgaaaaggtggataaactgcaggagcctcttctcgaggcattaaggctctatgcaagaagacggagaccttcccagccctacatgtttcccaggatgctgatgaagattactgacttgcggggcatttcgaccaaaggtgctgagagagcgatcacgctaaaaatggaaatccccgggcctatgccccctctcattcgagaaatgctcgagaatcctgaaatgttcgaagacgactcctcacaacctggcccgcatccaaatgctagcagtgaggatgaagtccccggaggacaggggaaaggagggctgaagagccctgcctag

SEQ ID NO: 34052 - DNA, 1332 bp, Artificial Sequence
  derived and/or modified sequence
atgtacgactgtatggagactttcgctcctggaccacgccgactgtacggcgcagcaggccctggcgctgggctactccgcagagcgactggtggttcttgtttcgcaggtctggaaagttttgcttggccacagcccgcaagtctgcagtcagtagaaacgcagtccaccagctctgaggaaatggttccaagctctccttcacctcccccacctccaagggtgtacaagccctgctttgtctgcaacgacaaatcaagcggatatcattatggcgtttcttcttgtgaaggctgtaagggtttctttcgtcgaagcatacagaagaacatggtgtatacatgtcatcgggataaaaattgcataatcaacaaagtaacacgaaatcgctgccagtattgtaggctgcagaaatgttttgaagtggggatgagcaaggaagctgtacgcaatgacagaaataaaaagaagaaagaagtcaaggaggagggcagtccagacagctatgagctgagtcctcagctagaggaacttatcactaaggtttcgaaggctcatcaggaaaccttcccatccctgtgccagctggggaaatataccactaatagtagcgctgaccacagggtgcagctcgatctgggcctgtgggataagttttctgagctggctacaaagtgcattataaaaattgtggagttcgctaaacgcctcccaggattcacaggattaagtattgccgatcagattactctgctgaaagccgcttgcctggacatcctgatgttgcgcatctgtacacggtatacccccgaacaggatacaatgaccttttctgatggacttacactgaaccggactcaaatgcataacgcaggcttcgggccactgacagatcttgtcttcgcgttcgctgggcaactcttaccactggaaatggacgacacggaaacaggtctgctgtcagcgatttgcctgatctgcggcgacaggatggacctcgaggagccagaaaaggtggacaagctccaggaaccacttctggaggccttgcgcctgtacgcacggagaagaaggcctagccaaccttacatgttccccaggatgctcatgaagataactgacctgcgcggtatctccaccaaaggcgctgagagggctattaccttgaaaatggaaataccgggacctatgcccccactgataagagagatgttggagaatcctgaaatgtttgaggacgatagttcccagccaggaccacatcccaatgcctcaagcgaagatgaggtgcctggcggacagggcaaaggtgggttgaagtcacctgcctag

SEQ ID NO: 34053 - DNA, 2074 bp, Artificial Sequence
  derived and/or modified sequence
gagaaaatgtgtcggatattttggggcggtcacgtgggcgggcgggctccgagaggccccgggacagtcccagcctagagccgtgcccccccaggagccccccagtacggcgagccccggacattgcgacgctccatccaagagactgcccgacgccgggacctcggggctccgccgcctcccttccccctcccactccagcagctacggcccagttccctcaacctgacccagtatgtagaagccagtctctgcaggcggccagcggcggtggagacacagagcaccagctcagaggagatggtgcccagctcgccctcgccccctccgcctcctcgggtctacaagccatgcttcgtgtgcaatgacaagtcctctggctaccactatggggtcagctcttgtgaaggctgcaagggcttctttcgccgaagcatccagaagaacatggtgtacacgtgtcaccgcgacaaaaactgtatcatcaacaaggtgaccaggaatcgctgccagtactgccggctacagaagtgcttcgaagtgggcatgtccaaggaagctgtgcgaaatgaccggaacaagaagaagaaagaggtgaaggaagaagggtcacctgacagctatgagctgagccctcagttagaagagctcatcaccaaggtcagcaaagcccatcaggagactttcccctcgctctgccagctgggcaagtataccacgaactccagtgcagaccaccgcgtgcagctggatctggggctgtgggacaagttcagtgagctggctaccaagtgcatcatcaagatcgtggagtttgccaagcggttgcctggctttacagggctcagcattgctgaccagatcactctgctcaaagctgcctgcctagatatcctgatgctgcgtatctgcacaaggtacaccccagagcaggacaccatgaccttctccgacgggctgaccctgaaccggacccagatgcacaatgccggcttcgggcccctcacagaccttgtctttgcctttgctgggcagctcctgcccctggagatggatgacaccgagacagggctgctcagcgccatctgcctcatctgcggagaccgcatggacctggaggagcccgaaaaagtggacaagctgcaggagccactgctggaagccctgaggctgtacgcccggcgccggcggcccagccagccctacatgttcccaaggatgctaatgaaaatcaccgacctccggggcatcagcactaagggagctgaaagggccattactctgaagatggagattccaggcccgatgcctcccttaatccgagagatgctggagaaccctgaaatgtttgaggatgactcctcgcagcctggtccccaccccaatgcctctagcgaggatgaggttcctgggggccagggcaaagggggcctgaagtccccagcctgaccagggcccctgacctccccgctgtgggggttggggcttcaggcagcagactgaccatctcccagaccgccagtgactgggggaggacctgctctgccctctccccaccccttccaatgagctccttgtttttgccaaagtttctaggggtgcctctgtgttcatccccttcctgatctaaccggctccctcgccagtcccgggggcctgccctgctcccaccaggagagagggcaaagggatgagcctgggtttggactctaaaatctcagcactgccccatgggtcctagacttcccagggcaagaggaagaccctgccattccacagccccttcctctgccaggtgcttggctctctgagagcaaacaggaacactagagaccaaaaaggggacaaaggagaagggctgagcccaccttcttgctcctacccttggtgcctaatgctgtgtgatgcacctgcagggtgtgtgctagcctctgtgccccgtccttgtgccaggtcaaggtgggggcaggctgggccctgcatttctggggcaggaacagagggtgaaagggacagatagatgcaggtccattctgcacctcttggctcgggtgcagagttcaccctgtgccct

SEQ ID NO: 34054 - DNA, 1836 bp, Artificial Sequence
  derived and/or modified sequence
ctcttccccgcccaccccttacccgcatgcagcccagcgccctatgctagccctccccctccccccctgctggagcggggcgccgccgggggaggagggggaatcggctgcgggtccttggtgtttccagcacccagtttcccttcaagccgggtcgcgatgtacgactgtatggaaacgtttgccccgggtccgcgacggctgtacggggcggccgggcccggggccggcttgctgcgcagagccaccggcggctcctgtttcgccggacttgaatcttttgcctggccgcaacccgccagcctgcaatcggtggagacacagagcaccagctcagaggagatggtgcccagctcgccctcgccccctccgcctcctcgggtctacaagccatgcttcgtgtgcaatgacaagtcctctggctaccactatggggtcagctcttgtgaaggctgcaagggcttctttcgccgaagcatccagaagaacatggtgtacacgtgtcaccgcgacaaaaactgtatcatcaacaaggtgaccaggaatcgctgccagtactgccggctacagaagtgcttcgaagtgggcatgtccaaggaagctgtgcgaaatgaccggaacaagaagaagaaagaggtgaaggaagaagggtcacctgacagctatgagctgagccctcagttagaagagctcatcaccaaggtcagcaaagcccatcaggagactttcccctcgctctgccagctgggcaagtataccacgaactccagtgcagaccaccgcgtgcagctggatctggggctgtgggacaagttcagtgagctggctaccaagtgcatcatcaagatcgtggagtttgccaagcggttgcctggctttacagggctcagcattgctgaccagatcactctgctcaaagctgcctgcctagatatcctgatgctgcgtatctgcacaaggtacaccccagagcaggacaccatgaccttctccgacgggctgaccctgaaccggacccagatgcacaatgccggcttcgggcccctcacagaccttgtctttgcctttgctgggcagctcctgcccctggagatggatgacaccgagacagggctgctcagcgccatctgcctcatctgcggagaccgcatggacctggaggagcccgaaaaagtggacaagctgcaggagccactgctggaagccctgaggctgtacgcccggcgccggcggcccagccagccctacatgttcccaaggatgctaatgaaaatcaccgacctccggggcatcagcactaagggagctgaaagggccattactctgaagatggagattccaggcccgatgcctcccttaatccgagagatgctggagaaccctgaaatgtttgaggatgactcctcgcagcctggtccccaccccaatgcctctagcgaggatgaggttcctgggggccagggcaaagggggcctgaagtccccagcctgaccagggcccctgacctccccgctgtgggggttggggcttcaggcagcagactgaccatctcccagaccgccagtgactgggggaggacctgctctgccctctccccaccccttccaatgagctccttgtttttgccaaagtttctaggggtgcctctgtgttcatccccttcctgatctaaccggctccctcgccagtcccgggggcctgccctgctcccaccaggagagagggcaaagggatgagcctgggtttggactctaaaatctcagcactgccccatgggtcctagacttcccagggcaagaggaagaccctgccattccacagccccttcctctgcca

SEQ ID NO: 34055 - DNA, 1332 bp, Artificial Sequence
  derived and/or modified sequence
atgtacgactgcatggagaccttcgcccccggccccagaagactgtacggcgccgccggccccggcgccggcctgctgagaagagccaccggcggcagctgcttcgccggcctggagagcttcgcctggccccagcccgccagcctgcagagcgtggagacccagagcaccagcagcgaggagatggtgcccagcagccccagccccccccccccccccagagtgtacaagccctgcttcgtgtgcaacgacaagagcagcggctaccactacggcgtgagcagctgcgagggctgcaagggcttcttcagaagaagcatccagaagaacatggtgtacacctgccacagagacaagaactgcatcatcaacaaggtgaccagaaacagatgccagtactgcagactgcagaagtgcttcgaggtgggcatgagcaaggaggccgtgagaaacgacagaaacaagaagaagaaggaggtgaaggaggagggcagccccgacagctacgagctgagcccccagctggaggagctgatcaccaaggtgagcaaggcccaccaggagaccttccccagcctgtgccagctgggcaagtacaccaccaacagcagcgccgaccacagagtgcagctggacctgggcctgtgggacaagttcagcgagctggccaccaagtgcatcatcaagatcgtggagttcgccaagagactgcccggcttcaccggcctgagcatcgccgaccagatcaccctgctgaaggccgcctgcctggacatcctgatgctgagaatctgcaccagatacacccccgagcaggacaccatgaccttcagcgacggcctgaccctgaacagaacccagatgcacaacgccggcttcggccccctgaccgacctggtgttcgccttcgccggccagctgctgcccctggagatggacgacaccgagaccggcctgctgagcgccatctgcctgatctgcggcgacagaatggacctggaggagcccgagaaggtggacaagctgcaggagcccctgctggaggccctgagactgtacgccagaagaagaagacccagccagccctacatgttccccagaatgctgatgaagatcaccgacctgagaggcatcagcaccaagggcgccgagagagccatcaccctgaagatggagatccccggccccatgccccccctgatcagagagatgctggagaaccccgagatgttcgaggacgacagcagccagcccggcccccaccccaacgccagcagcgaggacgaggtgcccggcggccagggcaagggcggcctgaagagccccgcctag

SEQ ID NO: 34056 - protein, 1233 aa, Artificial Sequence
  derived and/or modified sequence
MSAPAGSSHPAASARIPPKFGGAAVSGAAAPAGPGAGPAPHQQNGPAQNQMQVPSGYGLHHQNYIAPSGHYSQGPGKMTSLPLDTQCGDYYSALYTVPTQNVTPNTVNQQPGAQQLYSRGPPAPHIVGSTLGSFQGAASSASHLHTSASQPYSSFVNHYNSPAMYSASSSVASQGFPSTCGHYAMSTVSNAAYPSVSYPSLPAGDTYGQMFTSQNAPTVRPVKDNSFSGQNTAISHPSPLPPLPSQQHHQQQSLSGYSTLTWSSPGLPSTQDNLIRNHTGSLAVANNNPTITVADSLSCPVMQNVQPPKSSPVVSTVLSGSSGSSSTRTPPTANHPVEPVTSVTQPSELLQQKGVDSSSTTSSASPMPNSYDALEGGSYPDMLSSSASSPAPDPAPEPDPASAPAPASAPAPVVPQPSKMAKPFGYGYPTLQPGYQNATAPLISGVQPSNPVYSGFQQYPQQYPGVNQLSSSIGGLSLQSSPQPESLRPVNLTQERNILPMTPVWAPVPNLNADLKKLNCSPDSFRCTLTNIPQTQALLNKAKLPLGLLLHPFRDLTQLPVITSNTIVRCRSCRTYINPFVSFIDQRRWKCNLCYRVNDVPEEFMYNPLTRSYGEPHKRPEVQNSTVEFIASSDYMLRPPQPAVYLFVLDVSHNAVEAGYLTILCQSLLENLDKLPGDSRTRIGFMTFDSTIHFYNLQEGLSQPQMLIVSDIDDVFLPTPDSLLVNLYESKELIKDLLNALPNMFTNTRETHSALGPALQAAFKLMSPTGGRVSVFQTQLPSLGAGLLQSREDPNQRSSTKVVQHLGPATDFYKKLALDCSGQQTAVDLFLLSSQYSDLASLACMSKYSAGCIYYYPSFHYTHNPSQAEKLQKDLKRYLTRKIGFEAVMRIRCTKGLSMHTFHGNFFVRSTDLLSLANINPDAGFAVQLSIEESLTDTSLVCFQTALLYTSSKGERRIRVHTLCLPVVSSLADVYAGVDVQAAICLLANMAVDRSVSSSLSDARDALVNAVVDSLSAYGSTVSNLQHSALMAPSSLKLFPLYVLALLKQKAFRTGTSTRLDDRVYAMCQIKSQPLVHLMKMIHPNLYRIDRLTDEGAVHVNDRIVPQPPLQKLSAEKLTREGAFLMDCGSVFYIWVGKGCDNNFIEDVLGYTNFASIPQKMTHLPELDTLSSERARSFITWLRDSRPLSPILHIVKDESPAKAEFFQHLIEDRTEAAFSYYEFLLHVQQQICK

SEQ ID NO: 34057 - DNA, 3702 bp, Artificial Sequence
  derived and/or modified sequence
atgagcgcccccgccggcagcagccaccccgccgccagcgccagaatcccccccaagttcggcggcgccgccgtgagcggcgccgccgcccccgccggccccggcgccggccccgccccccaccagcagaacggccccgcccagaaccagatgcaggtgcccagcggctacggcctgcaccaccagaactacatcgcccccagcggccactacagccagggccccggcaagatgaccagcctgcccctggacacccagtgcggcgactactacagcgccctgtacaccgtgcccacccagaacgtgacccccaacaccgtgaaccagcagcccggcgcccagcagctgtacagcagaggcccccccgccccccacatcgtgggcagcaccctgggcagcttccagggcgccgccagcagcgccagccacctgcacaccagcgccagccagccctacagcagcttcgtgaaccactacaacagccccgccatgtacagcgccagcagcagcgtggccagccagggcttccccagcacctgcggccactacgccatgagcaccgtgagcaacgccgcctaccccagcgtgagctaccccagcctgcccgccggcgacacctacggccagatgttcaccagccagaacgcccccaccgtgagacccgtgaaggacaacagcttcagcggccagaacaccgccatcagccaccccagccccctgccccccctgcccagccagcagcaccaccagcagcagagcctgagcggctacagcaccctgacctggagcagccccggcctgcccagcacccaggacaacctgatcagaaaccacaccggcagcctggccgtggccaacaacaaccccaccatcaccgtggccgacagcctgagctgccccgtgatgcagaacgtgcagccccccaagagcagccccgtggtgagcaccgtgctgagcggcagcagcggcagcagcagcaccagaaccccccccaccgccaaccaccccgtggagcccgtgaccagcgtgacccagcccagcgagctgctgcagcagaagggcgtggacagcagcagcaccaccagcagcgccagccccatgcccaacagctacgacgccctggagggcggcagctaccccgacatgctgagcagcagcgccagcagccccgcccccgaccccgcccccgagcccgaccccgccagcgcccccgcccccgccagcgcccccgcccccgtggtgccccagcccagcaagatggccaagcccttcggctacggctaccccaccctgcagcccggctaccagaacgccaccgcccccctgatcagcggcgtgcagcccagcaaccccgtgtacagcggcttccagcagtacccccagcagtaccccggcgtgaaccagctgagcagcagcatcggcggcctgagcctgcagagcagcccccagcccgagagcctgagacccgtgaacctgacccaggagagaaacatcctgcccatgacccccgtgtgggcccccgtgcccaacctgaacgccgacctgaagaagctgaactgcagccccgacagcttcagatgcaccctgaccaacatcccccagacccaggccctgctgaacaaggccaagctgcccctgggcctgctgctgcaccccttcagagacctgacccagctgcccgtgatcaccagcaacaccatcgtgagatgcagaagctgcagaacctacatcaaccccttcgtgagcttcatcgaccagagaagatggaagtgcaacctgtgctacagagtgaacgacgtgcccgaggagttcatgtacaaccccctgaccagaagctacggcgagccccacaagagacccgaggtgcagaacagcaccgtggagttcatcgccagcagcgactacatgctgagacccccccagcccgccgtgtacctgttcgtgctggacgtgagccacaacgccgtggaggccggctacctgaccatcctgtgccagagcctgctggagaacctggacaagctgcccggcgacagcagaaccagaatcggcttcatgaccttcgacagcaccatccacttctacaacctgcaggagggcctgagccagccccagatgctgatcgtgagcgacatcgacgacgtgttcctgcccacccccgacagcctgctggtgaacctgtacgagagcaaggagctgatcaaggacctgctgaacgccctgcccaacatgttcaccaacaccagagagacccacagcgccctgggccccgccctgcaggccgccttcaagctgatgagccccaccggcggcagagtgagcgtgttccagacccagctgcccagcctgggcgccggcctgctgcagagcagagaggaccccaaccagagaagcagcaccaaggtggtgcagcacctgggccccgccaccgacttctacaagaagctggccctggactgcagcggccagcagaccgccgtggacctgttcctgctgagcagccagtacagcgacctggccagcctggcctgcatgagcaagtacagcgccggctgcatctactactaccccagcttccactacacccacaaccccagccaggccgagaagctgcagaaggacctgaagagatacctgaccagaaagatcggcttcgaggccgtgatgagaatcagatgcaccaagggcctgagcatgcacaccttccacggcaacttcttcgtgagaagcaccgacctgctgagcctggccaacatcaaccccgacgccggcttcgccgtgcagctgagcatcgaggagagcctgaccgacaccagcctggtgtgcttccagaccgccctgctgtacaccagcagcaagggcgagagaagaatcagagtgcacaccctgtgcctgcccgtggtgagcagcctggccgacgtgtacgccggcgtggacgtgcaggccgccatctgcctgctggccaacatggccgtggacagaagcgtgagcagcagcctgagcgacgccagagacgccctggtgaacgccgtggtggacagcctgagcgcctacggcagcaccgtgagcaacctgcagcacagcgccctgatggcccccagcagcctgaagctgttccccctgtacgtgctggccctgctgaagcagaaggccttcagaaccggcaccagcaccagactggacgacagagtgtacgccatgtgccagatcaagagccagcccctggtgcacctgatgaagatgatccaccccaacctgtacagaatcgacagactgaccgacgagggcgccgtgcacgtgaacgacagaatcgtgccccagccccccctgcagaagctgagcgccgagaagctgaccagagagggcgccttcctgatggactgcggcagcgtgttctacatctgggtgggcaagggctgcgacaacaacttcatcgaggacgtgctgggctacaccaacttcgccagcatcccccagaagatgacccacctgcccgagctggacaccctgagcagcgagagagccagaagcttcatcacctggctgagagacagcagacccctgagccccatcctgcacatcgtgaaggacgagagccccgccaaggccgagttcttccagcacctgatcgaggacagaaccgaggccgccttcagctactacgagttcctgctgcacgtgcagcagcagatctgcaagtag

SEQ ID NO: 34058 - DNA, 3702 bp, Artificial Sequence
  derived and/or modified sequence
atgagtgcgcccgccggaagcagccatccagcagcctccgcccgaatccctcccaagtttgggggcgctgcagtcagcggagctgccgcaccagctgggcccggtgccggaccagcacctcaccagcagaatggccccgcccagaaccagatgcaggtgccttcaggttacggtctacatcatcaaaattatattgcaccaagtggacattacagtcagggccctggtaaaatgacctcattgccgctggatacccagtgtggcgactactatagcgcgctgtacactgtgccaactcaaaatgtcacgccaaacactgtgaaccagcagccaggggcccaacagttatacagccgggggccccccgcccctcacattgtgggatctaccctgggctcttttcagggggccgcgtcctcagcgtcccatctgcacacatccgctagccaaccatactctagcttcgtgaaccactataacagcccggccatgtattcagccagtagctccgtggcgtctcagggttttccctcaacgtgcggacattacgctatgagcacagtgagtaatgcggcctatccttcagtgagctatccctctctccccgcaggtgacacttacggacagatgttcacatcgcaaaatgcacccactgttcggccagttaaagataacagcttttccgggcagaacactgccatctcccatcccagccctttaccacctttgccctcccagcaacaccaccagcaacagagcctgtcagggtactccaccctgacctggagttcccccgggctacccagcacgcaggacaatctgatacggaatcatactgggtcattggcggtggctaacaacaaccctacgattaccgtcgctgactcgttgtcttgtccggtgatgcagaacgtacagccaccgaagagctccccagttgttagtaccgtgctcagtggttcttccggtagctcatctacccgtaccccccccactgcgaaccaccctgttgagccagtcacctctgtcacgcaacccagcgagctgttacagcagaagggcgtagacagctcaagtacgactagctccgccagccctatgccaaattcttacgatgccttagagggcggctcttatcccgatatgctttcttcttctgctagcagccctgcgcctgaccccgcccccgaaccagaccccgcctctgctcccgctccagcctccgccccagcccccgtggtgccacagccatccaagatggccaagcccttcgggtacggatatcccactttacagccggggtaccagaatgctacagccccacttatctcaggcgtccaaccctccaaccccgtgtacagcggatttcaacaatatccgcagcagtatcctggcgtgaatcaactctcctcatcaatcggcggtctgagcctgcagagtagcccacagcccgagtctttacggccagttaacctcactcaagagagaaatatcctgcccatgacccctgtatgggcaccagtgcctaacctaaatgccgatcttaaaaaactgaactgcagcccagacagtttccggtgtaccctcacaaacattccccagacgcaagcacttttgaacaaagccaagcttccactggggctcctcttgcatcccttccgtgatctaactcaactgccagtgatcacatcaaacaccatagtgagatgccgctcgtgtcggacctacatcaacccttttgtctccttcatcgaccaaagaagatggaagtgcaacctgtgttacagagtaaacgacgttccagaggagttcatgtataacccattgaccagatcctacggagaaccacacaagcgcccagaagtgcaaaactcaacagtggagttcattgcttcatccgattacatgctccgacctccacaacccgcagtttatttgttcgtgctggatgtgtcacacaacgcggtagaggcagggtatctgactattttgtgtcagagcctgctcgagaacctggataaacttcccggcgattcacggactcgaattgggtttatgacattcgattccaccatccacttttataacctgcaggaaggattatcccaaccgcagatgcttattgtctcagacattgacgatgtctttctcccaacccctgacagtctgctggtgaacctgtatgaatcaaaagagcttattaaggacctactcaacgccctgcccaacatgtttaccaatacgagagagacccatagtgcgctgggaccagccctgcaagctgcattcaaacttatgtcgcccacaggaggtcgggtctccgtcttccagacacagctgccctctctgggcgccggcttactccagtctcgggaggatcccaaccagcggtcgtcaaccaaggtcgtacagcatcttggccctgccacggacttctataagaaactggctctggattgcagcggacaacagactgcggtggacctgttcctgctatccagtcagtattccgacttggcttcgctagcgtgcatgagtaaatacagcgctggctgtatctattattatccatccttccactacacccacaacccttcacaagccgagaaactgcaaaaggaccttaaaaggtatctgactcgtaagataggcttcgaagcagtcatgcgtattcgctgcacgaaaggtctgagcatgcacaccttccacggcaacttcttcgtgcggagtacagatctcctgtcactggccaatattaatcctgatgcaggttttgcggtgcagctgagtattgaggagtctctgaccgacactagcttggtgtgtttccagactgcactgctgtacacatcatcaaagggcgaaaggaggattcgagtgcacactctgtgtttgcccgttgtctcgtctctggccgacgtgtacgcaggcgtcgacgttcaggcagcaatatgtctattggccaatatggcagtcgaccgctcagtgagttcttccctcagcgatgcacgtgatgcattagtcaacgcggtcgtcgactcactgtccgcatacgggagcaccgtcagcaacctgcaacatagcgcccttatggcaccctccagtttgaagctgttccccctgtacgtcctagcactgctgaagcagaaagcatttcggaccggcacttctacgcgcctggacgatcgcgtgtacgcaatgtgccagattaaaagccagcccctagttcacctcatgaagatgatccatcccaatctgtacaggatagacaggttgacggatgaaggcgcagtgcatgtcaatgatcggatcgtccctcagcctcccctgcaaaagctgtcagccgagaaactgacgcgcgaaggggccttcctcatggactgtggctctgttttctacatctgggtcggtaaggggtgcgacaataactttattgaagatgtgttagggtacacgaactttgccagtatcccgcagaagatgacacacctgcccgagctggatactttgagctccgaaagagctcgatcgttcatcacatggctcagggacagtagacccctgtcgcccattttacacatagtgaaggatgagtcgcctgctaaggcggaatttttccaacacctgatcgaagacagaacagaagcagctttcagttactacgagtttctgctccacgtgcagcagcaaatctgcaaatag

SEQ ID NO: 34059 - DNA, 3702 bp, Artificial Sequence
  derived and/or modified sequence
atgtctgccccagctggcagcagccaccctgctgccagcgcccgcatcccccccaagtttggaggagctgctgtgtctggagctgctgccccagctggccctggggccggccctgccccccaccagcagaatggacctgcccagaaccagatgcaggtgcccagcggctacggcctgcaccaccagaactacatcgcccccagcggccactacagccagggccctgggaagatgaccagcctgcccctggacacccagtgtggggactactacagcgccctgtacacagtgcccacccagaatgtgacccccaacacagtgaaccagcagcccggggcccagcagctgtacagccggggccccccagccccccacatcgtgggcagcaccctgggcagcttccagggcgccgccagcagcgccagccacctgcacaccagcgccagccagccctacagcagctttgtgaaccactacaacagccctgccatgtacagcgccagcagctctgtggccagccagggcttccccagcacctgtggccactacgccatgagcacagtgtccaatgctgcctaccccagcgtgtcctaccccagcctgcctgctggggacacctacggccagatgttcaccagccagaatgcccccaccgtgcggcctgtgaaggacaacagcttcagcggccagaacacagccatcagccaccccagccccctgccccccctgcccagccagcagcaccaccagcagcagagcctgagcggctacagcaccctgacctggagcagccctggcctgcccagcacccaggacaacctgatccggaaccacacaggcagcctggccgtggccaacaacaaccccaccatcaccgtggccgacagcctgagctgccctgtgatgcagaatgtgcagccccccaagagcagccctgtggtgtccacagtgctgagcggcagcagcggcagcagcagcaccaggaccccacccacagccaaccaccctgtggagcctgtgacctctgtgacccagcccagcgagctgctgcagcagaagggcgtggacagcagcagcaccaccagcagcgccagccccatgcccaacagctatgatgccctggagggcggcagctacccagacatgctgagcagcagcgccagcagccctgccccagaccctgcccctgagccagaccctgccagcgccccagccccagccagcgccccagcccctgtggtgccccagcccagcaagatggccaagcccttcggctacggctaccccaccctgcagcccggctaccagaatgccacagcccccctcatcagcggcgtgcagcccagcaaccctgtgtacagcggcttccagcagtacccccagcagtacccaggagtgaaccagctgagcagcagcattggaggcctgagcctgcagagcagcccccagcctgagagcctgcggcctgtgaacctgacccaggagaggaacatcctgcccatgacccctgtgtgggcccctgtgcccaacctgaatgctgacctgaagaagctgaactgcagcccagacagcttccgctgcaccctgaccaacatcccccagacccaggccctgctgaacaaggccaagctgcccctgggcctgctgctgcaccccttccgggacctgacccagctgcccgtcatcaccagcaacaccatcgtgcgctgccgcagctgcaggacctacatcaacccctttgtgtccttcatcgaccagaggcgctggaagtgcaacctgtgctacagagtgaatgatgtgcctgaggagttcatgtacaaccccctgaccaggagctatggagagccccacaagaggcctgaggtgcagaacagcacagtggagttcatcgccagcagtgactacatgctgcggcccccccagcctgctgtgtacctgtttgtgctggatgtgagccacaatgctgtggaggccggctacctgaccatcctgtgccagagcctgctggagaacctggacaagctgcccggggacagcaggaccagaattggcttcatgacctttgacagcaccatccacttctacaacctgcaggagggcctgagccagccccagatgctgattgtgtctgacattgatgatgtgttcctgcccaccccagacagcctgctggtgaacctgtatgagagcaaggagctgatcaaggacctgctgaatgccctgcccaacatgttcaccaacacccgggagacccacagcgccctgggccctgccctgcaggccgccttcaagctgatgagccccactggaggccgggtgtctgtgttccagacccagctgcccagcctgggcgccggcctgctgcagagccgggaggaccccaaccagaggagcagcaccaaggtggtgcagcacctgggccctgccacagacttctacaagaagctggccctggactgcagcggccagcagacagctgtggacctcttcctgctgagcagccagtacagcgacctggccagcctggcctgcatgagcaagtacagcgctggctgcatctactactaccccagcttccactacacccacaaccccagccaggccgagaagctgcagaaggacctgaagcgctacctgaccaggaagattggatttgaagctgtgatgaggatccgctgcaccaagggcctgtccatgcacaccttccacggcaacttctttgtgcgcagcacagacctgctgagcctggccaacatcaacccagatgctggctttgctgtgcagctgagcattgaggagagcctgacagacaccagcctggtgtgcttccagacagccctgctgtacaccagcagcaaaggagagcggcgcatccgggtgcacaccctgtgcctgcctgtggtgagcagcctggctgatgtgtatgctggggtggatgtgcaggccgccatctgcctgctggccaacatggctgtggacagatctgtgagcagcagcctgagtgatgccagagatgccctggtgaatgctgtggtggacagcctgagcgcctacggcagcacagtgagcaacctgcagcacagcgccctgatggcccccagcagcctgaagctgttccccctgtatgtgctggccctgctgaagcagaaggccttcagaacaggcaccagcacccggctggatgacagagtgtatgccatgtgccagatcaagagccagcccctggtgcacctgatgaagatgatccaccccaacctgtacagaattgaccggctgacagatgagggcgctgtgcacgtgaatgaccgcatcgtgccccagccccccctgcagaagctgtctgctgagaagctgacccgggagggcgccttcctgatggactgtggcagcgtcttctacatctgggtgggcaagggctgtgacaacaacttcattgaagatgtgctgggctacaccaactttgccagcatcccccagaagatgacccacctgcctgagctggacaccctgagcagcgagcgggcccgctccttcatcacctggctgcgggacagccggcccctgagccccatcctgcacatcgtgaaggatgagagccctgccaaggccgagttcttccagcacctgattgaggacagaacagaggccgccttctcctactatgagttcctgctgcacgtgcagcagcagatctgcaagtag

SEQ ID NO: 34060 - DNA, 3702 bp, Artificial Sequence
  derived and/or modified sequence
atgagcgcccccgccggcagcagccaccccgccgccagcgcccggataccaccaaagttcgggggagcagctgttagcggggcagcagcaccggccggcccaggggctggtcctgcaccacaccagcaaaatgggcccgcccagaatcagatgcaagtgccatcggggtacggtcttcaccaccaaaactatatcgctccgtctggccactacagccagggacccgggaagatgacatcactcccactggatactcagtgcggcgactactatagtgccctctataccgtacccacacaaaatgttacccctaacaccgtcaatcagcagccaggagcccagcagttgtattcccgcgggcctccagctccccacatagttggcagcacactggggagcttccaaggtgcagccagttctgcaagccacctccacacctccgccagtcagccgtactcttcgttcgtcaatcactacaattcgccagcaatgtactcagctagctcatccgtggccagccagggattccctagcacctgtggacactacgccatgagcacagtgagtaatgccgcctatccttcagtgtcctacccgtcacttcctgccggcgacacttacggtcagatgtttacttcacaaaatgcccccacggtacggcccgttaaagacaactcctttagcggccagaataccgctatctctcacccatcgccactgcctcctctcccttcacagcagcaccaccagcaacaaagcttgtccggatatagcactctcacatggtcttcccccggtctcccttctacccaagacaacctgatccgcaatcatacgggatccttagcagtcgccaacaacaatcccactatcaccgtcgcggactcattgtcctgccctgtcatgcagaacgtgcagccacccaaatctagccccgttgtatctacagtgctgtctggctcatctggctcctcctctacgagaactccacctaccgcgaaccatcccgtcgagcccgtcacaagcgtcactcagccatcagagcttcttcagcaaaagggcgtagatagctcttctactacctcttccgcctcgcccatgcccaacagctatgatgcccttgagggcggttcttacccagatatgctgagttcctcggccagttcccccgcccctgatccagcacccgaaccagatccagcctctgcaccagctcccgcatctgcccctgcacccgtcgtccctcaaccttctaaaatggccaaaccgttcggatacggctatccaacattacagcccggataccagaatgctacagcccccctaatttccggggtccaacccagcaacccggtgtacagcggctttcagcagtatcctcagcagtatcctggcgtcaatcagctctctagctctatcgggggcctctctctgcaatcctcccctcagcccgaatctttgcgtcccgttaacctgacacaagaaagaaatatcctcccgatgacccctgtatgggcccccgtcccaaatctgaatgctgaccttaagaagttgaattgtagccccgattcctttcgatgcacattgacaaacattcctcaaacacaagccctcctcaataaggcgaaattacccctcggactgctgctgcacccctttcgggacctcacgcaactgccagttataacttcaaacacaatcgttaggtgcagaagttgtagaacatatattaatccttttgtgagctttatcgaccaaagacgctggaagtgtaacctgtgttatcgagtgaacgacgtgcctgaggagtttatgtataaccctttgactcgcagctacggtgagccccataagcgtcctgaggttcagaactcaacagtggaatttatcgccagctcagattatatgctgcgacccccccagccagcagtgtacctctttgtgctcgacgtttcgcataatgcagtcgaggccggatacctgactatcctgtgtcagtctctgctggaaaacctggacaaactcccgggcgacagtcgtaccagaataggattcatgactttcgacagcaccatccatttttacaatctccaggagggcctctcacagccgcagatgctgattgtgagtgacatcgacgacgtcttcctgcctacccctgatagcctccttgtgaacttatacgaatccaaagaactgattaaagaccttctgaatgccttacctaacatgtttacaaacactagagagacacacagcgcattgggacccgctctgcaggccgcattcaaacttatgtcccctaccgggggtcgtgtgagtgtattccagactcaactccctagcctgggagctggactcctccaatcaagagaagatcccaatcagagatcctccaccaaagtggtacagcatctgggccctgctaccgacttttataagaaactcgccttggattgttcaggccagcagactgctgtggatctcttcttgctaagttcgcagtatagtgatctagccagtcttgcctgcatgtcaaagtacagcgcggggtgtatctattactaccccagtttccattacacccataatcctagccaggcggaaaagctacagaaggatttgaagcggtatctgacacgcaagattggttttgaagcagtaatgcgcattagatgtactaaaggcctctcaatgcacactttccacggtaacttctttgtgcgttccaccgaccttcttagcctcgctaacatcaatccagacgccggatttgcagtgcagctctccatagaagaaagtctgactgatacttccctggtgtgtttccaaacggccctgttgtatacgtcaagcaagggggagcgtaggatccgggtacacaccctatgtctgcctgtagtcagctccctggcggatgtgtatgctggagtggacgtgcaagccgctatttgcctgctggctaacatggccgtcgaccgatcagtaagcagcagtctgtccgacgcacgggacgccctcgtcaatgcggtggtggattctctgtcagcgtatggttccaccgttagcaacctgcagcactcggcactaatggcgccatcaagccttaagttattccccctgtacgttcttgcgcttctcaaacagaaggcgtttagaaccggaacaagcactcgtctcgacgaccgtgtttacgcaatgtgccagatcaaaagccagcctctggttcacctcatgaagatgattcaccccaacctgtaccggatagaccgactgaccgacgagggcgctgtgcacgttaacgaccggatcgtgccccagccacccctgcagaagctatcagctgagaaactgaccagagagggagcttttctcatggattgcgggagcgtattttacatctgggtcggtaagggctgcgacaacaatttcattgaggatgtactgggctacactaactttgccagcatccctcagaaaatgacacatctccctgaactagacactttgagtagcgaacgtgccaggtcgttcatcacctggctcagggacagccggcctctttctcccattctccacatcgtgaaggatgaatcacccgctaaggcggaattttttcagcacctcatcgaggatcggaccgaggcagctttcagctactacgagtttctccttcacgtccagcagcagatctgtaagtag

SEQ ID NO: 34061 - DNA, 3702 bp, Artificial Sequence
  derived and/or modified sequence
atgagcgcccctgcaggatcttcccaccccgcagcgagtgcccgtatcccaccaaaattcggaggagccgcagtctcaggtgctgctgcgcctgcaggtcccggagcgggaccggcaccgcaccagcagaacggccctgctcagaatcagatgcaagtcccctccggttacgggctgcaccaccagaactatattgccccatctgggcactactctcagggaccaggcaagatgacctcacttcccttggatacacagtgtggggactactacagcgctttgtacacagtgcccacgcagaatgtcacaccgaacacagttaatcagcagcccggtgcccagcaactgtattccagggggcctcccgctcctcacattgttggctctactctcggatctttccagggcgctgcatctagtgcctcacatctacatacctccgcgtcccagccttatagctcttttgtgaaccattataattctcctgctatgtattccgcttcatctagcgtggctagtcagggattcccctcgacttgcggtcactacgcaatgagcacagtgtccaacgctgcttacccctccgtgtcatatccttcgcttccggctggggacacctacgggcagatgttcacatcacaaaacgccccaacagtcaggccagtcaaagacaatagcttcagcggccagaataccgcaatcagccacccaagcccactgccaccactccccagccagcaacaccatcaacaacaatcactgtccgggtatagtacactcacatggagctcccccggactgccatccacccaagataatctcatcagaaaccacacgggcagcctcgccgtagccaacaacaatcctacaatcacggtcgctgattctctctcatgccccgtcatgcagaacgtacagccccctaaatcatcacccgtggtatccaccgttctgtcaggttcttccgggtctagctccactaggacccctccaacggctaaccacccagtcgaacctgttacttctgtgactcagccttccgagctcttacagcagaaaggtgtggattccagctcaacaacctctagtgcttcaccaatgccgaactcttatgacgctctggaaggcggaagctacccggacatgctgagctcctccgccagttcccctgcccctgatccagccccagagcccgatccagcctcagctcccgctcctgccagtgcgcctgcaccggtagtcccccagccatccaagatggcaaaacccttcggttacggatacccaaccctgcaacccggatatcaaaatgctactgccccattaatcagcggagtgcaaccatccaaccctgtgtactccggattccagcagtatccgcaacagtatcctggcgttaatcagttatcttcctctatcggagggctttcgttgcagagctctccacaacctgaatcactgcgacccgtgaacctgacgcaggagagaaacattctgccgatgactcccgtctgggcaccggtgcccaacttgaatgcagacctgaaaaagctgaactgcagccctgattcattcaggtgcaccctaacgaatatcccacaaacccaggcactactgaacaaggctaaactaccccttggtctgcttctgcaccctttccgcgacctaacacagctgcccgtgatcacctccaataccattgtgaggtgtagatcatgcagaacgtatatcaatccatttgtgagcttcatcgaccagaggagatggaaatgcaatctgtgctatagggtgaacgacgtgcccgaagagttcatgtataaccccttgacacgttcatacggcgaacctcataagaggcccgaggttcagaattctacagtggagttcatcgcatcctctgactacatgctgcgccctccgcagcctgcagtctacctgtttgtgctagatgtttcccacaatgctgtggaggcaggctatctgaccatcctatgtcagtctctcctggagaacctggataaactacccggagactctagaacaagaattggattcatgacatttgattcgaccatccacttttataatcttcaggaggggctcagccagccacaaatgctcattgtgtcagatatcgatgatgtttttctgcctaccccggattccctgctggtgaatctgtacgagtctaaggagttaattaaagatctgctgaacgcacttccgaacatgttcacaaatactcgcgaaacgcactccgccttaggaccggctctgcaagccgctttcaagctgatgagtcctactggagggagggtcagcgtctttcagacacaactgccctctttaggtgcgggactgctccagagcagagaggatcccaaccagcgatccagcaccaaggtagtccagcacctagggcctgctacagatttttacaaaaaactggccctcgactgcagcggacagcaaactgccgttgatctttttctactcagcagccagtactccgacctggccagtctcgcgtgtatgtccaagtattccgccggatgtatctattattacccttcctttcattacacacacaatcccagccaggctgagaaactacagaaggatttgaaaaggtatctaacccgcaaaatagggtttgaggccgtcatgcggatccgctgcaccaaaggtctgtcaatgcacacattccatgggaacttctttgtgcgctctactgatttgttaagcctggcgaacattaatcctgatgctgggtttgcagttcagctaagtattgaggagtccctgacagatacctcccttgtgtgctttcaaactgctctgctttacacaagctccaagggagagcgacgcattcgcgtacacacgttatgccttcccgttgttagcagtcttgctgatgtctacgctggtgtggacgtgcaggcggctatctgccttctcgcaaacatggctgtagaccggagcgtctcaagctctctttctgatgcaagggacgctttggtgaacgccgtcgtcgacagcttgagcgcatacggctccaccgtgtccaatttgcagcactctgccctgatggccccttcctccctgaaactgtttcccctctatgtgctggcccttttgaagcagaaagcattcaggaccggtaccagcacaagactcgatgatagagtgtacgccatgtgtcagatcaagagtcagccccttgtgcacctgatgaaaatgatccacccaaatctctaccgaatcgatagactcaccgacgaaggtgccgtgcacgtcaatgatcgaattgttccacaacccccactgcaaaagctgtccgctgagaagctaactcgggaaggtgctttcctgatggactgcggaagcgtgttttacatttgggttggcaagggatgtgacaacaatttcatcgaggacgttctgggctacactaatttcgcctctattccccagaagatgacccacctgcccgagttggacaccctctctagtgagagggctagatccttcatcacttggttacgtgattccagacctctatccccaatcctccacattgtgaaggatgagagtccggctaaagccgagttctttcagcatctcattgaagaccgaacagaggctgccttctcctattatgaatttctgctccatgtccagcagcagatctgcaaatag

SEQ ID NO: 34062 - DNA, 3780 bp, Artificial Sequence
  derived and/or modified sequence
ttcccttccctccgcccacctccctgaagcggagccgccgtcgccaccagcgccgtcatgtcggcccccgccgggtcctctcacccggccgccagcgcccggatcccgcccaagttcggcggagcggccgtctcaggagccgcagcgcccgcgggcccgggtgcgggcccggcgccgcaccagcagaacggtccagcccagaatcaaatgcaggttccatctggatatggattgcatcatcaaaactatattgctccctcaggacattactctcaaggacctgggaaaatgacctcattgccattggatacccagtgtggtgattactactctgctctctatacagtaccaacacaaaatgtgactcctaacacagtgaaccagcaaccaggagcacagcagttgtacagcaggggtcctcctgcccctcatattgtgggatccactctaggatctttccaaggtgctgcatcgtcagcatcccatttgcatacgagtgcctcccaaccatactcctcttttgtgaatcactacaatagtccagccatgtactctgccagctcttctgttgcgtctcagggatttccctctacttgtggtcattatgctatgtcaactgtttctaatgccgcgtatcctagtgtttcatatccctctctgcctgctggtgatacatatgggcaaatgtttacctcacagaatgctccgactgttaggccagttaaagataattcattctctggtcaaaatacagctatcagccatccatcgccacttccacctctaccatcacaacagcaccaccagcagcaaagtctttcaggatacagtactctaacgtggtcatctccaggccttccatcgactcaagacaatctcatccgaaaccacacaggatccctggctgtagcgaacaacaacccaaccattactgttgcagattctttatcctgtcctgttatgcaaaatgttcagcctcccaagtccagcccagtggtatccactgttttatcaggatcctcaggatcctcatcaacaagaacacctcccactgcaaatcacccagttgagcctgtgacctcagttacacagccatcagagctattacaacaaaaaggtgttgacagctcttctaccacaagcagtgcttctccaatgcccaacagttatgatgccctggaaggaggcagttacccagatatgctttcttcatcagcaagcagtcctgctcctgatcccgcccctgaacctgatcctgcttctgctccagctccagcttcagctccagctcctgtcgtccctcagccttcaaaaatggctaagccttttggctatggctatccaacacttcagcctggttatcagaatgctacagcaccacttatttctggagtacagcccagtaacccggtatattctggattccagcagtatcctcaacagtatcctggtgtgaaccagctatcctccagtataggaggattgagtcttcagagttctccacaaccagaaagcctgagacctgtaaaccttactcaggagaggaatattttacctatgactcctgtttgggctcctgtacctaacttgaatgcagacctcaaaaaattaaactgtagcccagattcatttcggtgtactttgacaaatattccacagacacaggctttactgaataaagctaagcttcctttaggattgttgttacatcccttcagagacctaacgcaattaccagtgataacatcaaataccattgtgaggtgccgatcctgtcgaacgtatattaacccctttgtatccttcattgatcaacgtagatggaaatgcaatttgtgctatagagtaaacgatgttcctgaagaatttatgtataacccccttacccgatcttatggagagcctcataaacgaccagaagttcagaattcaactgtggagttcattgcttcttcagattacatgctgcgtcctcctcaacctgcagtttacttgtttgttttagatgtgtctcataatgcagtggaagctggatatttgacaattttgtgccagtcactcctagaaaatctagacaagcttcctggagattcacgaacaagaataggattcatgacctttgatagcactattcatttctacaatttacaagaaggattatcacagcctcaaatgttgattgtgtctgatatagatgatgtttttctacctacaccggatagtttacttgtgaatctatatgaaagtaaagagcttataaaagacttactgaatgcattaccaaacatgttcaccaatacaagagaaacacacagtgcccttggtcctgcacttcaggctgcctttaaattaatgtctccaacaggtggccgtgtgtctgtatttcagacacagttaccttccttgggtgcaggacttctgcaatccagagaagatcctaatcagagatcaagtacaaaggtggtacaacatcttggccctgcaactgatttttataagaaacttgcattagattgctcgggacagcaaactgcagtggatttgttccttttaagttcacagtattctgatcttgcttctctagcttgcatgtccaagtattctgcagggtgcatctattattatccatcattccactatactcacaatccttcacaagcagaaaagttacaaaaagacctaaaacggtatctcacaagaaaaattgggtttgaagctgttatgagaataaggtgtactaaaggtctttcaatgcacacttttcacggtaacttctttgtccgttctactgatttgttatcccttgccaacatcaatcctgatgctggatttgcggtgcagttgtcaattgaagaaagtttaacagatacttccttagtatgttttcaaacagccctattatatacatcaagcaaaggtgagcggagaattagagtacatacactttgtttgccagtggtaagttcactagcagatgtatatgcgggagtggatgtacaagctgccatctgccttctggcaaacatggctgtggatcggtccgtttcatcaagtctgtcagatgcaagagatgccttagtgaatgctgtagtggactcattgtctgcatatggctcaactgtctcaaatttacagcactctgcattgatggcgcccagctccctcaagttgtttcctctctatgttttggcccttctcaaacagaaagcatttagaacgggtacaagcacacggctggatgatcgtgtatatgccatgtgtcagataaagtctcagccacttgttcatctaatgaaaatgattcatcccaacttatacaggatagacagattgacagatgagggtgcagtacatgttaatgacaggattgtaccacagccacctcttcaaaaattgtctgcagagaagctgacaagagaaggtgctttccttatggactgtggctctgttttttacatttgggttgggaaaggctgtgacaataacttcatagaggatgtgcttggatatactaattttgcatcaataccacagaaaatgacacatcttccagagctagatacactttcatcagaaagagccagatccttcataacttggcttagagacagcagaccattaagtccaatccttcacatagtaaaagatgagagtcctgccaaagcagaattttttcagcatttgattgaagaccggacagaggctgcattttcttactatgaatttttgcttcatgttcagcagcagatttgtaagtgaagtagaataaaattgaataag

SEQ ID NO: 34063 - protein, 1268 aa, Artificial Sequence
  derived and/or modified sequence
MIAAPEIPTDFNLLQESETHFSSDTDFEDIEGKNQKQGKGKTCKKGKKGPAEKGKGGNGGGKPPSGPNRMNGHHQQNGVENMMLFEVVKMGKSAMQSVVDDWIESYKHDRDIALLDLINFFIQCSGCKGVVTAEMFRHMQNSEIIRKMTEEFDEDSGDYPLTMAGPQWKKFKSSFCEFIGVLVRQCQYSIIYDEYMMDTVISLLTGLSDSQVRAFRHTSTLAAMKLMTALVNVALNLSINMDNTQRQYEAERNKMIGKRANERLELLLQKRKELQENQDEIENMMNAIFKGVFVHRYRDAIAEIRAICIEEIGIWMKMYSDAFLNDSYLKYVGWTMHDKQGEVRLKCLTALQGLYYNKELNSKLELFTSRFKDRIVSMTLDKEYDVAVQAIKLLTLVLQSSEEVLTAEDCENVYHLVYSAHRPVAVAAGEFLYKKLFSRRDPEEDGMMKRRGRQGPNANLVKTLVFFFLESELHEHAAYLVDSMWDCATELLKDWECMNSLLLEEPLSGEEALTDRQESALIEIMLCTIRQAAECHPPVGRGTGKRVLTAKEKKTQLDDRTKITELFAVALPQLLAKYSVDAEKVTNLLQLPQYFDLEIYTTGRLEKHLDALLRQIRNIVEKHTDTDVLEACSKTYHALCNEEFTIFNRVDISRSQLIDELADKFNRLLEDFLQEGEEPDEDDAYQVLSTLKRITAFHNAHDLSKWDLFACNYKLLKTGIENGDMPEQIVIHALQCTHYVILWQLAKITESSSTKEDLLRLKKQMRVFCQICQHYLTNVNTTVKEQAFTILCDILMIFSHQIMSGGRDMLEPLVYTPDSSLQSELLSFILDHVFIEQDDDNNSADGQQEDEASKIEALHKRRNLLAAFCKLIVYTVVEMNTAADIFKQYMKYYNDYGDIIKETMSKTRQIDKIQCAKTLILSLQQLFNEMIQENGYNFDRSSSTFSGIKELARRFALTFGLDQLKTREAIAMLHKDGIEFAFKEPNPQGESHPPLNLAFLDILSEFSSKLLRQDKRTVYVYLEKFMTFQMSLRREDVWLPLMSYRNSLLAGGDDDTMSVISGISSRGSTVRSKKSKPSTGKRKVVEGMQLSLTEESSSSDSMWLSREQTLHTPVMMQTPQLTSTIMREPKRLRPEDSFMSVYPMQTEHHQTPLDYNTQVTWMLAQRQQEEARQQQERAAMSYVKLRTNLQHAIRRGTSLMEDDEEPIVEDVMMSSEGRIEDLNEGMDFDTMDIDLPPSKNRRERTELKPDFFDPASIMDESVLGVSMF

SEQ ID NO: 34064 - protein, 70 aa, Artificial Sequence
  derived and/or modified sequence
MIAAPEIPTDFNLLQESETHFSSDTDFEDIEGKNQKQGKGKTCKKGKKGPAEKGKGGNGGGKPPSGPNRM

SEQ ID NO: 34065 - protein, 115 aa, Artificial Sequence
  derived and/or modified sequence
MIAAPEIPTDFNLLQESETHFSSDTDFEDIEGKNQKQGKGKTCKKGKKGPAEKGKGGNGGGKPPSGPNRMNGHHQQNGVENMMLFEVVKMGKSAMQSVVDDWIESYKHDRDIALL

SEQ ID NO: 34066 - protein, 169 aa, Artificial Sequence
  derived and/or modified sequence
MIAAPEIPTDFNLLQESETHFSSDTDFEDIEGKNQKQGKGKTCKKGKKGPAEKGKGGNGGGKPPSGPNRMNGHHQQNGVENMMLFEVVKMGKSAMQSVVDDWIESYKHDRDIALLDLINFFIQCSGCKGVVTAEMFRHMQNSEIIRKMTEEFDEDSGDYPLTMAGPQWK

SEQ ID NO: 34067 - protein, 154 aa, Artificial Sequence
  derived and/or modified sequence
MIAAPEIPTDFNLLQESETHFSSDTDFEDIEGKNQKQGKGKTCKKGKKGPAEKGKGGNGGGKPPSGPNRMNGHHQQNGVENMMLFEVVKMGKSAMQSVVDDWIESYKHDRDIALLDLINFFIQCSGCKGVVTAEMFRHMQNSEIIRKMTEEFDE

SEQ ID NO: 34068 - protein, 208 aa, Artificial Sequence
  derived and/or modified sequence
MIAAPEIPTDFNLLQESETHFSSDTDFEDIEGKNQKQGKGKTCKKGKKGPAEKGKGGNGGGKPPSGPNRMNGHHQQNGVENMMLFEVVKMGKSAMQSVVDDWIESYKHDRDIALLDLINFFIQCSGCKGVVTAEMFRHMQNSEIIRKMTEEFDEDSGDYPLTMAGPQWKKFKSSFCEFIGVLVRQCQYSIIYDEYMMDTVISLLTGLS

SEQ ID NO: 34069 - protein, 548 aa, Artificial Sequence
  derived and/or modified sequence
MIAAPEIPTDFNLLQESETHFSSDTDFEDIEGKNQKQGKGKTCKKGKKGPAEKGKGGNGGGKPPSGPNRMNGHHQQNGVENMMLFEVVKMGKSAMQSVVDDWIESYKHDRDIALLDLINFFIQCSGCKGVVTAEMFRHMQNSEIIRKMTEEFDEDSGDYPLTMAGPQWKKFKSSFCEFIGVLVRQCQYSIIYDEYMMDTVISLLTGLSDSQVRAFRHTSTLAAMKLMTALVNVALNLSINMDNTQRQYEAERNKMIGKRANERLELLLQKRKELQENQDEIENMMNAIFKGVFVHRYRDAIAEIRAICIEEIGIWMKMYSDAFLNDSYLKYVGWTMHDKQGEVRLKCLTALQGLYYNKELNSKLELFTSRFKDRIVSMTLDKEYDVAVQAIKLLTLVLQSSEEVLTAEDCENVYHLVYSAHRPVAVAAGEFLYKKLFSRRDPEEDGMMKRRGRQGPNANLVKTLVFFFLESELHEHAAYLVDSMWDCATELLKDWECMNSLLLEEPLSGEEALTDRQESALIEIMLCTIRQAAECHPPVGRGTGKRVL

SEQ ID NO: 34070 - protein, 40 aa, Artificial Sequence
  derived and/or modified sequence
MIAAPEIPTDFNLLQESETHFSSDTDFEDIEGKNQKQGKG

SEQ ID NO: 34071 - DNA, 3807 bp, Artificial Sequence
  derived and/or modified sequence
atgatcgccgcccccgagatccccaccgacttcaacctgctgcaggagagcgagacccacttcagcagcgacaccgacttcgaggacatcgagggcaagaaccagaagcagggcaagggcaagacctgcaagaagggcaagaagggccccgccgagaagggcaagggcggcaacggcggcggcaagccccccagcggccccaacagaatgaacggccaccaccagcagaacggcgtggagaacatgatgctgttcgaggtggtgaagatgggcaagagcgccatgcagagcgtggtggacgactggatcgagagctacaagcacgacagagacatcgccctgctggacctgatcaacttcttcatccagtgcagcggctgcaagggcgtggtgaccgccgagatgttcagacacatgcagaacagcgagatcatcagaaagatgaccgaggagttcgacgaggacagcggcgactaccccctgaccatggccggcccccagtggaagaagttcaagagcagcttctgcgagttcatcggcgtgctggtgagacagtgccagtacagcatcatctacgacgagtacatgatggacaccgtgatcagcctgctgaccggcctgagcgacagccaggtgagagccttcagacacaccagcaccctggccgccatgaagctgatgaccgccctggtgaacgtggccctgaacctgagcatcaacatggacaacacccagagacagtacgaggccgagagaaacaagatgatcggcaagagagccaacgagagactggagctgctgctgcagaagagaaaggagctgcaggagaaccaggacgagatcgagaacatgatgaacgccatcttcaagggcgtgttcgtgcacagatacagagacgccatcgccgagatcagagccatctgcatcgaggagatcggcatctggatgaagatgtacagcgacgccttcctgaacgacagctacctgaagtacgtgggctggaccatgcacgacaagcagggcgaggtgagactgaagtgcctgaccgccctgcagggcctgtactacaacaaggagctgaacagcaagctggagctgttcaccagcagattcaaggacagaatcgtgagcatgaccctggacaaggagtacgacgtggccgtgcaggccatcaagctgctgaccctggtgctgcagagcagcgaggaggtgctgaccgccgaggactgcgagaacgtgtaccacctggtgtacagcgcccacagacccgtggccgtggccgccggcgagttcctgtacaagaagctgttcagcagaagagaccccgaggaggacggcatgatgaagagaagaggcagacagggccccaacgccaacctggtgaagaccctggtgttcttcttcctggagagcgagctgcacgagcacgccgcctacctggtggacagcatgtgggactgcgccaccgagctgctgaaggactgggagtgcatgaacagcctgctgctggaggagcccctgagcggcgaggaggccctgaccgacagacaggagagcgccctgatcgagatcatgctgtgcaccatcagacaggccgccgagtgccacccccccgtgggcagaggcaccggcaagagagtgctgaccgccaaggagaagaagacccagctggacgacagaaccaagatcaccgagctgttcgccgtggccctgccccagctgctggccaagtacagcgtggacgccgagaaggtgaccaacctgctgcagctgccccagtacttcgacctggagatctacaccaccggcagactggagaagcacctggacgccctgctgagacagatcagaaacatcgtggagaagcacaccgacaccgacgtgctggaggcctgcagcaagacctaccacgccctgtgcaacgaggagttcaccatcttcaacagagtggacatcagcagaagccagctgatcgacgagctggccgacaagttcaacagactgctggaggacttcctgcaggagggcgaggagcccgacgaggacgacgcctaccaggtgctgagcaccctgaagagaatcaccgccttccacaacgcccacgacctgagcaagtgggacctgttcgcctgcaactacaagctgctgaagaccggcatcgagaacggcgacatgcccgagcagatcgtgatccacgccctgcagtgcacccactacgtgatcctgtggcagctggccaagatcaccgagagcagcagcaccaaggaggacctgctgagactgaagaagcagatgagagtgttctgccagatctgccagcactacctgaccaacgtgaacaccaccgtgaaggagcaggccttcaccatcctgtgcgacatcctgatgatcttcagccaccagatcatgagcggcggcagagacatgctggagcccctggtgtacacccccgacagcagcctgcagagcgagctgctgagcttcatcctggaccacgtgttcatcgagcaggacgacgacaacaacagcgccgacggccagcaggaggacgaggccagcaagatcgaggccctgcacaagagaagaaacctgctggccgccttctgcaagctgatcgtgtacaccgtggtggagatgaacaccgccgccgacatcttcaagcagtacatgaagtactacaacgactacggcgacatcatcaaggagaccatgagcaagaccagacagatcgacaagatccagtgcgccaagaccctgatcctgagcctgcagcagctgttcaacgagatgatccaggagaacggctacaacttcgacagaagcagcagcaccttcagcggcatcaaggagctggccagaagattcgccctgaccttcggcctggaccagctgaagaccagagaggccatcgccatgctgcacaaggacggcatcgagttcgccttcaaggagcccaacccccagggcgagagccacccccccctgaacctggccttcctggacatcctgagcgagttcagcagcaagctgctgagacaggacaagagaaccgtgtacgtgtacctggagaagttcatgaccttccagatgagcctgagaagagaggacgtgtggctgcccctgatgagctacagaaacagcctgctggccggcggcgacgacgacaccatgagcgtgatcagcggcatcagcagcagaggcagcaccgtgagaagcaagaagagcaagcccagcaccggcaagagaaaggtggtggagggcatgcagctgagcctgaccgaggagagcagcagcagcgacagcatgtggctgagcagagagcagaccctgcacacccccgtgatgatgcagaccccccagctgaccagcaccatcatgagagagcccaagagactgagacccgaggacagcttcatgagcgtgtaccccatgcagaccgagcaccaccagacccccctggactacaacacccaggtgacctggatgctggcccagagacagcaggaggaggccagacagcagcaggagagagccgccatgagctacgtgaagctgagaaccaacctgcagcacgccatcagaagaggcaccagcctgatggaggacgacgaggagcccatcgtggaggacgtgatgatgagcagcgagggcagaatcgaggacctgaacgagggcatggacttcgacaccatggacatcgacctgccccccagcaagaacagaagagagagaaccgagctgaagcccgacttcttcgaccccgccagcatcatggacgagagcgtgctgggcgtgagcatgttctag

SEQ ID NO: 34072 - DNA, 3807 bp, Artificial Sequence
  derived and/or modified sequence
atgatcgcagcaccagagatccccaccgatttcaacctccttcaggaatccgaaacccacttcagtagtgacaccgacttcgaagacatagaagggaagaatcagaagcaaggcaaaggaaagacctgcaaaaaggggaaaaaaggcccagcggagaaaggcaagggtggcaatggtggtggcaaacctcctagcggccccaaccggatgaatggccatcaccagcagaatggagtcgagaatatgatgctattcgaggtagtaaaaatgggtaagtcagccatgcagtcagtagtggacgactggatcgagtcttacaagcacgatcgtgacatcgcacttctggatttaattaacttcttcatacagtgcagcgggtgtaagggcgtagtgactgccgagatgttcaggcatatgcagaacagcgagataattcgcaaaatgactgaggagttcgacgaagatagcggggattaccccctcacaatggcaggtcctcagtggaaaaagttcaaaagttcattttgcgagtttattggcgtgttggtgaggcaatgccagtacagtattatatacgacgagtatatgatggatactgttatcagtctcctgacgggcttgtccgattcacaagtaagagcattccgccatactagcactcttgcagctatgaagctcatgacagctctggtgaacgtcgctttaaatctcagcatcaacatggataacacacagaggcagtacgaggcagaacggaataaaatgatcgggaagcgcgccaacgaacggcttgaattgctgctgcaaaagcgaaaagaattgcaagaaaatcaggatgagattgaaaatatgatgaacgccatttttaagggagtgtttgtccaccggtatagagatgctattgctgagattcgcgctatttgtattgaggagatcgggatctggatgaaaatgtactccgacgcatttctcaacgattcctacttgaagtatgtggggtggactatgcatgataagcagggggaagttcggctgaaatgtttgaccgccctgcagggactttattacaacaaagagcttaattccaagctggagcttttcacatccagattcaaagatcgtattgtgtctatgactctggataaagaatacgacgtggccgttcaggctattaagctcttgacactggtgctccagagctccgaagaggtgctgaccgccgaagattgcgagaatgtgtaccatctagtatacagtgcacaccgccctgtcgccgtcgctgcaggagagttcctgtacaagaagctgttcagtcgccgggatcctgaggaagacggtatgatgaagaggagaggccggcaggggccgaacgccaacctagtgaagaccctcgtctttttcttcctggaatctgaactgcatgaacacgcggcatatctggttgactcaatgtgggactgtgcaacggagttgctcaaggactgggaatgcatgaactcacttctcctggaggaacccctgtcaggcgaggaagcactgacggaccgtcaggaaagtgctcttatagagataatgctgtgtaccatccggcaggccgccgagtgtcacccccccgtaggaaggggtaccggaaaaagagtactgacagccaaagagaaaaaaactcagcttgatgacagaacaaagataacagagctatttgctgtggctctgcctcagctgctggccaaatacagtgtggatgccgaaaaggtgaccaatctgctgcagctcccccaatatttcgatctggaaatttataccacagggaggcttgagaagcatcttgacgccctcctgagacaaattcgcaatatcgtcgagaaacacactgacacagacgtcctagaagcatgcagcaagacttaccacgccctgtgcaatgaggagttcacaatttttaatagggttgatatctcccgcagccagctcattgacgagctggccgataagtttaaccggctgctcgaggactttctgcaggaaggcgaggagcccgatgaagacgacgcctaccaggtgctgtccacactgaaacgtatcactgcttttcacaacgcccacgacttgtctaagtgggacttatttgcttgtaattataagcttcttaaaaccgggattgaaaatggagacatgcccgagcagattgtgatccatgcactgcagtgtacccactacgttatcttatggcaactggccaagattacggagtcatccagcacaaaagaggatttgctgagactgaagaagcaaatgcgggtgttttgccagatatgccagcattacctcactaatgtaaataccactgtgaaagagcaagccttcaccatcctctgcgacattctgatgattttcagtcaccagataatgtctggaggccgagatatgttagagcctttggtgtatacccccgattccagcctgcagagcgagctgctgtcatttattctggatcatgtttttattgagcaggacgatgataacaactccgccgatgggcaacaagaggacgaagcatcgaagattgaagcactgcataaacgccggaacctgctggcagccttctgcaaactgatagtttataccgtggtggaaatgaataccgccgccgacattttcaagcagtatatgaagtattataatgattacggcgatatcatcaaagagaccatgtcaaagactaggcaaatagataagatccagtgcgcaaaaacactgattctgtccctccagcagctctttaatgaaatgattcaggagaacgggtacaactttgaccggtcctcaagcaccttcagtgggataaaagaactggcgagaaggttcgcccttacatttggcctggaccagctgaaaacaagagaggccatcgctatgctgcataaggatggtatcgagtttgccttcaaggagccaaacccacagggagaatctcaccctccactcaacctggccttcctggacatcctgtccgaatttagttcaaaattgctgagacaagacaagagaacggtgtacgtgtacctagagaaattcatgactttccagatgagcctgcggagggaagatgtttggctccctttgatgtcttaccggaatagcttactcgctggaggggatgacgacactatgtccgtcatcagcggtatatcttcacgcggcagcaccgtcaggagcaagaagagtaaacccagcaccggaaagaggaaggtagttgagggcatgcagctgagtcttactgaagaatcatcatcgtctgactccatgtggctgagtcgcgaacagacgctccatacacctgttatgatgcagacgccacagcttacaagtacaatcatgcgagagcctaaacgattaagacctgaagattcattcatgagcgtgtacccaatgcagaccgagcatcaccagacacctctcgattataatacccaggtgacctggatgttagctcagaggcagcaagaagaagcccgtcaacagcaagagagggcagccatgtcctatgtcaagctcaggactaatctgcaacacgccatcagaagaggcacctccctgatggaggatgatgaagagcctattgtggaagatgtgatgatgagtagtgaagggcgtattgaggatttgaacgagggaatggacttcgacaccatggacattgatcttccaccgagtaaaaatagaagagagagaaccgaactgaaaccggacttttttgaccccgcttctatcatggatgaaagtgtcctgggagtgtccatgttttag

SEQ ID NO: 34073 - DNA, 3807 bp, Artificial Sequence
  derived and/or modified sequence
atgattgctgcccctgagatccccacagacttcaacctgctgcaggagagcgagacccacttcagcagtgacacagactttgaggacatcgagggcaagaaccagaagcagggcaagggcaagacctgcaagaagggcaagaagggccctgctgagaagggcaaaggaggaaatggaggcggcaagcccccatctggccccaacaggatgaatggccaccaccagcagaatggagtggagaacatgatgctgtttgaggtggtgaagatgggcaagagcgccatgcagagcgtggtggatgactggattgagagctacaagcatgaccgggacatcgccctgctggacctgatcaacttcttcatccagtgcagcggctgcaagggcgtggtgacagctgagatgttccgccacatgcagaacagcgagatcatcaggaagatgacagaggagtttgatgaggacagcggggactaccccctgaccatggccggcccccagtggaagaagttcaagagcagcttctgtgagttcatcggcgtgctggtgcggcagtgccagtacagcatcatctatgatgagtacatgatggacaccgtcatcagcctgctgaccggcctgagtgacagccaggtgcgggccttccgccacaccagcaccctggccgccatgaagctgatgacagccctggtgaatgtggccctgaacctgagcatcaacatggacaacacccagaggcagtatgaggccgagaggaacaagatgattggcaagagggccaatgaaaggctggagctgctgctgcagaagaggaaggagctgcaggagaaccaggatgaaattgagaacatgatgaatgccatcttcaagggcgtgtttgtgcaccgctacagagatgccatcgccgagatccgggccatctgcatcgaggagatcggcatctggatgaagatgtacagtgatgccttcctgaatgacagctacctgaagtatgtgggctggaccatgcatgacaagcagggcgaggtgcggctgaagtgcctgacagccctgcagggcctgtactacaacaaggagctgaacagcaagctggagctgttcaccagccgcttcaaggacagaattgtgtccatgaccctggacaaggagtatgatgtggccgtgcaggccatcaagctgctgaccctggtgctgcagagcagcgaggaggtgctgacagctgaggactgtgaaaatgtgtaccacctggtgtacagcgcccacaggcctgtggccgtggccgccggggagttcctgtacaagaagctgttcagcagaagagatcctgaggaggatggcatgatgaagaggcggggccggcagggccccaatgccaacctggtgaagaccctggtgttcttcttcctggagagcgagctgcacgagcacgccgcctacctggtggacagcatgtgggactgtgccacagagctgctgaaggactgggagtgcatgaacagcctgctgctggaggagcccctgagcggggaggaggccctgacagaccggcaggagagcgccctgattgagatcatgctgtgcaccatccggcaggccgctgagtgccacccccctgtgggccggggcaccgggaagagggtgctgacagccaaggagaagaagacccagctggatgacaggaccaagatcacagagctgtttgctgtggccctgccccagctgctggccaagtacagcgtggatgctgagaaggtgaccaacctgctgcagctgccccagtactttgacctggagatctacaccaccggccgcctggagaagcacctggatgccctgctgcggcagatcagaaatattgtggagaagcacacagacacagatgtgctggaggcctgcagcaagacctaccacgccctgtgcaatgaggagttcaccatcttcaacagagtggacatcagccgcagccagctgattgatgagctggccgacaagttcaaccggctgctggaggacttcctgcaggagggggaggagccagatgaagatgatgcctaccaggtgctgagcaccctgaagaggatcacagccttccacaatgcccatgacctgagcaagtgggacctgtttgcctgcaactacaagctgctgaagacaggaattgaaaatggagacatgcctgagcagatcgtcatccacgccctgcagtgcacccactacgtgatcctgtggcagctggccaagatcacagagagcagcagcaccaaggaggacctgctgcggctgaagaagcagatgagggtcttctgccagatctgccagcactacctgaccaacgtgaacaccaccgtgaaggagcaggccttcaccatcctgtgtgacatcctgatgatcttcagccaccagatcatgtctgggggccgggacatgctggagcccctggtgtacaccccagacagcagcctgcagagcgagctgctgtccttcatcctggaccacgtgttcatcgagcaggatgatgacaacaacagcgcagatggccagcaggaggatgaggccagcaagattgaggccctgcacaagagaagaaacctgctggccgccttctgcaagctgattgtgtacacagtggtggagatgaacacagctgctgacatcttcaagcagtacatgaagtactacaatgactatggagacatcatcaaggagaccatgagcaagacccggcagattgacaagatccagtgtgccaagaccctcatcctgagcctgcagcagctgttcaatgagatgatccaggagaatggctacaactttgacaggagcagcagcaccttcagcggcatcaaggagctggccaggagatttgccctgaccttcggcctggaccagctgaagacccgggaggccatcgccatgctgcacaaggatggcatcgagtttgccttcaaggagcccaacccccagggcgagagccacccccccctgaacctggccttcctggacatcctgtctgagttcagcagcaagctgctgcggcaggacaagaggacagtgtatgtgtacctggagaagttcatgaccttccagatgagcctgcggagagaagatgtgtggctgcccctgatgagctacagaaacagcctgctggccggaggagatgatgacaccatgtctgtcatcagcggcatcagcagccggggcagcacagtgcgcagcaagaagagcaagcccagcacaggcaagaggaaggtggtggagggcatgcagctgagcctgacagaggagagcagcagcagtgacagcatgtggctgagccgggagcagaccctgcacacccctgtgatgatgcagaccccccagctgaccagcaccatcatgagggagcccaagaggctgcggccagaagattccttcatgtctgtgtaccccatgcagacagagcaccaccagacccccctggactacaacacccaggtgacctggatgctggcccagaggcagcaggaggaggcccggcagcagcaggagcgggccgccatgtcctatgtgaagctgcggaccaacctgcagcacgccatccggcggggcaccagcctgatggaggatgatgaggagcccatcgtggaggatgtgatgatgagcagcgagggcagaattgaggacctgaatgaaggcatggactttgacaccatggacatcgacctgccccccagcaagaacagaagagagaggacagagctgaagccagacttctttgatcctgccagcatcatggatgaatctgtgctgggcgtgtccatgttttag

SEQ ID NO: 34074 - DNA, 3807 bp, Artificial Sequence
  derived and/or modified sequence
atgatcgccgcccccgagatccccaccgacttcaacctgctgcaggagtccgaaacacacttcagctccgacacggacttcgaagatattgagggtaagaaccaaaaacaggggaagggtaagacatgcaaaaaagggaaaaaaggccccgccgagaaaggaaagggcggaaacggcggcggcaagccaccaagcggtcccaatcgcatgaacggccatcatcagcagaacggcgttgagaacatgatgctgtttgaagtcgtgaagatggggaagtctgcaatgcaaagcgtggtggatgactggatcgaatcctacaagcatgatagggacattgccctcctggatctgatcaactttttcatccagtgctccggctgcaagggggttgtgacagccgaaatgttcaggcacatgcagaactccgagatcatccgaaagatgaccgaagagtttgatgaggacagcggggactatcctctgacgatggcaggccctcagtggaagaaatttaagtcctccttttgcgaattcataggcgtgctcgtgaggcaatgccagtactctattatatacgacgaatatatgatggacacggtgatatccctgttaaccggtctttccgatagccaggtgagggcctttcggcacacaagtactctggctgcaatgaagttaatgactgccctggttaacgtcgcgctgaacctgtccattaatatggacaatacgcaaagacagtacgaagctgagcggaacaaaatgatcggcaaacgcgctaatgaacgacttgaacttctattgcagaaaaggaaggagttacaggaaaatcaggacgaaattgaaaacatgatgaacgccatatttaaaggagtctttgtgcatcggtatcgagacgccatcgccgagattcgagcaatctgcattgaagagatcggaatctggatgaagatgtacagcgacgcatttctgaacgatagctacctcaagtatgtggggtggacaatgcacgataaacagggcgaggtcaggctgaagtgcctgaccgcgctgcagggcctctactataacaaagagctcaatagcaaacttgagctgtttacatctagattcaaagatcgcatcgtctcaatgacactcgacaaggagtacgacgtggcggtccaagctattaaactgctgacattggtgttgcaaagtagtgaggaggtacttactgcggaagactgtgagaatgtctatcacctggtgtacagcgcccacaggcccgtggctgtggcagccggggagttcctgtataaaaagttatttagccgacgggaccctgaggaggacggcatgatgaaaagaagaggccggcaggggccaaacgcaaacttagtgaaaactctggtgtttttttttctcgagtccgagttgcatgagcacgccgcatatcttgtggactctatgtgggactgtgccaccgagctactgaaggattgggagtgtatgaattccctgctattggaagaacccttatctggagaggaagctctaacagacaggcaagagagcgcccttattgaaataatgctgtgcactatcaggcaggccgcagaatgtcacccccctgtgggtcgggggactggaaagcgggttctgaccgccaaggaaaaaaaaacgcagctggacgaccgcaccaagataactgaattgttcgccgtggcactgccccagcttctagctaaatattctgttgacgcagaaaaggtcactaatctgctgcagctaccacagtactttgatctggaaatctacaccacaggacggttggagaagcacctcgacgccctgctgcgccagataaggaatattgtggagaaacacacagatactgacgtcttggaggcatgctctaagacataccacgcgctgtgcaacgaggaattcaccatattcaacagagttgatatcagccgcagccagctgatcgacgaactggctgacaaatttaatcggctgttagaggactttttacaagaaggcgaggagccggatgaagacgatgcttaccaggtcctgtctacattgaaaagaatcacggccttccacaacgctcatgatcttagcaagtgggatctgtttgcctgcaattacaagctgttgaaaaccggcatagaaaacggcgacatgccagaacagatcgtgatccacgctcttcagtgcacccactatgttatcctgtggcaactggccaaaatcaccgagtcttctagcaccaaggaagatttgctgcgcctaaaaaaacagatgcgcgtgttttgtcagatctgtcagcactaccttacaaatgtgaacaccacagtgaaggagcaggctttcacgatcctgtgcgacatcctgatgatattctcacatcaaatcatgtctggcggacgcgatatgttggagcccctggtgtacacccccgattcttcactgcagtcagagctactgtcttttattcttgatcatgtgtttatcgaacaagatgatgacaacaatagcgctgatggacagcaagaagatgaagctagcaaaatcgaagctctgcataaaaggcgcaacctcctggccgccttctgcaaattgatcgtatatacagtggtcgagatgaacactgcggcagacatcttcaagcagtatatgaagtattacaacgactacggggacatcatcaaagagacaatgtcaaagacgcgtcagattgataaaatccagtgcgccaaaactctgatcttgagcctgcagcaactgttcaatgaaatgattcaggaaaatgggtataatttcgacagatcgagctccactttttcagggataaaggaactcgcaagaaggtttgccctcacattcgggctggaccagctgaagaccagggaggcaatcgccatgttgcacaaggacggcatcgagttcgcctttaaagagccaaacccacagggggagagccatccaccactgaatcttgccttcctggacatccttagcgaatttagcagcaagctactcaggcaagacaaaaggactgtctacgtgtatctggaaaagtttatgacctttcagatgagcctgcgcagagaagatgtgtggctgccactaatgtcctaccggaattctctcttagctggcggagacgatgataccatgtccgtgatctcaggaattagctcccggggaagtaccgtgcgcagcaagaaaagcaagcccagtactggcaagcgaaaggttgtagagggcatgcagctgagccttaccgaggagagttcttcaagtgactcaatgtggctttcccgtgaacagaccctgcatacaccagtgatgatgcagacccctcagctcaccagtactataatgagggaacccaagagactacgtcccgaggactccttcatgagtgtctatcctatgcagaccgaacaccaccaaacacccctagactataacacacaggttacctggatgctggcacagagacagcaggaggaggcccgtcagcagcaggaacgcgcggcaatgtcctacgtgaagttacgcacaaatctgcagcatgccatccgtagaggtacctcattaatggaggacgatgaggagcctatagtcgaggacgtaatgatgagctccgaggggcgcatcgaggacctgaacgaggggatggatttcgacaccatggacatagaccttcctccttctaaaaataggcgggaaagaacagaacttaaacccgacttttttgatcctgcttcaatcatggacgaatctgttttaggcgtcagcatgttttag

SEQ ID NO: 34075 - DNA, 3807 bp, Artificial Sequence
  derived and/or modified sequence
atgatcgctgcccctgagatcccaactgatttcaacctgctccaagagtccgaaacccactttagctccgacactgactttgaagatattgaggggaaaaatcagaaacaaggaaaaggcaagacctgcaagaaaggaaaaaaaggccctgcggaaaagggaaaagggggtaatggtggtgggaagcctcccagtggtcctaatcggatgaatggacaccaccaacagaatggtgtagaaaatatgatgctatttgaggttgtgaaaatgggtaagagtgctatgcagtctgtggttgatgactggatcgaatcctataaacacgatagagatatcgcccttctggatctgattaatttcttcattcaatgttctggttgtaaaggcgtggtaaccgccgagatgttccgtcatatgcagaattccgagatcattaggaagatgacagaggaatttgatgaggacagtggcgactaccctctaactatggccggacctcaatggaaaaaatttaaaagctcgttttgcgaattcattggcgtgctcgtaaggcagtgccagtacagcatcatttatgacgagtacatgatggataccgtgatatccttactgacagggttgagcgactcacaagtcagggcctttcggcatacatctacgctggccgcaatgaaactcatgacggccttggtgaacgtggcactaaacttgtcgatcaacatggataacacccagagacagtatgaggctgagcgcaacaaaatgatcggaaaaagagccaacgaacgactggagctgttgcttcagaagcgcaaggaactgcaagaaaatcaggatgaaatcgagaacatgatgaatgcgatctttaagggcgtttttgttcaccgctaccgggacgccatcgccgaaattcgagccatctgcatcgaggagattggaatctggatgaagatgtacagtgacgccttcttaaacgactcttatctgaagtacgtaggctggacaatgcacgacaagcagggagaagtgcgactgaaatgccttaccgcgctgcagggcctctactataacaaagagctgaactccaagctcgagctatttaccagtaggttcaaagaccggatcgtgtctatgactttggacaaggagtacgacgttgcggtgcaggctattaagctcctcactctcgtgctgcagagcagcgaggaagtgctaacagccgaggactgcgaaaatgtgtatcacctggtgtactcagcacacaggcctgtagccgttgcggctggtgagttcctgtataaaaaactgttttctcgcagggatcctgaggaggacggaatgatgaagcgcagaggccgacaaggcccaaacgcaaacctagtgaaaacactcgtatttttctttctcgagtctgagttgcacgaacatgccgcatatcttgtggatagcatgtgggactgcgcaaccgagttactgaaggattgggagtgcatgaacagtctactcctggaggaacccttgtcaggcgaggaagcactcaccgaccgacaggaatccgctctaatcgaaatcatgctttgcacaatacggcaggcagccgaatgccaccccccagtgggtagaggaacagggaagagggtgcttacagcaaaagaaaagaagacgcagctcgatgacagaaccaaaattaccgagctattcgcagttgcactgccccagctgctggctaagtacagcgttgatgccgagaaagtgacaaacctcctgcagcttccccagtacttcgatcttgagatttatactaccggaaggctggaaaagcacctggacgccttactgagacagatcaggaatatcgtagaaaagcatacagatactgatgtattggaggcttgttcgaaaacttaccatgctctgtgtaatgaggaattcacgatattcaatcgtgtggatattagcagatctcagctcattgacgagctcgccgacaagttcaatagactgcttgaggatttccttcaggagggcgaggaacccgacgaggacgacgcttaccaggttctcagcacccttaagaggatcaccgccttccacaacgcccatgacctcagcaagtgggacttgttcgcatgcaattacaagctgctgaagaccggaatcgagaatggggatatgcccgaacaaatcgttatacacgctctccagtgcactcattatgtgatcctgtggcagctggctaaaattaccgaaagtagctcgacaaaggaagatctcctgcggttgaagaaacaaatgagggtcttctgccaaatatgccagcactatttgaccaatgtgaacacaacagtgaaagagcaagcctttacgattctgtgcgacatccttatgatattctcccatcagatcatgagtggcggacgcgatatgcttgagcctttagtatacacacccgacagctcgctccagagcgaactcttatcttttattctcgatcacgtctttattgaacaggacgacgataacaactctgcggacgggcagcaggaggacgaagccagcaagattgaagccttgcacaagagacgcaacttattggcagctttctgcaaactgatcgtgtacactgtggtggaaatgaacactgcagccgacatcttcaaacagtacatgaagtactataatgattacggtgacattattaaagagaccatgtctaaaaccaggcaaatcgacaagatccaatgtgcgaagacactgatcttgtctttacagcaattattcaatgagatgatccaggaaaacgggtataactttgatcggtcctcatctaccttctcgggcattaaggaactggctcgaaggtttgctctcacttttggacttgaccagctgaaaacacgcgaagccatcgccatgctgcacaaggatggcattgaattcgccttcaaggagccaaatccccagggagaatcccatcctcctcttaaccttgccttcctggatatcttgtccgaattttcctccaagttattacgtcaggataagaggaccgtgtatgtatacctggagaagttcatgacttttcagatgtctctgcgccgtgaggacgtgtggcttccacttatgagctaccgaaactcactcctcgcaggtggcgacgacgatactatgagcgtgataagtggtatcagttctagagggtcaaccgttaggtccaagaagagtaagccgtccactggaaaaagaaaggtggtcgaaggcatgcagttgagcttgacagaagagtcatcttcatctgattccatgtggttaagccgtgaacagactctgcacacccctgtgatgatgcaaacacctcagctcacttcaaccattatgcgagaaccaaagagattgagacctgaggatagcttcatgtccgtataccccatgcagacagagcaccaccagactcctttagattacaatacccaagttacttggatgctggctcagaggcaacaggaggaggctcgacagcagcaggagcgtgcggcaatgagttacgtaaagctgaggaccaacctgcagcatgccatcagacggggaacctccctgatggaagacgatgaggaacccatcgtggaagacgtaatgatgtcttctgagggaaggattgaagatctgaacgaaggtatggactttgataccatggacatagacctgccaccatcaaagaaccgcagagaaagaaccgagttgaagcctgactttttcgatcccgcatccattatggacgaaagcgtattaggcgtatcaatgttttag

SEQ ID NO: 34076 - DNA, 1647 bp, Artificial Sequence
  derived and/or modified sequence
atgatcgccgcccccgagatccccaccgacttcaacctgctgcaggagagcgagacccacttcagcagcgacaccgacttcgaggacatcgagggcaagaaccagaagcagggcaagggcaagacctgcaagaagggcaagaagggccccgccgagaagggcaagggcggcaacggcggcggcaagccccccagcggccccaacagaatgaacggccaccaccagcagaacggcgtggagaacatgatgctgttcgaggtggtgaagatgggcaagagcgccatgcagagcgtggtggacgactggatcgagagctacaagcacgacagagacatcgccctgctggacctgatcaacttcttcatccagtgcagcggctgcaagggcgtggtgaccgccgagatgttcagacacatgcagaacagcgagatcatcagaaagatgaccgaggagttcgacgaggacagcggcgactaccccctgaccatggccggcccccagtggaagaagttcaagagcagcttctgcgagttcatcggcgtgctggtgagacagtgccagtacagcatcatctacgacgagtacatgatggacaccgtgatcagcctgctgaccggcctgagcgacagccaggtgagagccttcagacacaccagcaccctggccgccatgaagctgatgaccgccctggtgaacgtggccctgaacctgagcatcaacatggacaacacccagagacagtacgaggccgagagaaacaagatgatcggcaagagagccaacgagagactggagctgctgctgcagaagagaaaggagctgcaggagaaccaggacgagatcgagaacatgatgaacgccatcttcaagggcgtgttcgtgcacagatacagagacgccatcgccgagatcagagccatctgcatcgaggagatcggcatctggatgaagatgtacagcgacgccttcctgaacgacagctacctgaagtacgtgggctggaccatgcacgacaagcagggcgaggtgagactgaagtgcctgaccgccctgcagggcctgtactacaacaaggagctgaacagcaagctggagctgttcaccagcagattcaaggacagaatcgtgagcatgaccctggacaaggagtacgacgtggccgtgcaggccatcaagctgctgaccctggtgctgcagagcagcgaggaggtgctgaccgccgaggactgcgagaacgtgtaccacctggtgtacagcgcccacagacccgtggccgtggccgccggcgagttcctgtacaagaagctgttcagcagaagagaccccgaggaggacggcatgatgaagagaagaggcagacagggccccaacgccaacctggtgaagaccctggtgttcttcttcctggagagcgagctgcacgagcacgccgcctacctggtggacagcatgtgggactgcgccaccgagctgctgaaggactgggagtgcatgaacagcctgctgctggaggagcccctgagcggcgaggaggccctgaccgacagacaggagagcgccctgatcgagatcatgctgtgcaccatcagacaggccgccgagtgccacccccccgtgggcagaggcaccggcaagagagtgctgtag

SEQ ID NO: 34077 - DNA, 123 bp, Artificial Sequence
  derived and/or modified sequence
atgatcgccgcccccgagatccccaccgacttcaacctgctgcaggagagcgagacccacttcagcagcgacaccgacttcgaggacatcgagggcaagaaccagaagcagggcaagggctag

SEQ ID NO: 34078 - DNA, 3807 bp, Artificial Sequence
  derived and/or modified sequence
atgatcgctgcccctgagattccaaccgactttaacctgttgcaggagtctgagacccatttttcttcggatacggattttgaggacattgaagggaaaaaccagaagcagggcaaaggaaagacctgtaagaaaggaaaaaaaggacctgcagagaaaggaaaaggagggaacgggggtggaaaacctccctcgggcccgaatagaatgaacggacatcaccagcaaaacggggtggagaatatgatgctatttgaagtggttaagatgggcaaatcagctatgcagtccgttgtggacgattggattgagtcttacaagcatgatcgagatattgcactgctggatctcatcaatttcttcattcagtgtagtgggtgtaagggagtcgtgactgccgagatgttccggcacatgcagaattccgaaattattcgcaaaatgaccgaggaatttgacgaagacagtggagattacccacttaccatggccggcccccagtggaagaagttcaaaagttctttctgtgagttcatcggtgtgttagtccgccagtgccagtattctatcatctatgatgaatatatgatggataccgtgatttccttacttacgggtctgtcagactcacaggtgagagctttccgacacaccagcacattggccgccatgaagctaatgactgcgttagtgaatgtggcactgaacctctccattaatatggataatacacaaagacagtatgaagccgagcgaaataagatgatcgggaaaagagcgaatgagcggttggagttgctcttgcagaaaagaaaagaattacaggagaatcaggatgaaatcgagaacatgatgaatgcaatatttaagggagtttttgtgcatcggtaccgggacgcaatagctgaaattcgggccatctgcatcgaagagattggcatatggatgaagatgtactcggatgccttccttaacgactcctatctcaaatatgttggttggaccatgcacgataagcagggagaggttcggctgaagtgcctgactgcgctgcagggactgtattataacaaggagctcaactctaaattggaactgtttacttctaggtttaaagaccgcatcgtgtccatgaccttggataaagaatatgatgtggcagttcaggccattaaacttctgacactcgtactacagtcttctgaggaggtactaacagcagaagactgcgagaatgtctatcacctggtttactcagcacaccgccccgtcgccgtagcagcaggagaattcttgtacaagaaattattcagtcggagagatcctgaggaggatgggatgatgaagcgaagaggccggcaagggccaaatgctaacctggtgaaaacactcgtttttttctttctggaatccgaactgcatgagcacgcggcttacctggtcgactccatgtgggactgcgctaccgaactgttaaaagattgggagtgtatgaatagtctgctcctggaggagcccctgagtggagaagaagccctgactgataggcaagagtcagccctcattgagatcatgttgtgcaccattcgccaggccgcggagtgtcaccctcctgtaggaagaggcaccggtaagcgagtgctgaccgctaaggaaaagaaaacgcagctggatgacagaactaaaatcaccgagctgtttgccgttgctttaccacagcttttagcaaagtattctgttgatgccgaaaaggtgactaacctgctgcagctgccacagtatttcgatctggagatttatacgactggacgcctggagaagcatctagacgccctgctgcgccagattcgcaacattgtcgagaagcataccgacacagatgtactggaggcctgttcgaagacatatcacgccctgtgcaacgaggagttcaccatctttaatcgagtggacatcagccgctctcagttgattgacgaattggccgacaaatttaataggctcttggaggatttcctgcaggaaggggaggagccagacgaggatgacgcctaccaggtgctgtctaccctgaaacggattaccgcattccacaacgcccacgatctgtccaagtgggatctttttgcctgtaattacaagctactcaagactggcattgaaaacggagatatgcctgagcagatcgtgatccacgctttgcaatgcactcactacgtgatcctttggcaactggcgaagatcacagagtctagctccacaaaggaagatcttctgcggctcaaaaaacagatgagagttttttgtcagatatgccaacactatctgaccaacgtgaacaccactgtgaaggaacaagctttcacgatcctctgtgacatcctgatgatcttttcacatcagatcatgtcaggcggacgggatatgctggagcccctggtgtatacaccagactcaagtctacagtctgagcttctctcttttatcctggaccacgtctttattgaacaggatgatgacaacaatagcgccgatggccagcaggaagacgaggcctccaagatcgaagcgctgcacaaaaggcggaacctcctggcagctttctgcaagctcatcgtgtacacagtagtggaaatgaacactgcagcagatatttttaagcagtacatgaagtactacaacgattatggcgacatcatcaaggaaacaatgagcaaaacccggcagatcgacaagatacagtgcgccaaaacactgatcctttctctccagcagctatttaatgagatgatccaagagaacggatataattttgatcgctctagcagcaccttcagcggaatcaaggaactcgcacgcagattcgccctgactttcgggctggatcagctcaaaacacgagaagccattgccatgttgcataaagacggaattgaatttgcgttcaaggagcctaatccccaaggcgagagccatccccctttgaacttagcgttcctggacatactcagcgaatttagctcaaaattgctgcgtcaggataaacgaacagtgtatgtctacctggaaaaattcatgacctttcagatgtcgctgagacgcgaagatgtgtggctgccgctgatgtcatataggaattctctcctcgccggaggggatgacgacaccatgtcagtcatctcaggaatcagctcccgcggctcgacagtcagatctaagaagagcaagccttctacaggcaagcggaaggtggttgagggaatgcagctgtccttgacagaagaatccagcagtagtgactcaatgtggctctcccgggaacagacactacacactccagtcatgatgcaaacccctcagttaacatctaccatcatgagagaacccaagagactgagaccggaggactcctttatgagcgtgtatcccatgcagaccgagcatcatcagactcctctggactacaatacgcaggttacctggatgctcgcccagaggcaacaggaagaggctcgccagcaacaggagagggccgccatgagttacgtgaagctcaggaccaacctccagcatgcaattcgcaggggcactagtttaatggaggacgacgaagagcctattgtggaagatgtaatgatgagttccgagggacgcatcgaggatcttaacgagggtatggacttcgatacaatggatatcgacctgccaccaagtaagaataggcgggagcggacagaacttaagcccgactttttcgaccccgcttccattatggatgagtcagtcttaggtgtctccatgttctag

SEQ ID NO: 34079 - DNA, 1647 bp, Artificial Sequence
  derived and/or modified sequence
atgattgcagcccccgagattccaacagactttaatctgctccaggagagtgagacccatttctcatcagataccgacttcgaggatattgagggaaagaatcaaaagcaggggaaagggaaaacatgtaaaaagggtaaaaaaggaccagccgaaaaaggaaaaggaggcaatggtggaggcaaacctcccagtggcccaaatcgcatgaatggacatcaccagcaaaacggagtggagaacatgatgcttttcgaggtcgtaaaaatgggtaagtctgccatgcagtcggtggtcgatgattggatagagtcatacaagcacgatcgcgatatcgccttgctcgacctgatcaacttctttatccagtgctctggatgcaagggtgttgtgacagcggaaatgtttcggcacatgcagaacagtgaaattattagaaaaatgactgaggaattcgacgaggattcgggggattaccctctgacgatggccgggccacaatggaaaaagttcaagtcgtccttctgtgagtttatcggggttctcgtgcggcagtgccagtacagtatcatttacgatgagtatatgatggataccgtgatctcgctcctaaccgggctctcagatagtcaggtccgagcctttcgtcatacatctacgctggctgccatgaaattgatgacagctctggtgaatgtcgcactaaacctcagtattaacatggacaacactcagaggcaatatgaagcagagcgaaataagatgattggtaaaagagccaacgagaggttggagctgctcctgcagaaacggaaagaactacaggaaaaccaggatgagatcgagaacatgatgaacgcaattttcaagggtgtgtttgtgcaccggtatcgggacgcaattgctgagatccgcgcaatctgtatcgaggaaataggcatttggatgaagatgtacagcgacgcattccttaacgattcatatctgaagtacgtcggatggacaatgcatgacaaacagggggaagtgagattgaagtgccttacagccttacaaggactctactacaacaaggagctgaacagcaaactagaacttttcaccagccggtttaaggacagaatcgtgtctatgacacttgacaaggaatatgacgtcgccgtccaggccattaagctcctgaccctcgtgctgcagtcctccgaagaagtgctcacagcagaggactgcgaaaacgtgtatcatttggtatactccgcacacaggcccgtggctgttgctgccggagagtttctctataaaaagctattctcccgccgcgatcccgaggaagacggaatgatgaaaagacggggcaggcagggtccaaacgcaaatctggtgaagacactggtgttcttcttcttggagtctgagctgcacgagcatgccgcatatctggttgatagcatgtgggattgcgccacagagctactgaaggactgggagtgcatgaattctctcttgctggaggaaccactctccggggaagaggcactgacggatcggcaggaatctgccctcattgagatcatgctgtgcaccatacgacaggccgccgaatgtcatccccccgtgggccgtggaaccggtaagagggttctctag

SEQ ID NO: 34080 - DNA, 123 bp, Artificial Sequence
  derived and/or modified sequence
atgatagcggcccctgagatcccgacagactttaatctgctacaggaatccgagactcacttctcttcggacactgacttcgaagacattgaggggaagaatcagaaacagggtaaggggtag

SEQ ID NO: 34081 - DNA, 1647 bp, Artificial Sequence
  derived and/or modified sequence
atgattgctgcccctgagatccccacagacttcaacctgctgcaggagagcgagacccacttcagcagtgacacagactttgaggacatcgagggcaagaaccagaagcagggcaagggcaagacctgcaagaagggcaagaagggccctgctgagaagggcaaaggaggaaatggaggcggcaagcccccatctggccccaacaggatgaatggccaccaccagcagaatggagtggagaacatgatgctgtttgaggtggtgaagatgggcaagagcgccatgcagagcgtggtggatgactggattgagagctacaagcatgaccgggacatcgccctgctggacctgatcaacttcttcatccagtgcagcggctgcaagggcgtggtgacagctgagatgttccgccacatgcagaacagcgagatcatcaggaagatgacagaggagtttgatgaggacagcggggactaccccctgaccatggccggcccccagtggaagaagttcaagagcagcttctgtgagttcatcggcgtgctggtgcggcagtgccagtacagcatcatctatgatgagtacatgatggacaccgtcatcagcctgctgaccggcctgagtgacagccaggtgcgggccttccgccacaccagcaccctggccgccatgaagctgatgacagccctggtgaatgtggccctgaacctgagcatcaacatggacaacacccagaggcagtatgaggccgagaggaacaagatgattggcaagagggccaatgaaaggctggagctgctgctgcagaagaggaaggagctgcaggagaaccaggatgaaattgagaacatgatgaatgccatcttcaagggcgtgtttgtgcaccgctacagagatgccatcgccgagatccgggccatctgcatcgaggagatcggcatctggatgaagatgtacagtgatgccttcctgaatgacagctacctgaagtatgtgggctggaccatgcatgacaagcagggcgaggtgcggctgaagtgcctgacagccctgcagggcctgtactacaacaaggagctgaacagcaagctggagctgttcaccagccgcttcaaggacagaattgtgtccatgaccctggacaaggagtatgatgtggccgtgcaggccatcaagctgctgaccctggtgctgcagagcagcgaggaggtgctgacagctgaggactgtgaaaatgtgtaccacctggtgtacagcgcccacaggcctgtggccgtggccgccggggagttcctgtacaagaagctgttcagcagaagagatcctgaggaggatggcatgatgaagaggcggggccggcagggccccaatgccaacctggtgaagaccctggtgttcttcttcctggagagcgagctgcacgagcacgccgcctacctggtggacagcatgtgggactgtgccacagagctgctgaaggactgggagtgcatgaacagcctgctgctggaggagcccctgagcggggaggaggccctgacagaccggcaggagagcgccctgattgagatcatgctgtgcaccatccggcaggccgctgagtgccacccccctgtgggccggggcaccgggaagagggtgctgtag

SEQ ID NO: 34082 - DNA, 123 bp, Artificial Sequence
  derived and/or modified sequence
atgattgctgcccctgagatccccacagacttcaacctgctgcaggagagcgagacccacttcagcagtgacacagactttgaggacatcgagggcaagaaccagaagcagggcaaaggatag

SEQ ID NO: 34083 - DNA, 3807 bp, Artificial Sequence
  derived and/or modified sequence
atgatcgccgcccccgagatccccaccgacttcaacctgctgcaggaatcggagacacatttctcatccgatacagacttcgaggatatcgaaggtaaaaaccaaaagcagggtaagggcaagacctgcaaaaagggcaaaaaaggccccgcagaaaagggtaagggagggaacggtggggggaagcctccgtcaggacctaaccggatgaacgggcaccatcagcagaacggtgtcgagaacatgatgctattcgaggtggtgaaaatgggcaagagtgccatgcagagcgtggttgatgactggatcgagtcttacaaacatgaccgagatattgcactgttagacctcataaactttttcatccagtgcagtggatgtaaaggggtggtgaccgccgagatgttccgccacatgcagaatagtgaaatcatccggaagatgacagaggagtttgacgaggatagcggcgattacccgctgaccatggccggaccccagtggaaaaagttcaaatccagcttctgtgagtttatcggggtgctggtgcgtcagtgccagtattccattatctacgatgaatatatgatggacaccgtcatcagcctgctgacgggtctgtcagattctcaggtgcgggcgtttagacatacgagcacactggcggccatgaaactgatgaccgctctggtaaatgtagcactcaacctgtctattaacatggataacacacagcggcagtatgaggccgagcgtaacaaaatgatcggaaagcgggcgaatgagcgcttggagctgcttctgcaaaagagaaaggagctccaggagaatcaggatgaaattgagaatatgatgaatgccatcttcaagggtgttttcgtccacaggtatagggatgctatagctgagatccgcgcaatctgtattgaagaaattggcatctggatgaaaatgtactcagatgccttcctgaacgattcctacttgaagtacgtgggctggacaatgcacgacaagcagggcgaggtgagactgaagtgtctgaccgctctgcaaggcttgtattataacaaggagttaaatagcaaactcgagctcttcacttcgaggttcaaagacagaatcgtcagtatgaccctggataaagaatatgacgtcgccgtgcaggcgatcaagctgctgacattagttctgcaatcatcagaggaggtattaaccgctgaggactgcgaaaacgtgtaccacctggtgtattcggctcataggccagtcgctgtggcagccggcgagtttttatataaaaagctgttctcccggagggaccctgaggaagacggaatgatgaaaaggagagggcgacagggccctaatgctaacctggtaaaaactctcgtcttcttcttcctggaatccgagctgcacgagcacgccgcttatttggtcgactctatgtgggactgcgcaacagagctcctgaaggattgggagtgtatgaactctcttctgctcgaggaaccattgagcggcgaagaggcattgaccgacaggcaggagtccgcattgatagagatcatgctatgtacaattaggcaggctgccgagtgccatcctcccgtcggaaggggtactggcaagcgagtactcacagccaaagaaaagaagacccagctggacgacagaacaaagatcacggaactgttcgctgttgctctacctcagctgttagccaagtacagcgtcgacgcagagaaagtgaccaacctcctgcaactgcctcaatactttgatcttgaaatctacacaacaggacggttggagaaacatttagacgcacttcttagacaaatccgcaacattgtggagaagcacactgatactgacgtgcttgaggcctgctctaagacctaccacgccctgtgcaatgaggagttcactattttcaaccgcgtggacatctcgagatcacagctgattgacgaactggcagacaaatttaaccgcctcttggaggattttctgcaggaaggggaggagcccgatgaggacgacgcctatcaagtactttctacactcaagcggataactgcattccacaatgcgcatgatttgtctaaatgggacttgtttgcttgtaactacaaactactgaaaaccggtatcgaaaatggggatatgcccgagcaaatcgtaatccatgctctccagtgcacacattacgtgattctgtggcaacttgccaaaattacagaatctagttccactaaggaggacctcctccgactgaagaagcagatgagagtgttctgtcagatttgtcagcactacttgacaaatgtaaacacaaccgttaaggagcaagctttcacaattctgtgtgacatcctcatgatcttttcacaccagatcatgtccggtgggcgggatatgcttgagcctctggtttacacccctgacagctctctccagagcgaactcctatccttcattttggaccacgtttttattgagcaagacgatgacaataactcagcagatggacagcaagaagacgaggcgtctaaaatcgaagccctgcataagcgacgtaatctgttggccgccttttgcaagcttattgtgtacaccgtggtcgaaatgaacaccgcagccgacatattcaaacagtacatgaaatattataacgattatggggatataataaaggagaccatgagcaaaactcgccagatcgacaagatccagtgcgctaagacactgatcctgagtctgcagcaactgtttaacgagatgatccaggagaacggctacaattttgaccgcagcagtagtaccttttctgggatcaaggagctggccagacgttttgcccttacctttggcctggatcagctcaaaaccagagaggcaattgctatgctccataaggatggaatcgaattcgccttcaaggaacctaatcctcagggcgagtctcaccctcccctgaatttagcctttctggatattctaagcgagttcagtagtaaactgttgaggcaggataaaagaacggtgtatgtgtacctggagaaattcatgaccttccagatgtccctgcggcgggaagacgtgtggcttcccctgatgtcttatcggaatagcctcctcgccggaggagacgatgacactatgagcgtcatcagcgggatttcctcacgcggaagtaccgtgagatcaaagaagagtaaaccatccacaggaaaacgcaaagtggtggagggaatgcaactgtctctcacagaggaaagctcctcaagcgattctatgtggcttagccgtgagcagacactgcacacacccgtgatgatgcagactccacagttgacatctaccatcatgagagagcctaaacgactgcgtcctgaggactctttcatgtccgtgtaccccatgcagacagaacatcatcaaacgcctctggactataatacccaggtaacatggatgttggcacagcgtcagcaagaggaggccagacaacagcaggaacgtgcagcaatgagctatgtaaagttgcggaccaacctccaacacgctatcagaagaggaacctccttaatggaggatgacgaggaacctatagtagaagacgtgatgatgtcctcagagggtcgaatcgaagatttgaatgaggggatggacttcgacacaatggatatcgacttaccacctagcaaaaacaggagggaacggaccgagctgaaacctgatttttttgaccctgccagtattatggatgagtccgtgctgggggtctcaatgttttag

SEQ ID NO: 34084 - DNA, 1647 bp, Artificial Sequence
  derived and/or modified sequence
atgatcgccgcccccgagatccccaccgacttcaacctgctgcaggagagcgagactcatttcagttctgacacagacttcgaggacatcgagggcaaaaatcagaagcagggcaagggcaaaacatgtaagaagggaaagaaaggtccagctgagaagggaaagggcgggaacggcggcggaaaacctccatcgggtcctaataggatgaacggacatcaccaacaaaacggtgtggagaatatgatgctgtttgaagtcgtgaaaatgggcaagtccgcgatgcagagcgtcgtggatgactggatcgagtcttacaagcatgaccgcgacatcgcccttcttgatctcataaatttttttatccagtgcagtgggtgtaagggggtagtcactgctgagatgttcaggcatatgcagaattctgagatcatccggaagatgacagaggagtttgatgaggattctggcgactatcccttgacaatggccggcccccagtggaagaaatttaagagctcgttttgcgagtttattggagtgcttgttcgacaatgtcagtactccattatttatgatgaatatatgatggacactgttatatccctactgacgggactgtccgatagtcaggttagagctttcagacacacctccacactggctgcaatgaagttaatgaccgctttggtgaacgttgccttgaacttgtcaattaatatggataatacacagcgacagtatgaggcggaacgaaataagatgatcgggaaacgcgctaacgaacgcttagagctcttacttcaaaaacgaaaggaattgcaggagaaccaagacgaaattgagaatatgatgaacgccattttcaaaggcgtgtttgtgcacagataccgcgacgctatcgcagagataagagctatctgcatcgaagaaattggtatttggatgaaaatgtatagtgacgcttttttgaacgacagctacctgaagtacgtggggtggacaatgcatgacaagcagggagaagtgagactgaaatgtctcacggcgctgcaaggcctttactacaataaggaactcaactctaaacttgaactcttcacttccaggttcaaagaccgtatagttagcatgaccttggataaggaatatgatgtggcggtgcaagccattaagttactgacccttgtccttcagagctctgaagaagtgctaactgccgaggactgcgaaaacgtctaccacctagtctatagcgctcaccggcctgtggccgtcgccgcaggggaattcctgtataagaagctcttctcacgtcgggaccctgaagaagacgggatgatgaagcgccgcgggcgacagggacctaatgccaatcttgtgaaaaccttagtcttctttttcctggaaagcgaactgcacgaacatgcagcttatcttgtggactccatgtgggactgtgcaacagaacttctgaaggattgggaatgcatgaattctctgctgttggaggaaccactatccggagaagaagcacttacggaccgccaggagtcagcactcatcgaaattatgctatgcactatcagacaggcagccgagtgccaccctccagtgggacgcggcacaggtaaacgggtgctgtag

SEQ ID NO: 34085 - DNA, 123 bp, Artificial Sequence
  derived and/or modified sequence
atgatcgccgcccccgagatccccaccgacttcaacctgctgcaggaatccgaaacccacttctcctccgatactgactttgaggacatagaaggtaaaaatcagaagcagggtaaaggctag

SEQ ID NO: 34086 - DNA, 3807 bp, Artificial Sequence
  derived and/or modified sequence
atgatcgctgcccctgaaataccaacggattttaatctgcttcaggagagcgagacccacttttcaagcgatacagattttgaggacattgaggggaagaatcagaaacaaggcaaaggaaagacctgcaagaaggggaagaagggacccgctgagaaaggaaaggggggaaatgggggaggaaagccgccaagcggcccaaataggatgaatgggcatcaccaacagaacggcgtcgaaaacatgatgcttttcgaagtagttaagatgggaaaatctgccatgcaaagcgtggtggacgattggattgagagctataaacatgatcgtgacatcgcgctgctggaccttatcaacttctttatccagtgtagtggttgtaaaggggtagtgaccgcggaaatgtttcgccacatgcagaatagcgaaatcatcagaaaaatgacagaggagtttgatgaagactctggcgattatcctctaaccatggccggtcctcaatggaaaaagttcaaatcatcattctgcgaatttattggggtgctggtgcgacaatgccaatatagcataatctatgacgagtacatgatggacaccgtgatctcactcctgactgggttaagcgactctcaggttcgggcattccgtcacacgagtaccctagcagcaatgaagctgatgacagcactggttaatgttgctctgaatcttagtatcaatatggacaacactcagagacagtatgaagccgaacgtaataaaatgatcggcaagagagccaacgagcgcctggaactgctgctccagaaacgcaaggaactccaggaaaaccaggatgagatcgaaaatatgatgaacgctattttcaagggagtgtttgtgcaccggtacagggacgctatcgccgagataagagccatctgtattgaggagattggaatttggatgaagatgtacagcgacgcttttctcaacgacagttacttgaagtacgtgggatggacaatgcacgacaaacagggcgaagttaggctcaagtgtttaacggctcttcagggcctatattataacaaagaactaaactccaaactcgagttattcacctcgcgttttaaagatagaattgtttctatgacacttgataaagaatatgatgtcgcagtgcaggccatcaagctgctcactctagtgttgcagtccagtgaggaagtccttacagctgaggattgcgaaaacgtataccacctcgtgtactctgcccacaggcctgttgctgtagcggctggagagttcttgtacaagaagcttttcagcagaagggatcctgaagaggacggaatgatgaaaaggaggggaaggcagggtcccaacgctaacctggtcaaaactcttgtatttttttttctcgaatcagaactgcacgagcatgctgcctacctggttgactccatgtgggactgcgctactgagctgctcaaggactgggagtgcatgaacagcctgctgcttgaagagcccttgagcggggaggaggcacttaccgacaggcaggaatctgctttgatcgagattatgctgtgcacaatacggcaggcagccgagtgtcaccctcccgtaggccgagggacaggtaagagggtcttaacagcgaaagaaaaaaagacacagttagacgataggacgaagattaccgagctgtttgctgtggcccttccacaactgcttgcaaaatactccgtggatgccgaaaaagtgactaatcttctccagctcccgcaatatttcgacctggaaatctacacaacgggacggctcgaaaaacacctggacgccctcttacgccagattcgaaacatcgtcgagaagcacacggacacagatgttctggaggcctgttcaaagacctaccatgccctttgcaacgaggagttcacgatatttaatcgagtggatatctccagaagccaactgatagatgagctggcagataagttcaatcgactactagaagactttctgcaagaaggggaggagcctgatgaggatgacgcctaccaggtgctgtccaccctgaagcggatcaccgcatttcacaacgcacatgatctgagcaagtgggatctgtttgcttgcaactataaactgctgaaaacaggcattgaaaatggcgatatgcccgaacagattgtcatacacgcgctgcagtgcacacactacgtcattctgtggcaacttgctaaaattaccgaaagttcctccacaaaggaagacctgctgaggctgaagaaacagatgcgagtgttttgccagatctgtcagcattatttgactaacgttaatacgacagtgaaggagcaggcatttacaattttgtgcgatatattaatgatctttagtcatcagatcatgtcggggggtcgggacatgctggaaccactggtgtacacgcccgacagttctttgcagagtgagctgctcagcttcattctggaccatgtgtttatcgagcaggatgacgacaacaattctgcggacgggcagcaggaagacgaggcttccaagattgaggcccttcataaaagaagaaacctgctggctgccttttgtaaattgatcgtgtataccgttgtggagatgaacaccgcagccgatattttcaagcagtacatgaagtactacaacgattatggggatatcatcaaggaaacaatgagtaaaacccgccagatcgacaaaattcagtgtgccaaaaccctcatactttcactgcagcagctgttcaacgaaatgatacaggagaacggctacaatttcgatcgcagctcctctactttctcgggcattaaagagctcgctcgtcggttcgctctaactttcggcttagatcagctaaaaacccgcgaagctatcgcaatgttacataaagatggaattgagttcgcattcaaggagcctaatccccaaggcgagtcccatccgcctctgaacctagcctttcttgacattctctccgagtttagctctaaactcctcagacaagacaagcgcaccgtttatgtgtatctcgaaaagtttatgacattccaaatgtcgttaaggagagaggatgtgtggttgcccctgatgtcctatagaaattcgcttcttgcaggcggtgacgatgatacaatgagcgtcatctccgggatcagcagcagggggagtacagtaaggagcaaaaagtccaaaccatccacaggaaagagaaaggtcgtggagggaatgcagctttcattgacagaagagagctcctccagcgatagcatgtggttgtcgcgggagcagacactgcacacccctgtcatgatgcagacccctcagctcacaagcactattatgagggagccaaagagactcagacctgaagatagctttatgagtgtgtatcccatgcaaacagaacaccaccagaccccgttggattacaatacccaggttacatggatgcttgcgcaacgccagcaggaggaagcccgacagcagcaggaacgtgccgcaatgagttacgttaagctgaggacaaacctccaacatgcgattcgtcggggaacaagtctcatggaggatgatgaggagcccatagttgaagacgtgatgatgagctctgaaggtcgaatcgaggatctgaatgaaggcatggattttgacaccatggacattgacctgcccccttccaagaaccggagagagcggaccgagctgaagcctgatttcttcgacccggcttctattatggatgagtccgtcttaggggtctccatgttttag

SEQ ID NO: 34087 - DNA, 1647 bp, Artificial Sequence
  derived and/or modified sequence
atgatcgcagcgccagaaattccaaccgacttcaatctgttgcaggaaagcgagactcacttcagttccgatacagacttcgaggatattgagggtaagaatcagaagcagggcaagggaaagacctgcaagaagggaaagaagggacccgctgagaagggtaaggggggaaatggtgggggaaaacctccttctggtcctaatcgtatgaatggccaccatcagcagaacggagtggaaaacatgatgctcttcgaggtggtgaagatgggaaaaagcgcaatgcagagcgtcgtggacgattggatcgagtcctacaaacacgaccgcgatatcgctctgctcgatttgatcaatttcttcatccagtgctccggttgtaagggcgtcgtaaccgcagaaatgtttaggcatatgcagaactcagagattattaggaagatgaccgaggaatttgacgaggattccggcgattatcccctaacaatggccggtccccagtggaagaaattcaaatcttcgttctgtgagtttattggagttctcgtccggcagtgccagtactccattatttacgacgaatacatgatggacaccgtgataagcttgcttaccgggctatcagattcacaggtgcgcgcatttagacacacctccaccctcgccgctatgaaactcatgaccgccttggttaacgtggcgctgaatctgtcaatcaatatggataacacacagcggcaatacgaagctgagcggaataaaatgattgggaagcgcgctaacgaacggctggagctgcttttacaaaaacgcaaagaattgcaagaaaatcaggatgagattgagaacatgatgaacgccatttttaaaggcgtgtttgtgcaccgctaccgtgacgctattgccgagatccgggcaatctgcatcgaagaaataggtatttggatgaagatgtacagcgacgccttcctgaatgattcatacctgaagtacgtcggatggacgatgcacgataagcagggagaagttcggctgaaatgtctcactgccctgcaggggctctactacaacaaggaactgaacagcaagcttgagctcttcacctctcgttttaaggaccgcatcgtctctatgacacttgacaaggaatatgatgtggccgtccaagcaattaagctgttgactcttgtgcttcagtcatcagaggaagtactgaccgctgaggattgtgagaacgtgtaccacctggtttatagcgcccaccggccagtcgccgttgcagccggtgagttcctgtacaaaaaattgttttctcggagagaccctgaagaagacggaatgatgaagcggagggggaggcaagggccaaacgcaaatttggtcaaaacactagtttttttcttcctggaatcagagctccacgaacatgctgcgtacctggttgactccatgtgggactgtgccactgagcttctaaaggattgggagtgtatgaattcccttctactagaagagccgctgtcaggcgaggaggctctgactgatcgacaagagagcgcgctcattgagataatgctgtgcacgattagacaggccgctgagtgtcacccacctgtcggaagaggcaccggaaaaagagtgctctag

SEQ ID NO: 34088 - DNA, 123 bp, Artificial Sequence
  derived and/or modified sequence
atgatagccgctcccgaaatccccaccgacttcaatttacttcaggagtccgaaacccatttttctagcgacacggactttgaggacatcgagggtaaaaatcagaagcaagggaaaggatag

SEQ ID NO: 34089 - DNA, 5218 bp, Artificial Sequence
  derived and/or modified sequence
gtggccgacagatggcgcctgcgcgttccattcgcctccaagtcgccgaagagcgaacaccccaaacaatcccgaagcgccaccaaaaaaaaaaaaaaaaaaaaaaaaaaaaaaaaaaaaaaaaagaaaaaaaaccccgccggatccgaccgccactttcaaaaccccccaccgctctagaaccgcgggagcttccgtccctgagtagaattcgagggtgtaaagaagaggaaggggaaaaatatcttgtaccagcccaggggtgaagaagcccccggcctgagaaagaaggaggagtgggggaggcgaacagtctcgttgctgcctctgtgtacgctgaggggggaggtggccaccgagtactaaattcacttgggaataaaagaaaaacataagaaaattataagagaaaggaattgtcttagaagaaagaaggcaagccaccattttacccacgtaaatatatgaatatatttctgacattgaggtgttccagaagatgataaagaaatgatagcagctccagaaataccaactgattttaatctactacaggagtcagaaacacatttttcttctgacacagattttgaagatatcgaaggaaaaaaccaaaagcaaggcaaaggcaaaacttgtaaaaaaggcaaaaagggcccagcagaaaagggcaaaggtggaaatggaggaggaaaacctccttctggtccaaaccgaatgaatggtcatcaccaacagaatggagtggaaaacatgatgttgtttgaagttgttaaaatgggcaagagtgctatgcagtcggtggtagatgattggatagaatcatacaagcatgaccgagatatagcacttcttgaccttatcaacttttttattcagtgttcaggctgtaaaggagttgtcacagcagaaatgtttagacatatgcagaactctgagataattcgaaaaatgactgaagaattcgatgaggatagtggagattatccacttaccatggctggtcctcagtggaagaagttcaaatccagtttttgtgaattcattggcgtgttagtacggcaatgtcaatatagtatcatatatgatgagtatatgatggatacagtcatttcacttcttacaggattgtctgactcacaagtcagagcatttcgacatacaagcaccctggcagctatgaagttgatgacagctttggtgaatgtggcactaaatcttagcattaatatggataatacacaaagacaatatgaagcagaacggaataaaatgattggaaaacgagccaatgagaggctagaactcctgctacaaaagcggaaagagcttcaggaaaatcaagatgaaatagaaaatatgatgaatgcaatatttaaaggagtgtttgtacatagataccgtgatgcgatagctgaaattcgagctatttgcattgaagagattggcatttggatgaagatgtatagtgatgcctttcttaatgacagttatttaaaatatgttggttggactatgcatgataagcaaggtgaagtaagactcaaatgtcttactgctctacaagggctttattataacaaagagcttaattccaaactggaactttttaccagtcggttcaaggatagaattgtgtctatgacccttgacaaagaatatgatgttgcagtacaagcaataaaattactcactcttgttttacagagtagtgaagaagttctcactgcagaagattgtgaaaatgtctatcatctggtttattcagctcaccggccagtagcagtagcagctggagaatttctctacaaaaagctcttcagtcgtagagatccagaggaggatggaatgatgaaaagaagaggaagacaaggtccaaatgccaaccttgttaagacattggtttttttctttctagaaagtgagttacatgagcatgcagcataccttgtggatagcatgtgggactgtgctactgagctgctgaaagactgggaatgtatgaatagcttgttactggaagagccacttagtggagaggaagcactaacagataggcaagagagtgctctgattgaaataatgctttgtaccattagacaagcggctgaatgtcatcctcccgtgggaagagggacaggaaaaagggtgcttacagcaaaggagaagaagacacagttggatgataggacaaaaatcactgagctttttgccgtggcccttcctcagttattagcaaaatactctgtagatgcagaaaaggtgactaacttgttgcagttgcctcagtactttgatttggaaatatataccactggacgattagaaaagcatttggatgccttattgcgacagatccggaatattgtagagaagcacacagatacagatgttttggaagcatgttctaaaacttaccatgcactctgtaatgaagagttcacaatcttcaacagagtagatatttcaagaagtcaactgatagatgaattggcagataaatttaaccggcttcttgaagattttctgcaagagggtgaagaacctgatgaagatgatgcatatcaggtattgtcaacattgaagaggatcactgcttttcataatgcccatgacctttcaaagtgggatttatttgcttgtaattacaaactcttgaaaactggaatcgaaaatggagacatgcctgagcagattgttattcacgcactgcagtgtactcactatgtaatcctttggcaacttgctaagataactgaaagcagctctacaaaggaggacttgctgcgtttaaagaaacaaatgagagtattttgtcagatatgtcaacattacctgaccaacgtgaatactactgttaaggaacaggccttcactattctgtgtgatattttgatgatcttcagccatcagattatgtcaggagggcgtgacatgttagagccattagtgtatacccctgattcttcattgcagtctgagttgctcagctttattttggatcatgtcttcattgaacaggatgatgataataatagtgcagatggtcagcaagaggatgaagccagtaaaattgaagctctgcacaagagaagaaatttacttgcagcattttgtaagctaattgtatatactgtggtggagatgaatacagctgcagatatcttcaaacagtatatgaagtattataatgactatggagatatcatcaaagaaacaatgagtaaaacaaggcagatagacaaaattcagtgtgctaagacccttattctcagtctgcaacagctttttaatgaaatgatacaagaaaatggctataattttgatagatcatcctctacatttagtggcataaaagaacttgctcgacgttttgctttaacttttggacttgatcagttgaaaacaagagaagccattgccatgctacacaaagatggcatagaatttgcttttaaagagcctaatccgcaaggggagagccatccacctttaaatttggcatttcttgatattctgagtgaattttcttctaaactacttcgacaagacaaaagaacagtgtatgtttacttggaaaagttcatgacctttcagatgtcactccgaagagaggatgtgtggcttccactgatgtcttaccgaaattctttgctagctggtggtgatgatgacaccatgtcagtcattagtggaatcagcagccgggggtcaacagtacggagtaaaaaatcaaaaccatctacaggaaaacggaaagtggttgagggcatgcagctttcactcactgaagaaagtagtagtagtgacagtatgtggttaagcagagaacaaacactgcacacccctgttatgatgcagacaccacaactcacctccactattatgagagagcccaaaagattacggcctgaggatagcttcatgagtgtttatccaatgcagactgaacatcatcaaacacctcttgattataacacgcaggtaacatggatgttagctcaaagacaacaagaggaagcaaggcaacagcaggagagagcagcaatgagctatgttaaactgcgaactaatcttcagcatgccattcggcgtggcacaagcctaatggaagatgatgaagagccaattgtggaagatgttatgatgtcctcagaagggaggattgaggatcttaatgagggaatggattttgacaccatggatatagatttgccaccatcaaagaacagacgagagagaacagaactgaagcctgatttctttgatccagcttcaattatggatgaatcagttcttggagtgtcaatgttttaataccagtacacaattaaatctgtggtgaagtcattttctaagtggaagaggaaattttaaagtgtggtagatacagtgaaattctgtacagatttttctctaaggagaatatgacatgcttatgcttaccaagatcaagtgcattgaggggcagttttgtttgcctgaataaacgtaaaggacaagtaaacaatttgatgataagctacagtttttcttagaaagtaaatattttatttatgcgctgttagttggcttttgaatcgattatttcatgcttttttttaaaaaaaaaaaaaaacaaaataacaatctgaagaggcatttggtacagatatgaattctcttacatttatttactggttgtactaaataatgatgacctctgctggatttctgtttacatccagaaaacaatgttaaggatgtatttattcccctaccctgaagaaagtgtaggatagaattgtttttagcattctaaatttaaatgcttaaaacgtcaatcaacaaaactttgttttaaatattgtaattgtggagaaaagtaaacttataagcagaacttttacaattttttcatctaaaagtattttaagatatttttaaaatccaagagcttctctatacttttcagaaatatccagatgcagtgaactgccagaaggtaaccagtctcaaacatgcttatcccattatcaaccctgaaagtttgcttgtcctttaagataaaaatgtaatgttgtgatattccttccagtaatgccactgtattttgtctccaaataaaagaagcttattgtagtatgtttgcagaaaaattctaaacaaaaattatacagcttattagagtgtgggaatagggatctaaattttaaataaaattatatatatatataaa

SEQ ID NO: 34090 - DNA, 4393 bp, Artificial Sequence
  derived and/or modified sequence
attcatgtgacgggcccctctgcttctcccccgccccatcatctccagcgcgtggtgggggaactgctggggaaggcgattggcatcgatctctccatcccttccgaggcccgacttcggtggccaccgagtactaaattcacttgggaataaaagaaaaacataagaaaattataagagaaaggaattgtcttagaagaaagaaggcaagccaccattttacccacgtaaatatatgaatatatttctgacattgaggtgttccagaagatgataaagaaatgatagcagctccagaaataccaactgattttaatctactacaggagtcagaaacacatttttcttctgacacagattttgaagatatcgaaggaaaaaaccaaaagcaaggcaaaggcaaaacttgtaaaaaaggcaaaaagggcccagcagaaaagggcaaaggtggaaatggaggaggaaaacctccttctggtccaaaccgaatgaatggtcatcaccaacagaatggagtggaaaacatgatgttgtttgaagttgttaaaatgggcaagagtgctatgcagtcggtggtagatgattggatagaatcatacaagcatgaccgagatatagcacttcttgaccttatcaacttttttattcagtgttcaggctgtaaaggagttgtcacagcagaaatgtttagacatatgcagaactctgagataattcgaaaaatgactgaagaattcgatgaggatagtggagattatccacttaccatggctggtcctcagtggaagaagttcaaatccagtttttgtgaattcattggcgtgttagtacggcaatgtcaatatagtatcatatatgatgagtatatgatggatacagtcatttcacttcttacaggattgtctgactcacaagtcagagcatttcgacatacaagcaccctggcagctatgaagttgatgacagctttggtgaatgtggcactaaatcttagcattaatatggataatacacaaagacaatatgaagcagaacggaataaaatgattggaaaacgagccaatgagaggctagaactcctgctacaaaagcggaaagagcttcaggaaaatcaagatgaaatagaaaatatgatgaatgcaatatttaaaggagtgtttgtacatagataccgtgatgcgatagctgaaattcgagctatttgcattgaagagattggcatttggatgaagatgtatagtgatgcctttcttaatgacagttatttaaaatatgttggttggactatgcatgataagcaaggtgaagtaagactcaaatgtcttactgctctacaagggctttattataacaaagagcttaattccaaactggaactttttaccagtcggttcaaggatagaattgtgtctatgacccttgacaaagaatatgatgttgcagtacaagcaataaaattactcactcttgttttacagagtagtgaagaagttctcactgcagaagattgtgaaaatgtctatcatctggtttattcagctcaccggccagtagcagtagcagctggagaatttctctacaaaaagctcttcagtcgtagagatccagaggaggatggaatgatgaaaagaagaggaagacaaggtccaaatgccaaccttgttaagacattggtttttttctttctagaaagtgagttacatgagcatgcagcataccttgtggatagcatgtgggactgtgctactgagctgctgaaagactgggaatgtatgaatagcttgttactggaagagccacttagtggagaggaagcactaacagataggcaagagagtgctctgattgaaataatgctttgtaccattagacaagcggctgaatgtcatcctcccgtgggaagagggacaggaaaaagggtgcttacagcaaaggagaagaagacacagttggatgataggacaaaaatcactgagctttttgccgtggcccttcctcagttattagcaaaatactctgtagatgcagaaaaggtgactaacttgttgcagttgcctcagtactttgatttggaaatatataccactggacgattagaaaagcatttggatgccttattgcgacagatccggaatattgtagagaagcacacagatacagatgttttggaagcatgttctaaaacttaccatgcactctgtaatgaagagttcacaatcttcaacagagtagatatttcaagaagtcaactgatagatgaattggcagataaatttaaccggcttcttgaagattttctgcaagagggtgaagaacctgatgaagatgatgcatatcaggtattgtcaacattgaagaggatcactgcttttcataatgcccatgacctttcaaagtgggatttatttgcttgtaattacaaactcttgaaaactggaatcgaaaatggagacatgcctgagcagattgttattcacgcactgcagtgtactcactatgtaatcctttggcaacttgctaagataactgaaagcagctctacaaaggaggacttgctgcgtttaaagaaacaaatgagagtattttgtcagatatgtcaacattacctgaccaacgtgaatactactgttaaggaacaggccttcactattctgtgtgatattttgatgatcttcagccatcagattatgtcaggagggcgtgacatgttagagccattagtgtatacccctgattcttcattgcagtctgagttgctcagctttattttggatcatgtcttcattgaacaggatgatgataataatagtgcagatggtcagcaagaggatgaagccagtaaaattgaagctctgcacaagagaagaaatttacttgcagcattttgtaagctaattgtatatactgtggtggagatgaatacagctgcagatatcttcaaacagtatatgaagtattataatgactatggagatatcatcaaagaaacaatgagtaaaacaaggcagatagacaaaattcagtgtgctaagacccttattctcagtctgcaacagctttttaatgaaatgatacaagaaaatggctataattttgatagatcatcctctacatttagtggcataaaagaacttgctcgacgttttgctttaacttttggacttgatcagttgaaaacaagagaagccattgccatgctacacaaagatggcatagaatttgcttttaaagagcctaatccgcaaggggagagccatccacctttaaatttggcatttcttgatattctgagtgaattttcttctaaactacttcgacaagacaaaagaacagtgtatgtttacttggaaaagttcatgacctttcagatgtcactccgaagagaggatgtgtggcttccactgatgtcttaccgaaattctttgctagctggtggtgatgatgacaccatgtcagtcattagtggaatcagcagccgggggtcaacagtacggagtaaaaaatcaaaaccatctacaggaaaacggaaagtggttgagggcatgcagctttcactcactgaagaaagtagtagtagtgacagtatgtggttaagcagagaacaaacactgcacacccctgttatgatgcagacaccacaactcacctccactattatgagagagcccaaaagattacggcctgaggatagcttcatgagtgtttatccaatgcagactgaacatcatcaaacacctcttgattataacacgcaggtaacatggatgttagctcaaagacaacaagaggaagcaaggcaacagcaggagagagcagcaatgagctatgttaaactgcgaactaatcttcagcatgccattcggcgtggcacaagcctaatggaagatgatgaagagccaattgtggaagatgttatgatgtcctcagaagggaggattgaggatcttaatgagggaatggattttgacaccatggatatagatttgccaccatcaaagaacagacgagagagaacagaactgaagcctgatttctttgatccagcttcaattatggatgaatcagttcttggagtgtcaatgttttaataccagtacacaattaaatctgtggtgaagtcattttctaagtggaagaggaaattttaaagtgtggtagatacagtgaaattctgtacagatttttctctaaggagaatatgacatgcttatgcttaccaagatcaagtgcattgaggggcagttttgtttgcctgaataaacgtaaaggacaagtaaacaatttgatgataagctacagtttttcttagaaagtaaatattttatttatgcgctgttagttggcttttgaatcgattatttcatgcttttttttaaaaaaaaaaaaaaacaaa

SEQ ID NO: 34091 - DNA, 2089 bp, Artificial Sequence
  derived and/or modified sequence
gtggccgacagatggcgcctgcgcgttccattcgcctccaagtcgccgaagagcgaacaccccaaacaatcccgaagcgccaccaaaaaaaaaaaaaaaaaaaaaaaaaaaaaaaaaaaaaaaaagaaaaaaaaccccgccggatccgaccgccactttcaaaaccccccaccgctctagaaccgcgggagcttccgtccctgagtagaattcgagggtgtaaagaagaggaaggggaaaaatatcttgtaccagcccaggggtgaagaagcccccggcctgagaaagaaggaggagtgggggaggcgaacagtctcgttgctgcctctgtgtacgctgaggggggaggaattgtcttagaagaaagaaggcaagccaccattttacccacgtaaatatatgaatatatttctgacattgaggtgttccagaagatgataaagaaatgatagcagctccagaaataccaactgattttaatctactacaggagtcagaaacacatttttcttctgacacagattttgaagatatcgaaggaaaaaaccaaaagcaaggcaaaggcaaaacttgtaaaaaaggcaaaaagggcccagcagaaaagggcaaaggtggaaatggaggaggaaaacctccttctggtccaaaccgaatgaatggtcatcaccaacagaatggagtggaaaacatgatgttgtttgaagttgttaaaatgggcaagagtgctatgcagtcggtggtagatgattggatagaatcatacaagcatgaccgagatatagcacttcttgaccttatcaacttttttattcagtgttcaggctgtaaaggagttgtcacagcagaaatgtttagacatatgcagaactctgagataattcgaaaaatgactgaagaattcgatgaggatagtggagattatccacttaccatggctggtcctcagtggaagaagttcaaatccagtttttgtgaattcattggcgtgttagtacggcaatgtcaatatagtatcatatatgatgagtatatgatggatacagtcatttcacttcttacaggattgtctgactcacaagtcagagcatttcgacatacaagcaccctggcagctatgaagttgatgacagctttggtgaatgtggcactaaatcttagcattaatatggataatacacaaagacaatatgaagcagaacggaataaaatgattggaaaacgagccaatgagaggctagaactcctgctacaaaagcggaaagagcttcaggaaaatcaagatgaaatagaaaatatgatgaatgcaatatttaaaggagtgtttgtacatagataccgtgatgcgatagctgaaattcgagctatttgcattgaagagattggcatttggatgaagatgtatagtgatgcctttcttaatgacagttatttaaaatatgttggttggactatgcatgataagcaaggtgaagtaagactcaaatgtcttactgctctacaagggctttattataacaaagagcttaattccaaactggaactttttaccagtcggttcaaggatagaattgtgtctatgacccttgacaaagaatatgatgttgcagtacaagcaataaaattactcactcttgttttacagagtagtgaagaagttctcactgcagaagattgtgaaaatgtctatcatctggtttattcagctcaccggccagtagcagtagcagctggagaatttctctacaaaaagctcttcagtcgtagagatccagaggaggatggaatgatgaaaagaagaggaagacaaggtccaaatgccaaccttgttaagacattggtttttttctttctagaaagtgagttacatgagcatgcagcataccttgtggatagcatgtgggactgtgctactgagctgctgaaagactgggaatgtatgaatagcttgttactggaagagccacttagtggagaggaagcactaacagataggcaagagagtgctctgattgaaataatgctttgtaccattagacaagcggctgaatgtcatcctcccgtgggaagagggacaggaaaaagggtgctt

SEQ ID NO: 34092 - protein, 250 aa, Artificial Sequence
  derived and/or modified sequence
MSDEEVEQVEEQYEEEEEAQEEEEVQEEEKPRPKLTAPKIPEGEKVDFDDIQKKRQNKDLMELQALIDSHFEARKKEEEELVALKERIEKRRAERAEQQRIRAEKERERQNRLAEEKARREEEDAKRRAEDDLKKKKALSSMGANYSSYLAKADQKRGKKQTAREMKKKILAERRKPLNIDHLGEDKLRDKAKELWETLHQLEIDKFEFGEKLKRQKYDIMNVRARVQMLAKFSKKAGTPAKGKVGGRWK

SEQ ID NO: 34093 - protein, 256 aa, Artificial Sequence
  derived and/or modified sequence
MSDEEVEQVEEQYEEEEEAQEEAAEVHEEVHEPEEKPRPKLTAPKIPEGEKVDFDDIQKKRQNKDLMELQALIDSHFEARKKEEEELVALKERIEKRRAERAEQQRIRAEKERERQNRLAEEKARREEEDAKRRAEDDLKKKKALSSMGANYSSYLAKADQKRGKKQTAREMKKKILAERRKPLNIDHLGEDKLRDKAKELWETLHQLEIDKFEFGEKLKRQKYDITTLRSRIDQAQKHSKKAGTPAKGKVGGRWK

SEQ ID NO: 34094 - protein, 248 aa, Artificial Sequence
  derived and/or modified sequence
MAGITTIEAVKRKIQVLQQQADDAEERAERLQREVEGERRAREQAEAEVASLNRRIQLVEEELDRAQERLATALQKLEEAEKAADESERGMKVIENRALKDEEKMELQEIQLKEAKHIAEEADRKYEEVARKLVIIEGDLERTEERAELAESKCSELEEELKNVTNNLKSLEAQAEKYSQKEDKYEEEIKILTDKLKEAETRAEFAERSVAKLEKTIDDLEDKLKCTKEEHLCTQRMLDQTLLDLNEM

SEQ ID NO: 34095 - DNA, 747 bp, Artificial Sequence
  derived and/or modified sequence
atggccggcatcaccaccatcgaggccgtgaagagaaagatccaggtgctgcagcagcaggccgacgacgccgaggagagagccgagagactgcagagagaggtggagggcgagagaagagccagagagcaggccgaggccgaggtggccagcctgaacagaagaatccagctggtggaggaggagctggacagagcccaggagagactggccaccgccctgcagaagctggaggaggccgagaaggccgccgacgagagcgagagaggcatgaaggtgatcgagaacagagccctgaaggacgaggagaagatggagctgcaggagatccagctgaaggaggccaagcacatcgccgaggaggccgacagaaagtacgaggaggtggccagaaagctggtgatcatcgagggcgacctggagagaaccgaggagagagccgagctggccgagagcaagtgcagcgagctggaggaggagctgaagaacgtgaccaacaacctgaagagcctggaggcccaggccgagaagtacagccagaaggaggacaagtacgaggaggagatcaagatcctgaccgacaagctgaaggaggccgagaccagagccgagttcgccgagagaagcgtggccaagctggagaagaccatcgacgacctggaggacaagctgaagtgcaccaaggaggagcacctgtgcacccagagaatgctggaccagaccctgctggacctgaacgagatgtag

SEQ ID NO: 34096 - DNA, 747 bp, Artificial Sequence
  derived and/or modified sequence
atggccgggatcactacaattgaagccgtcaagaggaaaatacaggtgctgcagcagcaggctgacgacgcggaagagagggccgagcgactgcaacgtgaggtggaaggggagaggagagctagagaacaggctgaggctgaggtggcctccttgaataggcgcatacagttagtagaggaggagctggatcgcgctcaagaacggttggcaaccgccttacagaagctggaggaggcagaaaaagcagcggatgagagcgagcgtgggatgaaagtaattgagaaccgagctctcaaagacgaagaaaagatggaactgcaggaaatacaacttaaagaagccaaacatattgccgaagaggcggatagaaaatatgaggaagttgcccgaaaactggtgatcatcgagggagacctggagcgcaccgaggaaagagccgagctggcggagagcaagtgttctgagctcgaagaggagctcaagaatgtgaccaacaatttaaaaagtctggaggcacaggcagaaaaatactcacagaaggaggacaagtatgaggaagaaatcaagattctgacagacaagctgaaagaggcagaaaccagagctgaatttgctgaaagatcggtcgcaaaactggaaaaaacaattgacgacctggaggacaaactgaagtgcaccaaggaggaacacctctgcacgcagcgcatgctcgaccagacgttgctagacctcaatgagatgtag

SEQ ID NO: 34097 - DNA, 747 bp, Artificial Sequence
  derived and/or modified sequence
atggccggcatcaccaccattgaagctgtgaagaggaagatccaggtgctgcagcagcaggctgatgatgctgaggagcgggcagagcggctgcagcgggaggtggagggggagcggcgggcccgggagcaggccgaggccgaggtggccagcctgaacagacgcatccagctggtggaggaggagctggaccgggcccaggagcggctggccacagccctgcagaagctggaggaggccgagaaggccgcagatgaaagtgagcggggcatgaaggtgattgaaaatagagccctgaaggatgaggagaagatggagctgcaggagatccagctgaaggaggccaagcacatcgccgaggaggccgacagaaaatatgaggaggtggccaggaagctggtgatcatcgagggggacctggagaggacagaggagagagctgagctggccgagagcaaatgttctgagctggaggaggagctgaagaatgtgaccaacaacctgaagagcctggaggcccaggccgagaagtacagccagaaggaggacaagtatgaggaggagatcaagatcctgacagacaagctgaaggaggccgagaccagggctgagtttgctgagaggtctgtggccaagctggagaagaccattgatgacctggaggacaagctgaagtgcaccaaggaggagcacctgtgcacccagaggatgctggaccagaccctgctggacctgaatgagatgtag

SEQ ID NO: 34098 - DNA, 747 bp, Artificial Sequence
  derived and/or modified sequence
atggccggcatcaccaccatcgaggccgtgaagcggaagatccaggttcttcagcagcaggcagacgatgctgaggagagagcggagcggcttcagcgcgaggtagagggggagcgtcgcgcccgagaacaggccgaagctgaggtggctagtttaaatagacggatacaattggtcgaggaagagttggatcgggcacaggagcggttggcgacagctctccagaaactcgaggaggcagaaaaggccgctgatgaaagcgaacgcggtatgaaagtcatcgagaacagggccctgaaggacgaagagaagatggagttgcaggagattcagctgaaggaagctaagcatatcgccgaggaggcagatcgtaagtatgaggaagtggccagaaagctcgtaataatcgagggggacctagagcggactgaggaacgcgccgaactggccgaatcgaagtgctctgagctggaggaggagctgaaaaacgtgactaacaatctgaagagcctcgaagcccaggcggaaaaatactctcagaaagaagacaaatatgaggaagagattaagattctcaccgacaagttgaaggaggctgaaacaagggccgagttcgcggagcgttctgtggctaagttagagaagactattgatgacctggaagacaagctcaagtgtacgaaagaggagcacctatgcacccagcggatgctggatcagacgctgttagatttgaatgaaatgtag

SEQ ID NO: 34099 - DNA, 747 bp, Artificial Sequence
  derived and/or modified sequence
atggcgggtatcaccacaattgaggcggttaagcgaaagattcaggtcctgcagcagcaagcagacgacgctgaagaaagagccgaaaggcttcagagagaggtggaaggtgaacgtagggctagagaacaggccgaggccgaggtagcttccctcaaccggcgtattcagttggtcgaggaagagttagatagagctcaagagcgcctggctacagcactccagaaactggaagaggccgagaaggccgctgatgagtcagaaaggggtatgaaggtgattgagaaccgggcactcaaggatgaggagaagatggagctgcaggaaatccagttgaaggaagccaagcacattgctgaggaggcagatcgcaagtatgaagaagttgccagaaaattggtcatcattgagggtgacttagaaaggaccgaagagagagccgaacttgctgagtctaaatgcagcgagctggaggaagagcttaaaaatgttactaacaacctgaaatccttagaagcccaagcggaaaaatatagccagaaggaggataagtacgaggaagaaattaagattctgactgacaagctgaaggaagccgaaacacgagctgaatttgccgaacggtcggtcgcaaagttagagaaaaccatagatgatcttgaagataaactgaagtgtacaaaggaggagcacctgtgtacacaacgcatgctagatcaaactctactggatttgaatgagatgtag

SEQ ID NO: 34100 - DNA, 2108 bp, Artificial Sequence
  derived and/or modified sequence
gcaggcggaagtaagggtgagaggaggctgcaacgccgagcggaggaggcaggaaccggagcgcgagcagtagctgggtgggcaccatggctgggatcaccaccatcgaggcggtgaagcgcaagatccaggttctgcagcagcaggcagatgatgcagaggagcgagctgagcgcctccagcgagaagttgagggagaaaggcgggcccgggaacaggctgaggctgaggtggcctccttgaaccgtaggatccagctggttgaagaagagctggaccgtgctcaggagcgcctggccactgccctgcaaaagctggaagaagctgaaaaagctgctgatgagagtgagagaggtatgaaggttattgaaaaccgggccttaaaagatgaagaaaagatggaactccaggaaatccaactcaaagaagctaagcacattgcagaagaggcagataggaagtatgaagaggtggctcgtaagttggtgatcattgaaggagacttggaacgcacagaggaacgagctgagctggcagagtctaagtgttctgagctggaggaggagctgaagaatgtcaccaacaacctcaagtctcttgaggctcaggcggagaagtactctcaaaaagaagataaatatgaggaagaaatcaagattcttactgataaactcaaggaggcagagacccgtgctgagtttgctgagagatcggtagccaagctggaaaagacaattgatgacctggaagataaactgaaatgcaccaaagaggagcacctctgtacacaaaggatgctggaccagaccctgcttgacctgaatgagatgtagaacgccccagtcccaccctgctgctgctcctccctctgacccagactccgcctgaggccagcctgcgggaagctgacctttaactgagggctgatctttaactggaaggctgctttctcctttcaccaccccctccttccctgtgtctttttcgccaaactgtctctgcctcttcccggagaatccagctgggctagaggctgagcacctttggaaacaacatttaagggaatgtgagcacaatgcataatgtctttaaaaagcatgttgtgatgtacacattttgtaattaccttttttgttgttttgtagcaaccatttgtaaaacattccaaataattccacagtcctgaagcagcaatcgaatccctttctcacttttggaaggtgacttttcaccttaatgcatattcccctctccatagaggagaggaaaaggtgtaggcctgccttaccgagagccaaacagagcccagggagactccgctgtgggaaacctcattgttctgtacaaagtactagctaaaccagaaaggtgattccaggaggagttagccaaacaacaacaaaaacaaaaaatgtgctgttcaagttttcagctttaagatatctttggataatgttatttctattttttatttttttcattagaagttaccaaattaagatggtaagacctctgagaccaaaattttgtcccatctctaccccctcacaactgcttacagaatggatcatgtcccccttatgttgaggtgaccacttaattgctttcctgcctccttgaaagaaagaaagaaagaagactgtgtttttgccactgatttagccatgtgaaactcatctcattacccttttctgggtttgaagctgctgtctctagaagtgccatctcaattgtgctttgtatcagtcagtgctggagaaatcttgaatagcttatgtacaaaactttttaaattttatattattttgaaactttgctttgggtttgtggcaccctggccaccccatctggctgtgacagcctctgcagtccgtgggctggcagtttgttgatcttttaagtttccttccctacccagtccccattttctggtaaggtttctaggaggtctgttaggtgtacatcctgcagcttattggcttaaaatgtactctccttttatgtggtctctttggggccgattgggagaaagagaaatcaatagtgcaactgttttgatactgaatattgacaagtgtctttttgaaataaagaaccagtccctccaa

SEQ ID NO: 34101 - protein, 247 aa, Artificial Sequence
  derived and/or modified sequence
MAGITTIEAVKRKIQVLQQQADDAEERAERLQREVEGERRAREQAEAEVASLNRRIQLVEEELDRAQERLATALQKLEEAEKAADESERGMKVIENRALKDEEKMELQEIQLKEAKHIAEEADRKYEEVARKLVIIEGDLERTEERAELAESRCREMDEQIRLMDQNLKCLSAAEEKYSQKEDKYEEEIKILTDKLKEAETRAEFAERSVAKLEKTIDDLEERLYSQLERNRLLSNELKLTLHDLCD

SEQ ID NO: 34102 - DNA, 744 bp, Artificial Sequence
  derived and/or modified sequence
atggccggcatcaccaccatcgaggccgtgaagagaaagatccaggtgctgcagcagcaggccgacgacgccgaggagagagccgagagactgcagagagaggtggagggcgagagaagagccagagagcaggccgaggccgaggtggccagcctgaacagaagaatccagctggtggaggaggagctggacagagcccaggagagactggccaccgccctgcagaagctggaggaggccgagaaggccgccgacgagagcgagagaggcatgaaggtgatcgagaacagagccctgaaggacgaggagaagatggagctgcaggagatccagctgaaggaggccaagcacatcgccgaggaggccgacagaaagtacgaggaggtggccagaaagctggtgatcatcgagggcgacctggagagaaccgaggagagagccgagctggccgagagcagatgcagagagatggacgagcagatcagactgatggaccagaacctgaagtgcctgagcgccgccgaggagaagtacagccagaaggaggacaagtacgaggaggagatcaagatcctgaccgacaagctgaaggaggccgagaccagagccgagttcgccgagagaagcgtggccaagctggagaagaccatcgacgacctggaggagagactgtacagccagctggagagaaacagactgctgagcaacgagctgaagctgaccctgcacgacctgtgcgactag

SEQ ID NO: 34103 - DNA, 744 bp, Artificial Sequence
  derived and/or modified sequence
atggctggaataaccactattgaagctgtgaaaagaaagattcaggtcctccagcagcaggcagacgatgccgaagaacgcgcagagcgattgcagcgtgaagtggaaggagagaggcgcgcccgcgagcaagcggaagccgaagtcgcttctttaaaccgtagaatccagctcgttgaagaggagctcgatcgagcacaggaaaggctcgccaccgccttacaaaaattagaagaggccgagaaggcagccgacgaaagcgaacgtgggatgaaggttatagaaaacagggcactgaaagacgaggagaagatggaactgcaagaaatccagctgaaagaggctaaacacattgcggaggaggcagatcgcaagtacgaagaggtggcacgaaaacttgtgatcattgagggagacctggagcgcacggaggagagggcagagctggcagagtccagatgcagagagatggacgagcagatccggcttatggatcagaacctgaagtgcttaagcgctgctgaggaaaagtacagccagaaggaagataagtacgaggaggagatcaagatccttactgataagctcaaagaggcggagacccgagccgagttcgctgagagaagcgtggctaagctggagaaaaccattgatgatctcgaggaaagactttatagtcaattggaaagaaaccgtctgctgtctaatgaactcaagttgacactgcacgacctttgcgattag

SEQ ID NO: 34104 - DNA, 744 bp, Artificial Sequence
  derived and/or modified sequence
atggccggcatcaccaccattgaagctgtgaagaggaagatccaggtgctgcagcagcaggctgatgatgctgaggagcgggcagagcggctgcagcgggaggtggagggggagcggcgggcccgggagcaggccgaggccgaggtggccagcctgaacagacgcatccagctggtggaggaggagctggaccgggcccaggagcggctggccacagccctgcagaagctggaggaggccgagaaggccgcagatgaaagtgagcggggcatgaaggtgattgaaaatagagccctgaaggatgaggagaagatggagctgcaggagatccagctgaaggaggccaagcacatcgccgaggaggccgacagaaaatatgaggaggtggccaggaagctggtgatcatcgagggggacctggagaggacagaggagagagctgagctggccgagagccgctgccgggagatggatgagcagatccggctgatggaccagaacctgaagtgcctgtctgctgctgaggagaagtacagccagaaggaggacaagtatgaggaggagatcaagatcctgacagacaagctgaaggaggccgagaccagggctgagtttgctgagaggtctgtggccaagctggagaagaccattgatgacctggaggagcggctgtacagccagctggagaggaaccggctgctgagcaatgagctgaagctgaccctgcatgacctgtgtgactag

SEQ ID NO: 34105 - DNA, 744 bp, Artificial Sequence
  derived and/or modified sequence
atggccggcatcaccaccatcgaggccgtgaagcggaagatccaggttctccagcagcaggcggatgatgccgaagagcgagccgagcgcctgcagcgagaggtcgaaggcgaaaggagagccagagaacaggctgaggccgaagtcgcaagtctgaacagaagaatccaactcgtagaggaggaactcgaccgggcccaggaaagattggcgaccgctcttcagaagttggaggaagccgagaaggctgcagatgagtctgaaagaggcatgaaggttatcgagaatcgtgcactaaaggacgaggaaaaaatggagctgcaagagatacagctgaaggaagccaagcacattgctgaagaagcagacagaaaatatgaggaggttgcacggaaattggtcatcattgagggagacctcgaacgaaccgaggaaagagccgaactcgcggagtcacgatgtagggaaatggacgaacagattagactcatggaccaaaacctgaagtgtctgtccgcggcagaagaaaagtattctcagaaagaagataagtatgaggaagagattaaaatccttaccgataagctgaaagaggcagagaccagagcggaattcgccgagcggtccgtcgctaaattggaaaagaccatcgacgacctggaggagcggctgtacagtcagttggagaggaatcgattgctttccaacgagctaaagctcactctgcacgatctctgtgactag

SEQ ID NO: 34106 - DNA, 744 bp, Artificial Sequence
  derived and/or modified sequence
atggccggaataacaacaatcgaggccgtcaagcgcaagatccaggttcttcaacagcaggcagatgacgctgaagagagggcggagcgcttgcagcgtgaggtcgaaggggagcggagagcccgtgagcaagctgaggcagaagtggcatctcttaaccgtagaatccagctggtggaagaagaactcgacagggcccaggagcggcttgcaaccgccctccagaaactggaagaagctgaaaaagcggctgatgaatccgaacgtgggatgaaggtgatagagaatcgtgctctgaaagacgaagaaaagatggaactgcaagagatccaactgaaagaggcaaagcacattgccgaggaggccgaccggaagtacgaagaggtagccaggaagttagtaataatagagggcgacctagagcggactgaggagcgcgctgagcttgccgagagcagatgcagagagatggacgagcagatcaggctgatggaccagaatctgaagtgtttgagcgctgcggaagagaagtatagccagaaggaagataagtacgaagaggaaatcaagatccttaccgacaaattaaaggaggcagagactagggccgaattcgcagagaggtctgttgccaaacttgaaaaaacgatcgacgatctcgaagagcgtttgtattctcagttagaacgcaatcgtttgttatcaaacgaactgaaactcacactgcacgacctttgcgattag

SEQ ID NO: 34107 - DNA, 1115 bp, Artificial Sequence
  derived and/or modified sequence
gggtgggcaccatggctgggatcaccaccatcgaggcggtgaagcgcaagatccaggttctgcagcagcaggcagatgatgcagaggagcgagctgagcgcctccagcgagaagttgagggagaaaggcgggcccgggaacaggctgaggctgaggtggcctccttgaaccgtaggatccagctggttgaagaagagctggaccgtgctcaggagcgcctggccactgccctgcaaaagctggaagaagctgaaaaagctgctgatgagagtgagagaggtatgaaggttattgaaaaccgggccttaaaagatgaagaaaagatggaactccaggaaatccaactcaaagaagctaagcacattgcagaagaggcagataggaagtatgaagaggtggctcgtaagttggtgatcattgaaggagacttggaacgcacagaggaacgagctgagctggcagagtcccgttgccgagagatggatgagcagattagactgatggaccagaacctgaagtgtctgagtgctgctgaagaaaagtactctcaaaaagaagataaatatgaggaagaaatcaagattcttactgataaactcaaggaggcagagacccgtgctgagtttgctgagagatcggtagccaagctggaaaagacaattgatgacctggaagagcgtctctacagccaacttgagcgaaaccgcctgctttctaatgagctgaagctaacgctgcatgatctgtgtgactgatgggcagggctcaatgatgcccattaaactgagcttactgctcacaccactgacctggaccccaacaaaaagctgattgtctttttaaaagttattattttgccctgagcaaattgcattttaattggggcagttagaatgttgatttcctaacagcattgtgaagttgaccattgtgaagtttctgtccctttagaagagattatgggtgaagaagggaggggcctgagagattatagtgagaaaacttgcgagaattttgttttccacccttatttgctgctctttcacttgggcactgactgtaggatatgttcccttgcatggatgtttttaacaataaaaggactgacttgacaa

SEQ ID NO: 34108 - protein, 247 aa, Artificial Sequence
  derived and/or modified sequence
MAGITTIEAVKRKIQVLQQQADDAEERAERLQREVEGERRAREQAEAEVASLNRRIQLVEEELDRAQERLATALQKLEEAEKAADESERGMKVIENRALKDEEKMELQEIQLKEAKHIAEEADRKYEEVARKLVIIEGDLERTEERAELAESKCSELEEELKNVTNNLKSLEAQAEKYSQKEDKYEEEIKILTDKLKEAETRAEFAERSVAKLEKTIDDLEERLYSQLERNRLLSNELKLTLHDLCD

SEQ ID NO: 34109 - DNA, 744 bp, Artificial Sequence
  derived and/or modified sequence
atggccggcatcaccaccatcgaggccgtgaagagaaagatccaggtgctgcagcagcaggccgacgacgccgaggagagagccgagagactgcagagagaggtggagggcgagagaagagccagagagcaggccgaggccgaggtggccagcctgaacagaagaatccagctggtggaggaggagctggacagagcccaggagagactggccaccgccctgcagaagctggaggaggccgagaaggccgccgacgagagcgagagaggcatgaaggtgatcgagaacagagccctgaaggacgaggagaagatggagctgcaggagatccagctgaaggaggccaagcacatcgccgaggaggccgacagaaagtacgaggaggtggccagaaagctggtgatcatcgagggcgacctggagagaaccgaggagagagccgagctggccgagagcaagtgcagcgagctggaggaggagctgaagaacgtgaccaacaacctgaagagcctggaggcccaggccgagaagtacagccagaaggaggacaagtacgaggaggagatcaagatcctgaccgacaagctgaaggaggccgagaccagagccgagttcgccgagagaagcgtggccaagctggagaagaccatcgacgacctggaggagagactgtacagccagctggagagaaacagactgctgagcaacgagctgaagctgaccctgcacgacctgtgcgactag

SEQ ID NO: 34110 - DNA, 744 bp, Artificial Sequence
  derived and/or modified sequence
atggcaggaatcaccacaatcgaagccgtgaagaggaagatccaggtgctgcagcaacaggctgacgacgccgaggagcgcgcggagcgtctgcagcgtgaagtcgagggcgaacggcgggcccgcgagcaagctgaggcagaggttgcatctcttaaccgccgcatccagctagtggaagaggagctggatcgcgcacaggaaagattggccaccgccctacagaagctggaagaagcagagaaagccgccgacgagagtgagcgcggaatgaaggtgattgaaaatcgggcccttaaggacgaagaaaaaatggagctccaagaaatccagctgaaggaggccaaacacatagctgaggaggctgatcgcaaatatgaggaggttgcaagaaaactcgtaattatcgaaggggatctcgagagaaccgaagagcgagccgagctggccgagagcaagtgctcggaactcgaagaggagttaaagaacgtcactaacaacctgaaatcgcttgaggcccaggccgaaaaatactcccagaaagaagacaaatatgaggaagagattaaaatcctgaccgacaagttgaaggaggccgagacgcgtgctgaatttgcagaacgcagtgtcgctaagctagaaaagaccattgatgacctggaagagaggctgtatagccaactggagaggaatcgtctcttgtcaaacgaactgaaactgactcttcacgatctttgtgactag

SEQ ID NO: 34111 - DNA, 744 bp, Artificial Sequence
  derived and/or modified sequence
atggccggcatcaccaccattgaagctgtgaagaggaagatccaggtgctgcagcagcaggctgatgatgctgaggagcgggcagagcggctgcagcgggaggtggagggggagcggcgggcccgggagcaggccgaggccgaggtggccagcctgaacagacgcatccagctggtggaggaggagctggaccgggcccaggagcggctggccacagccctgcagaagctggaggaggccgagaaggccgcagatgaaagtgagcggggcatgaaggtgattgaaaatagagccctgaaggatgaggagaagatggagctgcaggagatccagctgaaggaggccaagcacatcgccgaggaggccgacagaaaatatgaggaggtggccaggaagctggtgatcatcgagggggacctggagaggacagaggagagagctgagctggccgagagcaaatgttctgagctggaggaggagctgaagaatgtgaccaacaacctgaagagcctggaggcccaggccgagaagtacagccagaaggaggacaagtatgaggaggagatcaagatcctgacagacaagctgaaggaggccgagaccagggctgagtttgctgagaggtctgtggccaagctggagaagaccattgatgacctggaggagcggctgtacagccagctggagaggaaccggctgctgagcaatgagctgaagctgaccctgcatgacctgtgtgactag

SEQ ID NO: 34112 - DNA, 744 bp, Artificial Sequence
  derived and/or modified sequence
atggccggcatcaccaccatcgaggccgtgaagcggaagatccaggtcctgcaacagcaagccgacgatgctgaggagcgcgcagagaggctacaaagagaagttgaaggggagcgaagggccagggagcaggccgaggcagaggtggccagtttgaacagacggattcagttagtggaggaagaactcgatcgcgctcaggagaggctggctacagctctgcaaaagctcgaagaggcggagaaggctgctgacgagagtgagagaggcatgaaagtgatagagaacagggcgctaaaggacgaggagaaaatggaattacaggagatacagcttaaggaagccaagcatatcgctgaggaggcggaccgcaagtacgaggaggtggcccggaagttagtgatcattgagggcgacctcgaacgcaccgaagaacgagctgagctggcagaatccaagtgtagcgaactggaggaggagttaaagaacgtcactaacaacctgaaatctcttgaggcccaagcagagaagtacagccaaaaggaagataagtacgaagaagaaattaaaattctgacagacaagcttaaggaagctgagactcgcgccgaatttgctgaaaggtccgtggcaaaactggagaagactatcgacgatctcgaagaacgcttatattcgcagctcgagaggaatcgtttgttgagcaacgagctgaagctgaccttgcacgatctctgcgattag

SEQ ID NO: 34113 - DNA, 744 bp, Artificial Sequence
  derived and/or modified sequence
atggccggaattacaactattgaggctgtgaagaggaaaatccaggtgctccagcagcaagccgacgacgcggaggaacgcgcagaacgcctgcagagagaggtggagggcgaacgcagagctagagagcaggctgaagcagaggtggcatccctgaatagacgcatccagctggtagaagaagagcttgatcgcgctcaggagcggctcgccacggccctccagaagctggaagaggcagaaaaagccgctgatgaatccgaaagggggatgaaagtgattgagaatcgcgctctcaaggacgaggaaaaaatggaactgcaagagatacagctgaaagaggctaagcatatcgccgaagaggccgatcggaagtatgaagaggttgccaggaagctggtcatcatcgagggagacctggagcgcaccgaggaacgagctgaacttgccgagagtaaatgttctgagctggaggaagaacttaagaatgtaaccaacaatttgaagtccctagaggcccaggccgagaagtacagccaaaaagaggacaagtacgaagaagaaattaaaatcttgaccgacaagttgaaagaagctgaaacaagagctgaatttgctgagcgatcggttgccaaactcgagaaaacgattgatgatctagaagagcgattatactcccagctggagaggaatcggttactgtccaacgaactgaaactgactttgcacgatctctgtgattag

SEQ ID NO: 34114 - DNA, 1088 bp, Artificial Sequence
  derived and/or modified sequence
ggaggaggcaggaaccggagcgcgagcagtagctgggtgggcaccatggctgggatcaccaccatcgaggcggtgaagcgcaagatccaggttctgcagcagcaggcagatgatgcagaggagcgagctgagcgcctccagcgagaagttgagggagaaaggcgggcccgggaacaggctgaggctgaggtggcctccttgaaccgtaggatccagctggttgaagaagagctggaccgtgctcaggagcgcctggccactgccctgcaaaagctggaagaagctgaaaaagctgctgatgagagtgagagaggtatgaaggttattgaaaaccgggccttaaaagatgaagaaaagatggaactccaggaaatccaactcaaagaagctaagcacattgcagaagaggcagataggaagtatgaagaggtggctcgtaagttggtgatcattgaaggagacttggaacgcacagaggaacgagctgagctggcagagtctaagtgttctgagctggaggaggagctgaagaatgtcaccaacaacctcaagtctcttgaggctcaggcggagaagtactctcaaaaagaagataaatatgaggaagaaatcaagattcttactgataaactcaaggaggcagagacccgtgctgagtttgctgagagatcggtagccaagctggaaaagacaattgatgacctggaagagcgtctctacagccaacttgagcgaaaccgcctgctttctaatgagctgaagctaacgctgcatgatctgtgtgactgatgggcagggctcaatgatgcccattaaactgagcttactgctcacaccactgacctggaccccaacaaaaagctgattgtctttttaaaagttattattttgccctgagcaaattgcattttaattggggcagttagaatgttgatttcctaacagcattgtgaagttgaccattgtgaagtttctgtccctttagaagagattatgggtgaagaagggaggggcctgagagattatagtgagaaaacttgcgagaattttgttttccacccttatttgctgctctttcacttgggcac

SEQ ID NO: 34115 - protein, 630 aa, Artificial Sequence
  derived and/or modified sequence
METTPLNSQKQLSACEDGEDCQENGVLQKVVPTPGDKVESGQISNGYSAVPSPGAGDDTRHSIPATTTTLVAELHQGERETWGKKVDFLLSVIGYAVDLGNVWRFPYICYQNGGGAFLLPYTIMAIFGGIPLFYMELALGQYHRNGCISIWRKICPIFKGIGYAICIIAFYIASYYNTIMAWALYYLISSFTDQLPWTSCKNSWNTGNCTNYFSEDNITWTLHSTSPAEEFYTRHVLQIHRSKGLQDLGGISWQLALCIMLIFTVIYFSIWKGVKTSGKVVWVTATFPYIILSVLLVRGATLPGAWRGVLFYLKPNWQKLLETGVWIDAAAQIFFSLGPGFGVLLAFASYNKFNNNCYQDALVTSVVNCMTSFVSGFVIFTVLGYMAEMRNEDVSEVAKDAGPSLLFITYAEAIANMPASTFFAIIFFLMLITLGLDSTFAGLEGVITAVLDEFPHVWAKRRERFVLAVVITCFFGSLVTLTFGGAYVVKLLEEYATGPAVLTVALIEAVAVSWFYGITQFCRDVKEMLGFSPGWFWRICWVAISPLFLLFIICSFLMSPPQLRLFQYNYPYWSIILGYCIGTSSFICIPTYIAYRLIITPGTFKERIIKSITPETPTEIPCGDIRLNAV

SEQ ID NO: 34116 - protein, 672 aa, Artificial Sequence
  derived and/or modified sequence
MSQSRRVNPDDRELGGDPQIQAPRDQLGSLADGHQCHLLTSRMETTPLNSQKQLSACEDGEDCQENGVLQKVVPTPGDKVESGQISNGYSAVPSPGAGDDTRHSIPATTTTLVAELHQGERETWGKKVDFLLSVIGYAVDLGNVWRFPYICYQNGGGAFLLPYTIMAIFGGIPLFYMELALGQYHRNGCISIWRKICPIFKGIGYAICIIAFYIASYYNTIMAWALYYLISSFTDQLPWTSCKNSWNTGNCTNYFSEDNITWTLHSTSPAEEFYTRHVLQIHRSKGLQDLGGISWQLALCIMLIFTVIYFSIWKGVKTSGKVVWVTATFPYIILSVLLVRGATLPGAWRGVLFYLKPNWQKLLETGVWIDAAAQIFFSLGPGFGVLLAFASYNKFNNNCYQDALVTSVVNCMTSFVSGFVIFTVLGYMAEMRNEDVSEVAKDAGPSLLFITYAEAIANMPASTFFAIIFFLMLITLGLDSTFAGLEGVITAVLDEFPHVWAKRRERFVLAVVITCFFGSLVTLTFGGAYVVKLLEEYATGPAVLTVALIEAVAVSWFYGITQFCRDVKEMLGFSPGWFWRICWVAISPLFLLFIICSFLMSPPQLRLFQYNYPYWSIILGYCIGTSSFICIPTYIAYRLIITPGTFKERIIKSITPETPTEIPCGDIRLNAV

SEQ ID NO: 34117 - protein, 139 aa, Artificial Sequence
  derived and/or modified sequence
MALRMLWAGQAKGILGGWGIICLVMSLLLQHPGVYSKCYFQAQAPCHYEGKYFTLGESWLRKDCFHCTCLHPVGVGCCDTSQHPIDFPAGCEVRQEAGTCQFSLVQKSDPRLPCKGGGPDPEWGSANTPVPGAPAPHSS

SEQ ID NO: 34118 - DNA, 420 bp, Artificial Sequence
  derived and/or modified sequence
atggccttgcgcatgctttgggccggacaggccaaggggattctggggggttggggcatcatttgtcttgtcatgagcttactgctgcagcatcccggagtctacagcaaatgttactttcaagcccaggcaccttgtcactatgaaggcaagtatttcactctaggcgaatcctggctgagaaaggattgcttccattgcacctgcctccacccagtgggtgtgggatgttgcgacaccagccagcacccgatcgacttcccagcaggctgtgaagtaaggcaagaggccggaacctgccaattttccttagtccagaagtccgatcctcggctcccatgtaagggcggaggaccagacccggagtgggggagcgcaaacactcctgttcctggagcccctgctccacactcatcatag

SEQ ID NO: 34119 - DNA, 420 bp, Artificial Sequence
  derived and/or modified sequence
atggccctcagaatgctctgggcaggccaggctaagggcattctcggtggttgggggatcatatgcttggtcatgagtttgttacttcagcatcccggtgtctactccaaatgttattttcaggcccaggcgccttgtcattatgaaggaaagtacttcacactgggcgagtcatggttgcggaaggattgtttccactgcacttgcttacatcctgttggcgtcggctgttgtgacacgagtcagcatccaattgattttcccgccggctgtgaggtaagacaggaagccggcacctgtcagttctctctggtgcagaaatctgaccctcggctgccatgtaaggggggaggaccagacccagaatggggctctgccaatacaccagttccgggcgctccggcgccacactctagctag

SEQ ID NO: 34120 - DNA, 670 bp, Artificial Sequence
  derived and/or modified sequence
gggagatagtgtgagacaggagcccaggggagaaagacagaaactaagactcaaggagcaacgcaaagcaaagtcaaggagtcaagaccagagtagctgagcagaggccaagaagggtctgagagggctgtgcagcagcaatggccctaaggatgctctgggctggacaggccaaggggatcctaggaggctgggggatcatctgcttggtgatgtctctactcctccagcacccaggagtctacagcaagtgctacttccaagctcaagccccctgtcactatgaggggaaatattttaccctgggtgagtcttggctccgcaaggactgtttccattgcacctgtctgcatcctgttggcgtgggctgctgtgacacgtcccagcatcccatcgacttcccggctgggtgtgaggtacgtcaggaggcaggaacctgccagttctccttggtgcaaaaatctgaccctcggctgccctgcaaagggggagggcctgacccagaatggggctcagccaacacccctgttcctggggctcctgctccccactccagctaaactcaactgatcatccatctgctgactgctcactgctgctgccacttccagggaaaccactagcagctgccaatgtattctgaacaaataaattaatgctatagctgaaa

SEQ ID NO: 34121 - DNA, 420 bp, Artificial Sequence
  derived and/or modified sequence
atggcattgcggatgttgtgggctgggcaagcaaagggtattcttgggggatggggaattatttgcctggtaatgtctcttctcctacagcacccaggggtgtactccaaatgttactttcaggcacaagccccctgccactacgagggaaagtatttcacccttggcgagtcttggctaagaaaggattgttttcactgtacgtgccttcacccggttggggtgggatgttgcgacacatctcagcaccctattgattttcctgcaggctgcgaggtgaggcaagaggcaggtacctgccagttttcactggtccagaagtccgaccctagactaccctgtaaaggaggcggccctgatcccgagtggggatccgctaacacccccgtgcctggcgcccctgccccacactcttcatag

SEQ ID NO: 34122 - DNA, 420 bp, Artificial Sequence
  derived and/or modified sequence
atggccctgagaatgctgtgggccggccaggccaagggcatcctgggcggctggggcatcatctgcctggtgatgagcctgctgctgcagcaccccggcgtgtacagcaagtgctacttccaggcccaggccccctgccactacgagggcaagtacttcaccctgggcgagagctggctgagaaaggactgcttccactgcacctgcctgcaccccgtgggcgtgggctgctgcgacaccagccagcaccccatcgacttccccgccggctgcgaggtgagacaggaggccggcacctgccagttcagcctggtgcagaagagcgaccccagactgccctgcaagggcggcggccccgaccccgagtggggcagcgccaacacccccgtgcccggcgcccccgccccccacagcagctag

SEQ ID NO: 34123 - DNA, 420 bp, Artificial Sequence
  derived and/or modified sequence
atggcacttaggatgctctgggcgggccaggcgaagggcatcctcggaggatggggcatcatctgtttagttatgtcgctgttgttacagcaccctggcgtgtactctaagtgctatttccaggcccaagccccatgtcattacgaggggaaatactttaccctcggcgagagctggctgaggaaagattgctttcattgtacttgtctccatccggtcggagtgggatgctgtgatacaagccagcaccccatcgacttcccggcaggatgtgaagttcgacaggaagctggcacttgtcagttctctctcgtgcaaaagagcgacccccgtctgccctgtaagggaggcgggccggaccccgagtgggggtctgcgaatacacctgtgcctggtgcaccagcaccacactcgagctag

SEQ ID NO: 34124 - DNA, 420 bp, Artificial Sequence
  derived and/or modified sequence
atggccctgaggatgctgtgggccggccaggccaagggcatcctgggcggctggggcatcatctgcctggtgatgagcctgctgctgcagcaccctggggtgtacagcaagtgctacttccaggcccaggccccctgccactatgagggcaagtacttcaccctgggggagagctggctgaggaaggactgcttccactgcacctgcctgcaccctgtgggcgtgggctgctgtgacaccagccagcaccccatcgacttccctgctggctgtgaggtgcggcaggaggccggcacctgccagttcagcctggtgcagaagagtgacccccggctgccctgcaagggcggcggccctgaccctgagtggggcagcgccaacacccctgtgcctggggccccagccccccacagcagctag

SEQ ID NO: 34125 - DNA, 420 bp, Artificial Sequence
  derived and/or modified sequence
atggccctgcggatgctgtgggccggccaggccaagggcatcctggggggctggggcatcatctgtctggtgatgtctttactgctgcagcaccctggagtgtactccaagtgctattttcaggctcaggccccttgtcattacgagggtaagtatttcacactcggtgagtcctggctcagaaaggattgctttcattgtacctgtctgcatcctgtgggagtgggttgctgcgatacatctcaacacccaatagactttcccgcaggctgcgaagtacgccaggaagctggtacctgtcaattttctctggtgcagaaatccgatccccggctaccttgcaagggcggaggcccagacccagagtggggctcagccaacacaccagtccccggcgcccctgcacctcattcctcttag

SEQ ID NO: 34126 - RNA, 420 nt, Artificial Sequence
  derived and/or modified sequence
auggcccucagaaugcucugggcaggccaggcuaagggcauucucggugguugggggaucauaugcuuggucaugaguuuguuacuucagcaucccggugucuacuccaaauguuauuuucaggcccaggcgccuugucauuaugaaggaaaguacuucacacugggcgagucaugguugcggaaggauuguuuccacugcacuugcuuacauccuguuggcgucggcuguugugacacgagucagcauccaauugauuuucccgccggcugugagguaagacaggaagccggcaccugucaguucucucuggugcagaaaucugacccucggcugccauguaaggggggaggaccagacccagaauggggcucugccaauacaccaguuccgggcgcuccggcgccacacucuagcuag

SEQ ID NO: 34127 - RNA, 420 nt, Artificial Sequence
  derived and/or modified sequence
auggcauugcggauguugugggcugggcaagcaaaggguauucuugggggauggggaauuauuugccugguaaugucucuucuccuacagcacccagggguguacuccaaauguuacuuucaggcacaagcccccugccacuacgagggaaaguauuucacccuuggcgagucuuggcuaagaaaggauuguuuucacuguacgugccuucacccgguuggggugggauguugcgacacaucucagcacccuauugauuuuccugcaggcugcgaggugaggcaagaggcagguaccugccaguuuucacugguccagaaguccgacccuagacuacccuguaaaggaggcggcccugaucccgaguggggauccgcuaacacccccgugccuggcgccccugccccacacucuucauag

SEQ ID NO: 34128 - protein, 467 aa, Artificial Sequence
  derived and/or modified sequence
MATRSCREKAQKLNEQHQLILSKLLREEDNKYCADCEAKGPRWASWNIGVFICIRCAGIHRNLGVHISRVKSVNLDQWTAEQIQCMQDMGNTKARLLYEANLPENFRRPQTDQAVEFFIRDKYEKKKYYDKNAIAITNISSSDAPLQPLVSSPSLQAAVDKNKLEKEKEKKKEEKKREKEPEKPAKPLTAEKLQKKDQQLEPKKSTSPKKAAEPTVDLLGLDGPAVAPVTNGNTTVPPLNDDLDIFGPMISNPLPATVMPPAQGTPSAPAAATLSTVTSGDLDLFTEQTTKSEEVAKKQLSKDSILSLYGTGTIQQQSTPGVFMGPTNIPFTSQAPAAFQGFPSMGVPVPAAPGLIGNVMGQSPSMMVGMPMPNGFMGNAQTGVMPLPQNVVGPQGGMVGQMGAPQSKFGLPQAQQPQWSLSQMNQQMAGMSISSATPTAGFGQPSSTTAGWSGSSSGQTLSTQLWK

SEQ ID NO: 34129 - protein, 137 aa, Artificial Sequence
  derived and/or modified sequence
MATRSCREKAQKLNEQHQLILSKLLREEDNKYCADCEAKGPRWASWNIGVFICIRCAGIHRNLGVHISRVKSVNLDQWTAEQIQCMQDMGNTKARLLYEANLPENFRRPQTDHEDIILETTAVITLLLNKCLPYAKP

SEQ ID NO: 34130 - DNA, 1404 bp, Artificial Sequence
  derived and/or modified sequence
atggccactaggagctgccgcgagaaggcccagaagttgaacgagcagcatcagttaattctaagtaagctgctgagggaggaggataacaaatactgtgcagactgcgaggctaaaggccctagatgggcctcatggaatattggcgtgtttatctgcatccgctgcgccggaatccatcgtaacctgggcgtgcacatctcaagggtgaagtccgtgaacctcgaccagtggactgcagaacagatccagtgcatgcaagatatgggcaacacaaaggccaggcttttatacgaagctaacttgcctgagaactttagacggcctcagaccgaccaggccgtggaattctttattagagacaaatacgagaagaaaaagtattacgacaaaaacgcgatcgcgatcactaatatctcctccagcgatgcccccttgcagccactggtgtcctctcctagcctgcaggccgcagtggacaaaaacaagctcgaaaaagaaaaagaaaagaagaaggaggaaaagaagcgagagaaggagccagaaaaaccggccaaaccactcaccgccgaaaaactgcagaaaaaggaccagcagctcgagcctaagaagtccacctccccgaagaaggctgccgagccaactgtcgaccttttagggctcgatggcccagcagtcgcccccgtgacgaatggaaatacaaccgtgccccctctgaacgatgaccttgatatctttgggcccatgatcagtaacccgctgcctgctaccgtcatgccgcccgcccaagggacaccttcggcccctgccgccgctactctgtcaacggtgacatctggagatctcgaccttttcactgagcagactacgaagtctgaggaggtagccaaaaaacagctcagcaaagactccattctaagtttgtacggcactggcacgattcagcagcagagtacacctggcgtgttcatgggccccacgaacatcccgtttacgagccaggcaccagccgcatttcagggttttccatctatgggggtgcccgtacccgcggcccccggacttattggtaacgttatgggccaaagcccttctatgatggttggtatgcccatgcctaatggatttatgggcaacgctcagactggcgttatgcccctcccacagaacgtggtggggccccagggggggatggtggggcagatgggggccccacagtccaaattcgggctgccacaggctcagcagcctcagtggagcttgagccagatgaaccagcagatggcaggaatgagcatcagctctgcaacccccacagccggtttcgggcagccaagcagtacaactgccggatggagcggatcctcaagtggtcaaactctgagcacccagctgtggaaatag

SEQ ID NO: 34131 - DNA, 1404 bp, Artificial Sequence
  derived and/or modified sequence
atggccaccaggagctgccgggagaaggcccagaagctgaatgagcagcaccagctgatcctgagcaagctgctgcgggaggaggacaacaagtactgtgccgactgtgaggccaagggcccccgctgggcctcctggaacatcggggtcttcatctgcatccgctgtgccggcatccacaggaacctgggcgtgcacatcagccgggtgaagtctgtgaacctggaccagtggacagctgagcagatccagtgcatgcaggacatgggcaacaccaaggcccggctgctgtatgaggccaacctgcctgagaacttcagaagaccccagacagaccaggccgtggagttcttcatccgggacaagtatgagaagaagaagtactatgacaagaatgccatcgccatcaccaacatcagcagcagtgatgcccccctgcagcccctggtgagcagccccagcctgcaggccgctgtggacaagaacaagctggagaaggagaaggagaagaagaaggaggagaagaagcgggagaaggagcctgagaagccagccaagcccctgacagctgagaagctgcagaagaaggaccagcagctggagcccaagaagagcaccagccccaagaaggctgctgagcccaccgtggacctgctgggcctggatggccctgctgtggcccctgtgaccaatggaaacaccaccgtgccccccctgaatgatgacctggacatcttcggccccatgatcagcaaccccctgcctgccaccgtgatgcccccagcccagggcaccccatctgccccagctgctgccaccctgagcacagtgaccagcggggacctggacctcttcacagagcagaccaccaagtctgaggaggtggccaagaagcagctgagcaaggacagcatcctgagcctgtatggaacaggcaccatccagcagcagagcaccccaggagtcttcatgggccccaccaacatccccttcaccagccaggccccagctgccttccagggcttccccagcatgggcgtgcctgtgcctgctgcccctggcctgattggaaatgtgatgggccagagccccagcatgatggtgggcatgcccatgcccaacggcttcatgggaaatgcccagacaggagtgatgcccctgccccagaatgtggtgggcccccagggcggcatggtgggccagatgggcgccccccagagcaagtttggcctgccccaggcccagcagccccagtggagcctgagccagatgaaccagcagatggccggcatgagcatcagcagcgccacccccacagctggcttcggccagcccagcagcaccacagctggctggagcggcagcagcagcggccagaccctgagcacccagctgtggaagtag

SEQ ID NO: 34132 - DNA, 1404 bp, Artificial Sequence
  derived and/or modified sequence
atggccacccggagctgccgggagaaggcccagaagctgaacgagcagcatcagctgatcctgtccaaactgctgagagaagaggataacaaatactgtgcagactgcgaagctaagggcccacgttgggcttcatggaatatcggcgtcttcatctgcatacggtgtgcaggtatccaccgcaacctgggcgtgcatatcagtagggtgaagtctgtcaacctcgaccagtggacagccgaacaaatacagtgtatgcaggatatggggaataccaaggcaaggcttctgtatgaagctaatctgcctgagaatttcagacgcccacagaccgaccaggcagtagaattcttcatccgggacaaatacgaaaaaaaaaagtattacgacaagaacgccattgctattaccaatataagcagctctgacgctcctctgcagccactggtatcaagcccctctctgcaggctgccgttgacaagaataagctggagaaggagaaagagaaaaaaaaggaagagaagaaacgggaaaaggagccagagaagcctgccaagcccctgacggccgagaaattgcaaaagaaagatcagcagctggagccaaagaaatcaacctccccgaagaaagctgcagaaccaactgtggatctgctgggattggatggccctgccgtggcccccgttacaaatgggaacactaccgtgcctccattgaatgatgatctggatatctttggccctatgatctctaatccattgcccgctacagttatgcctcccgctcagggaaccccatccgccccagcagcagcaacattgagcacagtgactagcggtgatctcgacctgttcacagaacagacaacaaagagcgaagaggtggccaagaagcaattgtctaaagatagcatcttgagtctgtacgggacagggactatccagcaacagtcaaccccaggcgtgtttatgggaccaactaacatcccctttacctctcaggcacctgcagccttccaggggtttccaagcatgggggtcccagtgcccgctgcccccggtcttataggcaatgtcatggggcagagccctagcatgatggttggtatgccaatgccaaacggctttatggggaacgcccagaccggcgtcatgcccttgccccagaatgttgtcgggccccaaggcggaatggtagggcagatgggagccccccaaagcaaatttggcctgccgcaggcacagcagccccagtggtcactgtctcagatgaatcagcaaatggcaggaatgagtattagctcagcaaccccaaccgcaggattcggtcagcctagttctactacagcaggatggagcggaagtagcagtgggcagaccctctcaactcagctctggaaatag

SEQ ID NO: 34133 - DNA, 1404 bp, Artificial Sequence
  derived and/or modified sequence
atggccactcgctcgtgcagggaaaaagcgcagaaactgaatgagcagcaccaacttattctgtctaagcttcttcgcgaggaagataacaagtactgtgcagactgcgaggcaaaaggccctcgctgggctagctggaacatcggggttttcatttgtattcggtgtgccggaatccatagaaatttgggcgtgcatatcagccgagtcaaatcagttaatttagatcaatggaccgctgaacagatacagtgcatgcaggatatgggtaacactaaggctcggctattgtatgaagccaatctgccagaaaacttccgccgacctcagacggaccaagccgtcgaatttttcattcgggacaaatacgaaaagaagaagtattatgacaaaaacgccatcgcgattactaacatcagtagttctgatgccccactgcagccattggtaagcagtccaagtctgcaggctgccgtggacaaaaataagctcgagaaggagaaggagaagaagaaagaggagaagaagagggagaaggaacctgaaaagcctgccaagcctttgaccgctgaaaagctccagaaaaaagaccagcagctggaacctaagaaatccacatcccctaagaaggccgcagaacctaccgtggacttgcttgggctggacggtcccgcagtggcgcctgtgactaatggtaatactacagtccctcccctgaacgatgacctcgacatattcggcccaatgatctcgaatccactccccgctaccgtgatgcccccagcacaaggaacaccgagcgctcccgcagccgcaacgctgagcactgtgacctcaggggatttggatctgttcaccgagcagactaccaagagcgaggaagttgccaagaaacagctgtccaaagactcaatcttgtctctttatgggactggcaccatccagcaacagagcactcctggggtgttcatggggcctacaaatatcccgttcacctcccaggccccagccgcatttcagggcttcccaagcatgggagtccccgtgcccgcagctcctggccttatcggaaacgtaatgggtcaatcaccctccatgatggtggggatgccaatgcccaacgggtttatgggaaatgcccaaacaggggtgatgcccctacctcagaatgtcgtggggccacagggaggaatggttgggcaaatgggggcaccccagtccaaattcggcttaccacaggctcaacagccccaatggtccttaagtcagatgaatcagcagatggctggcatgagcattagcagcgctactcctacagcgggttttggccaacctagctccaccaccgctggctggtcaggcagctcttctgggcaaacactgtcaacccagttgtggaagtag

SEQ ID NO: 34134 - DNA, 3333 bp, Artificial Sequence
  derived and/or modified sequence
agtccccctccccctcccctcgccggctagggtggtgcgtgccggcaggccggtcaaggaggcgggacacgtcggcgctaccaccgccaccgccgccgccgcccctcctcccgttccagctgccgctgccgcttcctgggctgagtccgcccgcggtcccggcggcgccaggtgcgttcactctgcccggctccagccagcgtccgccgccgccgtagctgccccaggctccccgccccgctgccgagatggcgacgcgctcctgtcgggagaaggctcagaagctgaacgagcagcaccagctcatcctatccaagcttctgagggaggaggacaacaagtactgcgccgactgcgaggccaaaggtcctcgatgggcttcctggaatattggtgtgtttatttgcatcagatgtgctggaattcatagaaatcttggggttcatatatccagggtcaaatcagtcaacctagaccaatggacagcagaacagatacagtgcatgcaagatatgggaaatactaaagcaagactactctatgaagccaatcttccagagaactttcgaagaccacagacagatcaagcagtggaatttttcatcagagataaatatgaaaagaagaaatactacgataaaaatgccatagctattacaaatatttcctcctctgatgctcctcttcagcctttggtatcctctccttctctgcaagctgctgttgacaaaaataaattggagaaagaaaaggaaaaaaaaaaggaagagaaaaagagagaaaaggagccagaaaagccggcaaaaccacttacagctgaaaagctgcagaagaaagatcagcaactggagcctaaaaaaagtaccagccctaaaaaagctgcggagcccactgtggatcttttaggacttgatggccctgctgtggcaccagtgaccaacgggaacacaacggtgccacccctgaacgatgatctggacatctttggaccgatgatttctaatcccttacctgcaactgtcatgcccccagctcaggggacaccctctgcaccagcagctgcaaccctgtctacagtaacatctggggatctagatttattcactgagcaaactacaaaatcagaagaagtggcaaagaaacaactttccaaagactccatcttatctctgtatggcacaggaaccattcaacagcaaagtactcctggtgtatttatgggacccacaaatataccatttacctcacaagcaccagctgcatttcagggctttccatcgatgggcgtgcctgtgcctgcagctcctggccttataggaaatgtgatgggacagagtccaagcatgatggtgggcatgcccatgcccaatgggtttatgggaaatgcacaaactggtgtgatgccacttcctcagaacgttgttggcccccaaggaggaatggtgggacaaatgggtgcaccccagagtaagtttggcctgccgcaagctcagcagccccagtggagcctctcacagatgaatcagcagatggctggcatgagtatcagtagtgcaacccctactgcaggttttggccagccctccagcacaacagcaggatggtctggaagctcatcaggtcagactctcagcacacaactgtggaaatgaaaactgcaatacaagtttcatccagaactaccacctgacattccttgctgaaacgcatctagttcccctgtttattcatatgcatattttttttctttttacccatttgttcatattaagaatgatctgattgaccgtgttggtctgtactgattcaatttgatgtggtgaaaagcaggttgataaatcattttatgtcaagggcagctttgctcatatttcccatgatttcatgtactgcattatttgagaagctgctcaacttgcaaaatcagttttcctctcaataaaattatagctctaatgtttgcatataagggaagtagttatcatgttagtaatacctctaatagtataaaccccaccccaaaattagccagtaatcctgtaggaaggtactgtatgatcaaatgtttaatcatataaatagaatgtaaatgtctcactgagcactgttttctagtgtatcaaaatgctcttatttcatcattcacttcactgtgctgttgttatgatgtgcttaacagggaacgtgattagtgaaaggaagataaacgtggatgttactccaaaacttcgtttaatgaatgcttaaagaattcaaattttatctgcctctcttgtaatttggatctcttcttaatgtacatagtgctaacatgaagacctttttctgcactatatgcaaacagggtaactaactaaaacaaagccactttcaatcttcaatccttgaaggtatatctaggtttatgacagtaattgtgtttacattttatggtgcctagtattgacaaaatgttatttccctacattaaacatgactccatagaccttttcatttgtgggtttttatttcctatgatgtatactgccactaaccttccaaaaattacttagtattgcaaagtcaggaatcatcaggaacgtttagctgacaaaatacttgtctgttttaaaaacctgttcaagtctaccaacctgttcaagtctaccaattataagggcaaattggagaaaaagaaaaaatatatactcaagagtggtatcttgcagtatcggcactgtacaaaaaaatcttccaatttagttgttgtagagaaaacatgcagaacaaatgaagacaaaacatacattttgtaccaaccatccaattagcttatgttaactgacaagctccatttaaacagatgtccatcagatgacaagaaaggctgctgtactgaagtaaaacaaacaatacctgaatgctctgtagcctaaactccaaacatcctcttccatatggatccactggctggacaaactgcaccagttgctgcttcaatttatacctcaattttcactgtgtccaggtggtactttggctcgttggctagattaaccttctctgtccgagtgtgccacacgagaacctgaaggggaaggaaatagcttgggtagcgcactcttcatggtgacactcgaggtcgggcagcacaagtgtaatgaataccttagtgcagttatttgctttcggttccagttcttcgactgttgttatctgtttgagaaagtcagattcttgcatccctggctgggatccacgacgcttaaatacagcttttggattggacaaaatgacttgaagacttacagcaaatcctttgtgaaaaataaaaaaaaaaaagagactttaaaa

SEQ ID NO: 34135 - DNA, 1404 bp, Artificial Sequence
  derived and/or modified sequence
atggccaccagaagctgcagagagaaggcccagaagctgaacgagcagcaccagctgatcctgagcaagctgctgagagaggaggacaacaagtactgcgccgactgcgaggccaagggccccagatgggccagctggaacatcggcgtgttcatctgcatcagatgcgccggcatccacagaaacctgggcgtgcacatcagcagagtgaagagcgtgaacctggaccagtggaccgccgagcagatccagtgcatgcaggacatgggcaacaccaaggccagactgctgtacgaggccaacctgcccgagaacttcagaagaccccagaccgaccaggccgtggagttcttcatcagagacaagtacgagaagaagaagtactacgacaagaacgccatcgccatcaccaacatcagcagcagcgacgcccccctgcagcccctggtgagcagccccagcctgcaggccgccgtggacaagaacaagctggagaaggagaaggagaagaagaaggaggagaagaagagagagaaggagcccgagaagcccgccaagcccctgaccgccgagaagctgcagaagaaggaccagcagctggagcccaagaagagcaccagccccaagaaggccgccgagcccaccgtggacctgctgggcctggacggccccgccgtggcccccgtgaccaacggcaacaccaccgtgccccccctgaacgacgacctggacatcttcggccccatgatcagcaaccccctgcccgccaccgtgatgccccccgcccagggcacccccagcgcccccgccgccgccaccctgagcaccgtgaccagcggcgacctggacctgttcaccgagcagaccaccaagagcgaggaggtggccaagaagcagctgagcaaggacagcatcctgagcctgtacggcaccggcaccatccagcagcagagcacccccggcgtgttcatgggccccaccaacatccccttcaccagccaggcccccgccgccttccagggcttccccagcatgggcgtgcccgtgcccgccgcccccggcctgatcggcaacgtgatgggccagagccccagcatgatggtgggcatgcccatgcccaacggcttcatgggcaacgcccagaccggcgtgatgcccctgccccagaacgtggtgggcccccagggcggcatggtgggccagatgggcgccccccagagcaagttcggcctgccccaggcccagcagccccagtggagcctgagccagatgaaccagcagatggccggcatgagcatcagcagcgccacccccaccgccggcttcggccagcccagcagcaccaccgccggctggagcggcagcagcagcggccagaccctgagcacccagctgtggaagtag

SEQ ID NO: 34136 - protein, 419 aa, Artificial Sequence
  derived and/or modified sequence
MARAAGARGPAGWCRRRGRCGRGTLLAFAAWTAGWVLAAALLLRAHPGVLSERCTDEKSRRILAALCQDYQGGTLAGDLCEDLCVAGELLFQRCLHYNRGKKVLQADWRGRPVVLKSKEEAFSSFPPLSLLEEEAGEGGQDMPEAELLLMVAGEVKSALGLELSNSSLGPWWPGRRGPRWRGQLASLWALLQQEEYVYFSLLQDLSPHVLPVLGSCGHFYAVEFLAAGSPHHRALFPLDRAPGAPGGGQAKAISDIALSFLDMVNHFDSDFSHRLHLCDIKPENFAIRSDFTVVAIDVDMAFFEPKMREILEQNCTGDEDCNFFDCFSRCDLRVNKCGAQRVNNNLQVICDKIFRHWFSAPLKSSAVSFQLQLQLQEAVQECADPGVPSGNTRRAASSVFWKLRQLLQATLRELQEAEK

SEQ ID NO: 34137 - DNA, 1260 bp, Artificial Sequence
  derived and/or modified sequence
atggccagagccgccggcgccagaggccccgccggctggtgcagaagaagaggcagatgcggcagaggcaccctgctggccttcgccgcctggaccgccggctgggtgctggccgccgccctgctgctgagagcccaccccggcgtgctgagcgagagatgcaccgacgagaagagcagaagaatcctggccgccctgtgccaggactaccagggcggcaccctggccggcgacctgtgcgaggacctgtgcgtggccggcgagctgctgttccagagatgcctgcactacaacagaggcaagaaggtgctgcaggccgactggagaggcagacccgtggtgctgaagagcaaggaggaggccttcagcagcttcccccccctgagcctgctggaggaggaggccggcgagggcggccaggacatgcccgaggccgagctgctgctgatggtggccggcgaggtgaagagcgccctgggcctggagctgagcaacagcagcctgggcccctggtggcccggcagaagaggccccagatggagaggccagctggccagcctgtgggccctgctgcagcaggaggagtacgtgtacttcagcctgctgcaggacctgagcccccacgtgctgcccgtgctgggcagctgcggccacttctacgccgtggagttcctggccgccggcagcccccaccacagagccctgttccccctggacagagcccccggcgcccccggcggcggccaggccaaggccatcagcgacatcgccctgagcttcctggacatggtgaaccacttcgacagcgacttcagccacagactgcacctgtgcgacatcaagcccgagaacttcgccatcagaagcgacttcaccgtggtggccatcgacgtggacatggccttcttcgagcccaagatgagagagatcctggagcagaactgcaccggcgacgaggactgcaacttcttcgactgcttcagcagatgcgacctgagagtgaacaagtgcggcgcccagagagtgaacaacaacctgcaggtgatctgcgacaagatcttcagacactggttcagcgcccccctgaagagcagcgccgtgagcttccagctgcagctgcagctgcaggaggccgtgcaggagtgcgccgaccccggcgtgcccagcggcaacaccagaagagccgccagcagcgtgttctggaagctgagacagctgctgcaggccaccctgagagagctgcaggaggccgagaagtag

SEQ ID NO: 34138 - DNA, 2013 bp, Artificial Sequence
  derived and/or modified sequence
gggctggccatggcgcgggcggcgggcgcgcggggccctgccgggtggtgcaggaggcgcgggcgctgcgggcggggcacgctcctcgccttcgccgcgtggaccgcgggctgggtgctggcggccgcgctgctgctccgcgcgcacccgggtgtcctctccgagcgctgcaccgacgagaagagccggcgcatcctggccgcgctgtgccaggactaccagggcggcacgctggccggggacctctgcgaggacctgtgtgtggcgggagagctgctgttccaacgctgcctgcactacaacagaggcaagaaggtgctgcaggccgactggcgcggccggcccgtggtcctcaagtccaaggaggaggccttctccagcttcccgcccctcagcctgttggaagaggaggcaggggagggtggccaggacatgcccgaggccgaactcctcctgatggtggctggggaggtcaagagcgctctgggcctggagttgtccaacagcagcctggggccgtggtggccgggcaggcggggcccacgctggcggggacagctggccagcctgtgggccctgctgcagcaggaggagtacgtctacttcagcctgctgcaggacctgagcccacacgtgctgcccgtgctgggttcctgcggccacttctacgcggtggagttcctggccgcgggcagcccccaccacagggcactcttccccctggaccgggccccaggtgcccctgggggtggccaggccaaggccatcagtgacatcgcactcagcttcttggacatggtgaaccattttgacagtgacttttcccaccgcctccacctctgcgacatcaagccggaaaactttgccatccggagcgacttcacagtggtggctattgatgtggacatggccttttttgaacctaaaatgagggaaatccttgagcaaaactgcacaggagatgaagactgcaatttctttgactgtttttcaagatgtgatttacgagtcaacaaatgcggagcgcagcgcgtaaacaacaacctgcaggtcatctgtgacaaaatatttcgccattggttttccgcgcctctcaagagctctgcggtctctttccagcttcagctgcagttacaggaggcggtgcaggaatgtgcagaccctggggtccccagtgggaacacccggagagcagcctccagcgtgttctggaagcttcgccaactcctccaagccacactgagggagctgcaggaggcagagaagtagccactctctggccttaaacatgctcacacaggaaaagtgaccttggctggatttcttctgccattgttttaaagatgagccatttcccctgtgctctctggggtgccgttctggtctccacattgtggagtggcaagtgctgctgccagagacagtgctccctcgctctcgtcccaccctggcctctgacctgtcgccttgtgtaaaatgagatgagggaggaggtacagacctcccttcaggagggctctcggtcagaagacaccaacctgtgtgcacttattctctgcagagagcacttgtacctggttatcccagcacgagttccagctgttctttcctgtaaatcgttaccacgttaaaaagtgtgcgtgtgtgcatacaaatgatgtgtatgcctgtgtctgggtgcaaatgagcatgtgagcatgtgtgagtgtgcccatgagtgtctgcatgtgtgtgagtgtgcacaggtgagtgtgcacaggtgagtgtggtgtgctcatgaggagtatgagtatgcctgagtgtgaatatgtatgagtgtgaatgagtgtgtgcacatgagtgcacgggtgtcagcatgtgtatataagtgtgggcatgtgtatgtgattgtgtgagtgtgggcaggtgagtgtgttggggatgtgggttagggtggggagtggtgctttctctagtgtgtcctccggaacatcttgcctacctagcaaagaagtgtgaccattctttcggaat

SEQ ID NO: 34139 - DNA, 1260 bp, Artificial Sequence
  derived and/or modified sequence
atggcccgagcagccggagcacggggccccgcaggctggtgccgccgaaggggcaggtgcggacgggggaccttgctcgccttcgcagcttggactgcgggctgggtattggctgccgctcttctgcttcgtgcccatccgggagtactatctgagcgttgcacagatgaaaaaagtcggaggattttggccgccctgtgccaagactatcagggagggacactggctggagatctgtgtgaagatctgtgcgtcgcgggtgagctcctattccagcggtgtcttcactataacaggggaaagaaagtcctacaagccgactggagaggacgccctgtagtcttaaagtctaaggaggaggcattctcatcattcccccccctctcactcctcgaggaagaggccggcgaggggggccaggacatgccagaggctgagttattgcttatggtggccggcgaggtgaagtccgcccttgggttggaactgtccaactcaagcctgggcccatggtggcctgggcgccggggcccacgctggcggggccagctggccagcctgtgggcactgcttcagcaggaggaatacgtatacttttccttgctgcaggacctgtcgccccacgtcctaccagtgttgggcagttgcggccacttctatgcagttgagtttttagctgccggtagtccccatcaccgcgctctattccccttggatagagcacctggggctcccggagggggccaggcgaaggcaatctctgacattgcactcagttttctcgatatggtaaaccactttgatagtgacttcagccaccggctgcacctttgtgacatcaagcctgagaacttcgcgattagaagcgattttaccgtcgtggcgattgatgtggacatggcattctttgagccaaagatgagagaaattttagagcaaaactgtaccggggacgaggactgcaatttttttgactgcttctcacggtgtgacctgcgggtgaacaagtgtggcgcccagagagtgaataacaacctccaggtcatttgcgacaaaatcttcagacactggttctcagccccgctcaagagcagtgcagtttcctttcagttgcaactccagctccaggaggctgtccaggagtgtgctgaccctggtgtgccttcaggcaatactcgcagagctgccagtagcgtattctggaagctacgtcagctgctccaggcgactctacgcgagctccaggaagccgagaagtag

SEQ ID NO: 34140 - DNA, 1260 bp, Artificial Sequence
  derived and/or modified sequence
atggcccgggctgctggggcccggggccctgctggctggtgcagaagaagaggccgctgtggccggggcaccctgctggcctttgctgcctggacagctggctgggtgctggccgccgccctgctgctgcgggcccaccctggggtgctgtctgagcgctgcacagatgagaagagccgccgcatcctggccgccctgtgccaggactaccagggcggcaccctggccggggacctgtgtgaggacctgtgtgtggccggggagctgctcttccagcgctgcctgcactacaacagaggcaagaaggtgctgcaggccgactggaggggccggcctgtggtgctgaagagcaaggaggaggccttcagcagcttcccccccctgagcctgctggaggaggaggccggggagggcggccaggacatgcctgaggccgagctgctgctgatggtggccggggaggtgaagagcgccctgggcctggagctgagcaacagcagcctgggcccctggtggccaggaagaagaggcccccgctggaggggccagctggccagcctgtgggccctgctgcagcaggaggagtatgtgtacttcagcctgctgcaggacctgagcccccacgtgctgcctgtgctgggcagctgtggccacttctatgctgtggagttcctggccgccggcagcccccaccaccgggccctcttccccctggaccgggcccctggggcccctgggggcggccaggccaaggccatcagtgacatcgccctgtccttcctggacatggtgaaccactttgacagcgacttcagccaccggctgcacctgtgtgacatcaagccagaaaattttgccatccgcagtgacttcaccgtggtggccattgatgtggacatggccttctttgagcccaagatgagggagatcctggagcagaactgcacaggagatgaggactgcaacttctttgactgcttcagccgctgtgacctgcgggtgaacaagtgtggggcccagagggtgaacaacaacctgcaggtgatctgtgacaagatcttccgccactggttcagcgcccccctgaagagcagcgctgtgtccttccagctgcagctgcagctgcaggaggccgtgcaggagtgtgccgaccccggggtgcccagcggcaacaccaggagagctgccagcagcgtcttctggaagctgcggcagctgctgcaggccaccctgcgggagctgcaggaggccgagaagtag

SEQ ID NO: 34141 - DNA, 1260 bp, Artificial Sequence
  derived and/or modified sequence
atggcccgggccgccggcgcccggggccccgccggctggtgccggcggagaggtcggtgcggcaggggcacactgttagcctttgccgcttggacagccggatgggtcctcgctgctgctctgcttctgagggctcaccctggtgtcttgagcgagcgatgcactgacgaaaaaagtcgcaggatccttgctgccctgtgccaagattaccagggaggcactctggcaggtgacctttgcgaagacttatgcgtcgcaggtgagcttcttttccagcggtgcctgcattacaatcggggcaagaaggtactccaagcggactggaggggccgcccggtagtactcaagtccaaggaagaagctttctccagtttccctcctctaagcctcctcgaggaagaggctggcgagggcggccaggatatgcccgaagctgagttgctgttaatggtagcaggggaagtgaagtcagcgctagggctcgaactgagcaacagtagtctcggaccctggtggcctggaaggaggggccctaggtggagggggcaactggctagcttatgggcactcctccagcaagaggagtatgtgtactttagcctgcttcaggatctgtcccctcatgtcctgcctgtactcgggtcttgtggacacttctatgcggtcgagtttttagctgcaggaagcccacatcatagagccctgtttccactcgatagagcgcctggtgcccccgggggaggtcaagcaaaggccataagcgacatagctctgtcatttcttgacatggtgaaccacttcgactcagacttcagccacaggctgcatttgtgtgacattaaaccggagaattttgcgatcaggtccgatttcacagttgttgccattgatgttgatatggccttttttgagccgaagatgcgcgaaatccttgagcagaactgcaccggcgacgaagattgcaacttcttcgactgcttttccaggtgtgatctgcgggtgaataaatgcggcgcccagagagtaaacaacaatctccaagtgatctgcgataagatctttcgacattggttttcagctcctctaaagtcctctgcggtaagctttcaactgcagttgcagttacaggaggccgttcaggagtgcgccgaccctggtgtcccaagtggcaacacccgccgggccgccagctcagtcttctggaaactgagacagctattgcaggccaccctccgggagctgcaagaagcggaaaaatag

SEQ ID NO: 34142 - DNA, 1260 bp, Artificial Sequence
  derived and/or modified sequence
atggcaagagccgcaggggctagaggcccagcagggtggtgtcgcaggaggggcagatgtggacgcggaacacttctggctttcgcagcctggacggcgggttgggtgcttgccgctgcgttactgctgagggcccatcccggagtgctttccgagagatgcactgacgaaaagtctcgccgaattctagccgctctgtgtcaggactatcagggaggcacactagccggagacctgtgcgaggacctctgtgtggcaggcgaactgctattccagcggtgtctgcactacaatcgagggaaaaaagtgctgcaggctgactggcgaggtcggccagtagtgctaaagagcaaggaagaggccttcagtagcttcccacctctgagcctcctcgaagaggaagccggtgagggtggtcaggatatgcctgaagccgagttactgctgatggtcgcgggagaggtgaagagcgctctcggcctggagctctccaatagctctcttgggccatggtggcccggtagaaggggtcctcgctggcgtggacagctagcctcgctgtgggccctccttcagcaggaagagtacgtgtatttttccctgctgcaagatttaagtccgcacgtgctacccgtgctgggcagttgtggacatttctacgccgtcgagtttctggccgcagggtcccctcatcaccgagcactgttccctttagatcgcgctccaggagctccaggtggcggacaggctaaagccatttccgacatcgccctctcttttctcgatatggttaatcacttcgattcagacttcagccaccgcctgcacttgtgtgacataaagcccgagaactttgccattcgcagcgactttacagttgtcgctattgatgtggacatggccttttttgagccgaaaatgcgcgagatcctcgaacagaattgcaccggggacgaagactgtaatttcttcgattgtttctcgagatgtgacctgcgagtgaacaaatgtggagcacagcgcgtcaataacaatctgcaggtgatatgtgacaagattttccggcactggttctccgcccctcttaagagctctgctgtgagcttccagctgcaactccagctacaggaagccgtgcaggagtgtgccgaccctggcgtaccttccgggaacactcgtagggcagcttcctctgtgttctggaagctaaggcaactgctccaagccacactccgagaactgcaggaggctgaaaagtag

SEQ ID NO: 34143 - protein, 408 aa, Artificial Sequence
  derived and/or modified sequence
MRTDSGARLEEGHLRPPRALPPVPSQDDIPLSRPKKKKPRTKNTPASASLEGLAQTAGRRPSEGNEPSTKELKEHPEAPVQRRQKKTRLPLELETSSTQKKSSSSSLLRNENGIDAEPAEEAVIQKPRRKTKKTQPAELQYANELGVEDEDIITDEQTTVEQQSVFTAPTGISQPVGKVFVEKSRRFQAADRSELIKTTENIDVSMDVKPSWTTRDVALTVHRAFRMIGLFSHGFLAGCAVWNIVVIYVLAGDQLSNLSNLLQQYKTLAYPFQSLLYLLLALSTISAFDRIDFAKISVAIRNFLALDPTALASFLYFTALILSLSQQMTSDRIHLYTPSSVNGSLWEAGIEEQILQPWIVVNLVVALLVGLSWLFLSYRPGMDLSEELMFSSEVEEYPDKEKEIKASS

SEQ ID NO: 34144 - protein, 408 aa, Artificial Sequence
  derived and/or modified sequence
MRTDSGARLEEGHLRPPRALPPVPSIDDIPLSRPKKKKPRTKNTPASASLEGLAQTAGRRPSEGNEPSTKELKEHPEAPVQRRQKKTRLPLELETSSTQKKSSSSSLLRNENGIDAEPAEEAVIQKPRRKTKKTQPAELQYANELGVEDEDIITDEQTTVEQQSVFTAPTGISQPVGKVFVEKSRRFQAADRSELIKTTENIDVSMDVKPSWTTRDVALTVHRAFRMIGLFSHGFLAGCAVWNIVVIYVLAGDQLSNLSNLLQQYKTLAYPFQSLLYLLLALSTISAFDRIDFAKISVAIRNFLALDPTALASFLYFTALILSLSQQMTSDRIHLYTPSSVNGSLWEAGIEEQILQPWIVVNLVVALLVGLSWLFLSYRPGMDLSEELMFSSEVEEYPDKEKEIKASS

SEQ ID NO: 34145 - DNA, 1227 bp, Artificial Sequence
  derived and/or modified sequence
atgagaaccgacagcggcgccagactggaggagggccacctgagaccccccagagccctgccccccgtgcccagccaggacgacatccccctgagcagacccaagaagaagaagcccagaaccaagaacacccccgccagcgccagcctggagggcctggcccagaccgccggcagaagacccagcgagggcaacgagcccagcaccaaggagctgaaggagcaccccgaggcccccgtgcagagaagacagaagaagaccagactgcccctggagctggagaccagcagcacccagaagaagagcagcagcagcagcctgctgagaaacgagaacggcatcgacgccgagcccgccgaggaggccgtgatccagaagcccagaagaaagaccaagaagacccagcccgccgagctgcagtacgccaacgagctgggcgtggaggacgaggacatcatcaccgacgagcagaccaccgtggagcagcagagcgtgttcaccgcccccaccggcatcagccagcccgtgggcaaggtgttcgtggagaagagcagaagattccaggccgccgacagaagcgagctgatcaagaccaccgagaacatcgacgtgagcatggacgtgaagcccagctggaccaccagagacgtggccctgaccgtgcacagagccttcagaatgatcggcctgttcagccacggcttcctggccggctgcgccgtgtggaacatcgtggtgatctacgtgctggccggcgaccagctgagcaacctgagcaacctgctgcagcagtacaagaccctggcctaccccttccagagcctgctgtacctgctgctggccctgagcaccatcagcgccttcgacagaatcgacttcgccaagatcagcgtggccatcagaaacttcctggccctggaccccaccgccctggccagcttcctgtacttcaccgccctgatcctgagcctgagccagcagatgaccagcgacagaatccacctgtacacccccagcagcgtgaacggcagcctgtgggaggccggcatcgaggagcagatcctgcagccctggatcgtggtgaacctggtggtggccctgctggtgggcctgagctggctgttcctgagctacagacccggcatggacctgagcgaggagctgatgttcagcagcgaggtggaggagtaccccgacaaggagaaggagatcaaggccagcagctag

SEQ ID NO: 34146 - DNA, 1227 bp, Artificial Sequence
  derived and/or modified sequence
atgagaaccgacagcggcgccagactggaggagggccacctgagaccccccagagccctgccccccgtgcccagcatcgacgacatccccctgagcagacccaagaagaagaagcccagaaccaagaacacccccgccagcgccagcctggagggcctggcccagaccgccggcagaagacccagcgagggcaacgagcccagcaccaaggagctgaaggagcaccccgaggcccccgtgcagagaagacagaagaagaccagactgcccctggagctggagaccagcagcacccagaagaagagcagcagcagcagcctgctgagaaacgagaacggcatcgacgccgagcccgccgaggaggccgtgatccagaagcccagaagaaagaccaagaagacccagcccgccgagctgcagtacgccaacgagctgggcgtggaggacgaggacatcatcaccgacgagcagaccaccgtggagcagcagagcgtgttcaccgcccccaccggcatcagccagcccgtgggcaaggtgttcgtggagaagagcagaagattccaggccgccgacagaagcgagctgatcaagaccaccgagaacatcgacgtgagcatggacgtgaagcccagctggaccaccagagacgtggccctgaccgtgcacagagccttcagaatgatcggcctgttcagccacggcttcctggccggctgcgccgtgtggaacatcgtggtgatctacgtgctggccggcgaccagctgagcaacctgagcaacctgctgcagcagtacaagaccctggcctaccccttccagagcctgctgtacctgctgctggccctgagcaccatcagcgccttcgacagaatcgacttcgccaagatcagcgtggccatcagaaacttcctggccctggaccccaccgccctggccagcttcctgtacttcaccgccctgatcctgagcctgagccagcagatgaccagcgacagaatccacctgtacacccccagcagcgtgaacggcagcctgtgggaggccggcatcgaggagcagatcctgcagccctggatcgtggtgaacctggtggtggccctgctggtgggcctgagctggctgttcctgagctacagacccggcatggacctgagcgaggagctgatgttcagcagcgaggtggaggagtaccccgacaaggagaaggagatcaaggccagcagctag

SEQ ID NO: 34147 - DNA, 1227 bp, Artificial Sequence
  derived and/or modified sequence
atgaggacggattccggcgccagactggaggaagggcacctgcggcctcctagggcactccctcccgtaccaagccaggatgacattcccctgtctcggcccaaaaagaaaaagcctcgcacaaagaacacaccagcgtccgcctccctggagggcctggcacagactgcagggcggcgcccttctgagggtaatgagccatcgacaaaagaactcaaggagcacccggaggcgccagtgcagcgcaggcaaaaaaaaactcgtctgccgttggagttggaaacatcgagtacgcagaaaaagagctcaagctcatcccttttaaggaatgaaaacggtattgacgcagaaccagccgaggaggcagtgatccagaaacccagaaggaagacaaagaagactcagcctgctgagcttcagtatgccaacgagcttggcgtcgaggatgaagatatcattactgacgagcaaactacggtggaacagcaatctgtttttacagcaccaactggcatttcgcagcctgtgggcaaggtgtttgtagagaaaagcagacgctttcaggctgccgacagaagtgaactgatcaagaccacagaaaatatagacgtgtccatggacgtaaagccttcttggaccaccagagatgtcgccttaaccgttcacagagcttttcgaatgatcggccttttctcccatggattcctcgccggatgtgccgtttggaacatcgtagtcatctatgttctggccggagatcagctgtccaacctgagcaacctcctgcagcagtataaaacccttgcctatccgttccagagtctcctttacctcttgcttgcgctcagcacaatatcagcctttgaccggatcgacttcgctaagatctccgtggccattagaaattttttggctcttgatccgaccgctttggcctcctttctttacttcacagcactcattttgtcactttcccagcagatgacctccgatcggatacatctgtacactccctcttctgtcaacggatctctctgggaagcgggcattgaagaacagatcctccagccctggatcgtagtgaacctagtcgtcgctttactcgtgggcctcagctggctgttcttgagctatcgccccggaatggatctgagcgaggagcttatgttctcctcagaagtggaagaatacccagacaaagaaaaggaaattaaggcctcttcctag

SEQ ID NO: 34148 - DNA, 1227 bp, Artificial Sequence
  derived and/or modified sequence
atgaggacggactcaggggccaggctcgaggagggtcacttgcgtcctcccagggcactgccccctgtacccagtatcgatgatattccgctttcacggccaaagaaaaagaaaccacgcactaaaaacacgcccgcatcggctagcctggaagggttggcacagacagcagggcgtcgcccaagcgaggggaacgagccaagcactaaagagctaaaagagcatcctgaggcaccagtgcagcgtcgccaaaagaagactcggctgcctttagagcttgaaacctcttcaacccagaagaagagcagcagcagcagtctgctgaggaatgagaacgggatcgacgccgagcccgccgaagaggcggtgatccagaaacccaggaggaagactaaaaaaactcaaccagcggagttgcagtacgccaacgagctcggcgttgaggacgaggacatcatcaccgacgagcaaacaactgttgaacagcagtcagtctttaccgcacccacaggcatcagtcaacccgtgggaaaggtgttcgttgagaagtctcggaggttccaggctgccgatcgcagcgaattgattaagacgacagagaacattgatgttagcatggatgtcaaacctagctggaccacccgcgacgtcgcactcactgtacaccgtgccttccgaatgattggattatttagtcatggttttctagctgggtgcgccgtgtggaacatagtggtcatttacgttttagccggcgatcaacttagtaatctcagtaacctgctgcagcaatataaaaccctggcctacccctttcaatcactgttgtacttactcctggccctaagcacaatctccgcctttgaccggattgactttgccaagatttctgtagccattcgcaactttctggcactcgacccgaccgcacttgcgagttttctctactttaccgcccttatcctctcactttcccaacagatgactagcgatcgaatacacctttacacaccatctagcgtgaatggttcactctgggaggctggtattgaagaacagattctgcagccatggattgtggtgaatctcgtggtagcgctcttggtcgggctgtcatggctattcctgtcttatcgtcccggcatggatctgagtgaggagttaatgtttagctctgaggtggaggagtatcccgacaaggaaaaagagattaaggcttcttcatag

SEQ ID NO: 34149 - DNA, 1227 bp, Artificial Sequence
  derived and/or modified sequence
atgaggacagattctggggcccggctggaggagggccacctgcggcccccccgggccctgccccctgtgcccagccaggatgacatccccctgagccggcccaagaagaagaagcccaggaccaagaacaccccagccagcgccagcctggagggcctggcccagacagctggaagaagacccagcgagggcaatgagcccagcaccaaggagctgaaggagcaccctgaggcccctgtgcagaggcggcagaagaagacccggctgcccctggagctggagaccagcagcacccagaagaagagcagcagcagcagcctgctgagaaatgaaaatggaattgatgctgagcctgctgaggaggccgtcatccagaagcccaggaggaagaccaagaagacccagcctgctgagctgcagtatgccaatgagctgggcgtggaggatgaggacatcatcacagatgagcagaccaccgtggagcagcagagcgtcttcaccgcccccaccggcatcagccagcctgtgggcaaggtgtttgtggagaagagccgccgcttccaggccgctgacagaagtgagctgatcaagaccacagagaacattgatgtgtccatggatgtgaagcccagctggaccaccagagatgtggccctgactgtgcaccgggccttcaggatgattggcctcttcagccacggcttcctggccggctgtgctgtgtggaacatcgtggtgatctacgtgctggccggggaccagctgagcaacctgagcaacctgctgcagcagtacaagaccctggcctaccccttccagagcctgctgtacctgctgctggccctgagcaccatcagcgcctttgacagaattgactttgccaagatctctgtggccatccggaacttcctggccctggaccccacagccctggccagcttcctgtacttcaccgccctgatcctgagcctgagccagcagatgaccagtgaccgcatccacctgtacacccccagctctgtgaatggcagcctgtgggaggccggcatcgaggagcagatcctgcagccctggatcgtggtgaacctggtggtggccctgctggtgggcctgtcctggctgttcctgagctaccggcccggcatggacctgtctgaggagctgatgttcagcagcgaggtggaggagtacccagacaaggagaaggagatcaaggccagcagctag

SEQ ID NO: 34150 - DNA, 1227 bp, Artificial Sequence
  derived and/or modified sequence
atgaggacagattctggggcccggctggaggagggccacctgcggcccccccgggccctgccccctgtgcccagcattgatgacatccccctgagccggcccaagaagaagaagcccaggaccaagaacaccccagccagcgccagcctggagggcctggcccagacagctggaagaagacccagcgagggcaatgagcccagcaccaaggagctgaaggagcaccctgaggcccctgtgcagaggcggcagaagaagacccggctgcccctggagctggagaccagcagcacccagaagaagagcagcagcagcagcctgctgagaaatgaaaatggaattgatgctgagcctgctgaggaggccgtcatccagaagcccaggaggaagaccaagaagacccagcctgctgagctgcagtatgccaatgagctgggcgtggaggatgaggacatcatcacagatgagcagaccaccgtggagcagcagagcgtcttcaccgcccccaccggcatcagccagcctgtgggcaaggtgtttgtggagaagagccgccgcttccaggccgctgacagaagtgagctgatcaagaccacagagaacattgatgtgtccatggatgtgaagcccagctggaccaccagagatgtggccctgactgtgcaccgggccttcaggatgattggcctcttcagccacggcttcctggccggctgtgctgtgtggaacatcgtggtgatctacgtgctggccggggaccagctgagcaacctgagcaacctgctgcagcagtacaagaccctggcctaccccttccagagcctgctgtacctgctgctggccctgagcaccatcagcgcctttgacagaattgactttgccaagatctctgtggccatccggaacttcctggccctggaccccacagccctggccagcttcctgtacttcaccgccctgatcctgagcctgagccagcagatgaccagtgaccgcatccacctgtacacccccagctctgtgaatggcagcctgtgggaggccggcatcgaggagcagatcctgcagccctggatcgtggtgaacctggtggtggccctgctggtgggcctgtcctggctgttcctgagctaccggcccggcatggacctgtctgaggagctgatgttcagcagcgaggtggaggagtacccagacaaggagaaggagatcaaggccagcagctag

SEQ ID NO: 34151 - DNA, 1227 bp, Artificial Sequence
  derived and/or modified sequence
atgcggaccgacagcggcgcccggctggaggagggccacctgcggcctccccgggctctgcctccagttcctagccaagatgatatacccctcagcagacccaagaagaaaaaacccaggaccaaaaatacccccgcctcagccagccttgaaggcctggcccagaccgccggtcgcagaccttctgagggtaacgagccttctactaaggaacttaaagaacacccagaggcaccagttcagcggcgacagaaaaagacacgactaccactggagcttgaaacaagcagtacacagaaaaagtctagctcctcatctcttctcaggaacgagaatggtattgatgccgagccggctgaagaggcagttattcagaagcctaggcgaaagaccaaaaagacccagccagctgaattacagtatgccaacgaattgggggtggaggatgaagatataataactgacgagcagacgacagtggagcagcagtcagtgttcaccgccccaactggtatctctcaaccagtcggcaaagtgttcgttgagaaatccagacgtttccaggccgccgatcgatctgaactcattaaaacaaccgagaatatcgacgtgtctatggatgtaaagcccagttggacaacaagagatgtcgcactgaccgtacaccgggcgtttcgtatgatcggcctgttcagccatggattccttgcaggatgcgcagtctggaacatcgttgtcatctacgtgctggcgggggatcagttgagcaatctaagcaatctactccagcagtataaaaccctggcgtacccctttcagtctctgctgtacctgttgctcgccttaagtacaattagcgcctttgataggatcgatttcgcgaagatttccgtggctattcgcaattttttggccttagatccgactgctctggcctccttcctttacttcacagcgctcatactgagcttatcacagcaaatgacctcagaccggatccatctgtacaccccttcttctgttaacggatcactgtgggaggccggcatcgaggaacagattcttcagccctggatcgtcgtaaacctcgtggtggctctgttggtaggattatcatggctgtttctgtcataccgtccgggtatggatctttcagaagaattaatgtttagctcagaggtggaggagtacccagacaaggagaaggagataaaggccagttcatag

SEQ ID NO: 34152 - DNA, 1227 bp, Artificial Sequence
  derived and/or modified sequence
atgcggaccgacagcggcgcccggctggaggagggccacctgcggccgccaagagccctgcctcccgtgccttccatcgacgacattccactgtctaggccaaaaaagaaaaaaccccggactaagaacacacccgcttccgcttccctcgaggggctggcccagacagcaggccgccgcccttcggaggggaacgaaccctctaccaaagaattgaaagaacatcctgaagcgcctgtgcagcgcagacagaagaaaacacggcttccgctggagctggagacgagttccacccaaaagaaatcctccagttctagcttgctccggaatgaaaatggaattgatgctgaacccgccgaggaggcagtgatacagaagcctcggcgaaagaccaaaaagacccaacccgccgagctccagtatgcgaatgagcttggggtggaggacgaggatatcataacagacgagcagaccacagtcgagcaacagagcgttttcactgcaccaaccggaatctcacagcccgtgggaaaggtgttcgtcgagaaatctaggcggttccaggccgctgaccgttctgaacttataaaaacgacagagaacatcgacgtctcaatggatgtgaagccttcatggacaacccgcgatgtagctctaactgtccatcgtgccttcaggatgataggcctgttcagccacgggttcctcgccggctgcgctgtctggaacattgtcgtgatatatgtgctagccggtgaccagttatctaacttatccaacttactccagcagtataaaacattggcatatcccttccagtctttgctgtatcttttgctggcactgtctacaatatctgcatttgaccggatcgactttgcgaagatctcagtggcaattcgaaattttctggctctggaccccactgccctggcaagttttctgtattttacggctctcatcctcagcttaagtcaacaaatgacgtctgataggatccacttgtatacccccagttctgtgaacggttcgctgtgggaggcaggcatcgaggaacagatcttgcagccttggatcgtcgtaaacctcgtcgtggccctgctggtgggactgtcttggttgtttctctcctataggcctgggatggatctgagcgaggagttaatgttcagctctgaagtagaagaatacccagacaaagaaaaggaaataaaggcttcatcctag

SEQ ID NO: 34153 - DNA, 1227 bp, Artificial Sequence
  derived and/or modified sequence
atgaggaccgattccggagctaggctggaagagggacacctgcggccaccacgtgctctgccacctgtaccctctcaagacgacattcctctgtcccgccctaagaaaaagaagcccaggactaaaaatacccccgcaagcgccagtctggagggcttggcccaaacggcaggacgaaggccctcagaggggaatgagccaagcacaaaagagctgaaggagcaccctgaggcacctgtgcagcgtaggcagaagaagaccagactacctctcgagctggaaacctcctctacgcagaagaaaagttcaagttcgtctttactgcggaacgaaaacggcattgatgccgagccagctgaagaggccgttattcagaagccacggagaaagacaaaaaaaacacagcctgccgagctccagtatgccaatgagctgggggttgaagacgaggacatcatcactgacgaacagaccacagtcgagcagcaaagcgtgtttaccgcaccaacaggcatcagtcagccagttggcaaagtcttcgtcgaaaagtcccgcaggtttcaagcagctgatagaagtgaattgattaaaacaacagaaaatattgacgtgagcatggatgtgaagccctcatggacgaccagggatgtagccctgacagttcacagggccttcaggatgatcgggttgttttcgcatgggtttctggccggttgtgccgtgtggaacattgtagtgatatacgtcctggccggtgaccagctctcgaacctttcaaatctgctccagcagtacaagaccttggcatatcccttccagtctctgctttatctgctgctggcactgtctacgatctctgcgtttgacagaattgacttcgcgaagattagcgtagcgattaggaactttttggccttggacccaacagctctggcgagcttcctatattttacggcattaatcctgagcttatcacagcagatgactagcgaccggatacacttatatacaccttctagcgtgaatggatcactgtgggaggccggaattgaggagcagatccttcaaccatggatcgtggtaaatctggtcgtggcactcctagtgggtttatcctggttattcctgtcctaccgcccaggaatggatctaagtgaagagcttatgttttctagtgaggtggaagaataccctgataaggagaaggagatcaaagcatcatcctag

SEQ ID NO: 34154 - DNA, 1227 bp, Artificial Sequence
  derived and/or modified sequence
atgaggacagattccggagccaggctggaggagggacatctccggccacccagggcattaccacctgtcccttctatcgacgacattccactctcgcggccaaagaagaaaaagccgagaaccaaaaacacacctgccagcgcctcacttgaaggattagcacagacagctggtaggagaccaagcgagggtaacgagccttcaacaaaagaactgaaggagcaccctgaagccccagttcagcgccgacagaaaaagacaagattgcctctggaattggaaactagctccactcagaagaagtcttcgtcctcatctttactgcgtaacgaaaacggcatcgacgcggaacctgccgaggaagccgtgatccaaaaacctaggcgaaagaccaagaagactcaacctgccgaactccagtacgccaacgagttgggagtggaagatgaagatattattacggacgaacagactacggtagagcaacagagtgtcttcactgccccaaccggaattagccagcctgtcggcaaggtgttcgtcgaaaagtcaagacgattccaggctgcagataggtccgaattgattaaaaccactgaaaatatcgacgtgtcgatggacgtgaaaccttcatggaccacccgggatgtggcgttgactgtgcacagggctttccgtatgatcggtctcttcagccatgggtttctcgcaggatgtgcagtgtggaacattgttgttatctacgtgcttgccggtgaccaactgtctaatctgtcaaatttgcttcagcagtataagactctggcctacccttttcagtctctcctttacctcctcctggccctctccactatctcagcatttgaccgcattgacttcgcaaaaatctctgtggccatcaggaacttcttggcactcgaccctacggccctggcatcttttctgtatttcactgctctgatcctgagtctgtctcagcagatgacaagcgacagaattcatctgtacacgccaagttctgtgaatggttccttgtgggaggcaggaattgaagagcagatacttcagccgtggattgttgttaacctggtggtggccctgctagtgggcttatcgtggttgttcctttcctatcgacccggtatggatctctctgaggaactcatgttctctagcgaggttgaagaatatcccgataaagagaaagaaatcaaagcatcctcttag

SEQ ID NO: 34155 - DNA, 5415 bp, Artificial Sequence
  derived and/or modified sequence
cctcgccaggcgccacgaagccccggcgtcccacaggtcccggaggccgctgcgtcgcggggagctgggctcgggccgccggcggttgcgccggggcagccccgcggggagagcaccatgaggactgactcgggggctcggctggaggagggccacctgcgtcctccacgagctcttccacctgtgccaagtcaagatgatattccacttagtcgtcctaagaaaaagaagcccagaacaaaaaacacaccagcaagtgcttctttggaaggccttgctcagactgctggtcgaaggccctctgagggcaatgagccatcaactaaagaactcaaagagcacccagaggctcctgttcaaagaagacagaaaaagacaaggctacctcttgaattggagacttcctccacccaaaagaagtcatctagttcatctttattacgaaatgaaaatggtattgatgcggagccagctgaggaggcagttattcaaaaacctcggaggaagacaaagaaaacccagccagcagaattacagtatgccaatgagctaggagtagaagatgaagacataatcactgatgagcaaactactgtggaacagcagtctgtattcactgcacccactggcattagccagcctgtaggcaaagtatttgtggaaaaaagccggagattccaggctgctgatcgttcagagttgataaagaccacagaaaacatagatgtgtcaatggacgtgaagccttcctggaccaccagagatgtggcacttacagtgcaccgggctttcaggatgattggtctcttttctcatggattcttggctggctgtgctgtgtggaatattgttgtgatatatgttctagcaggagatcagctatccaacctctcaaaccttctgcaacaatacaagaccctagcgtatccattccagagtcttctgtacttgcttttggctctgagtacaatttcagcttttgacaggattgactttgctaaaatatcagtagcaatccgaaattttttggccctggatcctacagctttagcatctttcttgtactttactgctcttatactatctctgagtcagcaaatgacaagtgacagaatccacctttacacaccttcttctgttaatggtagcctctgggaagcaggaattgaggaacagattctccagccatggattgtggtgaatctcgtggtggctcttctggttggattatcttggctatttttgtcttataggccaggcatggatcttagtgaagagttaatgttctcctcagaggtggaagaatatcctgataaagagaaagaaatcaaagcctcttcataataccagctcacctttggaggaataatgacccagtatttgtcccatttttgtttttaaatgtatttttataagatgtatacatgtgtatttgtaatagattttttgattatataatactgaaacatctctcaatattatgaaaaatgttaaaattgtgtttgctgtttatgtctaaacattaatttgtctagcattatcatcttaatgacaaagggaataatgaactagaaaccagcaagtgaaagtgtttatttcctattttctcaaaacagttgtatttataactattaccttaaaaagcactggtttagaaaaagccataacttaaatagtgttataaaatatatatcaggtttaaacataaatttagcgaatatggtagaagggaaaaaagccttcatttttgacctccccttactgaataaattgaaatatgaagtttgtcttttctgaaactggcttagtgattgagtatcatgtaataattataatataatttagcttgaaagatgctctacattatgaccaataaaaagggaatgtatgttttgtttgaaaaattatataacctaaattttttacctagaagtaactaaaaagttgcttctcattataatctgtactagtggttctcatatctggttgtacatcaggatcatagagggagattttaaaaatctatgtagcaaaagaggctgagcagggcaaggctcaggggaataaaggagagacctgtgagcttgtgggctcccagttgacatctgcagtaccctttcctctgtcccttttttctgagtgacaagaaataggagtagaaattcaccatctctgttctccagctctttgtcagagaggtttctggttttccaggaaatccccctcttgagatgggtcctgcactgggaaagatctcttcagaactatatccaatggtacctcagctgttgtatatgagaccctaaagctcaagttgaggagaagactagctatgggaaaaaatgtttcaaaggctgttgagcacatcaataaaactattgagcctgccctgattagcaagcacctgaatgttatagaacagaagaggattgacaaattgatgatagagacagttgaccctgacaataggtctaaatttggagtgaacattatactgggaatctcttttgctgtttgtaaggctggagctgccgaaaagggattctccctgctgtcacagaattgtgaatttgctggcaattctgaaggcatcctgctagttccagctttcactgtgaccagcaatggttctcaatctggcaataagctggcagtataggagttcataatcttccccgtcagcaaacttcagggaagccatgctcgttagagccaaggcttagcacacttgagccgtgtcatcaaagagaaatgtgagaaagctgctgccaatgtgggggattgtggtaggctgcataatgtctcctaaagatgtccatgtcctaatccctggaacttgtgaatatactactttacttggccaaagggatttgcagatatgattaaggttatgaaccttaaaacggggacattatcctgtattatccagaagggtccagtgtaatcttatgagtccttaaaagcagagaagaaagccttttatgtctgtggtcagagaggtcagaagttatgatattgctggctttgaagatggaagagggggccatgagccaaggagagtgatgaccttgcagctgagtacggcccttggccaacaatgagcaaggaaatggatttcagtcacataaccacaaggaactgagttctatgagtatcccaaatgagcaaggaaacaaatcctcccctagagccaagaaaggaaggcagctctgtggataccttggttttggcctggtgctgcccatgtcatacttttgacatacagaactgtaagatagcaagtgtatgttgactaagctgctaaattggtggtgattgcttatggcagcaatagaaagctatatatcctagagaataaagaaggctagagctgctgtggaatgcacttgggaaagctggctacattgataatatgtaactgccatgggcatagttgcctttgtattcttccaggtctgggaagtacaacttagacttcagatctcgtaatgacccaggaggcatataaacctgagcagctagtggccctgtacaagtccttcatcagggaaaaacattgagtattccctgattaaggacttgtacagaggactctgttttccctggtgtttctggtgtgtctcaaaaattgtttgactgtgatgacagggaagtttggaagaagttcactgctaatgcatgtctccaggaagcagggaatgatctcacagtgacacttgaggcacattgctgaggccgtcgatgagaattcatgtaactttctccagcttacagtggactagattgacatgcaagctgatccagtccaattggtagggcatcatggtttctcattactcactgacttaaaatacttttattgccatcctggtgaagcactgcactgggtagataacacaggggcaccttgctgatcagagcccttggccaggtacaaagagctcagtttctaaaactctgtcatttcaataatgttataaattgaatcatacagtatgtaattttatgggattcgctttttttctgttgatctctttttttctgagtcatctcagctgttgtgtgtatcaatagttcatttccttttactgttttgtttggtttaactcattgacctattgaaggatatctgggctcattccagtctgtgaataatgctgctgtggacattcatgtgcaagtttttgtgtgaacattaagttttcatttctttaagataaatgcccaggagtgaaactgatgggttgtatgtagttacaaactgccaagctgttttccagagttggcggtaccattctaatttcccatgacaattttttgaagagtccaagctagttgctttagagtgcctcacctacattttttaattgtctgactttttcctaatgacatcacttaatttgttcctcaatctcctgaatttcctatagactggaggttaggtctggtggtttgattagattttttaaaaaaatatgacttcatctgtgatgctgtgtactttatgttgcataacatgaaccctaagaacagagtgagctgctggacagcaagtttcatggggtgcagtaattaacacaccacatagtataaatctgaaataatgacaaatgtgttaagggccttgggatattgggccatgtactctgaggagcacaaggtgaggtgcaggttcctgcccctaaagaactctatcttttgagattagcaactaacagtgtgagcccactaataggatgtgaaagttgtcaaaatcaagttctggtcattgtgttaaaaatcctaacaaatagagctggggaaggccgtgaaaggacgattttcatgcacagatgtctgataatgaggactatcattaaaagactgcacaaaaccacaccttgcacaaaggccatcacaacctgacacacacaaaaaatacttctatgaggacatttgcccagcaactccctgtccaatgtccaactggcaacatccttgttattgatccttgtagccaaggataattctctcaaaacaatcatttttgctttaaaaaccgttgtcttccttgacctccctgtatatgcacatagtttactgtggcacttgtattcttattgcaatgcctactcctgaataaacatcattttctttcagagagtctccctctctgttatttaggctgacaaggatatgccaagaagtagcttggatatagcagttaactctgcctttaggatatgtgtatggggatataagagttaactaaaagctgacctttgagttggtccttgaataaaagaagaatagattccaaaaataagaggaataaataatgatcctgagctaggagagtacattttgcagacctttggtttccatattaagaaattcagatttttatgtacaataaagaagttctggaattctctg

SEQ ID NO: 34156 - DNA, 5399 bp, Artificial Sequence
  derived and/or modified sequence
gaagccccggcgtcccacaggtcccggaggccgctgcgtcgcggggagctgggctcgggccgccggcggttgcgccggggcagccccgcggggagagcaccatgaggactgactcgggggctcggctggaggagggccacctgcgtcctccacgagctcttccacctgtgccaagtatagatgatattccacttagtcgtcctaagaaaaagaagcccagaacaaaaaacacaccagcaagtgcttctttggaaggccttgctcagactgctggtcgaaggccctctgagggcaatgagccatcaactaaagaactcaaagagcacccagaggctcctgttcaaagaagacagaaaaagacaaggctacctcttgaattggagacttcctccacccaaaagaagtcatctagttcatctttattacgaaatgaaaatggtattgatgcggagccagctgaggaggcagttattcaaaaacctcggaggaagacaaagaaaacccagccagcagaattacagtatgccaatgagctaggagtagaagatgaagacataatcactgatgagcaaactactgtggaacagcagtctgtattcactgcacccactggcattagccagcctgtaggcaaagtatttgtggaaaaaagccggagattccaggctgctgatcgttcagagttgataaagaccacagaaaacatagatgtgtcaatggacgtgaagccttcctggaccaccagagatgtggcacttacagtgcaccgggctttcaggatgattggtctcttttctcatggattcttggctggctgtgctgtgtggaatattgttgtgatatatgttctagcaggagatcagctatccaacctctcaaaccttctgcaacaatacaagaccctagcgtatccattccagagtcttctgtacttgcttttggctctgagtacaatttcagcttttgacaggattgactttgctaaaatatcagtagcaatccgaaattttttggccctggatcctacagctttagcatctttcttgtactttactgctcttatactatctctgagtcagcaaatgacaagtgacagaatccacctttacacaccttcttctgttaatggtagcctctgggaagcaggaattgaggaacagattctccagccatggattgtggtgaatctcgtggtggctcttctggttggattatcttggctatttttgtcttataggccaggcatggatcttagtgaagagttaatgttctcctcagaggtggaagaatatcctgataaagagaaagaaatcaaagcctcttcataataccagctcacctttggaggaataatgacccagtatttgtcccatttttgtttttaaatgtatttttataagatgtatacatgtgtatttgtaatagattttttgattatataatactgaaacatctctcaatattatgaaaaatgttaaaattgtgtttgctgtttatgtctaaacattaatttgtctagcattatcatcttaatgacaaagggaataatgaactagaaaccagcaagtgaaagtgtttatttcctattttctcaaaacagttgtatttataactattaccttaaaaagcactggtttagaaaaagccataacttaaatagtgttataaaatatatatcaggtttaaacataaatttagcgaatatggtagaagggaaaaaagccttcatttttgacctccccttactgaataaattgaaatatgaagtttgtcttttctgaaactggcttagtgattgagtatcatgtaataattataatataatttagcttgaaagatgctctacattatgaccaataaaaagggaatgtatgttttgtttgaaaaattatataacctaaattttttacctagaagtaactaaaaagttgcttctcattataatctgtactagtggttctcatatctggttgtacatcaggatcatagagggagattttaaaaatctatgtagcaaaagaggctgagcagggcaaggctcaggggaataaaggagagacctgtgagcttgtgggctcccagttgacatctgcagtaccctttcctctgtcccttttttctgagtgacaagaaataggagtagaaattcaccatctctgttctccagctctttgtcagagaggtttctggttttccaggaaatccccctcttgagatgggtcctgcactgggaaagatctcttcagaactatatccaatggtacctcagctgttgtatatgagaccctaaagctcaagttgaggagaagactagctatgggaaaaaatgtttcaaaggctgttgagcacatcaataaaactattgagcctgccctgattagcaagcacctgaatgttatagaacagaagaggattgacaaattgatgatagagacagttgaccctgacaataggtctaaatttggagtgaacattatactgggaatctcttttgctgtttgtaaggctggagctgccgaaaagggattctccctgctgtcacagaattgtgaatttgctggcaattctgaaggcatcctgctagttccagctttcactgtgaccagcaatggttctcaatctggcaataagctggcagtataggagttcataatcttccccgtcagcaaacttcagggaagccatgctcgttagagccaaggcttagcacacttgagccgtgtcatcaaagagaaatgtgagaaagctgctgccaatgtgggggattgtggtaggctgcataatgtctcctaaagatgtccatgtcctaatccctggaacttgtgaatatactactttacttggccaaagggatttgcagatatgattaaggttatgaaccttaaaacggggacattatcctgtattatccagaagggtccagtgtaatcttatgagtccttaaaagcagagaagaaagccttttatgtctgtggtcagagaggtcagaagttatgatattgctggctttgaagatggaagagggggccatgagccaaggagagtgatgaccttgcagctgagtacggcccttggccaacaatgagcaaggaaatggatttcagtcacataaccacaaggaactgagttctatgagtatcccaaatgagcaaggaaacaaatcctcccctagagccaagaaaggaaggcagctctgtggataccttggttttggcctggtgctgcccatgtcatacttttgacatacagaactgtaagatagcaagtgtatgttgactaagctgctaaattggtggtgattgcttatggcagcaatagaaagctatatatcctagagaataaagaaggctagagctgctgtggaatgcacttgggaaagctggctacattgataatatgtaactgccatgggcatagttgcctttgtattcttccaggtctgggaagtacaacttagacttcagatctcgtaatgacccaggaggcatataaacctgagcagctagtggccctgtacaagtccttcatcagggaaaaacattgagtattccctgattaaggacttgtacagaggactctgttttccctggtgtttctggtgtgtctcaaaaattgtttgactgtgatgacagggaagtttggaagaagttcactgctaatgcatgtctccaggaagcagggaatgatctcacagtgacacttgaggcacattgctgaggccgtcgatgagaattcatgtaactttctccagcttacagtggactagattgacatgcaagctgatccagtccaattggtagggcatcatggtttctcattactcactgacttaaaatacttttattgccatcctggtgaagcactgcactgggtagataacacaggggcaccttgctgatcagagcccttggccaggtacaaagagctcagtttctaaaactctgtcatttcaataatgttataaattgaatcatacagtatgtaattttatgggattcgctttttttctgttgatctctttttttctgagtcatctcagctgttgtgtgtatcaatagttcatttccttttactgttttgtttggtttaactcattgacctattgaaggatatctgggctcattccagtctgtgaataatgctgctgtggacattcatgtgcaagtttttgtgtgaacattaagttttcatttctttaagataaatgcccaggagtgaaactgatgggttgtatgtagttacaaactgccaagctgttttccagagttggcggtaccattctaatttcccatgacaattttttgaagagtccaagctagttgctttagagtgcctcacctacattttttaattgtctgactttttcctaatgacatcacttaatttgttcctcaatctcctgaatttcctatagactggaggttaggtctggtggtttgattagattttttaaaaaaatatgacttcatctgtgatgctgtgtactttatgttgcataacatgaaccctaagaacagagtgagctgctggacagcaagtttcatggggtgcagtaattaacacaccacatagtataaatctgaaataatgacaaatgtgttaagggccttgggatattgggccatgtactctgaggagcacaaggtgaggtgcaggttcctgcccctaaagaactctatcttttgagattagcaactaacagtgtgagcccactaataggatgtgaaagttgtcaaaatcaagttctggtcattgtgttaaaaatcctaacaaatagagctggggaaggccgtgaaaggacgattttcatgcacagatgtctgataatgaggactatcattaaaagactgcacaaaaccacaccttgcacaaaggccatcacaacctgacacacacaaaaaatacttctatgaggacatttgcccagcaactccctgtccaatgtccaactggcaacatccttgttattgatccttgtagccaaggataattctctcaaaacaatcatttttgctttaaaaaccgttgtcttccttgacctccctgtatatgcacatagtttactgtggcacttgtattcttattgcaatgcctactcctgaataaacatcattttctttcagagagtctccctctctgttatttaggctgacaaggatatgccaagaagtagcttggatatagcagttaactctgcctttaggatatgtgtatggggatataagagttaactaaaagctgacctttgagttggtccttgaataaaagaagaatagattccaaaaataagaggaataaataatgatcctgagctaggagagtacattttgcagacctttggtttccatattaagaaattcagatttttatgtacaataaagaagttctggaattctctg

SEQ ID NO: 34157 - protein, 203 aa, Artificial Sequence
  derived and/or modified sequence
MTPGTQSPFFLLLLLTVLTVVTGSGHASSTPGGEKETSATQRSSVPSSTEKNAIPAPTTTKSCRETFLKCFCRFINKGVFWASPILSSVSDVPFPFSAQSGAGVPGWGIALLVLVCVLVALAIVYLIALAVCQCRRKNYGQLDIFPARDTYHPMSEYPTYHTHGRYVPPSSTDRSPYEKVSAGNGGSSLSYTNPAVAATSANL

SEQ ID NO: 34158 - DNA, 612 bp, Artificial Sequence
  derived and/or modified sequence
atgacccccggcacccagagccccttcttcctgctgctgctgctgaccgtgctgaccgtggtgaccggcagcggccacgccagcagcacccccggcggcgagaaggagaccagcgccacccagagaagcagcgtgcccagcagcaccgagaagaacgccatccccgcccccaccaccaccaagagctgcagagagaccttcctgaagtgcttctgcagattcatcaacaagggcgtgttctgggccagccccatcctgagcagcgtgagcgacgtgcccttccccttcagcgcccagagcggcgccggcgtgcccggctggggcatcgccctgctggtgctggtgtgcgtgctggtggccctggccatcgtgtacctgatcgccctggccgtgtgccagtgcagaagaaagaactacggccagctggacatcttccccgccagagacacctaccaccccatgagcgagtaccccacctaccacacccacggcagatacgtgccccccagcagcaccgacagaagcccctacgagaaggtgagcgccggcaacggcggcagcagcctgagctacaccaaccccgccgtggccgccaccagcgccaacctgtag

SEQ ID NO: 34159 - DNA, 612 bp, Artificial Sequence
  derived and/or modified sequence
atgactccaggaactcagagcccttttttcctgctgctgttgttgacagtgttgacagttgttactggttccggtcatgcttccagcacccccggcggcgaaaaggaaaccagcgcaacccagagatccagtgtaccctcatccactgagaagaacgctatccccgcgcctaccactactaagagctgcagagagacctttcttaaatgcttctgtagattcattaataaaggagttttctgggcatcacctatactttcatcagtatccgacgtgccttttcctttctcagcgcagagcggcgccggagtgcccggttggggtattgcccttctcgttctggtgtgcgtgcttgtggcgctcgccattgtgtatctcattgcgctcgccgtctgccagtgtagaaggaagaattatgggcaactggatatcttcccagccagggacacttaccaccctatgtcagagtatcctacatatcacacgcacgggagatatgtccccccatcctcaacagatcgctccccttacgaaaaagtcagtgcgggcaatgggggatcttcgctgagctacactaacccggccgtggcggccacaagcgccaatctgtag

SEQ ID NO: 34160 - DNA, 612 bp, Artificial Sequence
  derived and/or modified sequence
atgaccccaggcacccagagccccttcttcctgctgctgctgctgactgtgctgactgtggtgacaggcagcggccacgccagcagcaccccaggaggagagaaggagaccagcgccacccagaggagctctgtgcccagcagcacagagaagaatgccatcccagcccccaccaccaccaagagctgccgggagaccttcctgaagtgcttctgccgcttcatcaacaagggcgtcttctgggccagccccatcctgagctctgtgtctgatgtgcccttccccttcagcgcccagagcggggccggcgtgcccggctggggcatcgccctgctggtgctggtgtgtgtgctggtggccctggccatcgtgtacctgattgccctggccgtgtgccagtgcaggaggaagaactacggccagctggacatcttccctgcccgggacacctaccaccccatgtctgagtaccccacctaccacacccacggccgctacgtgccccccagcagcacagacaggagcccctatgagaaggtgtctgctggaaatggaggcagcagcctgagctacaccaacccagctgtggccgccaccagcgccaacctgtag

SEQ ID NO: 34161 - DNA, 612 bp, Artificial Sequence
  derived and/or modified sequence
atgacccccggcacccagagccccttcttcctgctgctgctgctgacagtgctgactgtagtcaccggctcaggacacgcttcctctacacccggcggcgaaaaagagacctccgctacccagcggtcctccgtgccgagctccactgaaaagaacgccattccagcccccacaacaaccaagtcttgccgcgaaacttttcttaaatgcttctgcaggtttattaacaagggcgtattttgggctagtccaatcctgtcttcagtcagtgacgtaccttttcctttcagcgctcaatccggcgccggtgtaccagggtggggtatcgcactgctcgtgctggtttgcgtactggtcgccctcgcaatcgtgtacttgatagcactggctgtctgccaatgtaggagaaagaactatggccaacttgatatcttccccgcacgggacacctaccatcctatgtcggaatatcctacctaccacacacacggccggtatgtgccaccatcatctacagatcgctctccctatgagaaagtgagtgcaggaaacggtggctcttcattgagctacacaaacccggcggtcgcagctacatctgcaaacttatag

SEQ ID NO: 34162 - DNA, 648 bp, Artificial Sequence
  derived and/or modified sequence
ctccccacccatttcaccaccaccatgacaccgggcacccagtctcctttcttcctgctgctgctcctcacagtgcttacagttgttacgggttctggtcatgcaagctctaccccaggtggagaaaaggagacttcggctacccagagaagttcagtgcccagctctactgagaagaatgctatcccagcaccgactactaccaagagctgcagagagacatttctgaaatgtttttgcagatttataaacaagggggttttctgggcctctccaatattaagttcagtgagtgatgtgccatttcctttctctgcccagtctggggctggggtgccaggctggggcatcgcgctgctggtgctggtctgtgttctggttgcgctggccattgtctatctcattgccttggctgtctgtcagtgccgccgaaagaactacgggcagctggacatctttccagcccgggatacctaccatcctatgagcgagtaccccacctaccacacccatgggcgctatgtgccccctagcagtaccgatcgtagcccctatgagaaggtttctgcaggtaatggtggcagcagcctctcttacacaaacccagcagtggcagccacttctgccaacttgtaggggcacgtcgcc

SEQ ID NO: 34163 - DNA, 612 bp, Artificial Sequence
  derived and/or modified sequence
atgactcccggaacccagagcccattcttcctgctgcttttactcacagtgctgactgtggtgacaggatccggccacgccagcagcacgcccggaggagagaaagaaacgtctgcaacacagaggtccagtgtaccatccagtacagaaaagaatgccattcctgcccctactacaacaaagtcatgtcgggagactttcttaaagtgtttctgccgctttatcaacaaaggcgtgttctgggcatctcctatactctccagtgtgagtgatgtcccgtttccttttagcgcccagtctggcgctggcgtccccggatggggtattgctctgctggtgttggtctgcgttctcgttgctctggccatcgtttacctgatcgccctcgcagtttgtcagtgtagacgtaaaaactatggccaactggacatttttcccgcacgagacacttatcatccgatgagcgaatacccaacgtatcacacgcacggccgatatgttcccccttcctcaacggatcggtccccctatgagaaggtgtcagctggcaacggaggatcatccttatcttacacaaaccccgctgtggcggctacctcagccaacctctag

SEQ ID NO: 34164 - protein, 159 aa, Artificial Sequence
  derived and/or modified sequence
MTPGTQSPFFLLLLLTVLTATTAPKPATVVTGSGHASSTPGGEKETSATQRSSVPSSTEKNAFNSSLEDPSTDYYQELQRDISEMAVCQCRRKNYGQLDIFPARDTYHPMSEYPTYHTHGRYVPPSSTDRSPYEKVSAGNGGSSLSYTNPAVAATSANL

SEQ ID NO: 34165 - DNA, 480 bp, Artificial Sequence
  derived and/or modified sequence
atgacccccggcacccagagccccttcttcctgctgctgctgctgaccgtgctgaccgccaccaccgcccccaagcccgccaccgtggtgaccggcagcggccacgccagcagcacccccggcggcgagaaggagaccagcgccacccagagaagcagcgtgcccagcagcaccgagaagaacgccttcaacagcagcctggaggaccccagcaccgactactaccaggagctgcagagagacatcagcgagatggccgtgtgccagtgcagaagaaagaactacggccagctggacatcttccccgccagagacacctaccaccccatgagcgagtaccccacctaccacacccacggcagatacgtgccccccagcagcaccgacagaagcccctacgagaaggtgagcgccggcaacggcggcagcagcctgagctacaccaaccccgccgtggccgccaccagcgccaacctgtag

SEQ ID NO: 34166 - DNA, 480 bp, Artificial Sequence
  derived and/or modified sequence
atgacgcctgggacccaatcccctttcttcttattactgctgcttacagtgctgactgcaaccacggcacccaagcctgccactgtggtgaccggctctggccatgcgtcaagtactccgggcggggagaaagagacatccgccacacaaagatcttcagtgccgtcctccacggagaagaatgcctttaactcaagcctcgaggacccatctactgattattatcaagaattacagcgcgacatttccgaaatggctgtctgccaatgtagacgcaagaattacggccagctggacatctttccggccagagatacatatcatccaatgtccgaataccccacctatcacactcatggccgctatgtcccccctagctccacggaccggtctccttatgaaaaggtgtctgcaggaaacggcgggtcttctttgtcctacacgaaccctgcagtggccgctacaagcgcgaacctttag

SEQ ID NO: 34167 - DNA, 480 bp, Artificial Sequence
  derived and/or modified sequence
atgaccccaggcacccagagccccttcttcctgctgctgctgctgactgtgctgacagccaccacagcccccaagccagccaccgtggtgactggaagtggccacgccagcagcaccccaggaggagagaaggagaccagcgccacccagaggagctctgtgcccagcagcacagagaagaatgccttcaacagcagcctggaggaccccagcacagactactaccaggagctgcagagggacatcagcgagatggctgtgtgccagtgcaggaggaagaactacggccagctggacatcttccctgcccgggacacctaccaccccatgtctgagtaccccacctaccacacccacggccgctacgtgccccccagcagcacagacaggagcccctatgagaaggtgtctgctggaaatggaggcagcagcctgagctacaccaacccagctgtggccgccaccagcgccaacctgtag

SEQ ID NO: 34168 - DNA, 480 bp, Artificial Sequence
  derived and/or modified sequence
atgacccccggcacccagagccccttcttcctgctgctgctgctgacagtgctgacagctaccaccgccccaaagcctgctactgtcgtcacaggctccgggcacgcctcatctacccctggcggagaaaaggaaacaagcgctactcaacggagctctgtgccatcttcaacagaaaaaaatgcattcaactctagcttagaggatccttccacggattactaccaggagctccagcgcgacatcagcgagatggccgtttgtcagtgtaggcgtaagaattacgggcagctcgatatcttcccagccagggacacctaccacccgatgtcagaatatcccacttaccatacccacggccgctatgtaccccccagcagcaccgatcgctccccctatgagaaagtgagtgctggcaacggcggatcatcccttagctacacaaatcctgcggtcgccgccactagtgccaacctgtag

SEQ ID NO: 34169 - DNA, 516 bp, Artificial Sequence
  derived and/or modified sequence
ctccccacccatttcaccaccaccatgacaccgggcacccagtctcctttcttcctgctgctgctcctcacagtgcttacagctaccacagcccctaaacccgcaacagttgttacgggttctggtcatgcaagctctaccccaggtggagaaaaggagacttcggctacccagagaagttcagtgcccagctctactgagaagaatgcttttaattcctctctggaagatcccagcaccgactactaccaagagctgcagagagacatttctgaaatggctgtctgtcagtgccgccgaaagaactacgggcagctggacatctttccagcccgggatacctaccatcctatgagcgagtaccccacctaccacacccatgggcgctatgtgccccctagcagtaccgatcgtagcccctatgagaaggtttctgcaggtaatggtggcagcagcctctcttacacaaacccagcagtggcagccacttctgccaacttgtaggggcacgtcgcc

SEQ ID NO: 34170 - DNA, 480 bp, Artificial Sequence
  derived and/or modified sequence
atgacacccggaacacagagccctttttttttactgctgcttctgacagtgcttacagctacaactgctccaaagccagccaccgtcgtaacaggcagtggccacgccagtagcacacctggaggtgagaaagagacctcagctacccagaggtcgtcagttcctagctctacggaaaaaaatgcattcaatagctctttggaggacccttcaacagactactatcaggagctccagcgtgacattagtgagatggcagtgtgccagtgcaggcggaagaactacggtcagcttgacatattccctgcacgggacacttaccacccaatgtcggagtatcccacgtaccacactcacggcagatatgtaccaccctcatctaccgaccgcagtccctacgaaaaggttagcgccggaaatgggggttccagcctgtcatacaccaaccccgctgttgcagccacgtccgcgaatttatag

SEQ ID NO: 34171 - protein, 455 aa, Artificial Sequence
  derived and/or modified sequence
MENKKKDKDKSDDRMARPSGRSGHNTRGTGSSSSGVLMVGPNFRVGKKIGCGNFGELRLGKNLYTNEYVAIKLEPMKSRAPQLHLEYRFYKQLGSGDGIPQVYYFGPCGKYNAMVLELLGPSLEDLFDLCDRTFSLKTVLMIAIQLISRMEYVHSKNLIYRDVKPENFLIGRPGNKTQQVIHIIDFGLAKEYIDPETKKHIPYREHKSLTGTARYMSINTHLGKEQSRRDDLEALGHMFMYFLRGSLPWQGLKADTLKERYQKIGDTKRATPIEVLCENFPEMATYLRYVRRLDFFEKPDYDYLRKLFTDLFDRKGYMFDYEYDWIGKQLPTPVGAVQQDPALSSNREAHQHRDKMQQSKNQSADHRAAWDSQQANPHHLRAHLAADRHGGSVQVVSSTNGELNTDDPTAGRSNAPITAPTEVEVMDETNCQKVLNMWCCCFFKRRKRKTIQRHK

SEQ ID NO: 34172 - DNA, 1368 bp, Artificial Sequence
  derived and/or modified sequence
atggaaaacaagaagaaggacaaagataaaagtgatgacagaatggcaagaccatccggacggtccggtcacaatacacgtgggaccggatccagcagctcaggtgttctgatggtggggcccaatttcagggttgggaagaaaattggttgtggtaacttcggggaactaagactcggcaaaaatctttacaccaacgagtatgtcgccattaaactcgagccaatgaaaagcagggcccctcagcttcacttggaatacaggttctacaaacagctcggcagcggggatggcatcccgcaggtgtactattttggcccctgcggtaagtacaatgccatggtgttggagcttcttggcccgtccttggaagatctgtttgacctttgtgatcgaaccttctctctgaagactgtgcttatgatcgctatacagctgattagcaggatggaatacgtgcattccaaaaacctaatttatagggacgtcaaacccgagaacttcttgatcgggagacctggcaacaagacacagcaggttatccatattatagattttggccttgccaaggagtatattgatcctgagaccaagaagcatatcccataccgggagcataagtccctcacagggacagctcggtatatgtctataaacacacatttgggcaaagagcaatcaagaagggatgacctggaggctctgggacatatgttcatgtacttcttgagaggctcactgccttggcagggactcaaagccgatactctgaaagagaggtatcagaagataggagatactaagcgtgctactcctatcgaggtcctctgcgaaaacttccccgagatggcaacctatttacggtacgttagacgcttggatttttttgagaagcctgactatgactacctgagaaagttgttcaccgatctgtttgataggaaaggttacatgttcgactacgagtacgactggatcggtaaacagctgccaacgcccgttggtgctgtgcagcaggatccagcgttgagctcaaaccgggaggctcatcagcaccgggataaaatgcagcagtctaagaaccagtctgcagaccaccgtgccgcatgggattcccaacaggctaatcctcaccacttgcgggcacatctggccgctgatcgccacggaggttcagtgcaggtggtcagctccactaacggtgaactcaataccgatgatcccaccgccggacggagcaacgctcccatcacggcacccactgaagtggaggttatggacgaaaccaactgtcagaaagtgctgaacatgtggtgttgctgtttctttaagagacgtaaacggaagactattcagcgccataagtag

SEQ ID NO: 34173 - DNA, 1368 bp, Artificial Sequence
  derived and/or modified sequence
atggagaataagaagaaagacaaggataaaagtgatgatagaatggcccgtccgtctggtaggtctgggcataatacaagaggtactggatctagtagtagcggcgtgctaatggtgggccctaattttcgagtagggaagaagatcggctgtggcaattttggcgaactgcgcctgggtaagaatttatacactaatgagtacgtggcaattaaacttgagccaatgaaatctcgggccccacaactgcacctggagtatagattttacaaacagctcgggtccggagatggcatccctcaggtttactactttggcccttgtggaaagtacaacgctatggtgctggaactattgggtccaagccttgaggacctgttcgatctgtgtgaccggacattttccctgaagacagtgctgatgatcgccattcagctgatctctaggatggagtatgtgcattcgaagaacctgatctacagggatgtgaagcccgaaaattttctgatcggtcgtccaggcaacaagacccagcaggtgatccacattattgatttcggactggccaaagagtacatagatcctgagaccaagaagcatattccatacagagaacacaaatctctgaccggaaccgcgcgctacatgtctataaacactcatcttggcaaggagcagtcccgccgggacgatttggaagctcttggccacatgttcatgtatttcttaaggggcagcttaccgtggcaggggctgaaagcagataccctaaaggagcggtaccagaagattggagacaccaagcgggcaactcccatcgaagtcctttgcgaaaacttcccagagatggctacatatctccgttacgttaggcggctagacttctttgagaagccggattatgattacctgagaaagctattcacagacctcttcgatcgaaaagggtatatgttcgactacgagtatgactggataggtaaacaattgcctacccctgtaggcgccgttcagcaagaccccgctttgtcaagcaaccgagaagcccaccagcacagagacaagatgcagcagtcaaagaaccagagtgcggaccatcgagctgcttgggatagccagcaggcaaacccacaccacctccgcgcccacctcgcagcagaccggcacgggggctccgtgcaggtcgtgtcctcaactaacggagaacttaacaccgatgacccaaccgctgggcggagcaatgcacctataacagcacctacagaggtggaagtgatggacgagaccaattgccagaaggtgctgaacatgtggtgctgttgttttttcaagagacgtaaacgcaaaacgattcagcggcataagtag

SEQ ID NO: 34174 - DNA, 1368 bp, Artificial Sequence
  derived and/or modified sequence
atggagaacaagaagaaggacaaggacaagagtgatgacaggatggcccggcccagcggccgcagcggccacaacacccggggcaccggcagcagcagcagcggcgtgctgatggtgggccccaacttccgggtgggcaagaagattggctgcggcaactttggagagctgcggctgggcaagaacctgtacaccaatgaatatgtggccatcaagctggagcccatgaagagccgggccccccagctgcacctggagtaccgcttctacaagcagctgggcagcggagatggcatcccccaggtgtactacttcggcccctgtgggaagtacaatgccatggtgctggagctgctgggccccagcctggaggacctgtttgacctgtgtgacaggaccttcagcctgaagacagtgctgatgattgccatccagctgatcagcaggatggagtatgtgcacagcaagaacctgatctacagagatgtgaagccagagaacttcctgattggccggcccggcaacaagacccagcaggtgatccacatcatcgactttggcctggccaaggagtacattgatcctgagaccaagaagcacatcccctaccgggagcacaagagcctgaccggcacagcccgctacatgagcatcaacacccacctgggcaaggagcagagcagaagagatgacctggaggccctgggccacatgttcatgtacttcctgcggggcagcctgccctggcagggcctgaaggctgacaccctgaaggagcgctaccagaagatcggggacaccaagagggccacccccatcgaggtgctgtgtgagaacttccctgagatggccacctacctgcgctacgtgcggcggctggacttctttgagaagccagactatgactacctgaggaagctgttcacagacctgtttgacaggaagggctacatgtttgattatgaatatgactggattggcaagcagctgcccacccctgtgggcgctgtgcagcaggaccctgccctgagcagcaaccgggaggcccaccagcaccgggacaagatgcagcagagcaagaaccagagcgctgaccaccgggccgcctgggacagccagcaggccaacccccaccacctgcgggcccacctggccgctgacagacatggaggctctgtgcaggtggtgagcagcaccaacggggagctgaacacagatgaccccacagctggccgcagcaatgcccccatcacagcccccacagaggtggaggtgatggatgagaccaactgccagaaggtgctgaacatgtggtgctgctgcttcttcaagaggaggaagaggaagaccatccagaggcacaagtag

SEQ ID NO: 34175 - DNA, 1368 bp, Artificial Sequence
  derived and/or modified sequence
atggagaacaagaagaaggacaaggacaagagcgacgaccggatggctagacccagtggtcggtccgggcataacacaagggggactgggtctagctcgagtggcgtgctcatggttggtcccaactttcgggtgggaaagaaaattggctgcgggaacttcggcgagctcagactgggaaagaacctctacacaaatgagtatgtggcaattaaacttgaacccatgaagagccgggctcctcagctccaccttgagtatcgcttttataagcaactgggttccggcgacggaattccacaggtgtactactttggtccttgcgggaaatacaacgcgatggtacttgagctcctgggtccgtccctggaagatcttttcgacctctgcgaccggaccttctccctgaagacagtgctgatgatcgcgatccaacttatttcaaggatggagtatgtccatagcaagaacctgatctatagggacgttaaacctgagaactttttgatcggacgcccaggcaataaaacccagcaggtgatccatattatcgatttcgggcttgccaaggaatacatcgaccccgaaactaaaaaacatattccttacagggagcataagagcctgaccggcacagctaggtatatgagcatcaacacacatctcgggaaggagcaaagtaggagggatgatctggaggctctcggccacatgtttatgtattttctgagaggctccttaccctggcagggcttgaaagccgataccctgaaagagcgttatcagaaaatcggcgacaccaaacgtgccacccccatcgaagtgctgtgcgaaaatttcccagagatggccacctatcttcgctacgtacgccgtctcgattttttcgaaaagccggattatgactacctgagaaagctgttcaccgatttgttcgaccgaaaagggtatatgtttgactatgaatacgattggatcggcaagcagctgcccactcctgtgggcgctgtgcagcaggatcccgcactttcttccaaccgcgaggctcatcagcacagagataaaatgcagcagagcaagaatcagagcgctgaccatagagccgcatgggactcacaacaggccaatccgcatcacctgagggcccatcttgcggccgataggcatggaggttctgtccaagtggttagcagcacaaacggcgagttgaatactgatgacccaaccgccgggaggagtaacgccccaataaccgcaccaacagaagtggaggtgatggacgaaacgaactgccaaaaggttttgaatatgtggtgttgctgctttttcaagcgtcgcaagcgcaagacgatacagagacataaatag

SEQ ID NO: 34176 - DNA, 1368 bp, Artificial Sequence
  derived and/or modified sequence
atggagaacaagaagaaggacaaggacaagagcgacgaccggatggcccggccatcagggcgatcaggtcataatacccggggcacaggctccagttcctcaggcgtactgatggtcggtccaaactttcgcgtgggcaagaagatcggctgtggcaatttcggagaattgcggctagggaagaatctgtacactaatgaatacgtagctattaagctcgagcctatgaaatctcgggccccgcagcttcacctggaatacagattttataagcagctcggcagcggcgacggaatcccgcaggtgtattattttggcccatgtggaaagtacaatgccatggtgcttgagctcctcggtccgtcactggaggatctttttgatctgtgtgacagaacattttccttgaaaaccgtccttatgattgcgattcagctaatctctcggatggagtacgtgcactccaagaacctgatataccgagacgtgaaaccagagaactttctcatcggcagacctggaaataaaacacagcaggtcattcacatcatagatttcggactggcaaaggaatacatcgacccggaaaccaaaaaacatattccctaccgggaacacaaaagcttgaccggaacagccaggtatatgtcaattaacacccatttgggcaaggagcagagtcggcgtgatgacctggaagcactgggacatatgtttatgtacttcctgcgcgggagcctaccgtggcagggcttgaaggctgacaccctgaaagagcgctaccagaagatcggcgacactaaacgggctaccccaatcgaagtcttgtgcgagaactttcctgagatggccacctatctgcggtatgttagacgtcttgatttctttgagaaaccggattatgattacttgaggaagctgttcactgacttgtttgataggaaaggatacatgttcgactacgagtatgattggataggcaaacagcttcccactccagtgggggccgtgcagcaggaccctgccctgtcatccaaccgggaggcacaccaacatcgagacaagatgcagcagagcaaaaatcagtctgcggaccatcgggccgcatgggactctcagcaggccaatcctcaccacctcagggcacacctagcagctgatcgccatggggggagcgtgcaggtggtctcctccactaatggagagctgaatactgatgatcctacagcaggtcggagtaatgcacccatcaccgccccaactgaggtggaagtgatggatgagaccaactgccaaaaggttctcaatatgtggtgctgctgcttttttaagaggcggaaacgcaagacaatacagcgccacaagtag

SEQ ID NO: 34177 - DNA, 1368 bp, Artificial Sequence
  derived and/or modified sequence
atggagaacaaaaagaaagacaaagacaaaagcgatgatcggatggctagacccagcggtaggtctggccacaacacccggggaaccggcagtagcagcagcggcgtgttgatggttggccctaactttcgagttggcaaaaagatcggctgtgggaactttggcgagcttcgtttaggaaagaacctttataccaacgaatacgtggctataaaactggaacctatgaaaagccgcgctcctcagctgcaccttgagtacagattttacaagcagctgggcagcggggatggcattcctcaggtctattacttcgggccttgtgggaaatacaacgcaatggtgttggagctgctaggtccttctctcgaggatctgtttgatctctgcgataggacttttagcttgaaaacagtcctgatgatcgcaatacagcttatcagccgtatggaatacgtccacagtaagaatctgatctaccgggacgtgaaacccgagaacttcctgatcggaagaccagggaataagacccagcaagtaattcatattatcgatttcggcttagctaaagagtatatagaccctgaaaccaaaaagcacatcccctaccgtgagcataagagtctgaccggcactgcaaggtatatgagcatcaacactcacctgggaaaggaacagtctcggagagacgatctggaggccctggggcacatgtttatgtactttttgagaggatcattgccatggcagggtctgaaagcggatacactaaaggagcgctatcagaagattggggatacaaaacgggcaacaccaatcgaagtgctctgtgagaatttccccgagatggcaacctatctgagatatgtgagacggcttgacttcttcgagaaaccagactatgattatcttcggaagcttttcaccgatctgttcgatcgcaaagggtacatgttcgactacgagtatgattggattgggaagcaactccccacgcccgtgggagccgtccaacaggatcctgccctgtcctcaaatcgggaggcacatcagcaccgggataaaatgcagcagagtaagaatcagagcgcggaccaccgggcagcctgggactcccagcaggccaacccacatcacctcagagcccacttggcagctgatcgccatgggggttcagttcaggttgtttcaagcactaatggtgaactcaatacagatgacccaacagccggtaggtctaacgcgcctattacagcaccaaccgaagtggaggtcatggacgagaccaattgccagaaggtactgaacatgtggtgttgctgcttctttaaacggaggaagcgcaagacgatccagcggcacaagtag

SEQ ID NO: 34178 - DNA, 1368 bp, Artificial Sequence
  derived and/or modified sequence
atggaaaataaaaagaaagacaaggataaatctgatgatcgtatggcacgaccctcaggtcgctctggacacaacacaagagggactggatcttccagcagtggggtgcttatggtgggaccaaacttccgagtagggaaaaagattggctgtgggaatttcggcgagctacggctgggaaagaacctttatactaacgagtacgtggcaatcaaactggagcctatgaaatcacgcgcaccccagctgcacctggaatatcgtttttataagcagcttggctcaggcgacggcatccctcaagtgtactacttcggcccttgcggaaagtataatgccatggttttggagctgctcggccctagcctggaagatttatttgatctgtgcgacaggacattctcactcaagaccgtgcttatgatcgcgatccagttgatcagcagaatggagtatgtacacagtaagaacctgatataccgtgatgttaagccagagaattttttgatcggacggccagggaacaaaacccagcaagtaatacatattatcgactttgggctggccaaggaatatatagaccccgaaaccaagaagcacataccatatcgggagcacaaaagtctcacgggaaccgcaagatacatgagcatcaacacacaccttggtaaggaacagtctagaagagacgacctggaagccctgggccacatgtttatgtattttctgcgtggcagtcttccatggcaaggcctgaaggccgataccttgaaagagcgctatcaaaagattggagacacaaagcgcgctacccccatcgaagtgctgtgcgagaatttcccggagatggctacttacctcagatacgtgcggagactcgacttttttgagaagcccgactacgactacttgcggaaactgtttacagacctcttcgatagaaaaggctacatgtttgattacgagtatgactggatcggtaaacagctcccaacaccagtaggagccgttcagcaggaccctgccctgagcagtaatagagaggcccaccagcatcgggataagatgcaacagtcaaaaaaccagtcggcagaccatcgagctgcatgggactctcaacaggcaaacccccaccacctccgcgcacatctggccgctgacagacacggcggaagcgttcaggtggtgtcgtccaccaatggcgaactgaatactgacgatccaactgccggaaggtccaatgcgccaatcacagcacccaccgaagtggaagttatggacgagactaactgccagaaagtcctaaatatgtggtgctgttgcttctttaaacgacgtaaaaggaagacaatccagagacacaaatag

SEQ ID NO: 34179 - DNA, 4047 bp, Artificial Sequence
  derived and/or modified sequence
gaattcaaagtggagtaccgcaaacttgatatggaaaataaaaagaaagacaaggacaaatcagatgatagaatggcacgacctagtggtcgatcgggacacaacactcgaggaactgggtcttcatcgtctggagttttaatggttggacctaactttagagttggaaaaaaaattggatgtggcaattttggagaattacgattagggaaaaatttatacacaaatgaatatgtggcaattaagttggagcccatgaaatcaagagcaccacagctacatttggaatacagattctataagcagttaggatctggagatggtatacctcaagtttactatttcggcccttgtggtaaatacaatgctatggtgctggaactgctgggacctagtttggaagacttgtttgacttgtgtgacagaacattttctcttaaaacagttctcatgatagctatacaactgatttctcgcatggaatatgtccattcaaagaacttgatatacagagatgtaaaacctgagaacttcttaataggacgaccaggaaacaaaacccagcaagttattcacattatagattttggtttggcaaaggaatatattgatccggagacaaagaaacacataccatacagagaacacaagagccttacaggaacagctagatatatgagcataaacacacatttaggaaaagaacaaagtagaagagacgatttagaagctttaggtcatatgttcatgtattttctgagaggcagtcttccttggcaaggcttaaaggctgacacattaaaggagaggtatcagaaaattggagatacaaaacgggctacaccaatagaagtgttatgtgaaaattttccagaaatggcaacatatcttcgttatgtaagaaggctagatttttttgaaaaaccagactatgactacttaagaaagctttttactgacttgtttgatcgaaaaggatatatgtttgattatgaatatgactggattggtaaacagttgcctactccagtgggtgcagttcagcaagatcctgctctgtcatcaaacagagaagcacatcaacacagagataagatgcaacaatccaaaaaccagtcggcagaccacagggcagcttgggactcccagcaggcaaatccccaccatttgagagctcaccttgcagcagacagacatggtggctcggtacaggttgtaagttctacaaatggagagttaaacacagatgaccccaccgcaggacgttcaaatgcacccatcacagcccctactgaagtagaagtgatggatgaaaccaactgccagaaagtgttgaacatgtggtgctgctgttttttcaaacgaaggaaaaggaaaaccatacagcgccacaaatgactctggacacagacagatcctggggagttacttacatgttcatctgctgtcttgtgattaaaatcatctctgtagtgaccacgtatattttcaaggactcactcttagaaacaaaaatgtcatactttcatacttcattttgtggttgtcttacattctttttctttttttttttttctctaatttaacctttatggaagctttaaagttttgtcaaaacatgagtgctttgcccatcagtgaatggaatggaccaatgaggtggtatcaatgaatatagttccatagaacattttccagaagttcttctgttgtagaaagcagtacagtatcttaagtgtcaaccagttatatacctaatctggttttttataacttctgtaagagcataatcaaacaggaattttcttttctcagtggataatacaacagagaaaacagagttgcccaaatatttaaaagaagttattccttgagaagttcatattttgtgacatctgcattgatttcagtattactgatggtactgttattcataagtcatattaacattctctccgtgaaatcatggtacagtcactgcccagaggtactgaggaaaaagcaatatgggttcggcagatggtggtggtaaaatgaatcttaaggagtgtggtaaatatgtgctccgcttttgttgcatcactatgtgaagtactgtgttgcagaagtggcaaaagcgcttatttttaaaaatgcaaaatatttgtacaatgtaactttatgcttccaaataataatgtatgttagacagcaagaaatgaatactttaaaaagtgatgtatgttggagttataaagaaatacactaaggagaggtagtaaatgtgaaccttgttgcagtgtataaggtggaagcctaaagaaatctcaccgaaacttactgctgaatgattacattctcccttaagcagaaaactttggatgtgccatgcaatggtgtctgtgtaattattttgctctttgattaaaaaaaagacccccagcaataaaaagtgggtcactctatgccctctgtgcacattagtctcttgtattcaactttgctgattctctggaattttcctactctttagcataattttgatgattgaaaaatattttggaaaggatgggtcaggtgctttgcctccatagtcttttgaagtgcctgcatatgaacaacaacaacaacaacaaaaaattctgtaaaaaaggaagcccattccacttttcaagtatgctttgttttaagccataaagacacacatgtagttttgtcacattctactagccaaaattttcaagaagggttaaaacaaagactggctagaaagataattattttgaataaatctcatattcatctttcatttatataattgttacttattcctcccatgcagtctcttcgttgtctttaagtgtgtgcctccaggcatgcttatttatttttattgtctcaaggtaacatttaagatgtatattaaagtaaagctacatttttttacttcattattgcatttacagggatttaattgtactttgtaatttatttttcttattagccaaaagtttaatgcatttttttttgatgaattaggcacccacatgaacaccacaaatcaggacattgtttatcattgttgctatgaatcctatgaatgatcttttttttattttaaagacctacacttaacctacaaaacatttgctgtataatttggtcaacagtttctatctatctgtatactgtcatgatgtcttaaactgcaggagttacatactgagtttatatttttatttgctttgagcaaggtagataaacattttggccattataatgtgaaaccacttcttctttctttacagtatttgaccaaacttgtgtgtctatgatatttgtaaatacatgcgaatatctgtatttcttatcataagcctatttagttttattctcagtagggttttttggattgtacagtgtttatatgatctgaactccttatacataagaaggtgtgtatattaatccaattatggacttaaaatattttaaaagtataaatacccttatttgctgcaaagaccagtgtgtaggcatttgctttttagcaatatttttaagtgctccattttaatgccgaggaataagtcttttggcaacacaaactggtcaataataggtaatgcaggtatgttcaggttaagccaacaatgttttgcatttttatgcttattttctgtcaacactaatgaagtcaacattgcctgaatgtctgaataatgaaacacatccctgtttaaaagtatgtaactgaaaaagaaataaaaaaaaataaaagtagtttttttaaacttgctctttcccatttcctctaaagatgggtaaaataatgtcactccctaatttaagataggaattataaaaatttggtttatttagtctgttatatatgagaagcagagctaaaggaatatgcttttgttattttatgttttgttttgctttcttgaaatccagtggtaaaaagcacacactaggaaggatctaagctttctttaatataaaaaaaattatacttctctgaactgtttaatagagcaataattaaatacatcttctgataaa

SEQ ID NO: 34180 - DNA, 4462 bp, Artificial Sequence
  derived and/or modified sequence
actcggctgttttcgctgatgcgggcagcttgggggccgccgccgctaaacagacgctttcctttttaattttttttccatgtgttcacttccgggtccggcgtcgatccggatgcccgaggcagaaggatgtttgacctccggataagcgaggcgctgctgtgcattcattccgggctgcatcggtggcgacagcagaggctcgggcggcgactctccggccagcggcggcggtaggaggcaccagcggcagtgcagggaccgaatccgagcagcgctgcgttacctctctctctcgctccttcccccctacctcgctcgctcgctcgctcgctccctgcgtggctcgctttcctcctccggccgccggcgggtgtgatgtgccgccgccgctgcccccgccggcgctgacggactgggggcgccgcccgcgcccgggaccgacccctctgctcgcggccgcgcctttgagctctctatcaatatcagctcacatcattgaaaagataattttgaagacatgttttgctgaaaagacactaagaaaaattttacgaatgggatgaacatgctccagttaattgactacctactgcaatttgaatgttaacattacccatctggtacagttacctagtgatgtacctattttcacaataccctgtttcagtgtgcttgtcttgattaaagaattcaaagtggagtaccgcaaacttgatatggaaaataaaaagaaagacaaggacaaatcagatgatagaatggcacgacctagtggtcgatcgggacacaacactcgaggaactgggtcttcatcgtctggagttttaatggttggacctaactttagagttggaaaaaaaattggatgtggcaattttggagaattacgattagggaaaaatttatacacaaatgaatatgtggcaattaagttggagcccatgaaatcaagagcaccacagctacatttggaatacagattctataagcagttaggatctggagatggtatacctcaagtttactatttcggcccttgtggtaaatacaatgctatggtgctggaactgctgggacctagtttggaagacttgtttgacttgtgtgacagaacattttctcttaaaacagttctcatgatagctatacaactgatttctcgcatggaatatgtccattcaaagaacttgatatacagagatgtaaaacctgagaacttcttaataggacgaccaggaaacaaaacccagcaagttattcacattatagattttggtttggcaaaggaatatattgatccggagacaaagaaacacataccatacagagaacacaagagccttacaggaacagctagatatatgagcataaacacacatttaggaaaagaacaaagtagaagagacgatttagaagctttaggtcatatgttcatgtattttctgagaggcagtcttccttggcaaggcttaaaggctgacacattaaaggagaggtatcagaaaattggagatacaaaacgggctacaccaatagaagtgttatgtgaaaattttccagaaatggcaacatatcttcgttatgtaagaaggctagatttttttgaaaaaccagactatgactacttaagaaagctttttactgacttgtttgatcgaaaaggatatatgtttgattatgaatatgactggattggtaaacagttgcctactccagtgggtgcagttcagcaagatcctgctctgtcatcaaacagagaagcacatcaacacagagataagatgcaacaatccaaaaaccagtcggcagaccacagggcagcttgggactcccagcaggcaaatccccaccatttgagagctcaccttgcagcagacagacatggtggctcggtacaggttgtaagttctacaaatggagagttaaacacagatgaccccaccgcaggacgttcaaatgcacccatcacagcccctactgaagtagaagtgatggatgaaaccaactgccagaaagtgttgaacatgtggtgctgctgttttttcaaacgaaggaaaaggaaaaccatacagcgccacaaatgactctggacacagacagatcctggggagttacttacatgttcatctgctgtcttgtgattaaaatcatctctgtagtgaccacgtatattttcaaggactcactcttagaaacaaaaatgtcatactttcatacttcattttgtggttgtcttacattctttttctttttttttttttctctaatttaacctttatggaagctttaaagttttgtcaaaacatgagtgctttgcccatcagtgaatggaatggaccaatgaggtggtatcaatgaatatagttccatagaacattttccagaagttcttctgttgtagaaagcagtacagtatcttaagtgtcaaccagttatatacctaatctggttttttataacttctgtaagagcataatcaaacaggaattttcttttctcagtggataatacaacagagaaaacagagttgcccaaatatttaaaagaagttattccttgagaagttcatattttgtgacatctgcattgatttcagtattactgatggtactgttattcataagtcatattaacattctctccgtgaaatcatggtacagtcactgcccagaggtactgaggaaaaagcaatatgggttcggcagatggtggtggtaaaatgaatcttaaggagtgtggtaaatatgtgctccgcttttgttgcatcactatgtgaagtactgtgttgcagaagtggcaaaagcgcttatttttaaaaatgcaaaatatttgtacaatgtaactttatgcttccaaataataatgtatgttagacagcaagaaatgaatactttaaaaagtgatgtatgttggagttataaagaaatacactaaggagaggtagtaaatgtgaaccttgttgcagtgtataaggtggaagcctaaagaaatctcaccgaaacttactgctgaatgattacattctcccttaagcagaaaactttggatgtgccatgcaatggtgtctgtgtaattattttgctctttgattaaaaaaaagacccccagcaataaaaagtgggtcactctatgccctctgtgcacattagtctcttgtattcaactttgctgattctctggaattttcctactctttagcataattttgatgattgaaaaatattttggaaaggatgggtcaggtgctttgcctccatagtcttttgaagtgcctgcatatgaacaacaacaacaacaacaaaaaattctgtaaaaaaggaagcccattccacttttcaagtatgctttgttttaagccataaagacacacatgtagttttgtcacattctactagccaaaattttcaagaagggttaaaacaaagactggctagaaagataattattttgaataaatctcatattcatctttcatttatataattgttacttattcctcccatgcagtctcttcgttgtctttaagtgtgtgcctccaggcatgcttatttatttttattgtctcaaggtaacatttaagatgtatattaaagtaaagctacatttttttacttcattattgcatttacagggatttaattgtactttgtaatttatttttcttattagccaaaagtttaatgcatttttttttgatgaattaggcacccacatgaacaccacaaatcaggacattgtttatcattgttgctatgaatcctatgaatgatcttttttttattttaaagacctacacttaacctacaaaacatttgctgtataatttggtcaacagtttctatctatctgtatactgtcatgatgtcttaaactgcaggagttacatactgagtttatatttttatttgctttgagcaaggtagataaacattttggccattataatgtgaaaccacttcttctttctttacagtatttgaccaaacttgtgtgtctatgatatttgtaaatacatgcgaatatctgtatttcttatcataagcctatttagttttattctcagtagggttttttggattgtacagtgtttatatgatctgaactccttatacataagaaggtgtgtatattaatccaattatggacttaaaatattttaaaagtataaatacccttatttgctgcaaagaccagtgtgtaggcatttgctttttagcaatatttttaagtgctccattttaatgccgaggaataagtcttttggcaacacaaactggtcaataataggtaatgcaggtatgttcaggttaagccaacaatgttttgcatttttatgcttattttctgtcaacactaatgaagtcaacattgcctgaatgtctgaataatgaaacacatccctgtttaaaagtatgtaactgaaaaagaaataaaaaaaaataaaagtagtttttttaaa

SEQ ID NO: 34181 - DNA, 1368 bp, Artificial Sequence
  derived and/or modified sequence
atggagaacaagaagaaggacaaggacaagagcgacgacagaatggccagacccagcggcagaagcggccacaacaccagaggcaccggcagcagcagcagcggcgtgctgatggtgggccccaacttcagagtgggcaagaagatcggctgcggcaacttcggcgagctgagactgggcaagaacctgtacaccaacgagtacgtggccatcaagctggagcccatgaagagcagagccccccagctgcacctggagtacagattctacaagcagctgggcagcggcgacggcatcccccaggtgtactacttcggcccctgcggcaagtacaacgccatggtgctggagctgctgggccccagcctggaggacctgttcgacctgtgcgacagaaccttcagcctgaagaccgtgctgatgatcgccatccagctgatcagcagaatggagtacgtgcacagcaagaacctgatctacagagacgtgaagcccgagaacttcctgatcggcagacccggcaacaagacccagcaggtgatccacatcatcgacttcggcctggccaaggagtacatcgaccccgagaccaagaagcacatcccctacagagagcacaagagcctgaccggcaccgccagatacatgagcatcaacacccacctgggcaaggagcagagcagaagagacgacctggaggccctgggccacatgttcatgtacttcctgagaggcagcctgccctggcagggcctgaaggccgacaccctgaaggagagataccagaagatcggcgacaccaagagagccacccccatcgaggtgctgtgcgagaacttccccgagatggccacctacctgagatacgtgagaagactggacttcttcgagaagcccgactacgactacctgagaaagctgttcaccgacctgttcgacagaaagggctacatgttcgactacgagtacgactggatcggcaagcagctgcccacccccgtgggcgccgtgcagcaggaccccgccctgagcagcaacagagaggcccaccagcacagagacaagatgcagcagagcaagaaccagagcgccgaccacagagccgcctgggacagccagcaggccaacccccaccacctgagagcccacctggccgccgacagacacggcggcagcgtgcaggtggtgagcagcaccaacggcgagctgaacaccgacgaccccaccgccggcagaagcaacgcccccatcaccgcccccaccgaggtggaggtgatggacgagaccaactgccagaaggtgctgaacatgtggtgctgctgcttcttcaagagaagaaagagaaagaccatccagagacacaagtag

SEQ ID NO: 34182 - protein, 91 aa, Artificial Sequence
  derived and/or modified sequence
MGNSMKSTPAPAERPLPNPEGLDSDFLAVLSDYPSPDISPPIFRRGEKLRVISDEGGWWKAISLSTGRESYIPGICVARVYHGWLFEGLGR

SEQ ID NO: 34183 - protein, 49 aa, Artificial Sequence
  derived and/or modified sequence
MGNSMKSTPAPAERPLPNPEGLDSDFLAVLSDYPSPDISPPIFRRGEKL

SEQ ID NO: 34184 - DNA, 831 bp, Artificial Sequence
  derived and/or modified sequence
atgggcaacagcatgaagagcacccccgcccccgccgagagacccctgcccaaccccgagggcctggacagcgacttcctggccgtgctgagcgactaccccagccccgacatcagcccccccatcttcagaagaggcgagaagctgagagtgatcagcgacgagggcggctggtggaaggccatcagcctgagcaccggcagagagagctacatccccggcatctgcgtggccagagtgtaccacggctggctgttcgagggcctgggcagagacaaggccgaggagctgctgcagctgcccgacaccaaggtgggcagcttcatgatcagagagagcgagaccaagaagggcttctacagcctgagcgtgagacacagacaggtgaagcactacagaatcttcagactgcccaacaactggtactacatcagccccagactgaccttccagtgcctggaggacctggtgaaccactacagcgaggtggccgacggcctgtgctgcgtgctgaccaccccctgcctgacccagagcaccgccgcccccgccgtgagagccagcagcagccccgtgaccctgagacagaagaccgtggactggagaagagtgagcagactgcaggaggaccccgagggcaccgagaaccccctgggcgtggacgagagcctgttcagctacggcctgagagagagcatcgccagctacctgagcctgaccagcgaggacaacaccagcttcgacagaaagaagaagagcatcagcctgatgtacggcggcagcaagagaaagagcagcttcttcagcagccccccctacttcgaggactag

SEQ ID NO: 34185 - DNA, 477 bp, Artificial Sequence
  derived and/or modified sequence
atgggcaacagcatgaagagcacccccgcccccgccgagagacccctgcccaaccccgagggcctggacagcgacttcctggccgtgctgagcgactaccccagccccgacatcagcccccccatcttcagaagaggcgagaagctgagagtgatcagcgacgagggcggctggtggaaggccatcagcctgagcaccggcagagagagctacatccccggcatctgcgtggccagagtgtaccacggctggctgttcgagggcctgggcagagacaaggccgaggagctgctgcagctgcccgacaccaaggtgggcagcttcatgatcagagagagcgagaccaagaagggcttctacagcctgagcgtgagacacagacaggtgaagcactacagaatcttcagactgcccaacaactggtactacatcagccccagactgaccttccagtgcctggaggacctggtgaactag

SEQ ID NO: 34186 - DNA, 831 bp, Artificial Sequence
  derived and/or modified sequence
atgggcaactcaatgaaatctactccggctcccgctgagaggccattgccaaatccagagggactagattctgattttctggccgtgctgagcgattaccctagtcccgatatatcccctcccatctttagaaggggggaaaagctgcgcgtgattagtgacgaggggggctggtggaaggcaattagcttgtcgacaggtcgggaatcctatatccccggtatctgtgtggccagggtgtatcacggttggctgttcgagggcctcgggcgggataaggccgaggagctcctccagttgcctgacacgaaggtgggctcgttcatgatacgggaatcagaaactaaaaagggcttttattccttgtcagtccgtcaccggcaggtcaaacactacaggatattcagactgcctaacaactggtactatatctcaccacgcctaacctttcaatgccttgaggacctagtaaaccactacagcgaagtcgccgacgggctttgttgcgttctgaccactccctgccttactcaatctactgctgcacctgccgtcagggcgtcttcaagccccgtgacactacgacaaaaaacggtggactggagaagggtcagtagattgcaggaagaccctgaggggactgagaaccccctgggggtcgacgaaagtctcttttcctacggcctgcgggaatccatcgccagttatctgagcttgacatccgaggacaacactagctttgaccggaagaaaaagtccatctcactcatgtatggaggatcaaaaagaaagagctcttttttcagctctccaccctactttgaagattag

SEQ ID NO: 34187 - DNA, 477 bp, Artificial Sequence
  derived and/or modified sequence
atgggcaactctatgaaatccacccccgccccagccgagcgtccactccccaatccagaggggttagacagcgacttcctggctgtcctgtctgattacccttcaccagatatctctcctccgatctttaggcggggtgaaaaattgcgagtcataagtgacgaggggggttggtggaaagctattagcctgtccaccggccgcgaatcttatatccctggcatttgtgtggcccgtgtttatcatgggtggctattcgaaggcctcggacgggacaaggctgaggagctgctccaattaccagataccaaggtgggatctttcatgatcagggagtccgagactaagaagggcttctactccttgagtgtgcggcaccgccaggtcaaacactatcggatcttcaggcttccaaataactggtactatatctctcctaggttaacattccagtgtctagaagacttggtgaactag

SEQ ID NO: 34188 - DNA, 831 bp, Artificial Sequence
  derived and/or modified sequence
atgggcaacagcatgaagagcaccccagccccagctgagcggcccctgcccaaccctgagggcctggacagcgacttcctggccgtgctgagtgactaccccagcccagacatcagcccccccatcttccggcggggggagaagctgcgggtcatcagtgatgagggcggctggtggaaggccatcagcctgagcacaggccgggagagctacatccctggcatctgtgtggcccgggtgtaccacggctggctgtttgagggcctgggccgggacaaggccgaggagctgctgcagctgcctgacaccaaggtgggcagcttcatgatccgggagagcgagaccaagaagggcttctacagcctgtctgtgcgccaccggcaggtgaagcactaccgcatcttccggctgcccaacaactggtactacatcagcccccggctgaccttccagtgcctggaggacctggtgaaccactacagcgaggtggctgatggcctgtgctgcgtgctgaccaccccctgcctgacccagagcacagctgccccagctgtgcgggccagcagcagccctgtgaccctgcggcagaagacagtggactggaggagagtgtcccggctgcaggaggaccctgagggcacagagaaccccctgggcgtggatgagagcctcttctcctatggcctgcgggagagcatcgccagctacctgagcctgaccagcgaggacaacaccagctttgacaggaagaagaagagcatcagcctgatgtatggaggcagcaagaggaagagcagcttcttcagcagccccccctactttgaagattag

SEQ ID NO: 34189 - DNA, 477 bp, Artificial Sequence
  derived and/or modified sequence
atgggcaacagcatgaagagcaccccagccccagctgagcggcccctgcccaaccctgagggcctggacagcgacttcctggccgtgctgagtgactaccccagcccagacatcagcccccccatcttccggcggggggagaagctgcgggtcatcagtgatgagggcggctggtggaaggccatcagcctgagcacaggccgggagagctacatccctggcatctgtgtggcccgggtgtaccacggctggctgtttgagggcctgggccgggacaaggccgaggagctgctgcagctgcctgacaccaaggtgggcagcttcatgatccgggagagcgagaccaagaagggcttctacagcctgtctgtgcgccaccggcaggtgaagcactaccgcatcttccggctgcccaacaactggtactacatcagcccccggctgaccttccagtgcctggaggacctggtgaactag

SEQ ID NO: 34190 - DNA, 831 bp, Artificial Sequence
  derived and/or modified sequence
atgggcaacagcatgaagagcacccccgcccccgccgagcggcccttacctaaccctgaaggcctggactcagactttctggccgtcctttctgactatccaagtcccgatatctctccccccatattcaggcggggtgagaagttgagagtgatttccgacgaaggtggctggtggaaagcaatatccctaagcacgggaagggagagctacattccaggcatatgcgtcgccagagtgtaccatggatggctatttgaggggctaggccgcgataaagctgaagaattactccagttgcctgacactaaggtgggaagcttcatgattcgggaatctgagaccaagaagggattctacagtctgtctgtcaggcacaggcaggtgaagcactaccgcatttttcgcctgccgaataactggtactacattagtccacgactgacttttcaatgccttgaggatctcgttaatcactactccgaggtcgctgacggtctgtgttgtgtgctcactaccccatgtctgacccagagtacggccgctcccgcagttcgcgcatcctcatcaccggtaaccctgaggcagaaaacagtggactggcggcgagtgtctcgccttcaggaggacccagagggaactgaaaatcctctgggagttgacgaatccctgttctcgtatggacttcgcgagtccattgccagctacctgagccttacatctgaggataataccagttttgaccgcaagaagaaatctatttctctgatgtacggcggctctaagaggaaatctagtttttttagttcccccccttattttgaggactag

SEQ ID NO: 34191 - DNA, 477 bp, Artificial Sequence
  derived and/or modified sequence
atgggcaacagcatgaagagcacccccgcccccgccgagcggcccctgccaaaccctgaaggacttgatagcgactttcttgcggtgctgagcgattacccgagcccagacatttctcccccaatcttccgccggggggaaaagctccgtgtcatttcagatgaaggtgggtggtggaaggccatcagtctgagcacaggccgggaatcttatataccaggtatctgcgttgcgcgcgtgtatcatggctggctatttgagggactaggccgggataaggcagaggagttactgcaacttcccgatactaaggtgggatcatttatgatccgagagtcggagacaaagaaaggcttttactctctaagtgtcaggcataggcaggtaaagcattaccgcatatttagactacctaacaactggtattacatctctccgagattaacatttcagtgcctcgaggacctggttaattag

SEQ ID NO: 34192 - DNA, 831 bp, Artificial Sequence
  derived and/or modified sequence
atgggcaattctatgaaatccactcccgctcccgctgaacgtcccctcccaaatcctgaaggattggacagcgactttctcgccgtgctgagtgattacccttcccctgatattagcccccctatcttccgcaggggagagaaactgagggtgatcagcgacgaggggggatggtggaaagcaatttccttgtccacgggacgggaaagctacatcccaggtatctgcgtggctcgagtataccatggttggttgttcgaagggctcgggagggacaaggcagaagagcttcttcagcttcccgatacgaaagtgggatccttcatgattcgtgagagtgagacaaagaagggcttctacagcttgtccgtcagacaccgtcaggtaaaacattaccgaattttccggttgcctaataactggtattatatatcccctcggctgactttccagtgcttggaggatttagtcaaccattacagtgaggtcgctgacggactgtgttgcgtactgacaaccccgtgcctaacgcagtcaaccgccgctcccgcagttcgcgcttccagcagccccgtgaccctgagacagaagacagtggattggagacgggtgtcacgtctgcaggaggatccagagggtactgagaaccctctgggcgtggatgaatctcttttcagctatgggctccgcgagtccatcgcatcatacctctctctgaccagcgaggataatacctccttcgatcgcaaaaaaaagtctatttctctcatgtatggaggtagtaagagaaagagctcatttttcagcagccccccatatttcgaggactag

SEQ ID NO: 34193 - DNA, 477 bp, Artificial Sequence
  derived and/or modified sequence
atgggaaattccatgaagagcactccagcccctgccgagcggcctttgccaaaccccgaaggcttggactcagatttcctggctgtgctgagtgattacccttctcctgatattagcccgccaatcttcaggcgaggagagaaactcagagtcattagcgacgaaggaggttggtggaaggcgattagtctgtctacagggagagaatcatacatcccagggatatgtgtggccagagtctatcacgggtggttattcgaaggcctggggagggataaggctgaagagctattgcagttaccagacactaaagtgggatcattcatgattcgcgagtctgagaccaaaaaagggttctattcgttgagtgtgcggcacagacaggtgaaacactatcgtatatttaggctccctaacaattggtattatatctcacctagactcactttccaatgtctcgaggacttggtgaactag

SEQ ID NO: 34194 - protein, 276 aa, Artificial Sequence
  derived and/or modified sequence
MGNSMKSTPAPAERPLPNPEGLDSDFLAVLSDYPSPDISPPIFRRGEKLRVISDEGGWWKAISLSTGRESYIPGICVARVYHGWLFEGLGRDKAEELLQLPDTKVGSFMIRESETKKGFYSLSVRHRQVKHYRIFRLPNNWYYISPRLTFQCLEDLVNHYSEVADGLCCVLTTPCLTQSTAAPAVRASSSPVTLRQKTVDWRRVSRLQEDPEGTENPLGVDESLFSYGLRESIASYLSLTSEDNTSFDRKKKSISLMYGGSKRKSSFFSSPPYFED

SEQ ID NO: 34195 - protein, 293 aa, Artificial Sequence
  derived and/or modified sequence
MLHRLWASPAAPGKKKEMGNSMKSTPAPAERPLPNPEGLDSDFLAVLSDYPSPDISPPIFRRGEKLRVISDEGGWWKAISLSTGRESYIPGICVARVYHGWLFEGLGRDKAEELLQLPDTKVGSFMIRESETKKGFYSLSVRHRQVKHYRIFRLPNNWYYISPRLTFQCLEDLVNHYSEVADGLCCVLTTPCLTQSTAAPAVRASSSPVTLRQKTVDWRRVSRLQEDPEGTENPLGVDESLFSYGLRESIASYLSLTSEDNTSFDRKKKSISLMYGGSKRKSSFFSSPPYFED

SEQ ID NO: 34196 - protein, 14 aa, Artificial Sequence
  derived and/or modified sequence
MGNSMKSTPAPAER

SEQ ID NO: 34197 - protein, 158 aa, Artificial Sequence
  derived and/or modified sequence
MGNSMKSTPAPAERPLPNPEGLDSDFLAVLSDYPSPDISPPIFRRGEKLRVISDEGGWWKAISLSTGRESYIPGICVARVYHGWLFEGLGRDKAEELLQLPDTKVGSFMIRESETKKGFYSLSVRHRQVKHYRIFRLPNNWYYISPRLTFQCLEDLVN

SEQ ID NO: 34198 - protein, 40 aa, Artificial Sequence
  derived and/or modified sequence
MGNSMKSTPAPAERPLPNPEGLDSDFLAVLSDYPSPDISP

SEQ ID NO: 34199 - DNA, 882 bp, Artificial Sequence
  derived and/or modified sequence
atgctgcacagactgtgggccagccccgccgcccccggcaagaagaaggagatgggcaacagcatgaagagcacccccgcccccgccgagagacccctgcccaaccccgagggcctggacagcgacttcctggccgtgctgagcgactaccccagccccgacatcagcccccccatcttcagaagaggcgagaagctgagagtgatcagcgacgagggcggctggtggaaggccatcagcctgagcaccggcagagagagctacatccccggcatctgcgtggccagagtgtaccacggctggctgttcgagggcctgggcagagacaaggccgaggagctgctgcagctgcccgacaccaaggtgggcagcttcatgatcagagagagcgagaccaagaagggcttctacagcctgagcgtgagacacagacaggtgaagcactacagaatcttcagactgcccaacaactggtactacatcagccccagactgaccttccagtgcctggaggacctggtgaaccactacagcgaggtggccgacggcctgtgctgcgtgctgaccaccccctgcctgacccagagcaccgccgcccccgccgtgagagccagcagcagccccgtgaccctgagacagaagaccgtggactggagaagagtgagcagactgcaggaggaccccgagggcaccgagaaccccctgggcgtggacgagagcctgttcagctacggcctgagagagagcatcgccagctacctgagcctgaccagcgaggacaacaccagcttcgacagaaagaagaagagcatcagcctgatgtacggcggcagcaagagaaagagcagcttcttcagcagccccccctacttcgaggactag

SEQ ID NO: 34200 - DNA, 882 bp, Artificial Sequence
  derived and/or modified sequence
atgctccacagactctgggcctcacccgctgcccctggtaaaaaaaaggagatgggcaactcaatgaagtctacacccgcccccgcggaacgacctctgccaaatccggaaggattggatagtgactttctagccgtcctctccgattatccttctcccgacatcagccctccaatttttcgccgtggagaaaagctgcgcgttatctccgacgagggtgggtggtggaaagctatctctcttagcaccgggagagaaagctacattcccgggatttgcgtggcccgggtttatcacgggtggctcttcgagggacttggaagagacaaggcagaggaactcctgcagctgcctgataccaaggtgggaagctttatgattagagaatctgaaaccaaaaagggcttttacagtttgtccgtacggcacagacaggtgaaacactaccgtatatttcggctgcccaacaattggtattacatctctcccagactaacttttcagtgcttggaggatctggtgaatcactattctgaggttgctgacggcctttgctgcgtgcttacgacaccctgccttacccaatctacagctgcgccggccgtcagggccagctcaagccccgtgaccctccgtcagaagacagtcgactggaggcgcgtgagccgcctgcaggaggaccctgagggtacggaaaaccccctaggcgttgacgagagtctcttcagttacggcttgcgggaaagtattgcttcgtacctgtccctgactagtgaggataatacatcctttgatcggaaaaaaaaaagcatttccctcatgtacggcggaagcaaaagaaagtccagcttttttagctcacccccctatttcgaagactag

SEQ ID NO: 34201 - DNA, 882 bp, Artificial Sequence
  derived and/or modified sequence
atgctgcaccggctgtgggccagccctgctgcccctgggaagaagaaggagatgggcaacagcatgaagagcaccccagccccagctgagcggcccctgcccaaccctgagggcctggacagcgacttcctggccgtgctgagtgactaccccagcccagacatcagcccccccatcttcagaagaggagagaagctgcgggtcatcagtgatgaaggaggctggtggaaggccatcagcctgagcacaggccgggagagctacatccctggcatctgtgtggcccgggtgtaccacggctggctgtttgagggcctgggccgggacaaggccgaggagctgctgcagctgcctgacaccaaggtgggcagcttcatgatccgggagagcgagaccaagaagggcttctacagcctgtctgtgcgccaccggcaggtgaagcactaccgcatcttccggctgcccaacaactggtactacatcagcccccggctgaccttccagtgcctggaggacctggtgaaccactacagcgaggtggctgatggcctgtgctgcgtgctgaccaccccctgcctgacccagagcacagctgccccagctgtgcgggccagcagcagccctgtgaccctgcggcagaagacagtggactggaggagagtgtcccggctgcaggaggaccctgagggcacagagaaccccctgggcgtggatgagagcctcttctcctatggcctgcgggagagcatcgccagctacctgagcctgaccagcgaggacaacaccagctttgacaggaagaagaagagcatcagcctgatgtatggaggcagcaagaggaagagcagcttcttcagcagccccccctactttgaggactag

SEQ ID NO: 34202 - DNA, 882 bp, Artificial Sequence
  derived and/or modified sequence
atgctgcaccggctgtgggccagccccgccgcccccggcaagaagaaagaaatgggcaacagcatgaagtccacccccgcacccgctgagcgcccgttgccaaaccctgaggggctggactccgattttctggctgtactcagcgactatcccagtcctgatatttctccacctatctttcgccgtggcgagaagctgcgggtaatcagcgatgagggcggctggtggaaggcgatctcactgtcaacaggccgggagtcatacatccctgggatttgcgtggcccgggtgtatcacggatggttgtttgaggggctcggacgagataaggccgaagagttgctgcagctgccagacaccaaggttggcagtttcatgatacgcgagagcgagacaaagaaagggttttactcactgagcgtgcgacaccgccaggttaagcattaccgcatttttagattgcctaacaactggtactatatctctccaagactgacctttcaatgtctcgaggacctcgtgaatcactatagcgaagtcgcagatggcttgtgctgcgtactgaccaccccatgtctaacccaaagtactgcggctcccgctgtgagagcctccagtagtcccgtgaccttgagacagaagactgtcgattggcgtagggtctctcgcctgcaggaggaccccgaaggaaccgagaacccactcggtgttgatgagagcctttttagctacggattgcgggaatccatcgctagctacctatccctaaccagtgaggataatacatcctttgaccgaaagaaaaagagcatctcattaatgtacggcggaagcaaacgcaaatcatcttttttttcttctccaccttactttgaggactag

SEQ ID NO: 34203 - DNA, 882 bp, Artificial Sequence
  derived and/or modified sequence
atgctgcatcggctttgggcgtcccccgctgcgcctggcaaaaaaaaagaaatgggcaattcaatgaaatccacccccgctcccgctgagcgtcctctgcctaaccctgagggactggactctgacttcctggcagtcctgtccgactatccaagtcctgacatttcccccccaatttttagacgcggtgaaaaactgagggtgatcagtgatgaaggaggctggtggaaggccattagtctatccaccggcagggaatcctacatcccgggaatctgtgtggccagggtgtaccacggatggctctttgaagggttggggagggacaaggcggaggaactgcttcagctgccagacacaaaagttggcagtttcatgatccgtgaatctgaaaccaagaagggcttctatagcctaagcgtccgtcacagacaagtaaaacactaccggatattcagattgcctaacaactggtactatatttccccacggctcacatttcagtgcctggaagacctggttaatcactacagcgaggtcgctgacgggttatgctgcgtactgaccactccgtgcctgacccagtcaaccgcagcacccgcagttcgggcatcctccagcccagtgacgctacgccagaagacagtggattggcgacgggtgagcagactgcaggaggaccccgagggcactgagaaccccctgggcgtggatgagagcctcttttcatatggacttcgggagtcaattgcttcgtatctttctctgacatcggaagataatacctctttcgacagaaaaaaaaaatctatatccctcatgtatgggggttccaagcgcaagtcaagttttttctccagtcctccctattttgaagactag

SEQ ID NO: 34204 - DNA, 3447 bp, Artificial Sequence
  derived and/or modified sequence
cacacacacactggaaactcctgcatactcctcttactataatctgtcaccaaagactggatattcctgtgctggggctcgtgccagcgcctcgggctgccaggtgctgctttccaactcccacatgggctgccctccccctactgctacccacagggcccccactccacctgctcccagacgaggccaactcctggccaagcttaggggcacagcggaggcgctctgtttctgatttttctcgccttccttggagatgcctgtgcttggaagggaaggcagaacattgcatcttggaacaaatctgcttttgatcatgcaaatgaatgcctggataatgtaggcagactgtcaatttcaccagttagaaagaaagagaaaagggggagaaattccccatgacagcgactgatgaagaatttcaatagaaagctgctacttcagaaaataagatcatttgctgcgaatggagaacatctcaggcagccctgatgctccaccgtccttgcagagagaagcttgctcagagtggttactgaaaacaggaacctgcccttctgcaagccctgtgccttcctcgttcctagcagaggaagtatgcggccagtttagcaactgcagttcttctgtgtagcatgggctgcttctccacaaccgcgagaagcccggctgcctgtttattctggagcagcagcagttgacagacggagaggcagtgactctgcacccagcaatccctctgcagacagctcccacaggagtcatgcccagtgtgtgaaggctctgggcatcaccagcggccccagggaaaaagaaagaaatgggaaacagcatgaaatccacccctgcgcctgccgagaggcccctgcccaacccggagggactggatagcgacttccttgccgtgctaagtgactacccgtctcctgacatcagccccccgatattccgccgaggggagaaactgcgtgtgatttctgatgaagggggctggtggaaagctatttctcttagcactggtcgagagagttacatccctggaatatgtgtggccagagtttaccatggctggctgtttgagggcctgggcagagacaaggccgaggagctgctgcagctgccagacacaaaggtcggctccttcatgatcagagagagtgagaccaagaaagggttttactcactgtcggtgagacacaggcaggtaaagcattaccgcattttccgtctgcccaacaactggtactacatttccccgaggctcaccttccagtgcctggaggacctggtgaaccactattctgaggtggctgatggcctgtgctgtgtgctcaccacgccctgcctgacacaaagcacggctgccccagcagtgagggcctccagctcacctgtcaccttgcgtcagaagactgtggactggaggagagtgtccagactgcaggaggaccccgagggaacagagaacccgcttggggtagacgagtcccttttcagctatggccttcgagagagcattgcctcttacctgtccctgaccagtgaggacaacacctcctttgatcgaaagaagaaaagcatctccctgatgtatggtggcagcaagagaaagagctcattcttctcatcaccaccttactttgaggactagccaagaacagacacaatggttcatgcccaaaaggaacagaagttccaactattgcctgggatcttgcgaaaagcgaggttccctgatccctgggagcctcacgtattttagaagccaagagaagccacatggagactcaaattcgcatcttctctatccacatcatgaccaaaggaacccctccctggtgtctgatcagggctgtggcatcacgaaacattggatcatgacatgtcgggcgatgcttggaagagcccagcatgtatgtatgcacacattgtgtgtgtgggaaggacaaagccactctcacaagaaagggcaccaggactgctctccaaggaactggacctgtccagacagttacactccaaggtcattggagagaacttctgtatgggcaagcctgagagggagaggaaacaaaagctgtgtcctggcagaaggtctgggtttgcagatgggtgccctgaatggaactactttaactaatccatagggacttctggtatgctttcctctctttttaaaggaacttcgtgacactaaacattagcccaaaggacttcttagccttcaattgggagatacctttggtctgctcctgcaccaaagccatatgggtggaagtcagttggcctccctggttctgcagagggccagaagaatgagagagaggaagactgctggcagggaaatcgaggaggcgagactagaactgcaccagcttccctgatgtctgcagccatggctttgcagcgcagacagagcttctctgggatgctgggattcttgcctgtatgaatgcatcaagtattcatttattgcccgaataggcattgcattaagtcctctgtaaggtgtcaggcaagccaaaaaaaaaaaaaagatgcgtaagtcctaacccccaacagaggtgttcacagtgtagacagggaaaaaatgtataaacaaatgtgtaaaaagagaaatcagctcatggcttaggatggaattagagacaggtgagggacactcaggagctcattttccagctgctcttcagagtggaagggctggctggatcgggtaggtaagaatagctggattttttagaaaagaaatggatacagtctaaagaattaactcacccggtactttattctaagaagggtctggcatccatatgaggaaaaatgctcagctccaggaaagatggggagtccaagtggattaatgatgtcatgcataattttaagagacaagggagaaaacacaatgtatagccagagaaggagaagctcccatccaaatcctactaggaagagagtgggctgcagatgaatctgtgactcatgtttccctgtttcaaagggatcctggggaaggaggggaacatgcttgcagtatctctccctgtctgtctgctcacataagcattccgtccatctgagctcatcgtgctactggtatgtgtatgtgcagttacacagttttctgtatcatagattctagtgtgtttatacaaggagacatctgtggtttccccaaccgttccaaaaggctatttcaaaggaaccagccaacgtatgagaaatgaatgtaacactgtggacattgacttcccgcataaggcagggtgaccccctgaactccagatgtctgcacagtatcttatgtgttgttttccgttgtgacgaatgtgattggaacatttggggagcacccagagggatttctcagtgggaagcattacactttgctaaatcatgtatttattcctgattaaaacaaacctaataaatatttaacccttggca

SEQ ID NO: 34205 - DNA, 2102 bp, Artificial Sequence
  derived and/or modified sequence
actgctacccacagggcccccactccacctgctcccagacgaggccaactcctggccaagcttaggggcacagcggaggcgctctgtttctgatttttctcgccttccttggagatgcctgtgcttggaagggaaggcagaacattgcatcttggaacaaatctgcttttgatcatgcaaatgaatgcctggataatgtaggcagactgtcaatttcaccagttagaaagaaagagaaaagggggagaaattccccatgacagcgactgatgaagaatttcaatagaaagctgctacttcagaaaataagatcatttgctgcgaatggagaacatctcaggcagccctgatgctccaccggctctgggcatcaccagcggccccagggaaaaagaaagaaatgggaaacagcatgaaatccacccctgcgcctgccgagaggcccctgcccaacccggagggactggatagcgacttccttgccgtgctaagtgactacccgtctcctgacatcagccccccgatattccgccgaggggagaaactgcgtgtgatttctgatgaagggggctggtggaaagctatttctcttagcactggtcgagagagttacatccctggaatatgtgtggccagagtttaccatggctggctgtttgagggcctgggcagagacaaggccgaggagctgctgcagctgccagacacaaaggtcggctccttcatgatcagagagagtgagaccaagaaagggttttactcactgtcggtgagacacaggcaggtaaagcattaccgcattttccgtctgcccaacaactggtactacatttccccgaggctcaccttccagtgcctggaggacctggtgaaccactattctgaggtggctgatggcctgtgctgtgtgctcaccacgccctgcctgacacaaagcacggctgccccagcagtgagggcctccagctcacctgtcaccttgcgtcagaagactgtggactggaggagagtgtccagactgcaggaggaccccgagggaacagagaacccgcttggggtagacgagtcccttttcagctatggccttcgagagagcattgcctcttacctgtccctgaccagtgaggacaacacctcctttgatcgaaagaagaaaagcatctccctgatgtatggtggcagcaagagaaagagctcattcttctcatcaccaccttactttgaggactagccaagaacagacacaatggttcatgcccaaaaggaacagaagttccaactattgcctgggatcttgcgaaaagcgaggttccctgatccctgggagcctcacgtattttagaagccaagagaagccacatggagactcaaattcgcatcttctctatccacatcatgaccaaaggaacccctccctggtgtctgatcagggctgtggcatcacgaaacattggatcatgacatgtcgggcgatgcttggaagagcccagcatgtatgtatgcacacattgtgtgtgtgggaaggacaaagccactctcacaagaaagggcaccaggactgctctccaaggaactggacctgtccagacagttacactccaaggtcattggagagaacttctgtatgggcaagcctgagagggagaggaaacaaaagctgtgtcctggcagaaggtctgggtttgcagatgggtgccctgaatggaactactttaactaatccatagggacttctggtatgctttcctctctttttaaaggaacttcgtgacactaaacattagcccaaaggacttcttagccttcaattgggagatacctttggtctgctcctgcaccaaagccatatgggtggaagtcagttggcctccctggttctgcagagggccagaagaatgagagagaggaagactgctggcagggaaatcgaggaggcgagactagaactgcaccagcttccctgatgtctgcagccatggctttgcagcgcagacagagcttctctgggatgctgggattcttgcctgtatgaatgcatcaagtattcatttattgcccgaataggcattgcattaagtcctctgtaaggtgtcaggcaagcc

SEQ ID NO: 34206 - DNA, 594 bp, Artificial Sequence
  derived and/or modified sequence
gtcttcagagggacttgatggatcctgtacccaccctccgtctttggtctgaagaaaatgggtgggtctctgctggtggctctgggcatcaccagcggccccagggaaaaagaaagaaatgggaaacagcatgaaatccacccctgcgcctgccgagaggcccctgcccaacccggagggactggatagcgacttccttgccgtgctaagtgactacccgtctcctgacatcagccccccgatattccgccgaggggagaaactgcgtgtgatttctgatgaagggggctggtggaaagctatttctcttagcactggtcgagagagttacatccctggaatatgtgtggccagagtttaccatggctggctgtttgagggcctgggcagagacaaggccgaggagctgctgcagctgccagacacaaaggtcggctccttcatgatcagagagagtgagaccaagaaagggttttactcactgtcggtgagacacaggcaggtaaagcattaccgcattttccgtctgcccaacaactggtactacatttccccgaggctcaccttccagtgcctggaggacctggtgaacca

SEQ ID NO: 34207 - protein, 116 aa, Artificial Sequence
  derived and/or modified sequence
MLSCRLQCALAALSIVLALGCVTGAPSDPRLRQFLQKSLAAAAGKQELAKYFLAELLSEPNQTENDALEPEDLSQAAEQDEMRLELQRSANSNPAMAPRERKAGCKNFFWKTFTSC

SEQ ID NO: 34208 - protein, 596 aa, Artificial Sequence
  derived and/or modified sequence
MEPELAAQKQPRPRRRSRRASGLSTEGATGPSADTSGSELDGRCSLRRGSSFTFLTPGPNWDFTLKRKRREKDDDVVSLSSLDLKEPSNKRVRPLARVTSLANLISPVRNGAVRRFGQTIQSFTLRGDHRSPASAQKFSSRSTVPTPAKRRSSALWSEMLDITMKESLTTREIRRQEAIYEMSRGEQDLIEDLKLARKAYHDPMLKLSIMSEEELTHIFGDLDSYIPLHEDLLTRIGEATKPDGTVEQIGHILVSWLPRLNAYRGYCSNQLAAKALLDQKKQDPRVQDFLQRCLESPFSRKLDLWSFLDIPRSRLVKYPLLLKEILKHTPKEHPDVQLLEDAILIIQGVLSDINLKKGESECQYYIDKLEYLDEKQRDPRIEASKVLLCHGELRSKSGHKLYIFLFQDILVLTRPVTRNERHSYQVYRQPIPVQELVLEDLQDGDVRMGGSFRGAFSNSEKAKNIFRIRFHDPSPAQSHTLQANDVFHKQQWFNCIRAAIAPFQSAGSPPELQGLPELHEECEGNHPSARKLTAQRRASTVSSVTQVEVDENAYRCGSGMQMAEDSKSLKTHQTQPGIRRARDKALSGGKRKETLV

SEQ ID NO: 34209 - protein, 160 aa, Artificial Sequence
  derived and/or modified sequence
MVAHDETGGLLPIKRTIRVLDVNNQSFREQEELTHIFGDLDSYIPLHEDLLTRIGEATKPDGTVEQIGHILVSWLPRLNAYRGYCSNQLAAKALLDQKKQDPRVQDFLQRCLESPFSRKLDLWSFLDIPRSRLVKYPLLLKEILKHTPKEHPDVQLLEDA

SEQ ID NO: 34210 - DNA, 1791 bp, Artificial Sequence
  derived and/or modified sequence
atggagccggagctggccgcccagaagcagccacggcctcggaggcggagccgacgcgcctccgggctgagcacagagggagccactgggccaagtgccgatacgtcaggttctgagctggatggaagatgttcgttgagacggggctccagcttcacattcctcacgccagggccaaattgggacttcactctgaagaggaagagacgggaaaaggatgatgatgtcgtctccctgagctctctggacctgaaggagccatctaataagcgagtgcgcccactggcgcgggttacttctctggcgaatctgatcagtccagttaggaacggtgccgtgcgacgtttcggacagacaattcagtcttttaccctgagaggagatcatcgatcacctgcctccgctcagaagttttcctctcgaagcacagtaccaactcctgccaagcgacggtctagcgccctctggtcagagatgttggatatcacaatgaaagaaagcctaacaacccgggagattcgccgccaggaagcaatttatgaaatgtctaggggggagcaggatctcatcgaggatctgaagctcgcccgcaaagcctaccacgaccccatgctcaaactcagcataatgtcagaagaggagctcacacacatctttggcgacctggacagttacatccctttgcacgaagacttactgactagaattggtgaagcaactaagccagatggtactgtcgagcagattggtcacatcctggtctcctggttgcctaggctcaatgcgtaccggggttactgttccaaccagctggctgcaaaggcgctccttgatcagaagaagcaagatccccgggttcaggacttcctgcagcggtgtttggagtctcctttttccagaaaattggatctgtggtcttttcttgacattcctcgctctagactggtgaagtatcccttgctgctcaaggaaatactaaagcataccccaaaagagcatccagatgtccagttacttgaggatgccatcttgattatccagggtgtcttatcagatatcaaccttaagaaaggtgaaagtgaatgtcaatattacatcgacaagctggagtaccttgatgaaaaacagagagatcccagaattgaggcgagcaaagtgctcctgtgccacggggagcttcggtctaaaagcggacataagctgtacattttcctctttcaggacatcctggttctgacgcgccccgtcaccagaaacgagcggcactcctaccaagtgtatcgtcagcctattccagtacaggagctggttctggaggacctgcaggacggagatgtccggatgggcggttctttccgtggcgcgtttagcaatagcgagaaagccaaaaatatttttcgaatcaggttccatgacccaagccctgcccagtcccacacattgcaggctaacgacgttttccataagcaacagtggttcaactgtattcgggctgcaatcgcaccatttcagagcgctggatcgcccccggagctgcaaggcctgcccgaactccacgaggagtgcgaaggcaaccatcccagcgcaagaaaactgaccgcccagcggcgagcaagtacagtatcaagtgttacacaggtggaagtggacgagaacgcctatcggtgcggcagcggcatgcagatggcagaggattcaaaatctctgaaaactcaccagacacagcctggcatccgcagagcccgcgataaagccttatccgggggaaaaagaaaggaaacgttggtttag

SEQ ID NO: 34211 - DNA, 1791 bp, Artificial Sequence
  derived and/or modified sequence
atggagcctgagctggccgcccagaagcagccccggcccaggagaagaagccggcgggccagcggcctgagcacagaaggagccaccggccccagcgctgacaccagcggcagcgagctggatggccgctgcagcctgcggcggggcagcagcttcaccttcctgaccccaggccccaactgggacttcaccctgaagaggaagagaagagagaaggatgatgatgtggtgtccctgagcagcctggacctgaaggagcccagcaacaagagggtgcggcccctggcccgggtgaccagcctggccaacctgatcagccctgtgagaaatggagctgtgcggcgcttcggccagaccatccagagcttcaccctgcggggggaccacaggagccctgccagcgcccagaagttcagcagccgcagcacagtgcccaccccagccaagaggaggagcagcgccctgtggagcgagatgctggacatcaccatgaaggagagcctgaccacccgggagatccggcggcaggaggccatctatgagatgagcagaggagagcaggacctgattgaggacctgaagctggccaggaaggcctaccatgaccccatgctgaagctgagcatcatgtctgaggaggagctgacccacatctttggagacctggacagctacatccccctgcacgaggacctgctgacccgcatcggggaggccaccaagccagatggcaccgtggagcagatcggccacatcctggtgtcctggctgccccggctgaatgcctaccggggctactgcagcaaccagctggccgccaaggccctgctggaccagaagaagcaggacccccgggtgcaggacttcctgcagcgctgcctggagagccccttcagcaggaagctggacctgtggagcttcctggacatccccaggagccggctggtgaagtaccccctgctgctgaaggagatcctgaagcacacccccaaggagcacccagatgtgcagctgctggaggatgccatcctgatcatccagggcgtgctgagtgacatcaacctgaagaagggggagagcgagtgccagtactacatcgacaagctggagtacctggatgagaagcagagggaccccagaattgaggccagcaaggtgctgctgtgccacggggagctgcggagcaagagcggccacaagctgtacatcttcctgttccaggacatcctggtgctgaccaggcctgtgaccagaaatgaaagacacagctaccaggtgtaccggcagcccatccctgtgcaggagctggtgctggaggacctgcaggatggagatgtgaggatgggcggcagcttccggggggccttcagcaacagcgagaaggccaagaacatcttccgcatccgcttccatgaccccagccctgcccagagccacaccctgcaggccaatgatgtgttccacaagcagcagtggttcaactgcatccgggccgccatcgcccccttccagagcgctggcagccccccagagctgcagggcctgcctgagctgcatgaagaatgtgagggcaaccaccccagcgccaggaagctgacagcccagaggcgggccagcacagtgtcctctgtgacccaggtggaggtggatgaaaatgcctaccgctgtggcagcggcatgcagatggccgaggacagcaagagcctgaagacccaccagacccagcccggcatcagaagagcccgggacaaggccctgagcggcggcaagaggaaggagaccctggtgtag

SEQ ID NO: 34212 - DNA, 1791 bp, Artificial Sequence
  derived and/or modified sequence
atggagcccgagctggccgcccagaagcagccccggccccggcggagatctaggagggccagcggactgtccactgagggtgctaccggtccctccgctgatacatcaggctctgagttagatggccgatgctcacttcgcagaggctctagcttcacgttcttgacccctggccccaactgggacttcacattgaagaggaagcgtagggagaaagacgatgatgtcgtttccctgagctcgctggatttgaaggagccttctaacaagcgtgtccggcctcttgcacgtgtgacctctctggcaaatctgatctcaccagtccggaacggagccgtgcgtcgctttgggcagacaatacagagtttcaccctgcgcggcgaccaccgtagccctgcaagtgcccagaaattttcctctcgatctaccgttcccactcccgccaaaagaaggagtagcgcgctttggtccgaaatgctggacatcacaatgaaggaaagcctgaccactcgtgaaatacggaggcaggaggccatctacgagatgagcaggggggaacaggatctgatcgaagatctgaagctagctaggaaggcttatcacgaccccatgctaaaactaagcattatgagcgaggaagagcttacacacatcttcggcgacctcgatagttatatccctctgcatgaggacctcctgactagaataggtgaggcaaccaagcctgacgggacggtggaacaaattggccacattctggtcagttggttacctcggctgaatgcatatcgcggttactgctcgaatcagctggctgcaaaggccctactcgatcagaagaaacaggacccacgggtgcaggacttcctgcagcgatgcctggagagcccttttagtcggaaactggacctgtggtcattcctcgatatccccaggtcccgattggtgaaatatccactgctgctcaaggagatattgaaacacacccccaaagagcaccctgacgtgcagctcctggaggacgcgattcttatcatccaaggtgtgttgtccgatatcaacctgaagaaaggggagagtgagtgccagtattacattgataaattagaatatctggatgagaagcagagggatcctagaatcgaagcatctaaggtgctgttgtgccatggggaactgcggtctaagagtggccacaaactttacatcttcctgttccaggacatccttgtgcttacacgccccgtgactaggaacgagcggcattcttaccaggtgtatagacagcccattcccgtgcaggaactggttctcgaggaccttcaggatggagacgtcagaatgggcgggagttttaggggagcattctccaacagtgaaaaggcaaagaacatcttcaggattcgctttcacgaccccagccctgcccaatcccatacactgcaagctaatgacgtttttcacaaacagcagtggtttaattgcatccgggccgctatcgcaccatttcaatcggctggttccccccctgagttgcaaggtctacccgaactgcacgaggagtgcgaaggtaaccacccttcagcgagaaaattaacagcgcagcggagagcgtctaccgtctcttccgtaacccaggtggaggttgacgagaatgcctatcggtgtggatcagggatgcaaatggccgaagactctaaatcactaaagacccatcagacacagcccggtatcaggagagctagggacaaggctttgtccggcggaaaacgcaaggagactctggtgtag

SEQ ID NO: 34213 - DNA, 3402 bp, Artificial Sequence
  derived and/or modified sequence
attttcaaatccccggatgacggcggtggcggctgcagtccgctgacaggcgctttctgcctggcagaggctggcgggcatcgtgcccgtccctgccggtctcccgggcacccggccaccgccccaccccctcctccgtgccatggagcccgagctggcggctcagaagcagcctcgaccgcggaggcgaagccgccgggcctctgggctcagcacggagggagcgacggggccttcggccgacacctccgggtcggagctggacgggagatgttcccttcggagaggcagctccttcacattcttaacacctggccccaactgggacttcactttgaaaagaaaacgcagagagaaagatgatgatgttgtaagccttagcagccttgatctgaaggagccaagcaataaaagagttcgacctctggctcgtgtcacgtccttggcaaatttaatctctcctgtaagaaatggagctgtcagacgttttggtcaaacaatacagtcatttacccttcgtggtgaccacagatccccagcctctgcccagaagttttctagcaggtcaacagtcccaacacccgccaagagaaggagcagtgcactgtggtcagagatgctggacatcaccatgaaggagtctctcaccaccagggagatcagacggcaggaggcaatatatgaaatgtcccgaggtgaacaggatttaattgaggatctcaaacttgcaagaaaggcctatcatgaccccatgttaaagttgtccatcatgtcagaagaggaactcacacatatatttggtgatctggactcttacatacctctgcatgaagatttgttgacaagaataggagaagcaaccaagcctgatggaacagtggagcagattggtcacattctcgtgagctggttaccgcgcttgaatgcctacagaggttactgtagtaaccagctggcagccaaagctcttcttgatcaaaagaaacaggatccaagagtccaagacttcctccagcgatgtctcgagtctcccttcagtcgaaaactagatctttggagtttcctagatatccctcgaagtcgcctagtcaaataccctttactgttaaaagaaattcttaaacacactccaaaagagcaccctgatgttcagcttctggaggatgctatattgataatacagggagtcctctctgatatcaacttgaagaaaggtgaatccgagtgccagtattacatcgacaagctggagtacctggatgaaaagcagagggaccccagaatcgaagcgagcaaagtgctgctgtgccatggggagctgcggagcaagagtggacataaactttacattttcctgtttcaagacatcttggttctgactcggcccgtcacacggaacgaacggcactcttaccaggtttaccggcagccaatcccagtccaagagctagtcctagaagacctgcaggatggagatgtgagaatgggaggctcctttcgaggagctttcagtaactcagagaaagctaaaaatatctttagaattcgcttccatgacccctctccagcccagtctcacactctgcaagccaatgacgtgttccacaagcagcagtggttcaactgtattcgagcggccattgcccccttccagtcggcaggcagtccacctgagctgcagggcctgccggagctgcacgaagagtgtgaggggaaccacccctctgcgaggaaactcacagcccagaggagggcatccacagtttccagtgttactcaggtagaagttgatgaaaacgcttacagatgtggctctggcatgcagatggcagaggacagcaagagcttaaagacacaccagacacagcccggcatccgaagagcgagggacaaagccctttctggtggcaaacggaaagagactttggtgtagagaaggctctgtgtgttaactgatgggagagactgtttgtttataaatgtgtacagttttgttttctcgtaaggggagcatcatagggttactttataccagttgtaacattttcattgtttttggttgttcttttttctttttttaatggcagctaaagatatacagattactgttaaattgcagtccttttttttttaaagatattttcttgaattatttagaacatggtaagcctggtattttttaatcaaacaaaatatttatgaaatgggttttctcttaattctggattcatcatggctttctaataccaattgtaatatttacaatattcaccaaaacttagaattttgcaaatgctggaattctgccagtgtttctttgctaagccttgcatgcaaaatttgaaattttaacattggcacccaaaacctacatggaatgtatgtctggagtatttcaaactttacattgaaacataatttccttggaaaacaaaccataagcctgaggaggtttttatcaactggaatgctttatattagtttgtttttcactgtacattcctcattttacattcatttaacctgccgattatttaatttttttattgtaaagtagtttttagcatttgcttttatttttttactttgatgccttttcaaattggcatgtctttaaagtatttttcttcctgattaaaaatgtgtgtgtatgtgtgtgtgtgtgtgtatatatatatatatttttaaatcacattaattttaccaagtgaaaccaagccatactgtttttgagccaattaagaaaattgccatttttaaagtgtagcatttcagggtaaagacccatgaaatggcttgatgtattctagactactgaaagaaaaccacttcaaagattttgttgaaagttttagtgttgtctgaaatgcaagagggaaggtgattggtagtgagttaaaagaaaaagagaggaaaagagagtagttttgtcttcaagtaaaatgtctggttgtgccagacatttcacaagtgtgaaaggagataggagaagctcaacttgagggcgtgtagtaagttgtagaaggctcgaggggacgtggacttatttgccttggtttgcaatacctgcaaataatgagtttgaaaagaaacaatgaaatgtgttaaaaatttgaccatattagataaattttcgtggatttagtcataagatggaaaaagactggtgaatcttttattacaaaatgtttctgttaaaatgggatcatcatctttgaaaggggggaggaggagtaaaagcccgattataatggtgatcaattcaagtcagtgttgactattctgtgaaatatatttggccagtggaaatgataatcagaaaagactgtaaatagatccatccaaatgatttctctgtacaaatgaatgatactattaaaaaaaaaaaaagcacacacataa

SEQ ID NO: 34214 - DNA, 2016 bp, Artificial Sequence
  derived and/or modified sequence
gatttgttcagaaaataatatgttcccttcggagaggcagctccttcacattcttaacacctggccccaactgggacttcactttgaaaagaaaacgcagagagaaagatgatgatgttgtaagccttagcagccttgatctgaaggagccaagcaataaaagagttcgacctctggctcgtgtcacgtccttggcaaatttaatctctcctgtaagaaatggagctgtcagacgttttggtcaaacaatacagtcatttacccttcgtggtgaccacagatccccagcctctgcccagaagttttctagcaggtcaacagtcccaacacccgccaagagaaggagcagtgcactgtggtcagagatgctggacatcaccatgaaggagtctctcaccaccagggagatcagacggcaggaggaatgacctctgatgtttgctggatgtttttaggcaatatatgaaatgtcccgaggtgaacaggatttaattgaggatctcaaacttgcaagaaaggcctatcatgaccccatgttaaagttgtccatcatgtcagaagaggaactcacacatatatttggtgatctggactcttacatacctctgcatgaagatttgttgacaagaataggagaagcaaccaagcctgatggaacagtggagcagattggtcacattctcgtgagctggttaccgcgcttgaatgcctacagaggttactgtagtaaccagctggcagccaaagctcttcttgatcaaaagaaacaggatccaagagtccaagacttcctccagcgatgtctcgagtctcccttcagtcgaaaactagatctttggagtttcctagatatccctcgaagtcgcctagtcaaataccctttactgttaaaagaaattcttaaacacactccaaaagagcaccctgatgttcagcttctggaggatgctatattgataatacagggagtcctctctgatatcaacttgaagaaaggtgaatccgagtgccagtattacatcgacaagctggagtacctggatgaaaagcagagggaccccagaatcgaagcgagcaaagtgctgctgtgccatggggagctgcggagcaagagtggacataaactttacattttcctgtttcaagacatcttggttctgactcggcccgtcacacggaacgaacggcactcttaccaggtttaccggcagccaatcccagtccaagagctagtcctagaagacctgcaggatggagatgtgagaatgggaggctcctttcgaggagctttcagtaactcagagaaagctaaaaatatctttagaattcgcttccatgacccctctccagcccagtctcacactctgcaagccaatgacgtgttccacaagcagcagtggttcaactgtattcgagcggccattgcccccttccagtcggcaggcagtccacctgagctgcagggcctgccggagctgcacgaagagtgtgaggggaaccacccctctgcgaggaaactcacagcccagaggagggcatccacagtttccagtgttactcaggtagaagttgatgaaaacgcttacagatgtggctctggcatgcagatggcagaggacagcaagagcttaaagacacaccagacacagcccggcatccgaagagcgagggacaaagccctttctggtggcaaacggaaagagactttggtgtagagaaggctctgtgtgttaactgatgggagagactgtttgtttataaatgtgtacagttttgttttctcgtaaggggagcatcatagggttactttataccagttgtaacattttcattgtttttggttgttcttttttctttttttaatggcagctaaagatatacagattactgttaaattgcagtccttttttttttaaagatattttcttgaattatttagaacatggtaagcctggtattttttaatcaaacaaaatatttatgaaatgggttttctcttaattctggattcatcat

SEQ ID NO: 34215 - DNA, 1791 bp, Artificial Sequence
  derived and/or modified sequence
atggagccagagttggccgcacaaaagcaacccaggccccgtcggaggtctcgcagggccagcgggcttagcaccgagggagccactggccctagcgccgacacatctggcagtgaattggatggtagatgcagtcttcgtcggggatcctcttttacctttctgacgcctgggcctaactgggacttcacactaaaacggaaacggcgagaaaaggatgatgacgtggtgtccctgtcttctctagatctgaaagagccttccaataagcgcgtgaggccactggccagggttacctccttggcaaacctcatttcacctgtgaggaacggggcagtccgcaggttcggccagaccattcagtcattcactcttcggggtgaccataggagccccgcaagtgcacaaaaatttagcagtcgcagcactgttcccacccccgcaaagaggaggtcaagcgccctctggagcgagatgctcgacataaccatgaaagaatccctgacaacacgggagattcgacgtcaggaggctatctacgagatgtcgaggggagagcaagatcttatagaagatttgaaactggcccgaaaggcctaccatgatcccatgctgaagctgagtatcatgagtgaagaggagcttacgcatatttttggcgatctcgactcctatatccccttgcacgaggacctcctgacgcggataggagaagccaccaaacctgacgggacagtcgaacagataggccatattctcgtctcctggcttcctcgattgaatgcctaccgtggctattgtagcaaccagctggccgcaaaagccctcctagaccagaagaaacaggacccaagagtccaggacttcctccagcgttgtctggagtcgcccttcagcaggaaactcgacctgtggagcttcctagacatccccagaagccgactggtcaaatacccactgttgctgaaagagatcctgaaacatacacccaaagagcatcctgacgtccagctgctggaggatgcaatattgataattcaaggggtgctatcagatatcaatctgaagaaaggagagagcgagtgtcagtattacatagacaagctcgagtacctggatgaaaagcagagggaccctagaatcgaggccagcaaggtgctgctctgccacggcgaactgaggtcgaaaagcggccataaactgtacatttttctgttccaagatatcctggtgttaactagacccgtgacccggaatgagagacacagttatcaggtttaccggcagcccatcccagtacaggagttagtgctggaggatttacaagatggtgatgttcgcatgggtggaagcttccggggtgccttcagcaattcagagaaagctaaaaatattttcaggattcgcttccacgacccctcaccggcacagtcacacaccctgcaggctaatgatgtttttcacaaacagcagtggtttaattgtatcagagcagctattgcacccttccagtcggccggatctcccccagagctccagggcctccccgagctgcacgaagaatgtgagggtaatcacccctcagccagaaagctgactgcgcagaggagggctagtacggtcagttccgtaacgcaggtggaggtcgacgaaaatgcttaccggtgcgggtctggaatgcaaatggccgaggattctaagtccttaaaaacacatcagacccagcctgggattcgccgagccagggacaaagcactgtctggaggcaaacgcaaggagaccctggtgtag

SEQ ID NO: 34216 - DNA, 1791 bp, Artificial Sequence
  derived and/or modified sequence
atggagcccgagctggccgcccagaagcagcccagacccagaagaagaagcagaagagccagcggcctgagcaccgagggcgccaccggccccagcgccgacaccagcggcagcgagctggacggcagatgcagcctgagaagaggcagcagcttcaccttcctgacccccggccccaactgggacttcaccctgaagagaaagagaagagagaaggacgacgacgtggtgagcctgagcagcctggacctgaaggagcccagcaacaagagagtgagacccctggccagagtgaccagcctggccaacctgatcagccccgtgagaaacggcgccgtgagaagattcggccagaccatccagagcttcaccctgagaggcgaccacagaagccccgccagcgcccagaagttcagcagcagaagcaccgtgcccacccccgccaagagaagaagcagcgccctgtggagcgagatgctggacatcaccatgaaggagagcctgaccaccagagagatcagaagacaggaggccatctacgagatgagcagaggcgagcaggacctgatcgaggacctgaagctggccagaaaggcctaccacgaccccatgctgaagctgagcatcatgagcgaggaggagctgacccacatcttcggcgacctggacagctacatccccctgcacgaggacctgctgaccagaatcggcgaggccaccaagcccgacggcaccgtggagcagatcggccacatcctggtgagctggctgcccagactgaacgcctacagaggctactgcagcaaccagctggccgccaaggccctgctggaccagaagaagcaggaccccagagtgcaggacttcctgcagagatgcctggagagccccttcagcagaaagctggacctgtggagcttcctggacatccccagaagcagactggtgaagtaccccctgctgctgaaggagatcctgaagcacacccccaaggagcaccccgacgtgcagctgctggaggacgccatcctgatcatccagggcgtgctgagcgacatcaacctgaagaagggcgagagcgagtgccagtactacatcgacaagctggagtacctggacgagaagcagagagaccccagaatcgaggccagcaaggtgctgctgtgccacggcgagctgagaagcaagagcggccacaagctgtacatcttcctgttccaggacatcctggtgctgaccagacccgtgaccagaaacgagagacacagctaccaggtgtacagacagcccatccccgtgcaggagctggtgctggaggacctgcaggacggcgacgtgagaatgggcggcagcttcagaggcgccttcagcaacagcgagaaggccaagaacatcttcagaatcagattccacgaccccagccccgcccagagccacaccctgcaggccaacgacgtgttccacaagcagcagtggttcaactgcatcagagccgccatcgcccccttccagagcgccggcagcccccccgagctgcagggcctgcccgagctgcacgaggagtgcgagggcaaccaccccagcgccagaaagctgaccgcccagagaagagccagcaccgtgagcagcgtgacccaggtggaggtggacgagaacgcctacagatgcggcagcggcatgcagatggccgaggacagcaagagcctgaagacccaccagacccagcccggcatcagaagagccagagacaaggccctgagcggcggcaagagaaaggagaccctggtgtag

SEQ ID NO: 34217 - protein, 57 aa, Artificial Sequence
  derived and/or modified sequence
MAVFHDEVEIEDFQYDEDSETYFYPCPCGDNFSITKDQFVCGETVPAPSANKELVKC

SEQ ID NO: 34218 - DNA, 174 bp, Artificial Sequence
  derived and/or modified sequence
atggcagtattccatgatgaggtggagattgaggatttccagtatgacgaggattctgaaacctacttttacccctgtccatgtggcgacaatttttctattacaaaggatcagtttgtgtgcggagagactgtgccagctcccagtgccaataaggagttggtcaagtgctag

SEQ ID NO: 34219 - DNA, 174 bp, Artificial Sequence
  derived and/or modified sequence
atggctgtgttccatgatgaggtggagattgaggacttccagtatgatgaagattctgagacctacttctacccctgcccctgtggggacaacttcagcatcaccaaggaccagtttgtgtgtggggagaccgtgcctgcccccagcgccaacaaggagctggtgaagtgctag

SEQ ID NO: 34220 - DNA, 174 bp, Artificial Sequence
  derived and/or modified sequence
atggccgtgttccacgacgaggtggagatcgaggacttccagtacgacgaagactcagagacgtatttctacccctgcccatgcggagacaatttctcaatcaccaaggaccagttcgtgtgcggtgagaccgttccagctccttctgcaaacaaagaattggttaaatgctag

SEQ ID NO: 34221 - DNA, 174 bp, Artificial Sequence
  derived and/or modified sequence
atggctgtcttccatgatgaggtggagatagaggacttccagtacgatgaagactccgaaacgtatttttatccatgcccgtgcggcgacaacttttccattacgaaggatcagtttgtctgcggtgagacagtcccagccccttctgcaaacaaggagttggtgaagtgttag

SEQ ID NO: 34222 - DNA, 174 bp, Artificial Sequence
  derived and/or modified sequence
atggccgtgttccacgacgaggtggagatcgaggacttccagtacgacgaggacagcgagacctacttctacccctgcccctgcggcgacaacttcagcatcaccaaggaccagttcgtgtgcggcgagaccgtgcccgcccccagcgccaacaaggagctggtgaagtgctag

SEQ ID NO: 34223 - DNA, 3052 bp, Artificial Sequence
  derived and/or modified sequence
gatgccgagcccaggccggttccggcgaagttaaaccctcggagctggcctcggactgctggggcgttaccccttcggccacccccgctgaccatggcagtgtttcatgacgaggtggaaatcgaggacttccaatatgacgaggactcggagacgtatttctatccctgcccatgtggagataacttctccatcaccaaggatcagtttgtgtgtggagaaacagtcccagccccttcagccaacaaagaattagttaaatgctgaagaagccttcaggaatccaaatcctgaacatttggaatgagcccagatagaaatatcgaatgcaaagctactggcttcacagagacaaccatttatgatttgctgttctgtaagagtgtggattctttctatcaactgctgatatcatcttcaggaagcaagtccataacatgacatatctggattttgtgcttagaaccttaaattggaagcattcttaattatgcatctaaatttaaaagaagataatttcaaaacagtgctttctttcccttggtttcatcattttcatatcttaaaccaaattacttcggtatctgacaacagcatcatctacctcagtcattaggatttcttaataaaaaagagattgtatttttgacttggttattaagattattaaaattagcccttcctttgaaatatgacatcagctttgctgttctaaatttaaaattagttgcttcatcagtaccacacttccagtttctataccaagccagtctcctcagttttcccattagaatggacatgttctgttcagcgtgtcatttctgtaatgcttcatgcagagagtttggtcatagtattaaagagaaaatacagtgaggtcacaatgtctccagagctaaaagttagtgaacaagaaagaaagtccaaaatgaagtgatgaaagaatgaggacttttcttatattctgcatattccttggaagtcaggacaagatgaaaagaaaaacatccaaaagaagtgaaattggtgacagaatgagaggagcaaagcataccagtgtagtaagtggaatgtttgaatgactttgccaggtcagagcaagtaatatttctgtatctgagtttttgtttgtgttttgataaggctaatgaaattgcattccaggtaggggttaacgtcaaatttccatggctggtagctgtgcttttggcatatcacagtgttgtgtcactactacaaggtaaagcatctacagcggagaatgagcttgaaaatgagagacctattgtgaataaatatgcccatgagagcatatttaataagcctctataacatgcagccaaaccagacattcactcctgcagagaaatgttgccctggagaaaaagaaatatataaagataggctatcacccttcttttgctgcagtactaagcatagcaagaaattagaatcatttacattggaaatttgaaaattccctttatatacacaactttactgtgtataaataaaaaatatttattaatgcagtgatgtccgtcaggttgttttaggaatggcttctgcaattagaaaaatagcttgctagaatgtaaatgttctgttactggtaaatgtactgcacacattcattggacgttaaaacaagtgagtagccttttttacctgccagcagcatggctgtgtgcagccactaggctgagacaataaattaccaaaaattataatgtaccgagctgaaaatgctcagtacattatgtggcatattctggatgtgatgagaaatctcattgccatttgggacactgacatcccagaagtaatccacaactgctttgcaaaagcaaagtgactgctcagatgaacagagcagagtactcactcactatggtggcatcagctgcaaagcaaaatgaactgtcccatgatcatgttgatggttttctagatactgccaacatgttagctctttctgatgctgatgagtttcaaacacgaacagacacccttgatgtgggtttgctaagaacatagaagaacaggaagaaaagttgccaggttcacacatcccaggaaaaaagaagcataaaaagcattagcagtcagtgactgatgataatgctgcaataatgggaatggttttgtttctaaaccaaattatttctaaatcaaatcatttattgctttgtttctaaagcaattgagtcactaagtttgtgaactgtaggagaacacatcaagattgaatcctgtgttaagcagaaggtaaaaccagagccaggcgcagtggctcgtgcctgtaatcccagctactcaggaagctaaggcaggaggatcatgtgaggccaggagttcaagactagcctgggcaacatagaaagaccctgtctctaaaaaatcttcttttaattagcaaggtgtggggccttgagcaaattgcttgggcccaggagtttgaggctgtggtgagctgtgatcacaccactgcgttccagcctgtgtgacagggcaagacctcatgcctaaaaaataaagagaaagcagagtaaaactggactctgagatacgactaaagttctgtgtgatacgtgtgccttatttagctcaagacattcctggagcacctataaaaactgacttgtaatccaggctatgtctctttttagcttcgtaatctttggcaaggccattggattcttcagctgtacaattaggagactcgatcaggtgattgcctttctcagctgtcagttctctaatttcaggcttggtagcttgtaggaactgaaattgcaattaaaacctttataaactcaaactaaatcatgaattacagaaaaagtccattcttccaaaacttgatgttaccacacttacaagtttaaaatatgaagtcgactgtttaaaggattctgcatatattctagtgtgcacattcagaaacatttttcttggaaaaagtacccaacattttttataactgcacatattaatttattgccagaataaattgcattgcatgctaaataaagtcagataattcaaatcc

SEQ ID NO: 34224 - protein, 391 aa, Artificial Sequence
  derived and/or modified sequence
MFPNGTASSPSSSPSPSPGSCGEGGGSRGPGAGAADGMEEPGRNASQNGTLSEGQGSAILISFIYSVVCLVGLCGNSMVIYVILRYAKMKTATNIYILNLAIADELLMLSVPFLVTSTLLRHWPFGALLCRLVLSVDAVNMFTSIYCLTVLSVDRYVAVVHPIKAARYRRPTVAKVVNLGVWVLSLLVILPIVVFSRTAANSDGTVACNMLMPEPAQRWLVGFVLYTFLMGFLLPVGAICLCYVLIIAKMRMVALKAGWQQRKRSERKITLMVMMVVMVFVICWMPFYVVQLVNVFAEQDDATVSQLSVILGYANSCANPILYGFLSDNFKRSFQRILCLSWMDNAAEEPVDYYATALKSRAYSVEDFQPENLESGGVFRNGTCTSRITTL

SEQ ID NO: 34225 - protein, 619 aa, Artificial Sequence
  derived and/or modified sequence
MPWQAFRRFGQKLVRRRTLESGMAETRLARCLSTLDLVALGVGSTLGAGVYVLAGEVAKDKAGPSIVICFLVAALSSVLAGLCYAEFGARVPRSGSAYLYSYVTVGELWAFTTGWNLILSYVIGTASVARAWSSAFDNLIGNHISKTLQGSIALHVPHVLAEYPDFFALGLVLLLTGLLALGASESALVTKVFTGVNLLVLGFVMISGFVKGDVHNWKLTEEDYELAMAELNDTYSLGPLGSGGFVPFGFEGILRGAATCFYAFVGFDCIATTGEEAQNPQRSIPMGIVISLSVCFLAYFAVSSALTLMMPYYQLQPESPLPEAFLYIGWAPARYVVAVGSLCALSTSLLGSMFPMPRVIYAMAEDGLLFRVLARIHTGTRTPIIATVVSGIIAAFMAFLFKLTDLVDLMSIGTLLAYSLVSICVLILRYQPDQETKTGEEVELQEEAITTESEKLTLWGLFFPLNSIPTPLSGQIVYVCSSLLAVLLTALCLVLAQWSVPLLSGDLLWTAVVVLLLLLIIGIIVVIWRQPQSSTPLHFKVPALPLLPLMSIFVNIYLMMQMTAGTWARFGVWMLIGFAIYFGYGIQHSLEEIKSNQPSRKSRAKTVDLDPGTLYVHSV

SEQ ID NO: 34226 - DNA, 1860 bp, Artificial Sequence
  derived and/or modified sequence
atgccctggcaggccttcagaagattcggccagaagctggtgagaagaagaaccctggagagcggcatggccgagaccagactggccagatgcctgagcaccctggacctggtggccctgggcgtgggcagcaccctgggcgccggcgtgtacgtgctggccggcgaggtggccaaggacaaggccggccccagcatcgtgatctgcttcctggtggccgccctgagcagcgtgctggccggcctgtgctacgccgagttcggcgccagagtgcccagaagcggcagcgcctacctgtacagctacgtgaccgtgggcgagctgtgggccttcaccaccggctggaacctgatcctgagctacgtgatcggcaccgccagcgtggccagagcctggagcagcgccttcgacaacctgatcggcaaccacatcagcaagaccctgcagggcagcatcgccctgcacgtgccccacgtgctggccgagtaccccgacttcttcgccctgggcctggtgctgctgctgaccggcctgctggccctgggcgccagcgagagcgccctggtgaccaaggtgttcaccggcgtgaacctgctggtgctgggcttcgtgatgatcagcggcttcgtgaagggcgacgtgcacaactggaagctgaccgaggaggactacgagctggccatggccgagctgaacgacacctacagcctgggccccctgggcagcggcggcttcgtgcccttcggcttcgagggcatcctgagaggcgccgccacctgcttctacgccttcgtgggcttcgactgcatcgccaccaccggcgaggaggcccagaacccccagagaagcatccccatgggcatcgtgatcagcctgagcgtgtgcttcctggcctacttcgccgtgagcagcgccctgaccctgatgatgccctactaccagctgcagcccgagagccccctgcccgaggccttcctgtacatcggctgggcccccgccagatacgtggtggccgtgggcagcctgtgcgccctgagcaccagcctgctgggcagcatgttccccatgcccagagtgatctacgccatggccgaggacggcctgctgttcagagtgctggccagaatccacaccggcaccagaacccccatcatcgccaccgtggtgagcggcatcatcgccgccttcatggccttcctgttcaagctgaccgacctggtggacctgatgagcatcggcaccctgctggcctacagcctggtgagcatctgcgtgctgatcctgagataccagcccgaccaggagaccaagaccggcgaggaggtggagctgcaggaggaggccatcaccaccgagagcgagaagctgaccctgtggggcctgttcttccccctgaacagcatccccacccccctgagcggccagatcgtgtacgtgtgcagcagcctgctggccgtgctgctgaccgccctgtgcctggtgctggcccagtggagcgtgcccctgctgagcggcgacctgctgtggaccgccgtggtggtgctgctgctgctgctgatcatcggcatcatcgtggtgatctggagacagccccagagcagcacccccctgcacttcaaggtgcccgccctgcccctgctgcccctgatgagcatcttcgtgaacatctacctgatgatgcagatgaccgccggcacctgggccagattcggcgtgtggatgctgatcggcttcgccatctacttcggctacggcatccagcacagcctggaggagatcaagagcaaccagcccagcagaaagagcagagccaagaccgtggacctggaccccggcaccctgtacgtgcacagcgtgtag

SEQ ID NO: 34227 - DNA, 1860 bp, Artificial Sequence
  derived and/or modified sequence
atgccttggcaagcattccgccgttttggacagaagctggtccggaggcgcacgctggagagcggcatggcggagacacgtctggccaggtgtctgtctactctggatctggtcgccttgggggttggtagtacgttgggtgcaggcgtttacgtgttggccggcgaagtagcaaaggataaggcaggtccctctattgtgatttgtttcctggtggctgcactgagttccgttctggcaggtctctgctatgcagagttcggggccagggtgccacgatcaggatctgcgtatttatattcctatgtcactgtgggcgagctgtgggcttttaccaccgggtggaacctgattttgtcctacgtaattggtactgcatccgtggcccgagcctggagttccgcttttgacaacctcatcggcaatcatatcagcaaaacactccaggggtccattgccctccatgtcccacatgtgctcgccgagtaccctgatttctttgcccttggactggttctcctactaaccgggctgctagcccttggtgcttccgaaagtgcactggtcactaaggtgtttactggcgtgaatctgctggtgctgggctttgttatgatatcaggctttgtgaaaggcgatgtgcacaattggaagctgacggaagaggattacgaactcgccatggccgagctgaacgatacatactctctgggcccacttggttcaggcggctttgtaccgttcggcttcgaggggatcttgaggggagcggctacctgcttctacgccttcgtggggtttgattgtatagctacaaccggcgaggaagcccagaaccctcagcggagcatccccatggggattgtgatctctttgtcagtatgctttctggcctactttgcggtgagtagcgccctcacgcttatgatgccctactaccaacttcaacctgaatcccctttgcccgaggccttcctatacatcgggtgggcgcctgccaggtacgtcgtggctgtcgggagcctgtgcgctctctcgacctcgctgcttgggtctatgtttccaatgcctcgcgtaatatacgccatggccgaagacggactcttgtttagggtactggcaaggatccacactggcacacgcaccccaatcatcgctactgtcgtttctggcatcattgcggcatttatggctttcttgttcaaactcaccgatctcgttgatctcatgtcaattgggacgctcctcgcttatagtcttgtctctatctgtgtactgattctcaggtaccaaccagatcaggaaacaaaaacaggagaagaggtggagctgcaagaggaggctattaccacagagtcagagaagctcaccctttggggcttattctttcccctgaactcgattccgaccccactgagcgggcagatagtttatgtgtgcagctctctgttagcagtactgctgacagcgctttgtcttgtccttgcccagtggtctgtcccactgctcagcggagacctgctgtggacagccgtagtcgtcttactgttgctgctgattattggcattatcgtggttatttggcggcaacctcaatccagtactccacttcactttaaagtgccagccctgcctctactgcccttgatgagcatcttcgttaatatttacctcatgatgcagatgacagcagggacttgggcaaggtttggcgtgtggatgttgattgggttcgctatctatttcgggtatgggatacagcattcactggaggagataaaaagcaaccagccttccaggaagagcagagcaaagacagtcgatcttgaccccggcacactatatgtgcactctgtgtag

SEQ ID NO: 34228 - DNA, 1860 bp, Artificial Sequence
  derived and/or modified sequence
atgccctggcaggcttttcgtcgatttggccaaaagctggtgagacggcggactctagagtccggcatggccgagactcgcctcgctcggtgtctgtcaaccctcgatctggtagccctgggggtggggtcaactcttggggccggagtatatgtcttagcaggtgaggtagccaaggacaaagccggcccgagtattgtcatatgctttttggtggcagccctctcaagcgtactcgctggactgtgctatgcagagttcggggcccgcgtgccccgatccggaagcgcatacctctatagctatgtgaccgtcggtgagctgtgggcctttacaaccggctggaacctgattcttagctacgtcataggcacagcctcagtcgcccgggcatggtcatcagcattcgataatctgatcggaaatcatattagcaaaaccttacagggatctatcgctttgcacgtgccccacgttttggccgaatacccagacttttttgctttgggactggttctacttttgacaggactgctggctttgggagcctcagaatcagcactggtgacgaaggtttttactggcgttaacttactcgtgctcggctttgtcatgatctcagggtttgtgaaaggcgacgtgcacaactggaagctgacagaggaggactatgagttggcgatggcagagctgaatgacacctatagtctcgggcccctgggatctggcgggtttgtccccttcggcttcgaaggaatacttcggggtgcggctacctgtttttacgcctttgtggggtttgattgcatcgccacaaccggtgaggaggcacagaatccgcagcgcagtatccctatggggattgtgattagtctgagtgtgtgtttcctggcatatttcgctgtgtcgagtgccctcacactcatgatgccatattaccagttacagccggagagtccactgccagaggcgtttctgtacataggatgggcacccgcgaggtacgttgtagccgttgggtccttatgtgcattgagcacttctctgttggggagcatgtttccaatgccccgggtcatctacgccatggccgaggatgggctgctgtttcgtgtgttggcccggattcataccggtacccggactccaattatagcaacagtcgtgtcaggcatcatcgcagctttcatggccttcctgttcaagctgacagacttagtggacctgatgtcgataggaacgctgctggcgtacagcctcgtgtctatatgtgttctgatcctgcgttatcagcctgatcaggagacgaagacaggcgaggaagtcgagctgcaggaggaagccatcacgacagagtcggaaaagttaactctgtggggccttttcttccctttgaactccattccgacccctctgtcggggcagatcgtgtatgtgtgcagctcacttttggctgtgctgctgactgcgttatgtctggtcctggcccagtggtctgtacctctgctctccggtgacctgttgtggaccgctgtcgtagttcttcttctactgcttatcataggtatcattgttgtcatctggcgtcagccacagagctcaacgcctctccactttaaagtcccggccctccctctgctgcctctgatgtctatctttgtcaatatctacctcatgatgcagatgactgccggaacgtgggcccgattcggcgtgtggatgctcattggcttcgccatctattttggatacggaatacagcattcgctggaggaaattaagagcaatcaacccagtcgaaagtccagggcaaagactgtcgacttggaccctggcaccctctacgtgcactccgtctag

SEQ ID NO: 34229 - DNA, 1860 bp, Artificial Sequence
  derived and/or modified sequence
atgccctggcaggccttcagaagatttggccagaagctggtgagaagaaggaccctggagagcggcatggccgagacccggctggcccgctgcctgagcaccctggacctggtggccctgggcgtgggcagcaccctgggcgctggggtgtatgtgctggccggggaggtggccaaggacaaggccggccccagcatcgtcatctgcttcctggtggccgccctgagctctgtgctggccggcctgtgctacgccgagtttggagcccgggtgcccaggagcggcagcgcctacctgtacagctatgtgacagtgggggagctgtgggccttcaccaccggctggaacctgatcctgtcctatgtgattggaacagcctctgtggcccgggcctggagcagcgcctttgacaacctgattggcaaccacatcagcaagaccctgcagggcagcatcgccctgcacgtgccccacgtgctggccgagtacccagacttctttgccctgggcctggtgctgctgctgaccggcctgctggccctgggcgccagcgagagcgccctggtgaccaaggtgttcaccggggtgaacctgctggtgctgggctttgtgatgatcagcggctttgtgaagggagatgtgcacaactggaagctgacagaggaggactatgagctggccatggccgagctgaatgacacctacagcctgggccccctgggcagcggcggctttgtgcccttcggctttgagggcatcctgcggggagctgccacctgcttctacgcctttgtgggctttgactgcatcgccaccactggagaggaggcccagaacccccagaggagcatccccatgggcatcgtcatcagcctgtctgtgtgcttcctggcctactttgctgtgagcagcgccctgaccctgatgatgccctactaccagctgcagcctgagagccccctgcctgaggccttcctgtacatcggctgggccccagcccgctacgtggtggccgtgggcagcctgtgtgccctgagcaccagcctgctgggctccatgttccccatgcccagggtcatctatgccatggctgaagatggcctgctcttccgggtgctggcccgcatccacacaggcaccaggacccccatcatcgccaccgtggtgtctggcatcatcgccgccttcatggccttcctgttcaagctgacagacctggtggacctgatgagcatcggcaccctgctggcctacagcctggtgtccatctgtgtgctgatcctgcgctaccagcctgaccaggagaccaagacaggagaggaggtggagctgcaggaggaggccatcaccacagaaagtgagaagctgaccctgtggggcctcttcttccccctgaacagcatccccacccccctgagcggccagatcgtgtatgtgtgcagcagcctgctggccgtgctgctgacagccctgtgcctggtgctggcccagtggagcgtgcccctgctgagcggggacctgctgtggacagctgtggtggtgctgctgctgctgctgatcatcggcatcatcgtggtgatctggaggcagccccagagcagcacccccctgcacttcaaggtgcctgccctgcccctgctgcccctgatgagcatctttgtgaacatctacctgatgatgcagatgacagctggcacctgggcccgcttcggcgtgtggatgctgattggatttgccatctacttcggctacggcatccagcacagcctggaggagatcaagagcaaccagcccagcaggaagagccgggccaagacagtggacctggaccccggcaccctgtatgtgcacagcgtgtag

SEQ ID NO: 34230 - DNA, 1860 bp, Artificial Sequence
  derived and/or modified sequence
atgccctggcaggccttccggcggttcggccagaagctggtgcggagacgtacactcgagtccggtatggcagaaacacgtcttgcccggtgcttgtcaactcttgacctggttgcattaggcgtcgggtccaccctcggcgctggggtgtacgtcctggccggagaagtggctaaggacaaggcgggaccctccattgtaatctgcttcctggtggctgcgctctcaagtgtgctggccggattgtgctacgccgagtttggggccagggtgcctagatccggatctgcatatctgtactcatatgtgactgtcggcgaattgtgggccttcaccactggatggaatttgatattgtcctacgttataggcactgcctcagtggcccgagcatggtcctccgcatttgacaatctgatagggaaccatatctccaagactttacagggttcaattgcccttcatgtcccccacgtattagcagagtaccccgacttcttcgctctaggacttgtgttgttactaacgggcctattggcgctcggagcctctgagtccgctctcgtgaccaaagtatttactggagtcaatctcttggtgttaggcttcgtgatgataagtggctttgtgaaaggcgacgtccacaactggaagttgacagaagaggactatgagcttgctatggcagagttgaacgatacatacagtctgggccctcttggcagcggcggattcgttccattcggcttcgagggaattctcagaggggccgccacatgcttctacgcttttgtcgggtttgattgtatcgcgacaactggggaggaggcccagaacccacagagaagtattccgatgggaattgttatttctcttagcgtctgcttcctcgcttattttgccgtgtcctcagcactgacacttatgatgccgtattatcaactccaacccgagagccctcttccggaggctttcttgtacattgggtgggcacctgcaagatacgtggttgccgtcgggagcttatgcgctttatccacctccctgttgggctccatgtttccaatgccaagggttatttacgcaatggccgaggacggcctgttattccgtgtgctggccaggattcataccggaacacggaccccaatcatagccaccgtggtctcagggatcatcgctgcatttatggcattcctatttaagctaacggatcttgttgatttaatgagtatcggaacactcctggcatattctcttgtgtctatctgcgtgctgatccttaggtatcaaccagaccaggaaaccaagacaggtgaggaggtggagctgcaagaagaggccatcacaaccgagtccgaaaagttgacactctggggtcttttctttccactgaactctatccccacccccttgtccggccagattgtgtacgtttgcagttcccttctggccgtactgttgacagcgttatgcctggtgctggcgcagtggagtgttcccttgttgtcgggagatctgctctggaccgctgtagtcgttttactgttactgctcattattggcatcatcgtggttatttggagacaacctcaatcttctactccactgcatttcaaggtacccgctctgcctctgctgcccttgatgagcatcttcgttaatatttacctcatgatgcaaatgacggctgggacctgggctagatttggcgtttggatgctgattgggtttgcaatatattttggatacggcatacagcatagtctggaagagattaaatccaaccaaccttcacgtaaatccagggcgaaaaccgtggacctggatccaggtactctctatgtgcactctgtgtag

SEQ ID NO: 34231 - DNA, 1860 bp, Artificial Sequence
  derived and/or modified sequence
atgccctggcaggccttccggcggttcggccagaagctggtgcggcggaggaccctcgagagcggcatggctgagacaagactcgcccgttgcctgtccaccttggacttggtcgctctgggggtggggagtaccctcggcgccggggtctacgtgctggccggcgaggttgctaaggacaaagcagggccctctatcgtgatctgcttcctggtagctgccctcagctctgtcttggccgggctgtgttacgccgagttcggcgcacgagtcccccggtctggctctgcatatttgtactcatacgtcacagtgggcgaactctgggcattcacaacaggatggaacctgatcctgtcctacgtgattggcacggcttccgtggccagggcctggagctccgcttttgacaatcttatcggtaatcatattagtaaaacactccagggcagcattgccttgcacgtgccccacgtgctcgcggagtaccctgacttctttgcccttggcttggttctcctcctgacgggcctgctggccctcggggcatctgaatccgccctcgtgacgaaggtgttcacaggggtcaaccttctggtcctggggttcgtaatgatctccgggttcgtgaaaggtgacgttcataattggaaactgaccgaggaggactacgaattggcaatggcagaactcaatgatacttatagcttgggtccgttgggatctggaggcttcgttccttttggctttgagggcatactgcgtggcgccgccacatgcttttatgcatttgtgggcttcgattgcatcgcgaccactggtgaggaagcccaaaacccccagcgatctatccccatgggtatcgtgatatctctgagtgtgtgcttccttgcatacttcgcagtcagcagcgcactgactctaatgatgccatattaccagttgcagccggaatctcccctaccggaggccttcctgtacatcggttgggctcccgcaaggtacgtcgtggctgtcggcagcctttgcgcgctgtcaaccagcctgctagggagtatgttccctatgccccgcgtcatatacgctatggccgaggacgggctgctgttcagggtgcttgctcgcatccacactggtactaggacacctattatcgctaccgtggtgagcggaatcattgcggctttcatggcctttctgttcaagttgactgatcttgtcgacctcatgtccatcggtactctgcttgcatacagtctggtctccatttgcgtccttatccttaggtatcagccagatcaggaaaccaaaaccggcgaagaggtggagctgcaagaagaagccataaccaccgagtcggaaaagctaacactttggggtctgttttttccactgaattccatacccacaccactttctggacagattgtgtacgtatgctcttcccttttggccgtcttactgactgccctatgcctagtcttggcccagtggtctgttccacttctaagcggtgaccttctgtggacagccgtggttgtgctcctcctgttgctgatcataggcattattgttgtgatctggcggcaacctcagagctcgacacctcttcacttcaaggtccctgccctccctctcctgccacttatgagtatatttgtcaatatctatctcatgatgcaaatgacagcagggacctgggctaggtttggagtgtggatgctgataggattcgctatttattttggctatggtattcagcactcactggaggaaatcaaatcgaatcaaccctctcgtaaatctcgcgcgaagaccgtggatcttgaccccggaacattgtatgtgcactctgtatag

SEQ ID NO: 34232 - DNA, 1860 bp, Artificial Sequence
  derived and/or modified sequence
atgccgtggcaggcctttcgaagattcgggcagaagctggtgcggaggcgcaccctggaatccggaatggcagaaaccaggttggcaaggtgtctgagcaccctggatctggtggcattaggggtcggctcaaccttgggcgctggcgtgtacgtgctagcaggtgaagtagctaaggataaagctggcccttctattgtgatctgtttcctcgtcgcagccctcagctctgtactggctggactgtgttacgccgaatttggggcacgcgtgcccaggtcaggttcagcctatctttactcatatgtcacagttggagagctctgggctttcacaaccgggtggaatttgattttatcctatgttatcggaaccgcgtcagttgcgagagcttggtcctcagcgttcgataatctgatcggcaatcacatcagtaagacgctccagggaagtatcgcccttcacgtcccccatgtgctagcggagtatcccgacttcttcgcactgggactcgtccttcttctcacaggcctgctcgccctgggggctagtgaaagtgcgctcgtgacaaaggtcttcactggggtcaatctgctcgtgctgggcttcgtgatgatctctggcttcgtcaaaggcgacgttcacaattggaagctaactgaagaggactacgaactcgcaatggccgaactgaacgatacgtatagtctcggcccactcggctcaggtggttttgttccttttggctttgaggggattctgcgaggggcagccacttgcttctacgcttttgtcggatttgactgcatcgccaccaccggggaggaggcccagaacccacaacgatctattccaatgggaatcgtgatctctctcagcgtctgctttctcgcttattttgccgtgagctctgcattaacgcttatgatgccttactaccaattgcagccagagtccccgctgcccgaggcattcttgtatattggatgggccccagcccgatacgtagtggccgtgggctctctgtgcgcccttagcactagcctgctgggatccatgttcccaatgcccagagtgatctatgctatggccgaggatgggctcctttttcgcgtgttggccagaattcataccggcactagaactccaattattgcaacagttgtgagcgggatcatcgcagcctttatggctttcctgtttaaactgactgacctggtggatctgatgagtattggcacactcctggcatattcccttgttagcatttgcgtgctaatcctcagatatcagccagaccaggagaccaaaacaggcgaggaggtggaactacaggaggaggcgattacaactgagtccgagaagttaacgctgtgggggcttttttttcctctgaactcaattcccacgccgctctcaggccagattgtgtacgtctgctcttctctgctggccgtcctgctgactgcgctctgccttgttctagctcagtggtcagtgccactgctgtccggagacctgctgtggaccgccgtcgtcgtactactcctgctacttatcattggtataatcgtggtaatctggcggcagccccagtccagtactcccctccatttcaaggttccagccctgccattgctaccactcatgtcaatctttgtaaacatataccttatgatgcagatgacggcgggtacatgggctaggtttggcgtctggatgctgatagggttcgccatctactttggctatggaatccaacacagtctagaagaaattaaatctaatcaacctagtcgaaaatcacgagcgaagacggtggatttagatcctgggaccctgtacgttcactccgtatag

SEQ ID NO: 34233 - DNA, 1860 bp, Artificial Sequence
  derived and/or modified sequence
atgccgtggcaggcctttcgcagatttggacagaagctggtgcgcagaaggacactggaatctggtatggccgagacaagacttgcccgttgcttgtccacacttgatcttgtggctctgggtgtgggctcaactcttggtgccggagtttacgtgcttgccggagaagtggccaaggataaggcaggcccatccatcgttatctgttttctcgtcgccgcactctcgagcgtgctggccggattatgctatgcagagtttggcgctcgagtcccgagaagtggaagtgcctacctgtattcatatgttaccgttggcgaactatgggccttcactaccggctggaacctgattttgagttacgtgattggcacggcatccgtggcacgcgcttggagcagcgcctttgacaatctgatcggtaaccatatttctaagacgctgcaaggaagcatcgcactgcacgtacctcatgtcttggccgagtatccagatttcttcgcccttggtctcgtgctgctattaacaggcttactcgccctcggcgctagcgaaagcgcacttgtgacaaaggtattcacgggggtgaacctactggtgcttggctttgtgatgatctctggtttcgtcaagggcgatgtgcacaattggaagctgactgaagaggactacgagcttgccatggccgaattaaacgacacatattctctgggcccactgggatccgggggttttgttcctttcggctttgaggggattctgcgtggggcagcgacctgcttctatgctttcgtaggctttgactgcatcgccactaccggtgaggaagcccagaacccacagcgatcaatcccgatgggcatagtgatctctctttctgtctgctttctggcttattttgcagtgtcatcagccttgacactcatgatgccctactaccagctccagccagagagccctctaccggaggcctttctgtatatcggatgggccccagctagatacgtggtagccgtgggaagtctgtgtgccttatctacttcactccttgggtcaatgttccccatgcctagggtgatctatgccatggctgaagatggcctgctgttcagagtattggctcgcattcataccggcacaagaacccccattatcgctaccgtggtgagtgggatcatcgcggcattcatggcgtttctgtttaagctcactgatctggtcgatctcatgtccatcggcaccttgctggcttatagcctggtgtctatttgcgtgctgatcctgaggtaccagcccgatcaggagaccaagaccggggaagaggtggagctgcaggaggaagctatcaccaccgagtcagagaagctcacgttgtggggcctttttttccctcttaatagcattcctacgcctctgagcggacagatagtctacgtttgttcctccctgttagccgtactactgaccgcactgtgtttggttctcgcccagtggtctgtaccactactatccggcgatctcctgtggacagcggtcgtggtgctgttgctgctgttgatcatcggaatcatcgtagtaatttggagacaacctcagtccagcactcccctgcacttcaaagttcccgcactccccctccttcctctgatgagcatcttcgtgaatatctatcttatgatgcaaatgacggctgggacgtgggccagatttggagtctggatgctgatcgggtttgctatttactttgggtatgggatccagcactctctcgaagagattaagagcaaccagccctctaggaagagcagggctaagactgtggatctagatccaggaaccctgtatgtgcatagcgtgtag

SEQ ID NO: 34234 - DNA, 2235 bp, Artificial Sequence
  derived and/or modified sequence
ataaggggcgcttggcgcgcaacgaccccaagccgcagctttgaagcctgagcggccgaactcggcagctccaacccaactcggcttaactccgcctcaccgagcccagtccaagactctgtgctccctaggtttgcaacagctctctggatgccgtggcaagcatttcgcagatttggtcaaaagctggtacgcagacgtacactggagtcaggcatggctgagactcgccttgccagatgcctaagcaccctggatttagtggccctgggtgtgggcagcacattgggtgcaggcgtgtatgtcctagctggcgaggtggccaaagataaagcagggccatccattgtgatctgctttttggtggctgccctgtcttctgtgttggctgggctgtgctatgcggagtttggtgcccgggttccccgttctggttcggcatatctctacagctatgtcactgtgggtgaactctgggccttcaccactggctggaacctcatcctctcctatgtcattggtacagccagtgtggcccgggcctggagctctgcttttgacaacctgattgggaaccacatctctaagactctgcaggggtccattgcactgcacgtgccccatgtccttgcagaatatccagatttctttgctttgggcctcgtgttgctgctcactggattgttggctctcggggctagtgagtcggccctggttaccaaagtgttcacaggcgtgaaccttttggttcttgggttcgtcatgatctctggcttcgttaagggggacgtgcacaactggaagctcacagaagaggactacgaattggccatggctgaactcaatgacacctatagcttgggtcctctgggctctggaggatttgtgcctttcggcttcgagggaattctccgtggagcagcgacctgtttctatgcatttgttggtttcgactgtattgctaccactggagaagaagcccagaatccccagcgttccatcccgatgggcattgtgatctcactgtctgtctgctttttggcgtattttgctgtctcttctgcactcaccctgatgatgccttactaccagcttcagcctgagagccctttgcctgaggcatttctctacattggatgggctcctgcccgctatgttgtggctgttggctccctctgtgctctttctaccagcctcctgggctccatgttccccatgcctcgggtgatctacgcgatggcagaggatggcctcctgttccgtgtacttgctcggatccacaccggcacacgcaccccaatcatagccaccgtggtctctggcattattgcagcattcatggcattcctcttcaaactcactgatcttgtggacctcatgtcaattgggaccctgcttgcttactccctggtgtcgatttgtgttctcatcctcaggtatcaacctgatcaggagacaaagactggggaagaagtggagttgcaggaggaggcaataactactgaatcagagaagttgaccctatggggactatttttcccactcaactccatccccactccactctctggccaaattgtctatgtttgttcctcattgcttgctgtcctgctgactgctctttgcctggtgctggcccagtggtcagttccattgctttctggagacctgctgtggactgcagtggttgtgctgctcctgctgctcattattgggatcattgtggtcatctggagacagccacagagttccactccccttcactttaaggtgcctgctttgcctctcctcccactaatgagcatctttgtgaatatttaccttatgatgcagatgacagctggtacctgggcccgatttggggtctggatgctgattggctttgctatctacttcggctatgggatccagcacagcctggaagagattaagagtaaccaaccctcacgcaagtctagagccaaaactgtagaccttgatcccggcactctctatgtccactcagtttgacatcgtcacacctaaatgctgtctggtcccctgcacaataatggagagtactcctgaccccagtgacagctagccctcccctgtgatggtggtggtggatactaatacagttctgtacgatgtgaaggatgtgtctttgctatttcttgtctattttaacccgtctgcttctaaatgatgtctagctgcttaccaactttaaaaaatgatattaaaagaaagtag

SEQ ID NO: 34235 - DNA, 2236 bp, Artificial Sequence
  derived and/or modified sequence
aagccgcagctttgaagcctgagcggccgaactcggcagctccaacccaactcggcttaactccgcctcaccgagcccagtccaagactctgtgctccctaggtttgcaacagctctctgatcatcttcttcaattcctgctaggatgccgtggcaagcatttcgcagatttggtcaaaagctggtacgcagacgtacactggagtcaggcatggctgagactcgccttgccagatgcctaagcaccctggatttagtggccctgggtgtgggcagcacattgggtgcaggcgtgtatgtcctagctggcgaggtggccaaagataaagcagggccatccattgtgatctgctttttggtggctgccctgtcttctgtgttggctgggctgtgctatgcggagtttggtgcccgggttccccgttctggttcggcatatctctacagctatgtcactgtgggtgaactctgggccttcaccactggctggaacctcatcctctcctatgtcattggtacagccagtgtggcccgggcctggagctctgcttttgacaacctgattgggaaccacatctctaagactctgcaggggtccattgcactgcacgtgccccatgtccttgcagaatatccagatttctttgctttgggcctcgtgttgctgctcactggattgttggctctcggggctagtgagtcggccctggttaccaaagtgttcacaggcgtgaaccttttggttcttgggttcgtcatgatctctggcttcgttaagggggacgtgcacaactggaagctcacagaagaggactacgaattggccatggctgaactcaatgacacctatagcttgggtcctctgggctctggaggatttgtgcctttcggcttcgagggaattctccgtggagcagcgacctgtttctatgcatttgttggtttcgactgtattgctaccactggagaagaagcccagaatccccagcgttccatcccgatgggcattgtgatctcactgtctgtctgctttttggcgtattttgctgtctcttctgcactcaccctgatgatgccttactaccagcttcagcctgagagccctttgcctgaggcatttctctacattggatgggctcctgcccgctatgttgtggctgttggctccctctgtgctctttctaccagcctcctgggctccatgttccccatgcctcgggtgatctacgcgatggcagaggatggcctcctgttccgtgtacttgctcggatccacaccggcacacgcaccccaatcatagccaccgtggtctctggcattattgcagcattcatggcattcctcttcaaactcactgatcttgtggacctcatgtcaattgggaccctgcttgcttactccctggtgtcgatttgtgttctcatcctcaggtatcaacctgatcaggagacaaagactggggaagaagtggagttgcaggaggaggcaataactactgaatcagagaagttgaccctatggggactatttttcccactcaactccatccccactccactctctggccaaattgtctatgtttgttcctcattgcttgctgtcctgctgactgctctttgcctggtgctggcccagtggtcagttccattgctttctggagacctgctgtggactgcagtggttgtgctgctcctgctgctcattattgggatcattgtggtcatctggagacagccacagagttccactccccttcactttaaggtgcctgctttgcctctcctcccactaatgagcatctttgtgaatatttaccttatgatgcagatgacagctggtacctgggcccgatttggggtctggatgctgattggctttgctatctacttcggctatgggatccagcacagcctggaagagattaagagtaaccaaccctcacgcaagtctagagccaaaactgtagaccttgatcccggcactctctatgtccactcagtttgacatcgtcacacctaaatgctgtctggtcccctgcacaataatggagagtactcctgaccccagtgacagctagccctcccctgtgatggtggtggtggatactaatacagttctgtacgatgtgaaggatgtgtctttgctatttcttgtctattttaacccgtctgcttctaaatgatgtctagctgcttaccaactttaaaaaatgatattaaaagaaagtagaaaaat

SEQ ID NO: 34236 - protein, 364 aa, Artificial Sequence
  derived and/or modified sequence
MAQQWSLQRLAGRHPQDSYEDSTQSSIFTYTNSNSTRGPFEGPNYHIAPRWVYHLTSVWMIFVVIASVFTNGLVLAATMKFKKLRHPLNWILVNLAVADLAETVIASTISVVNQVYGYFVLGHPMCVLEGYTVSLCGITGLWSLAIISWERWMVVCKPFGNVRFDAKLAIVGIAFSWIWAAVWTAPPIFGWSRYWPHGLKTSCGPDVFSGSSYPGVQSYMIVLMVTCCITPLSIIVLCYLQVWLAIRAVAKQQKESESTQKAEKEVTRMVVVMVLAFCFCWGPYAFFACFAAANPGYPFHPLMAALPAFFAKSATIYNPVIYVFMNRQFRNCILQLFGKKVDDGSELSSASKTEVSSVSSVSPA

SEQ ID NO: 34237 - DNA, 1095 bp, Artificial Sequence
  derived and/or modified sequence
atggcccagcagtggagcctgcagagactggccggcagacacccccaggacagctacgaggacagcacccagagcagcatcttcacctacaccaacagcaacagcaccagaggccccttcgagggccccaactaccacatcgcccccagatgggtgtaccacctgaccagcgtgtggatgatcttcgtggtgatcgccagcgtgttcaccaacggcctggtgctggccgccaccatgaagttcaagaagctgagacaccccctgaactggatcctggtgaacctggccgtggccgacctggccgagaccgtgatcgccagcaccatcagcgtggtgaaccaggtgtacggctacttcgtgctgggccaccccatgtgcgtgctggagggctacaccgtgagcctgtgcggcatcaccggcctgtggagcctggccatcatcagctgggagagatggatggtggtgtgcaagcccttcggcaacgtgagattcgacgccaagctggccatcgtgggcatcgccttcagctggatctgggccgccgtgtggaccgccccccccatcttcggctggagcagatactggccccacggcctgaagaccagctgcggccccgacgtgttcagcggcagcagctaccccggcgtgcagagctacatgatcgtgctgatggtgacctgctgcatcacccccctgagcatcatcgtgctgtgctacctgcaggtgtggctggccatcagagccgtggccaagcagcagaaggagagcgagagcacccagaaggccgagaaggaggtgaccagaatggtggtggtgatggtgctggccttctgcttctgctggggcccctacgccttcttcgcctgcttcgccgccgccaaccccggctaccccttccaccccctgatggccgccctgcccgccttcttcgccaagagcgccaccatctacaaccccgtgatctacgtgttcatgaacagacagttcagaaactgcatcctgcagctgttcggcaagaaggtggacgacggcagcgagctgagcagcgccagcaagaccgaggtgagcagcgtgagcagcgtgagccccgcctag

SEQ ID NO: 34238 - DNA, 1095 bp, Artificial Sequence
  derived and/or modified sequence
atggcacaacagtggtccttgcagaggcttgcagggagacacccccaagacagctatgaggactcaactcagtcaagtatctttacctatacaaattcaaatagtacccgaggacctttcgagggaccaaactaccacattgcgccaagatgggtctaccacctgacaagcgtgtggatgattttcgtggtaattgcctcagtgttcacaaacggactcgtgcttgcagccaccatgaaattcaaaaaactgcgccaccctttgaactggattctagtcaatcttgcagtcgctgatctggcggaaactgtcattgctagcaccatttctgtggtcaaccaggtgtacggatactttgtgctggggcacccaatgtgcgttctagagggctacaccgtgtctttgtgcgggattacaggcctctggagtctggccatcatctcctgggaaagatggatggtggtgtgcaagcccttcgggaatgtaagattcgacgcgaaattggctattgttggtattgcgttctcctggatttgggcagcagtttggacagcaccacccatatttggttggtcgagatactggcctcacggactcaaaacctcttgtgggccagatgttttctcagggagtagttatcccggcgtacaaagctatatgatagtgctaatggtcacctgctgcattacccctctcagtattatcgttctgtgctacttacaggtatggctcgccatccgagctgtggcgaagcaacagaaagaatccgaatctactcagaaggccgaaaaagaggtgacacgcatggtggtggtgatggtacttgcattctgcttttgctggggcccatacgctttcttcgcttgttttgccgccgcaaaccccggctatccctttcatccattgatggctgcactgcccgcgttttttgccaagagcgccactatctataatccagtcatctacgtattcatgaacaggcagttccgaaattgcatcctccaactcttcggcaagaaggtcgatgatggatcagagttatccagtgcaagcaaaacagaggtaagtagtgtttctagtgtctcgccggcgtag

SEQ ID NO: 34239 - DNA, 1095 bp, Artificial Sequence
  derived and/or modified sequence
atggcccagcagtggagcctgcagaggctggccggccgccacccccaggacagctatgaggacagcacccagagcagcatcttcacctacaccaacagcaacagcacccggggcccctttgagggccccaactaccacatcgccccccgctgggtgtaccacctgacctctgtgtggatgatctttgtggtgattgcctctgtgttcaccaacggcctggtgctggccgccaccatgaagttcaagaagctgcggcaccccctgaactggatcctggtgaacctggccgtggccgacctggccgagaccgtgattgccagcaccatctctgtggtgaaccaggtgtatggctactttgtgctgggccaccccatgtgtgtgctggagggctacacagtgtccctgtgtggcatcaccggcctgtggagcctggccatcatctcctgggagcgctggatggtggtgtgcaagccctttggaaatgtgcgctttgatgccaagctggccatcgtgggcatcgccttctcctggatctgggccgctgtgtggacagccccacccatcttcggctggagccgctactggccccacggcctgaagaccagctgtggcccagatgtgttttctggcagcagctacccaggagtgcagagctacatgattgtgctgatggtgacctgctgcatcacccccctgagcatcatcgtgctgtgctacctgcaggtgtggctggccatccgggctgtggccaagcagcagaaggagagcgagagcacccagaaggccgagaaggaggtgaccaggatggtggtggtgatggtgctggccttctgcttctgctggggcccctatgccttctttgcctgctttgctgctgccaaccctggctaccccttccaccccctgatggccgccctgcctgccttctttgccaagagcgccaccatctacaaccctgtgatctacgtgttcatgaaccggcagttcaggaactgcatcctgcagctgtttgggaagaaggtggatgatggcagcgagctgagcagcgccagcaagacagaggtgtcctctgtgtcctctgtgtccccagcctag

SEQ ID NO: 34240 - DNA, 1095 bp, Artificial Sequence
  derived and/or modified sequence
atggcccagcagtggagcctgcagcggctggccggccggcacccccaggattcctatgaggattcaacccagagcagtatctttacctacacaaattccaattccactcggggaccttttgaggggccaaactaccatattgcaccccgatgggtttaccacctaacaagtgtatggatgatttttgtggttatcgcaagcgtgttcactaacggtttggtgctggcagctaccatgaagtttaagaagcttcgccatccactcaattggattttggttaatctagccgtcgcagaccttgcagaaacagtgatcgcttctaccatcagcgtagtgaaccaggtatatgggtatttcgtcctgggtcatccgatgtgtgtgctggaggggtacacagtgagcctctgtgggatcacggggctgtggagcctggctattatttcctgggagaggtggatggttgtctgcaaacctttcggtaacgttagatttgatgccaaactggctatcgttggcatcgcattcagttggatatgggccgccgtgtggaccgccccccccatcttcggctggtcccgttactggcctcatggcctcaaaacaagctgtggacccgatgtattcagcggctcctcctaccccggtgtacagtcctacatgatagtattgatggtgacctgttgcatcactcctttgtcaatcatcgtgctatgctacctgcaggtatggcttgctatcagagcagtggctaagcagcaaaaagagagcgagagcactcagaaagccgagaaggaagtcacacgaatggtagtggtcatggtgctcgcattctgcttctgctggggtccctacgcattctttgcttgctttgcggcagccaacccaggttaccccttccaccccttgatggccgcacttcctgcattctttgcaaagagtgctacaatctacaaccccgtgatttatgtgtttatgaatcgacaatttcggaactgtattctgcagctttttgggaagaaggtcgatgacggaagcgagttaagttctgcctctaagactgaagtgagctctgtgagctccgtgagcccggcctag

SEQ ID NO: 34241 - DNA, 1261 bp, Artificial Sequence
  derived and/or modified sequence
cgtgaccctcaggtgacgcaccagggccggctgccgtcggggacagggctttccatagccatggcccagcagtggagcctccaaaggctcgcaggccgccatccgcaggacagctatgaggacagcacccagtccagcatcttcacctacaccaacagcaactccaccagaggccccttcgaaggcccgaattaccacatcgctcccagatgggtgtaccacctcaccagtgtctggatgatctttgtggtcattgcatccgtcttcacaaatgggcttgtgctggcggccaccatgaagttcaagaagctgcgccacccgctgaactggatcctggtgaacctggcggtcgctgacctggcagagaccgtcatcgccagcactatcagcgttgtgaaccaggtctatggctacttcgtgctgggccaccctatgtgtgtcctggagggctacaccgtctccctgtgtgggatcacaggtctctggtctctggccatcatttcctgggagagatggatggtggtctgcaagccctttggcaatgtgagatttgatgccaagctggccatcgtgggcattgccttctcctggatctgggctgctgtgtggacagccccgcccatctttggttggagcaggtactggccccacggcctgaagacttcatgcggcccagacgtgttcagcggcagctcgtaccccggggtgcagtcttacatgattgtcctcatggtcacctgctgcatcaccccactcagcatcatcgtgctctgctacctccaagtgtggctggccatccgagcggtggcaaagcagcagaaagagtctgaatccacccagaaggcagagaaggaagtgacgcgcatggtggtggtgatggtcctggcattctgcttctgctggggaccctacgccttcttcgcatgctttgctgctgccaaccctggctaccccttccaccctttgatggctgccctgccggccttctttgccaaaagtgccactatctacaaccccgttatctatgtctttatgaaccggcagtttcgaaactgcatcttgcagcttttcgggaagaaggttgacgatggctctgaactctccagcgcctccaaaacggaggtctcatctgtgtcctcggtatcgcctgcatgaggtctgcctcctacccatcccgcccaccggggctttggccacctctcctttccccctccttctccatccctgtaaaataaatgtaatttatctttgccaaaaccaa

SEQ ID NO: 34242 - DNA, 1095 bp, Artificial Sequence
  derived and/or modified sequence
atggcccaacaatggtctctgcagaggctcgccggtcggcaccctcaggactcatatgaagattctacccagagtagtattttcacctacacaaattccaactccactagaggtcccttcgagggtccaaattatcacattgctccaagatgggtgtatcatctcacttctgtttggatgatattcgtggtgatagcttctgtgtttactaatggtctggtgttggcagccaccatgaaattcaagaaattaaggcaccccttaaactggatcctcgtgaatttggcggtggcagacctggctgagaccgtgatcgcgagtactatatccgtagtgaaccaagtatatgggtatttcgtgctgggacaccctatgtgtgtactagagggatataccgtttcactgtgcggcattaccggactgtggagtctggccatcatatcctgggagagatggatggtggtgtgtaagccgttcgggaatgtgaggtttgacgcaaaactcgctattgtcgggattgcattctcatggatatgggctgctgtgtggaccgcccctccgatttttggctggtctaggtattggccacacgggctgaagactagctgtggtcccgatgtttttagtggctctagctatccaggcgtccagtcgtacatgatcgtcctaatggtgacatgttgcatcacccccttgagtattattgtgctgtgctatttgcaggtctggttagcaatcagggccgtagcgaaacagcaaaaagagtccgaatcaacacaaaaagccgagaaagaggtgacacgcatggtggttgtcatggtgctggctttctgcttttgttggggcccttacgcattctttgcctgcttcgccgctgccaatcctggttacccatttcaccctctgatggcagcattacctgcattctttgccaaatctgcgaccatatacaatcctgtcatctacgtattcatgaacagacagttcagaaactgcatactgcagctctttggaaaaaaggtggacgacgggtccgaactgtcttcagcctctaaaacggaggtttctagcgttagctcggtgtccccagcctag

SEQ ID NO: 34243 - DNA, 1095 bp, Artificial Sequence
  derived and/or modified sequence
atggcacagcagtggtcattgcaaagactcgcaggcaggcacccacaggacagctatgaggattccactcagtctagtatatttacctacacaaattctaattcaacacgcggccctttcgagggcccaaattatcatatcgcgcctaggtgggtgtaccatctaacatcggtctggatgatcttcgtcgtgattgcttccgtcttcactaatggcctcgtactcgctgccacgatgaagtttaaaaaactccggcaccccctgaattggattctggtcaaccttgctgtagctgacttagcagaaactgttatcgccagcaccattagcgtagtcaatcaggtgtatggctacttcgtgctggggcatccgatgtgtgtactggaaggctataccgttagcttatgtggaatcacggggctgtggtccctggccattatttcttgggaacgctggatggttgtgtgtaagccgttcggaaacgtcaggtttgacgccaaattggccatagtcggcattgctttttcttggatctgggctgctgtatggacggccccacccattttcggctggtctcgttattggcctcacggactgaagacttcctgtggccccgacgtgtttagcgggtcttcatacccaggcgtgcagagctacatgattgttctcatggttacttgctgcataacccccctgtccataatcgttttgtgctatctgcaggtctggctggcgatccgcgcagtggctaagcagcagaaggaatctgagtccacccagaaggccgagaaagaggtgaccagaatggtcgtagtcatggtgctcgccttttgcttctgctggggcccttacgctttcttcgcatgttttgccgccgccaatccgggttacccttttcatcccctgatggcagcccttcctgcattctttgctaaatccgccaccatttacaatccagtcatctacgtcttcatgaaccgacagttcaggaactgcatcctacaattgtttggcaaaaaggtcgacgatggatccgaactttcttcagcatctaaaacggaggttagctccgtttcctccgtgtcacccgcctag

SEQ ID NO: 34244 - DNA, 1095 bp, Artificial Sequence
  derived and/or modified sequence
atggcccagcagtggagcctgcagcggctggccggccggcacccccaagactcatatgaggactcaacgcaaagctctattttcacctacactaatagtaatagtacacgagggccatttgaagggccaaactaccacattgcgccacggtgggtgtaccacctcacctccgtgtggatgatattcgtagtcatcgctagcgtttttaccaacggtctggtgcttgccgccactatgaagtttaaaaagctgaggcacccactcaactggatcctggtgaatctagccgtcgctgatctagccgaaacagtgattgcctcgacaattagcgtggtgaatcaagtatacggatatttcgtacttggccaccctatgtgcgttctggaaggctatacagtgagtctgtgtggcatcaccggattatggtcacttgccattatttcttgggagcgatggatggtcgtttgtaagcccttcgggaatgttaggttcgatgccaaattggctatagtaggcattgccttttcgtggatctgggccgccgtctggaccgctccaccaatctttgggtggtctagatactggccgcacggccttaaaacctcctgcggccctgatgttttttccggctctagctaccctggggttcaatcttatatgattgtgctgatggttacatgttgcattacacccctcagtattatcgtgctttgttatctgcaggtctggctggctatccgggccgtggctaagcagcaaaaggaatccgagagcacacagaaggctgaaaaagaggtgacacgcatggtggtggtgatggtgctggcattttgtttctgttggggcccatatgcattttttgcatgttttgccgccgccaatcccggttacccgttccaccctctcatggctgcccttcccgccttcttcgccaaatccgctaccatatataaccctgtgatttacgtcttcatgaataggcagttccggaattgcatactccagctctttggaaaaaaggtcgacgacggcagtgagctgagtagtgcctccaaaacagaggtgtctagcgtcagcagcgtgagcccagcttag

SEQ ID NO: 34245 - DNA, 1257 bp, Artificial Sequence
  derived and/or modified sequence
cgtgaccctcaggtgacgcaccagggccggctgccgtcggggacagggctttccatagccatggcccagcagtggagcctccaaaggctcgcaggccgccatccgcaggacagctatgaggacagcacccagtccagcatcttcacctacaccaacagcaactccaccagaggccccttcgaaggcccgaattaccacatcgctcccagatgggtgtaccacctcaccagtgtctggatgatctttgtggtcattgcatccgtcttcacaaatgggcttgtgctggcggccaccatgaagttcaagaagctgcgccacccgctgaactggatcctggtgaacctggcggtcgctgacctggcagagaccgtcatcgccagcactatcagcgttgtgaaccaggtctatggctacttcgtgctgggccaccctatgtgtgtcctggagggctacaccgtctccctgtgtgggatcacaggtctctggtctctggccatcatttcctgggagagatggatggtggtctgcaagccctttggcaatgtgagatttgatgccaagctggccatcgtgggcattgccttctcctggatctgggctgctgtgtggacagccccgcccatctttggttggagcaggtactggccccacggcctgaagacttcatgcggcccagacgtgttcagcggcagctcgtaccccggggtgcagtcttacatgattgtcctcatggtcacctgctgcatcaccccactcagcatcatcgtgctctgctacctccaagtgtggctggccatccgagcggtggcaaagcagcagaaagagtctgaatccacccagaaggcagagaaggaagtgacgcgcatggtggtggtgatggtcctggcattctgcttctgctggggaccatacgccttcttcgcatgctttgctgctgccaaccctggctaccccttccaccctttgatggctgccctgccggccttctttgccaaaagtgccactatctacaaccccgttatctatgtctttatgaaccggcagtttcgaaactgcatcttgcagcttttcgggaagaaggttgacgatggctctgaactctccagcgcctccaaaacggaggtctcatctgtgtcctcggtatcgcctgcatgaggtctgcctcctacccatcccgcccaccggggctttggccacctctcctttccccctccttctccatccctgtaaaataaatgtaatttatctttgccaaaa

SEQ ID NO: 34246 - DNA, 1095 bp, Artificial Sequence
  derived and/or modified sequence
atggcccagcagtggtcactgcagcggcttgccggacggcaccctcaggactcctacgaagactccactcagtcttctattttcacatacactaactctaattcaactcggggtcctttcgaaggccctaactaccacatagcaccgcgatgggtgtatcacttgaccagtgtgtggatgatttttgtggtgattgctagcgttttcacgaatggtctagtgctggcggctaccatgaaatttaagaaactgaggcacccgctaaactggatcctcgtgaacctagccgttgctgatttggcagaaaccgtcatcgctagcacaatctctgtcgtgaatcaagtctacggctattttgtcctgggtcacccaatgtgcgtcttagaaggatatacagtgagtctgtgtgggataacagggctgtggtcccttgctataatctcttgggagaggtggatggtggtgtgtaaacctttcggcaacgtacgctttgacgcaaaactggctatagtgggtatcgcattttcctggatttgggcagccgtctggactgcgcctcccatcttcggctggtcacggtattggccgcacggccttaagacatcctgtggccctgatgtgttttccggaagcagttaccctggtgttcagtcatatatgattgtactgatggtaacttgctgtattactcctctgtcgatcattgttctttgctacctacaagtgtggctcgctatcagagcagtagcgaaacagcaaaaagagtcggaaagcactcagaaagccgagaaagaggtgacccggatggtagtcgtgatggttttggctttttgtttttgttggggaccttatgctttttttgcttgtttcgcagccgcaaaccccggttacccgttccaccctttaatggccgctctgccagccttttttgccaagtcagccaccatctataacccggtgatttacgtgttcatgaatcggcagttccgcaattgtatcctgcagcttttcggaaaaaaggtagatgacgggagtgagttgagctctgcctccaagactgaggtgtcaagtgtgtcatccgtttctcctgcctag

SEQ ID NO: 34247 - protein, 546 aa, Artificial Sequence [sequence omitted]

SEQ ID NO: 34248 - protein, 529 aa, Artificial Sequence
  derived and/or modified sequence
MFYYPNVLQRHTGCFATIWLAATRGSRLVKREYLRVNVVKTCEEILNYVLVRVQPPQPGLPRPRFSLYLSAQLQIGVIRVYSQQCQYLVEDIQHILERLHRAQLQIRIDMETELPSLLLPNHLAMMETLEDAPDPFFGMMSVDPRLPSPFDIPQIRHLLEAAIPERVEEIPPEVPTEPREPERIPVTVLPPEAITILEAEPIRMLEIEGERELPEVSRRELDLLIAEEEAILLEIPRLPPPAPAEVEGIGEALGPEELRLTGWEPGALLMRRPPVPPPPRRRRRRRLLFWDKETQISPEKFQEQLQTRAHCWECPMVQPPERTIRGPAELFRTPTLSGWLPPELLGLWTHCAQPPPKALRRELPEEAAAEEERRKIEVPSEIEVPREALEPSVPLMVSLEISLEAAEEEKSRISLIPPEERWAWPEVEAPEAPALPVVPELPEVPMEMPLVLPPELELLSLEAVHRAVALELQANREPDFSSLVSPLSPRRMAARVFYLLLVLSAQQILHVKQEKPYGRLLIQPGPRFH

SEQ ID NO: 34249 - protein, 74 aa, Artificial Sequence
  derived and/or modified sequence
MFYYPNVLQRHTGCFATIWLAATRGSRLVKREYLRVNVVKTCEEILNYVLVRVQPPQPGLPRPRFSLYLSAQLQ

SEQ ID NO: 34250 - DNA, 1641 bp, Artificial Sequence
  derived and/or modified sequence
atgttttactatcccaacgtcctccagcggcatacagggtgcttcgcaacaatatggcttgccgccacgagagggtcaaggctggttaagcgggagtacctccgagtcaatgtggttaaaacgtgcgaagaaattttaaactatgtgcttgtacgagtccagccgccccagcccggcttgccaagaccaagattctctctttatctttccgcccagctacagataggggtcattcgcgtgtatagccagcagtgccagtatctcgttgaggacatccagcatattttagaacgactgcatcgggctcagttacagatccggattgatatggagacggaactgccaagtctgctccttccgaaccacttggctatgatggaaaccctggaagatgcacccgatccttttttcggaatgatgtctgtggatcccaggctaccttctccctttgatataccccaaataagacatctcctggaagctgcaatcccggagagggtagaggaaatcccgcccgaggtcccaactgaaccccgagaacccgagcgcatacccgtgaccgtactgccacctgaggccatcacaattcttgaggcagagcccatcaggatgctagaaatagaaggtgagcgggaactccccgaggtctccaggcgtgagctcgatcttctgattgctgaagaggaggccatcttactcgaaatccctcgactgccacctcccgctcctgccgaggtggagggcattggagaggcactgggaccagaagagctgcgcctgacaggatgggaacctggcgccctcttgatggaggtcacccccccagaagagttgcgactccctgcaccaccttcaccagagaggagaccgccagtacctcccccaccccgtcgaaggcgcagacggcgcttgttattttgggataaagagacgcagatttcacctgagaaattccaggaacagctacagacccgggcccactgttgggagtgtcctatggtgcaacctcccgagagaaccatcaggggtcctgccgagctgttccgcacgcctactcttagtggttggctcccccctgaactgctgggtctgtggacacattgcgctcagccaccacccaaggcccttcggcgcgagctgcccgaggaggccgcagcagaggaggagaggcgcaagatcgaagtgccatctgagatcgaggttcccagggaagccctggaaccttcagttcccctgatggtatccttagagatcagcctggaggcagctgaagaagagaagtctcgcattagcctaatccctcctgaggagcgatgggcttggcccgaggtggaagcacccgaagcccccgctttgcctgtggttccagaacttccagaggtccctatggagatgccactggtgctgcctcctgaactggaactgctgagcctggaggctgttcatcgagctgtcgcactggagctccaggccaaccgagagcccgatttctcgagtctggtgagtcctctgagtccgcgacgaatggccgccagggtgttttatctgctgctcgtcctgtccgctcagcaaatcctgcacgtgaagcaggaaaagccatatggacgcctgctgatccagccaggcccaaggtttcactag

SEQ ID NO: 34251 - DNA, 1590 bp, Artificial Sequence
  derived and/or modified sequence
atgttttattatcctaacgtgctgcaaagacacaccggatgctttgctaccatttggttagccgccaccaggggaagccgcttggttaagcgggaatatctccgcgtgaacgtggtcaagacctgcgaagaaatacttaactacgtcctcgtcagggtccagccaccacagccgggtctgccacgtcctcgctttagtctgtatctatccgcacagctgcagattggcgtcattcgagtctatagccagcagtgccagtacttggtggaggacattcagcatatccttgaacgtcttcatagagcccagctgcagatccggattgatatggaaaccgaactcccctcgctccttctgcccaatcacctggccatgatggaaaccctcgaggacgcgccagatcccttctttggaatgatgtcagttgacccaagactcccctcccctttcgatatcccacagatccggcaccttctagaggccgcaatacctgagagggtcgaggagataccccccgaagttccaacggaacccagggagccagaacggatacccgtgacagtcctgccccctgaggccattactattcttgaggcagaacccatccgcatgctggagatcgagggcgagagagagctaccggaagtgtcacggcgggaattggacctcctgatagcagaagaagaggcaattctgctggagatccccagactgccaccacctgcaccggccgaagtcgagggaataggcgaagctttgggtcctgaagagctcagattgacagggtgggaaccaggagccctgcttatgaggcggccaccagtgcccccacctccccggcgtcggcgccggcggagactgttgttttgggataaagagactcagattagtccagagaagtttcaggaacagctacagactcgtgcacactgttgggagtgcccgatggtacaacctcctgagcggacaatacgcgggcctgccgagctgttccggacccccactttgagcggttggctccctcccgagctgctaggcctctggacccactgtgcccagcccccgcccaaagctctgcgcagagaactcccggaagaggccgctgctgaagaagagcgacgcaaaattgaagtgccctccgagattgaagtccctcgagaagcattggagcccagtgttcccctgatggtcagtcttgaaatttcgctggaggccgctgaagaagaaaagagtaggattagcctgatccctcctgaagagagatgggcctggcctgaggtggaggcccctgaggccccagctctgccagttgtaccggagctgccggaggtaccaatggaaatgccgttagtgttaccgcctgagttagagctgctatcacttgaagctgtgcaccgcgccgttgcactggaacttcaagctaatcgggaaccagatttcagctccctcgtcagccccttatctcccagaaggatggccgctagggttttctatctgcttcttgtactgagcgcgcagcagatactgcacgtgaaacaggaaaaaccatacggcaggcttctaattcaacccgggcccaggtttcactag

SEQ ID NO: 34252 - DNA, 225 bp, Artificial Sequence
  derived and/or modified sequence
atgttctattaccccaacgtactgcaacgccatacgggctgcttcgccaccatttggctggcggctaccaggggcagcagactcgtgaaacgggagtacctgcgtgtcaacgtggtaaaaacttgcgaggagattctgaattacgtcctcgtgcgagtccagccgcctcagcctgggcttcccaggccgcgcttctcattgtacctatcagcccaactgcagtag

SEQ ID NO: 34253 - DNA, 1641 bp, Artificial Sequence
  derived and/or modified sequence
atgttctattatccgaacgtgttgcagcgccatacaggctgttttgcgacgatttggttggccgcaactagaggctctcgtttagtcaaaagagagtatctgcgcgttaatgttgtcaagacttgtgaggaaatcctcaattacgtgctggtgcgggtccagccgcctcagcccggactccccaggcctagattctcactgtatctctccgcccagctacagatcggagttattagggtgtacagtcagcaatgtcagtatctggtcgaggatatacaacatattcttgagcgattacatcgtgctcagttacagataaggattgacatggagaccgagctgccttcattactgctgccaaatcaccttgcaatgatggagaccctggaggacgcacctgatcctttctttggaatgatgtctgtggatccccgccttcccagcccttttgacattccccagatcagacatctgttggaagcagccattccagagcgggttgaagaaattcctcctgaagtgccaactgaaccacgagaaccagagagaatccctgtgacggtcttaccacccgaggcaatcaccatactggaagccgagcccattaggatgctggagattgagggcgagagggaattgcctgaagtgtcacgccgggagctggacttactgattgccgaggaggaagctatccttttagaaatacccagactacccccacctgcacctgcagaagtggaaggaatcggcgaggcgctaggccccgaggagttgcggcttaccggctgggaacctggagcgctgttgatggaggtgaccccccccgaggagctgcgcttaccggccccccccagtcctgaacgcagaccaccggtgcccccccctccccgtcgacggaggagacgtaggctactcttctgggataaggagacccagatttctcccgagaaatttcaggagcagctgcagaccagagcgcattgttgggagtgccctatggtgcagccacccgagcgaacaatacggggacctgcagaactctttcgtactcccaccctttctggctggctgccgcctgagcttttgggtctgtggacacattgtgctcaaccaccgcccaaggcactgcggagggaactgcccgaagaggctgcagctgaggaagaaaggagaaagattgaagtccctagcgagattgaagttcctagagaagccctggaaccttctgtacctttgatggtgtccctcgaaatttcactagaggccgcagaggaagagaaaagcaggatatcgcttataccccccgaagagaggtgggcatggccagaagtggaggccccagaagcccctgcgctgcccgtggtacctgaactacctgaggtaccaatggagatgcctctggtcctgccacccgaacttgaactgctgtctttagaggcagtgcacagagccgttgccctggagcttcaggctaaccgcgaacccgacttttcaagcctagtgtccccactcagccctcggcgtatggctgctcgagtgttctatcttctcctcgtgctctcagcacagcaaattctacatgtgaagcaagagaagccctacggtcgcttgcttatacagcccggccctcgcttccactag

SEQ ID NO: 34254 - DNA, 1641 bp, Artificial Sequence
  derived and/or modified sequence
atgttctactaccccaacgtgctgcagaggcacacaggctgctttgccaccatctggctggccgccacccggggcagccggctggtgaagcgggagtacctgcgggtgaatgtggtgaagacctgtgaggagatcctgaactacgtgctggtgcgggtgcagcccccccagcccggcctgccccggccccgcttcagcctgtacctgagcgcccagctgcagattggagtcatccgggtgtacagccagcagtgccagtacctggtggaggacatccagcacatcctggagcggctgcaccgggcccagctgcagatcagaattgacatggagacagagctgcccagcctgctgctgcccaaccacctggccatgatggagaccctggaggatgccccagaccccttcttcggcatgatgtctgtggacccccggctgcccagcccctttgacatcccccagatccgccacctgctggaggccgccatccctgagcgggtggaggagatccccccagaggtgcccacagagccccgggagcctgagcgcatccctgtgacagtgctgcccccagaggccatcaccatcctggaggccgagcccatccgcatgctggagattgaaggagagcgggagctgcctgaggtgtcccggcgggagctggacctgctgattgctgaggaggaggccatcctgctggagatcccccggctgcccccaccagccccagctgaggtggagggcattggagaggccctgggccctgaggagctgcggctgaccggctgggagcccggggccctgctgatggaggtgaccccacctgaggagctgcggctgcctgccccacccagccctgagcggcggccccctgtgcccccacctccaagaagaagaagaagaagaaggctgctcttctgggacaaggagacccagatcagccctgagaagttccaggagcagctgcagacccgggcccactgctgggagtgccccatggtgcagcccccagagaggaccatccggggccctgctgagctgttccgcacccccaccctgagcggctggctgcccccagagctgctgggcctgtggacccactgtgcccagcccccacccaaggccctgcggcgggagctgcctgaggaggccgctgctgaggaggagaggaggaagattgaggtgcccagcgagattgaggtgccccgggaggccctggagcccagcgtgcccctgatggtgtccctggagatcagcctggaggccgctgaggaggagaagagccgcatcagcctcatccccccagaggagcgctgggcctggccagaggtggaggcccctgaggccccagccctgcctgtggtgcctgagctgcctgaggtgcccatggagatgcccctggtgctgcccccagagctggagctgctgagcctggaggccgtgcacagagctgtggccctggagctgcaggccaaccgggagccagacttcagcagcctggtgagccccctgagccccaggaggatggccgcccgggtcttctacctgctgctggtgctgagcgcccagcagatcctgcacgtgaagcaggagaagccctacggccgcctgctgatccagcccggcccccgcttccactag

SEQ ID NO: 34255 - DNA, 1590 bp, Artificial Sequence
  derived and/or modified sequence
atgttctactaccccaacgtgctgcagaggcacacaggctgctttgccaccatctggctggccgccacccggggcagccggctggtgaagcgggagtacctgcgggtgaatgtggtgaagacctgtgaggagatcctgaactacgtgctggtgcgggtgcagcccccccagcccggcctgccccggccccgcttcagcctgtacctgagcgcccagctgcagattggagtcatccgggtgtacagccagcagtgccagtacctggtggaggacatccagcacatcctggagcggctgcaccgggcccagctgcagatcagaattgacatggagacagagctgcccagcctgctgctgcccaaccacctggccatgatggagaccctggaggatgccccagaccccttcttcggcatgatgtctgtggacccccggctgcccagcccctttgacatcccccagatccgccacctgctggaggccgccatccctgagcgggtggaggagatccccccagaggtgcccacagagccccgggagcctgagcgcatccctgtgacagtgctgcccccagaggccatcaccatcctggaggccgagcccatccgcatgctggagattgaaggagagcgggagctgcctgaggtgtcccggcgggagctggacctgctgattgctgaggaggaggccatcctgctggagatcccccggctgcccccaccagccccagctgaggtggagggcattggagaggccctgggccctgaggagctgcggctgaccggctgggagcccggggccctgctgatgagaagacctcctgtgcccccaccacccaggagaagaagaagaagaaggctgctcttctgggacaaggagacccagatcagccctgagaagttccaggagcagctgcagacccgggcccactgctgggagtgccccatggtgcagcccccagagaggaccatccggggccctgctgagctgttccgcacccccaccctgagcggctggctgcccccagagctgctgggcctgtggacccactgtgcccagcccccacccaaggccctgcggcgggagctgcctgaggaggccgctgctgaggaggagaggaggaagattgaggtgcccagcgagattgaggtgccccgggaggccctggagcccagcgtgcccctgatggtgtccctggagatcagcctggaggccgctgaggaggagaagagccgcatcagcctcatccccccagaggagcgctgggcctggccagaggtggaggcccctgaggccccagccctgcctgtggtgcctgagctgcctgaggtgcccatggagatgcccctggtgctgcccccagagctggagctgctgagcctggaggccgtgcacagagctgtggccctggagctgcaggccaaccgggagccagacttcagcagcctggtgagccccctgagccccaggaggatggccgcccgggtcttctacctgctgctggtgctgagcgcccagcagatcctgcacgtgaagcaggagaagccctacggccgcctgctgatccagcccggcccccgcttccactag

SEQ ID NO: 34256 - DNA, 225 bp, Artificial Sequence
  derived and/or modified sequence
atgttctactaccccaacgtgctgcagaggcacacaggctgctttgccaccatctggctggccgccacccggggcagccggctggtgaagcgggagtacctgcgggtgaatgtggtgaagacctgtgaggagatcctgaactacgtgctggtgcgggtgcagcccccccagcccggcctgccccggccccgcttcagcctgtacctgagcgcccagctgcagtag

SEQ ID NO: 34257 - DNA, 1641 bp, Artificial Sequence
  derived and/or modified sequence
atgttctactaccccaacgtgctgcagcggcacaccggctgcttcgcaacaatctggcttgccgccacgcgaggcagccggctcgtgaagcgagagtatcttagggtcaatgtcgtgaagacttgcgaggaaatcttaaactatgtactagtacgcgtccaaccccctcagcccggtctccccaggccaaggttttctctgtaccttagtgcccagctgcagatcggggtcatccgcgtgtacagtcagcaatgccagtacctggttgaggatattcagcatatcctcgagcgtctgcatcgcgcccagttgcagattcggatcgacatggaaaccgaattaccatcccttttactgcccaaccaccttgccatgatggagaccctagaggacgcccccgacccctttttcggaatgatgtctgtagacccacggctgcccagcccgtttgatattcctcagatacgacacttactcgaagccgctatcccagagcgagtggaggaaatacccccggaggttccaacggaaccccgggagccagaacggattccggtgacagtcctgccgcccgaggccataacaattttggaggctgagccaatccgtatgttggaaatagagggtgagagagaactgcctgaagtgagcagaagagaactggacctgttaatagcagaggaagaggctatcttgctcgagattccccgcctgcccccaccagcaccagccgaggttgagggcataggcgaggcgcttgggcctgaagaactgcgcttgactgggtgggaacctggcgccctcctgatggaggtgactccccccgaggaactgaggctgcctgcccctccaagtcccgaaagaaggcctccagtgcctcctccacctcgcaggcgcaggcggcgacggctgcttttctgggacaaagagacgcaaattagtcccgagaaattccaggaacagttacagactagggcacactgttgggagtgtcctatggtgcagccacccgagcgcactatcagaggtccagcagaattgtttcgcacaccaacgttgagtggctggttgcctccggaacttctcgggctctggacacactgcgcgcagcccccccctaaggcgctgcggcgagagctgccagaagaggccgcggcagaggaagagcgcagaaagatcgaggtacccagcgagatagaggttcccagggaagcactcgaacctagtgtgcctcttatggtgagcctagagattagtctggaagctgccgaagaagaaaagtcaagaatttctcttatccctcccgaggagcgctgggcgtggcccgaggtggaagcgcccgaggcaccagctctccctgtggtgcctgagctgcccgaggtcccaatggaaatgccacttgtgctgccacctgagttagagctgctttcactagaagctgtgcaccgcgccgtcgctcttgagcttcaagccaaccgcgaaccggatttctcctctttagtgtcacccctcagcccaaggcggatggctgctagggttttttatttgctgctggtgttgtcagcacaacaaattcttcacgttaagcaggagaagccctatggcaggctactgatccaacctgggccacgtttccactag

SEQ ID NO: 34258 - DNA, 1590 bp, Artificial Sequence
  derived and/or modified sequence
atgttctactaccccaacgtgctgcagcggcacaccggctgcttcgccaccatatggcttgcagctactaggggctcaagactggttaagcgcgaatatcttcgggtcaatgtcgtcaaaacctgcgaagagattctgaactacgtcctggtccgggttcagccgcctcagcccggactacctaggcccagattttcgttatacctttccgcgcagctgcagattggggtcatccgtgtgtacagtcaacagtgccagtatctggttgaggacatccagcacatcctggaacgcctgcatagggcacaactgcagattaggatcgacatggaaacagagctgccctctttgctcctgcctaaccatttagcaatgatggagacccttgaggatgcgccagacccattctttggcatgatgtcagttgatccaagacttccttcaccattcgacatccctcagattagacacctcctcgaggccgctatccccgagcgggtggaagagattcctcccgaggtgccaacagagccgcgggagcccgagcggataccggttaccgtactgcctcccgaagcaatcacaattctggaagctgaacctattagaatgctggagatagagggcgaaagagagctaccagaggtgtcccggcgagaactggacctcctgatagcagaagaagaggctattctcctcgagattcctcgcctgccgccccctgcccccgctgaggttgagggaattggcgaggcactggggcctgaggagcttcgcctgaccggatgggagcctggtgccctcctgatgcggaggccacctgtcccacccccgccacgccggcgtaggcgacgcagactcctgttctgggataaagagacccagatttcacctgaaaaatttcaggagcagctgcagacacgggcccactgttgggagtgcccaatggtacaaccgccagagagaacgatacgggggcccgctgaactcttcaggacccctaccctgagtggatggctcccgccggagctgctcggactgtggactcattgcgctcaaccccctccaaaggctctgcggcgggagctccccgaggaagccgccgccgaggaggaacgtagaaagatagaggtgcctagcgagatagaggtcccacgagaggctctggaacccagcgtacctttaatggtctccctggagatctcactggaggcggccgaagaggaaaagtccaggatctcactcattccccctgaggaacgctgggcttggcccgaggttgaggccccggaggctcctgcgctgccagtagttccagagctgcctgaggttccaatggaaatgcctctcgtgcttccacctgaactggaactgttgtctctagaggcagtccacagggccgttgcgctcgaactgcaggctaacagagaaccagacttctcaagcttagtatcacctttgtccccccgcaggatggccgctcgcgtgttctatctgctgcttgtcctgtccgctcagcagatcctccatgtgaagcaggagaagccctacgggcgactgctgattcagccaggccctagatttcactag

SEQ ID NO: 34259 - DNA, 225 bp, Artificial Sequence
  derived and/or modified sequence
atgttctactaccccaacgtgctgcagcggcacaccggctgcttcgccaccatatggctggcagctactcgcggatctcgtctggtgaagagagaatatctacgcgttaatgtggttaaaacctgtgaggagatcctgaactacgtgctggtgcgcgtccagccgccacagccaggtttaccccgccccagattcagcctttacctttccgcacagctacagtag

SEQ ID NO: 34260 - DNA, 1641 bp, Artificial Sequence
  derived and/or modified sequence
atgttctactaccccaacgtgctgcagcggcacaccggctgcttcgctacgatctggctcgccgcgaccaggggcagccgtctagtcaaaagggagtacttgcgtgtcaacgtggtgaaaacctgcgaagaaattctgaattatgtgttagtgcgcgtgcagcccccacaaccaggtctcccccgccctaggttctctctttacctgtccgctcagctccagataggcgtcattagagtgtatagccaacaatgccaatatctagtcgaggatatccaacatatcctggagcgcctacaccgggcccagttgcagattcgcatagacatggagactgagctgcccagcctgctgttgccaaatcacttagcaatgatggaaacactcgaggatgcccctgatccgttctttgggatgatgtccgtggacccacgcttgcccagccctttcgacataccacagattcgacatttactcgaagcggccatcccagaacgagtggaggaaattcctcctgaggtgcctacggaaccacgggaacctgaacgtattcccgtgactgtcctgcctcccgaagctattaccatactggaagcggagcccatcaggatgcttgagatagagggagagagagaactccccgaggtgagtcgcagggaacttgaccttctgatcgctgaagaagaagcaattttgctggaaataccccgcctaccaccacctgcccccgccgaggtggagggcatcggggaagctttagggcccgaggagctccggttgacaggctgggagccgggcgccctcctgatggaggtaactccacccgaagagctgcggctgcccgctcctccttctcctgaaaggaggcccccggtgccacctcccccccggcgtcgccggcggagaaggttgttgttttgggataaagaaacccagatttcacctgagaagtttcaggagcaattacagacccgggcccattgttgggagtgccccatggtgcaaccacctgaacggaccatcagaggcccagcggagcttttccgcacaccaactctgagtggttggctgccccctgagctgctcgggctttggactcactgcgcacagccccccccaaaagcgcttaggcgagagctccctgaagaagccgcagctgaagaggaacgcaggaaaatagaggtcccgagcgagatcgaggttcctcgggaggccttggaacctagtgtacccctcatggtcagtcttgaaatttccctggaagcggcggaagaggagaagtcccggatcagcctgatccctccggaagagaggtgggcttggccagaagtcgaggctccggaggcgcccgctcttcctgtggttcccgagctgcctgaggtgccaatggagatgcctttagtgttgcctcctgaactggaactactttccttggaagccgtgcacagggctgttgcactggaattgcaggctaatagggaaccggatttctcatccctggttagccccctttccccaaggcggatggcagcccgtgttttttatctgctgctcgttctttcggcacaacagatcctccatgtgaagcaggaaaaaccatatggacggctgctcatccagcccggtcctcgattccattag

SEQ ID NO: 34261 - DNA, 1641 bp, Artificial Sequence
  derived and/or modified sequence
atgttctattatcctaacgtgctgcagcgacacactggctgctttgctaccatctggctcgcggcaactcggggatcaagactagtgaaaagggagtatttgcgggtgaacgttgtgaagacatgtgaagaaattctgaattacgtgctggtgagagtacaacctccccagccgggtctgccgaggcccaggttctctctgtacctgtctgctcagctccagatcggggtgatccgagtgtacagtcagcagtgccagtatctggtcgaagacatacagcatatcctggaacgtctccacagagctcagctgcagatccgaatagatatggaaacagagctaccttctctgctcttgccaaaccacctggccatgatggagaccctcgaagacgccccagaccctttttttggaatgatgtctgttgatcctagattgccgtccccatttgacattccccagataagacacctgctggaggctgccattccagaacgagttgaggaaattccaccagaggtgcctaccgagcccagggaacccgaacgcatacccgtcactgtgttaccaccagaagctataacgatcctggaggctgaacctattcgaatgcttgaaatagagggcgagagggagcttcccgaagtaagtaggcgtgagctggacctattaatagccgaagaagaagctattctgctggagataccgaggttgcccccacctgctccagcagaggtggaaggaatcggagaggccttaggcccagaggagttgagactcaccggctgggagccgggagcactcctcatggaggtgaccccaccagaggaactgaggcttcctgctcctcctagccctgagcgaaggccacccgtgcccccaccgcctcgcagacgacggagaaggagacttctcttctgggataaggagacgcagatttcacccgaaaaattccaggagcagctccagaccagagcacattgctgggaatgccctatggtgcagccaccagaacggacaattcggggacctgctgagttgttccggactcctactctgagcggatggctccccccagaattactgggattatggacccattgcgctcagcctccgccaaaggctctgcgaagggaactccccgaagaggccgctgctgaggaggaacgacgcaagatcgaagtgccctctgaaatcgaagtgccgagggaagctctcgagccatccgtcccactgatggtgtcattagaaatcagtctggaggccgcagaggaggagaaaagtcgtattagtttgattcctccagaagagcggtgggcctggcctgaggtggaggctccagaagcacctgccctgccggtggtgccagagctgccggaagtccctatggaaatgcctctcgtgctaccccctgagctggaacttttgtcactcgaggctgtgcaccgcgctgtggccctggagctccaggctaacagagaacctgactttagctccctggtctctccattatcacccaggcgtatggccgctcgcgtgttttaccttcttcttgtgctgtcagcacaacaaatactccacgtgaagcaggagaaaccctatggccgtcttttgattcagcccggaccgaggttccattag

SEQ ID NO: 34262 - DNA, 1590 bp, Artificial Sequence
  derived and/or modified sequence
atgttctattatccaaatgttttacaacggcatacgggatgctttgcaaccatttggctggcagcaacacgcggttctaggttagtcaagcgggagtacctccgcgttaatgtcgttaagacctgcgaggagatacttaattacgtcctagtccgagtgcaacctccccaaccaggcctgccacggcctaggttctcactttatctgtctgcacagctgcagatcggcgtgatcagagtgtacagtcagcagtgtcaatacttggtggaggatattcagcacattctggagaggctccacagggcacagctgcaaattcggatcgatatggaaaccgaattaccgtctctacttttacctaaccacctcgcaatgatggaaacactggaagatgctcctgacccgtttttcggaatgatgagtgtcgatcctcggctgccctcacccttcgatatccctcagattcgccatctgctcgaagccgctatccccgagcgcgtcgaggagattcctcctgaggtccccaccgagcccagggaaccagaacgaatccccgtcacagtgctgcctcccgaggcgatcaccatccttgaggcagagcctatccgtatgcttgagatcgaaggggaacgggagctgcccgaggtatctcggagagaattggatctactgattgctgaggaggaagctattctcctcgaaatacctaggctgcccccacctgctcccgcagaggtagaaggaattggagaggccctggggcctgaagaactgagactcacaggctgggagcccggtgcgttgttaatgcgacggcctcctgtaccaccacctccaaggcggcgacgacgcagaaggctgctgttttgggataaagagacacaaatctctcctgaaaagtttcaggagcagctacagaccagagctcactgctgggagtgtcccatggtgcagccacccgagcggaccattagggggccagctgaactattcaggacccccactctgagcggctggctgcctcctgaactgctcgggctctggactcactgcgcccagccccctccaaaggctctgcggagggagttgccggaggaggccgcagctgaagaggaaaggcgcaaaattgaagtacctagcgaaattgaagtgcccagggaggccttagaaccttctgtgccgcttatggtgtcactcgagattagcctcgaggcagctgaagaggaaaagagcagaattagcctcattcctccagaagaacggtgggcctggcctgaggtcgaagctcctgaagcgccagccctgcctgtggtgccggaactgccggaggttcccatggagatgccacttgtcctgcccccagagttggaactgctatccctagaggccgtccacagagcagtggctctggagcttcaggccaaccgtgaaccagacttcagcagcctggtgtcacccctcagcccgcgaagaatggccgcaagggttttctatctcctacttgtgttgagcgcccagcaaatactgcacgtaaagcaggagaaaccctacgggcgactcctaatacaaccagggccaagattccattag

SEQ ID NO: 34263 - DNA, 225 bp, Artificial Sequence
  derived and/or modified sequence
atgttttactaccctaatgtgcttcaacgtcacacgggctgcttcgcgacaatctggttggccgctacccgcggttccagacttgtgaaaagggaatacctacgggtgaatgtcgtcaagacctgtgaggagatcctgaattacgtactcgtacgcgtgcaacctccgcagccaggactgcctcgcccacgattctccctgtatctctctgcacagctgcagtag

SEQ ID NO: 34264 - DNA, 1641 bp, Artificial Sequence
  derived and/or modified sequence
atgttttactatcccaatgtcctgcagaggcacacaggatgtttcgctacgatttggctggcagcaacacgaggttcaaggcttgtcaaacgagaatacttgagggtgaacgtagtgaagacttgtgaggagatcctgaactatgtactcgttcgggtgcagccgcctcagcccggtctacctcgcccacgatttagtttatatctcagcgcccaactgcagattggagttatccgcgtgtatagccagcagtgtcagtatctcgttgaagacattcagcacatcctggagcggttgcatcgcgcacagctgcaaataagaatagacatggagactgaactcccttccctccttcttcccaaccatctcgccatgatggaaacactggaagacgctcctgacccattcttcgggatgatgtccgtggatcccagactgcccagccctttcgatattccccagattcggcacttactggaggcagctataccggagcgggtggaagagattcccccagaagtgccaacagagccaagagaaccagaacgtatccccgtaacagtgctaccacctgaagccatcacaattctggaagccgaaccaattaggatgctggaaatagaaggagaacgagaactgcccgaagtatctcggagggagctagatcttctaatcgccgaagaagaagctatactcctggagatcccaaggctgcctccaccagcgcctgcggaggtggaaggtattggagaggctctcggaccagaagaacttagactgaccggatgggagcccggagccctcctgatggaggtgaccccacccgaggagctcagactgcccgcacctccatctcccgaacggcgtcctccagtgccacctcctccacggaggagaaggaggaggagactattattttgggacaaagaaacgcaaatttcccccgagaaatttcaagagcaactgcagactcgagcacattgctgggagtgtcccatggtgcagccacctgagaggactataagggggcctgccgagttattccggacaccgacactctccggctggctacctcctgagcttctgggtctgtggacacactgtgctcagccccctcccaaagctctgcgtcgcgaacttccagaggaggccgcagcggaggaggagcggaggaaaatcgaagtgccgagcgagattgaggtccccagagaagccctggaaccatcggttccactgatggtgagcctggagatctcgttagaagcagcagaggaagagaaatcccgtatttccttgattccacctgaagaaaggtgggcttggcctgaggtggaggcccctgaagctcccgctctgcccgtggttcctgaacttcctgaggtgcccatggagatgccgttagtcctgcctccagaattggagctgctgtcgcttgaagcggttcacagagcggtggctttggagctacaggccaacagagagccagatttcagctccttagtcagccccctgtctccacgcagaatggcagcccgagttttttatctgctgcttgttctatccgctcagcagattctgcacgtgaagcaggagaaaccatatgggaggctgttaatccagcccggacccaggtttcactag

SEQ ID NO: 34265 - DNA, 2402 bp, Artificial Sequence
  derived and/or modified sequence
actagaggcgagaaccggagcccattggtcggaacacctcacaatggaccccagcggcgcgcaaaatccttatgattggtttgctggctgcctcgggagaccctgttgccaggatacttggcgttcccgacccgacccccgttccccattggctgtcagggcaaaagccgccatctaatgaggagcgaggtgcggtgccccgaagcgctcgcttcccgcggtgcgatctagtcctgcagtaggcggcccggggccacaccgcggccgcccaagccagtgcaaggcccaggggcctgacatcgctcccagcgctcgaggaccgaggcctgctgtggaggacaccgtgctccctcgggacctgctctggattccggcccggacgtccccttggagctctgcatctccaacctggaacccaacccagaagtctcaagtttgacgcatcacgtggcgtgcggatccactgagggtccacagagaggggcgcccatctcctgcgtctcagttatcctggtgttgggaattctgtgccctaaagaattccgactcagatccgaacggggatctggtggaatcgagggtgaaagaccagagggacaatgttctactatcccaacgtgcttcagcgccacaccggctgctttgccaccatctggctggcggcgactcgcggcagccggttggtgaagcgcgaatacctgagggtgaatgtggtgaaaacctgcgaggaaatcctcaattacgtgctggtacgagtgcaacccccgcagcccggcctgccgcggccccgcttctccctctatctctcagcccaacttcagatcggtgtgatccgcgtctattctcaacaatgccagtacctcgtggaggacatccagcacatcttggagcgcctccaccgtgcccagctgcagatccgaatagatatggagactgagctacccagcctgctgcttcctaaccacctggccatgatggagaccctagaagatgctccagatcccttttttgggatgatgtctgtggatcccagacttcctagtcctttcgatatccctcagattcgacacctcttagaggctgcaatcccagagagagttgaagagatccctcctgaagttcctacagagcccagggagccagagaggattccggtcactgtgctgccacctgaggccatcacgatcctggaggcagagcccatacggatgctggagattgagggtgaacgggagctcccagaggtcagccgccgagaactggacctgctgatcgcagaggaagaagctatcttgttagaaatcccgcggctcccacctccagctcctgcagaggtggaaggaataggagaggcactgggtcctgaggagctgaggctgacaggctgggaacctggggccctactcatggaggtgacccccccggaggagctgcgtctgccagccccacccagcccagagaggaggcccccagtccccccacctcctcgccgccgccgtcgtcgccggttactgttctgggacaaggagactcagatctccccggagaaattccaggaacaactgcaaaccagagcccactgctgggaatgtcctatggtgcagccgcccgagaggaccatcagaggccctgcggagttgttcagaaccccaactctctctggctggctaccccctgaactactgggtctctggacccattgtgcccagccacccccaaaagccctcaggcgagagctgcctgaggaggcagccgctgaggaggaaaggagaaagattgaagttccaagtgagattgaggtcccgagggaggccctggagcccagtgttccccttatggtgtctttagagatctccctagaggcagctgaagaggagaagtcccgcatcagcctcatcccaccagaagaacggtgggcctggcctgaggtggaggcgccagaagctcctgcattgcccgtggtgcctgaactccctgaggtgcccatggagatgcctttggtgctgcccccagagctcgagctgctctcactggaagcagtgcacagggcagtggcactggagctgcaggctaacagggagcccgacttcagcagcctggtgtcacctctcagcccccgcaggatggctgcccgggtcttctacctgctcctggtgctctcagcgcaacagattcttcacgtgaaacaagaaaagccatatggtcgcctcctgatccagccggggcccagattccactgaggttagagtccatttacaaagctgccaggaaaccggccacttctagtaaaccacgtcgtgcctcactgggtcctgcttacctcatttctgaatgtgcatttccagccttcttgctctcagagctattgttcaagcagaaaacaagctgcttttattacagta

SEQ ID NO: 34266 - DNA, 2307 bp, Artificial Sequence
  derived and/or modified sequence
acaatggaccccagcggcgcgcaaaatccttatgattggtttgctggctgcctcgggagaccctgttgccaggatacttggcgttcccgacccgacccccgttccccattggctgtcagggcaaaagccgccatctaatgaggagcgaggtgcggtgccccgaagcgctcgcttcccgcggtgcgatctagtcctgcagtaggcggcccggggccacaccgcggccgcccaagccagtgcaaggcccaggggcctgacatcgctcccagcgctcgaggaccgaggcctgctgtggaggacaccgtgctccctcgggacctgctctggattccggcccggacgtccccttggagctctgcatctccaacctggaacccaacccagaagtctcaagtttgacgcatcacgtggcgtgcggatccactgagggtccacagagaggggcgcccatctcctgcgtctcagttatcctggtgttgggaattctgtgccctaaagaattccgactcagatccgaacggggatctggtggaatcgagggtgaaagaccagagggacaatgttctactatcccaacgtgcttcagcgccacaccggctgctttgccaccatctggctggcggcgactcgcggcagccggttggtgaagcgcgaatacctgagggtgaatgtggtgaaaacctgcgaggaaatcctcaattacgtgctggtacgagtgcaacccccgcagcccggcctgccgcggccccgcttctccctctatctctcagcccaacttcagatcggtgtgatccgcgtctattctcaacaatgccagtacctcgtggaggacatccagcacatcttggagcgcctccaccgtgcccagctgcagatccgaatagatatggagactgagctacccagcctgctgcttcctaaccacctggccatgatggagaccctagaagatgctccagatcccttttttgggatgatgtctgtggatcccagacttcctagtcctttcgatatccctcagattcgacacctcttagaggctgcaatcccagagagagttgaagagatccctcctgaagttcctacagagcccagggagccagagaggattccggtcactgtgctgccacctgaggccatcacgatcctggaggcagagcccatacggatgctggagattgagggtgaacgggagctcccagaggtcagccgccgagaactggacctgctgatcgcagaggaagaagctatcttgttagaaatcccgcggctcccacctccagctcctgcagaggtggaaggaataggagaggcactgggtcctgaggagctgaggctgacaggctgggaacctggggccctactcatgaggaggcccccagtccccccacctcctcgccgccgccgtcgtcgccggttactgttctgggacaaggagactcagatctccccggagaaattccaggaacaactgcaaaccagagcccactgctgggaatgtcctatggtgcagccgcccgagaggaccatcagaggccctgcggagttgttcagaaccccaactctctctggctggctaccccctgaactactgggtctctggacccattgtgcccagccacccccaaaagccctcaggcgagagctgcctgaggaggcagccgctgaggaggaaaggagaaagattgaagttccaagtgagattgaggtcccgagggaggccctggagcccagtgttccccttatggtgtctttagagatctccctagaggcagctgaagaggagaagtcccgcatcagcctcatcccaccagaagaacggtgggcctggcctgaggtggaggcgccagaagctcctgcattgcccgtggtgcctgaactccctgaggtgcccatggagatgcctttggtgctgcccccagagctcgagctgctctcactggaagcagtgcacagggcagtggcactggagctgcaggctaacagggagcccgacttcagcagcctggtgtcacctctcagcccccgcaggatggctgcccgggtcttctacctgctcctggtgctctcagcgcaacagattcttcacgtgaaacaagaaaagccatatggtcgcctcctgatccagccggggcccagattccactgaggttagagtccatttacaaagctgccaggaaaccggccacttctagtaaaccacgtcgtgcctcactgggtcctgcttacctcatttctgaatgtgcatttccagccttcttgctctcagagctattgttcaagcagaaaacaagctgcttttattac

SEQ ID NO: 34267 - DNA, 635 bp, Artificial Sequence
  derived and/or modified sequence
aaaagccgccatctaatgaggagcgaggtgcggtgccccgaagcgctcgcttcccgcggtgcgatctagtcctgcagtaggcggcccggggccacaccgcggccgcccaagccagtgcaaggcccaggggcctgacatcgctcccagcgctcgaggaccgaggcctgctgtggaggacaccgtgctccctcgggacctgctctggattccggcccggacgtccccttggagctctgcatctccaacctggaacccaacccagaagtctcaagtttgacgcatcacgtggcgtgcggatccactgagggtccacagagaggggcgcccatctcctgcgtctcagttatcctgaattccgactcagatccgaacggggatctggtggaatcgagggtgaaagaccagagggacaatgttctactatcccaacgtgcttcagcgccacaccggctgctttgccaccatctggctggcggcgactcgcggcagccggttggtgaagcgcgaatacctgagggtgaatgtggtgaaaacctgcgaggaaatcctcaattacgtgctggtacgagtgcaacccccgcagcccggcctgccgcggccccgcttctccctctatctctcagcccaacttcaga

SEQ ID NO: 34268 - DNA, 2328 bp, Artificial Sequence
  derived and/or modified sequence
atctaatgaggagcgaggtgcggtgccccgaagcgctcgcttcccgcggtgcgatctagtcctgcagtaggcggcccggggccacaccgcggccgcccaagccagtgcaaggcccaggggcctgacatcgctcccagcgctcgaggaccgaggcctgctgtggaggacaccgtgctccctcgggacctgctctggattccggcccggacgtccccttggagctctgcatctccaacctggaacccaacccagaagtctcaagtttgacgcatcacgtggcgtgcggatccactgagggtccacagagaggggcgcccatctcctgcgtctcagttatcctggtaattgtgtatctgcccattgttcgttgcctcattaacttggctttctaggtgcacccaccttgccaccagagaagtccaaatcctgacttctctccaaggtgttgggaattctgtgccctaaagaattccgactcagatccgaacggggatctggtggaatcgagggtgaaagaccagagggacaatgttctactatcccaacgtgcttcagcgccacaccggctgctttgccaccatctggctggcggcgactcgcggcagccggttggtgaagcgcgaatacctgagggtgaatgtggtgaaaacctgcgaggaaatcctcaattacgtgctggtacgagtgcaacccccgcagcccggcctgccgcggccccgcttctccctctatctctcagcccaacttcagatcggtgtgatccgcgtctattctcaacaatgccagtacctcgtggaggacatccagcacatcttggagcgcctccaccgtgcccagctgcagatccgaatagatatggagactgagctacccagcctgctgcttcctaaccacctggccatgatggagaccctagaagatgctccagatcccttttttgggatgatgtctgtggatcccagacttcctagtcctttcgatatccctcagattcgacacctcttagaggctgcaatcccagagagagttgaagagatccctcctgaagttcctacagagcccagggagccagagaggattccggtcactgtgctgccacctgaggccatcacgatcctggaggcagagcccatacggatgctggagattgagggtgaacgggagctcccagaggtcagccgccgagaactggacctgctgatcgcagaggaagaagctatcttgttagaaatcccgcggctcccacctccagctcctgcagaggtggaaggaataggagaggcactgggtcctgaggagctgaggctgacaggctgggaacctggggccctactcatggaggtgacccccccggaggagctgcgtctgccagccccacccagcccagagaggaggcccccagtccccccacctcctcgccgccgccgtcgtcgccggttactgttctgggacaaggagactcagatctccccggagaaattccaggaacaactgcaaaccagagcccactgctgggaatgtcctatggtgcagccgcccgagaggaccatcagaggccctgcggagttgttcagaaccccaactctctctggctggctaccccctgaactactgggtctctggacccattgtgcccagccacccccaaaagccctcaggcgagagctgcctgaggaggcagccgctgaggaggaaaggagaaagattgaagttccaagtgagattgaggtcccgagggaggccctggagcccagtgttccccttatggtgtctttagagatctccctagaggcagctgaagaggagaagtcccgcatcagcctcatcccaccagaagaacggtgggcctggcctgaggtggaggcgccagaagctcctgcattgcccgtggtgcctgaactccctgaggtgcccatggagatgcctttggtgctgcccccagagctcgagctgctctcactggaagcagtgcacagggcagtggcactggagctgcaggctaacagggagcccgacttcagcagcctggtgtcacctctcagcccccgcaggatggctgcccgggtcttctacctgctcctggtgctctcagcgcaacagattcttcacgtgaaacaagaaaagccatatggtcgcctcctgatccagccggggcccagattccactgaggttagagtccatttacaaagctgccaggaaaccggccacttctagtaaaccacgtcgtgcctcactgggtcctgcttacctcatttctgaatgtgcatttccagccttcttgctctcagagctattgttcaagcagaaaacaagctgcttttattaca

SEQ ID NO: 34269 - DNA, 1641 bp, Artificial Sequence
  derived and/or modified sequence
atgttctactaccccaacgtgctgcagagacacaccggctgcttcgccaccatctggctggccgccaccagaggcagcagactggtgaagagagagtacctgagagtgaacgtggtgaagacctgcgaggagatcctgaactacgtgctggtgagagtgcagcccccccagcccggcctgcccagacccagattcagcctgtacctgagcgcccagctgcagatcggcgtgatcagagtgtacagccagcagtgccagtacctggtggaggacatccagcacatcctggagagactgcacagagcccagctgcagatcagaatcgacatggagaccgagctgcccagcctgctgctgcccaaccacctggccatgatggagaccctggaggacgcccccgaccccttcttcggcatgatgagcgtggaccccagactgcccagccccttcgacatcccccagatcagacacctgctggaggccgccatccccgagagagtggaggagatcccccccgaggtgcccaccgagcccagagagcccgagagaatccccgtgaccgtgctgccccccgaggccatcaccatcctggaggccgagcccatcagaatgctggagatcgagggcgagagagagctgcccgaggtgagcagaagagagctggacctgctgatcgccgaggaggaggccatcctgctggagatccccagactgcccccccccgcccccgccgaggtggagggcatcggcgaggccctgggccccgaggagctgagactgaccggctgggagcccggcgccctgctgatggaggtgaccccccccgaggagctgagactgcccgccccccccagccccgagagaagaccccccgtgccccccccccccagaagaagaagaagaagaagactgctgttctgggacaaggagacccagatcagccccgagaagttccaggagcagctgcagaccagagcccactgctgggagtgccccatggtgcagccccccgagagaaccatcagaggccccgccgagctgttcagaacccccaccctgagcggctggctgccccccgagctgctgggcctgtggacccactgcgcccagcccccccccaaggccctgagaagagagctgcccgaggaggccgccgccgaggaggagagaagaaagatcgaggtgcccagcgagatcgaggtgcccagagaggccctggagcccagcgtgcccctgatggtgagcctggagatcagcctggaggccgccgaggaggagaagagcagaatcagcctgatcccccccgaggagagatgggcctggcccgaggtggaggcccccgaggcccccgccctgcccgtggtgcccgagctgcccgaggtgcccatggagatgcccctggtgctgccccccgagctggagctgctgagcctggaggccgtgcacagagccgtggccctggagctgcaggccaacagagagcccgacttcagcagcctggtgagccccctgagccccagaagaatggccgccagagtgttctacctgctgctggtgctgagcgcccagcagatcctgcacgtgaagcaggagaagccctacggcagactgctgatccagcccggccccagattccactag

SEQ ID NO: 34270 - DNA, 1590 bp, Artificial Sequence
  derived and/or modified sequence
atgttctactaccccaacgtgctgcagagacacaccggctgcttcgccaccatctggctggccgccaccagaggcagcagactggtgaagagagagtacctgagagtgaacgtggtgaagacctgcgaggagatcctgaactacgtgctggtgagagtgcagcccccccagcccggcctgcccagacccagattcagcctgtacctgagcgcccagctgcagatcggcgtgatcagagtgtacagccagcagtgccagtacctggtggaggacatccagcacatcctggagagactgcacagagcccagctgcagatcagaatcgacatggagaccgagctgcccagcctgctgctgcccaaccacctggccatgatggagaccctggaggacgcccccgaccccttcttcggcatgatgagcgtggaccccagactgcccagccccttcgacatcccccagatcagacacctgctggaggccgccatccccgagagagtggaggagatcccccccgaggtgcccaccgagcccagagagcccgagagaatccccgtgaccgtgctgccccccgaggccatcaccatcctggaggccgagcccatcagaatgctggagatcgagggcgagagagagctgcccgaggtgagcagaagagagctggacctgctgatcgccgaggaggaggccatcctgctggagatccccagactgcccccccccgcccccgccgaggtggagggcatcggcgaggccctgggccccgaggagctgagactgaccggctgggagcccggcgccctgctgatgagaagaccccccgtgccccccccccccagaagaagaagaagaagaagactgctgttctgggacaaggagacccagatcagccccgagaagttccaggagcagctgcagaccagagcccactgctgggagtgccccatggtgcagccccccgagagaaccatcagaggccccgccgagctgttcagaacccccaccctgagcggctggctgccccccgagctgctgggcctgtggacccactgcgcccagcccccccccaaggccctgagaagagagctgcccgaggaggccgccgccgaggaggagagaagaaagatcgaggtgcccagcgagatcgaggtgcccagagaggccctggagcccagcgtgcccctgatggtgagcctggagatcagcctggaggccgccgaggaggagaagagcagaatcagcctgatcccccccgaggagagatgggcctggcccgaggtggaggcccccgaggcccccgccctgcccgtggtgcccgagctgcccgaggtgcccatggagatgcccctggtgctgccccccgagctggagctgctgagcctggaggccgtgcacagagccgtggccctggagctgcaggccaacagagagcccgacttcagcagcctggtgagccccctgagccccagaagaatggccgccagagtgttctacctgctgctggtgctgagcgcccagcagatcctgcacgtgaagcaggagaagccctacggcagactgctgatccagcccggccccagattccactag

SEQ ID NO: 34271 - DNA, 225 bp, Artificial Sequence
  derived and/or modified sequence
atgttctactaccccaacgtgctgcagagacacaccggctgcttcgccaccatctggctggccgccaccagaggcagcagactggtgaagagagagtacctgagagtgaacgtggtgaagacctgcgaggagatcctgaactacgtgctggtgagagtgcagcccccccagcccggcctgcccagacccagattcagcctgtacctgagcgcccagctgcagtag

SEQ ID NO: 34272 - protein, 344 aa, Artificial Sequence
  derived and/or modified sequence
MKTIQPKMHNSISWAIFTGLAALCLFQGVPVRSGDATFPKAMDNVTVRQGESATLRCTIDNRVTRVAWLNRSTILYAGNDKWCLDPRVVLLSNTQTQYSIEIQNVDVYDEGPYTCSVQTDNHPKTSRVHLIVQVSPKIVEISSDISINEGNNISLTCIATGRPEPTVTWRHISPKAVGFVSEDEYLEIQGITREQSGDYECSASNDVAAPVVRRVKVTVNYPPYISEAKGTGVPVGQKGTLQCEASAVPSAEFQWYKDDKRLIEGKKGVKVENRPFLSKLIFFNVSEHDYGNYTCVASNKLGHTNASIMLFGPGAVSEVSNGTSRRAGCVWLLPLLVLHLLLKF

SEQ ID NO: 34273 - DNA, 1035 bp, Artificial Sequence
  derived and/or modified sequence
atgaaaacaattcaacccaaaatgcataacagtatctcgtgggccatcttcaccggcttggcagccttgtgtcttttccagggggtgcctgtgagaagcggagacgccacctttcccaaggcaatggataatgtgacggtcagacaaggggaaagcgccacgctacggtgtacgattgataatagagttacccgcgtggcctggctcaaccgaagcaccattttgtacgcgggcaacgacaaatggtgcctcgatccccgtgtcgtgctcttatccaacacccagactcagtacagtatcgaaattcagaatgtggacgtgtacgacgagggcccttacacatgtagtgtgcaaacagacaaccatccaaaaacaagccgtgtgcacctcatcgtgcaagtgagccctaagattgtagaaatcagttctgatatcagcatcaacgaaggaaataatattagcctaacatgcatagctactgggaggcccgaacctactgtcacgtggagacatatcagtccgaaggccgtgggcttcgtctcagaggatgagtacttagagatccaaggcattacacgggagcagtcgggtgactacgagtgctctgcttcaaatgatgttgctgcccctgttgtcagaagagtcaaggtgaccgtgaattatcctccctatatttccgaggcaaaaggcacaggggtgccagttggccagaagggaacattgcagtgtgaggctagcgcagtccccagtgctgaattccagtggtacaaggatgacaagcgactgattgagggcaaaaagggtgtaaaagtggagaaccggcccttcctgagcaagcttatttttttcaatgtatctgaacacgactatggcaactacacatgtgttgcatctaataaactaggacatacaaatgccagtatcatgctctttggtcctggcgccgtcagcgaagtttctaacggcacgtctcggagggccggttgtgtttggcttctgccgcttctggttcttcacttactgctgaaattctag

SEQ ID NO: 34274 - DNA, 1035 bp, Artificial Sequence
  derived and/or modified sequence
atgaagaccatccagcccaagatgcacaacagcatctcctgggccatcttcaccggcctggccgccctgtgcctcttccagggcgtgcctgtgcgctctggagatgccaccttccccaaggccatggacaacgtgacagtgcggcagggcgagagcgccaccctgcgctgcaccatcgacaacagagtgaccagggtggcctggctgaacagaagcaccatcctgtatgctggaaatgacaagtggtgcctggacccccgggtggtgctgctgagcaacacccagacccagtacagcattgagatccagaatgtggatgtgtatgatgagggcccctacacctgcagcgtgcagacagacaaccaccccaagaccagccgggtgcacctgattgtgcaggtgagccccaagatcgtggagatcagcagtgacatcagcatcaatgaaggcaacaacatcagcctgacctgcatcgccaccggccggcctgagcccaccgtgacctggaggcacatcagccccaaggctgtgggctttgtgtctgaagatgagtacctggagatccagggcatcacccgggagcagagcggggactatgagtgcagcgccagcaatgatgtggccgcccctgtggtgagaagagtgaaggtgacagtgaactacccaccctacatcagcgaggccaagggcactggagtgcctgtgggccagaagggcaccctgcagtgtgaggccagcgctgtgcccagcgctgagttccagtggtacaaggatgacaagaggctgattgagggcaagaagggcgtgaaggtggagaaccggcccttcctgagcaagctgatcttcttcaacgtgtctgaacatgactatggcaactacacctgtgtggccagcaacaagctgggccacaccaatgccagcatcatgctgtttggacctggagctgtgtctgaggtgtccaatggcaccagcagaagagctggctgtgtgtggctgctgcccctgctggtgctgcacctgctgctgaagttctag

SEQ ID NO: 34275 - DNA, 1035 bp, Artificial Sequence
  derived and/or modified sequence
atgaagaccatccagcccaagatgcacaacagcatcagctgggccatctttaccggtcttgcggccctgtgcctgtttcaaggagtccctgtgaggtctggagacgctacctttcccaaagcgatggataatgtgactgtgcgccagggcgagtcagcgaccctacgctgtacgattgataacagagtgactcgcgtggcttggctgaaccgctctacgattctgtatgccgggaatgataaatggtgccttgatccacgggtcgtgctgctatcgaacacacagacccagtactccatcgagatacagaacgtggatgtgtacgatgaggggccttatacctgttccgtccagaccgataaccaccctaagacttctagggtgcatctgattgtgcaggtttcccccaaaattgttgaaatttcatcagatatcagtatcaacgagggaaataacatttcactgacatgtatcgcaactggcagaccagaaccgacagtgacatggcgtcatatctctcccaaggcagtcggattcgtcagcgaagatgagtatctcgagatacaaggtataacaagagagcaatcaggagactacgaatgttctgcgtccaacgacgtggccgccccggtcgtcagacgcgttaaggtgacagtcaactatccaccctacatctcagaagccaaggggaccggtgtgccggttggccagaaaggcacgctgcagtgcgaagcttccgccgttcctagtgctgagtttcagtggtataaggatgataaaaggttgattgagggcaagaaaggagtaaaagtcgagaatagacccttcctgagcaaattgattttcttcaatgtgagcgagcacgactacggcaattacacgtgcgtcgcctccaacaagctcgggcataccaacgcaagtatcatgctctttggccccggcgccgtgtccgaggtaagcaatggcacaagcagaagggcgggctgtgtgtggctactcccactattggtgctgcacctcctgctcaaattttag

SEQ ID NO: 34276 - DNA, 3040 bp, Artificial Sequence
  derived and/or modified sequence
agagtgtgtgtgcgtgtgtgtgtgtgtgtgtgcccgcgcgcgtgtgttgtagctctgtcaatccttggattagaaccaatgattgcagcttgtaggagggctgtccagggccagattgtacaatgtgtctcagtgccagagtatgagtggagataattacggagaagtcatactctctcacaccctcggctttcttgttgtgtccttcagcaaaacagtggatttaaatctccttgcacaagcttgagagcaacacaatctatcaggaaagaaagaaagaaaaaaaccgaacctgacaaaaaagaagaaaaagaagaagaaaaaaaatcatgaaaaccatccagccaaaaatgcacaattctatctcttgggcaatcttcacggggctggctgctctgtgtctcttccaaggagtgcccgtgcgcagcggagatgccaccttccccaaagctatggacaacgtgacggtccggcagggggagagcgccaccctcaggtgcactattgacaaccgggtcacccgggtggcctggctaaaccgcagcaccatcctctatgctgggaatgacaagtggtgcctggatcctcgcgtggtccttctgagcaacacccaaacgcagtacagcatcgagatccagaacgtggatgtgtatgacgagggcccttacacctgctcggtgcagacagacaaccacccaaagacctctagggtccacctcattgtgcaagtatctcccaaaattgtagagatttcttcagatatctccattaatgaagggaacaatattagcctcacctgcatagcaactggtagaccagagcctacggttacttggagacacatctctcccaaagcggttggctttgtgagtgaagacgaatacttggaaattcagggcatcaccagggagcagtcaggggactacgagtgcagtgcctccaatgacgtggccgcgcccgtggtacggagagtaaaggtcaccgtgaactatccaccatacatttcagaagccaagggtacaggtgtccccgtgggacaaaaggggacactgcagtgtgaagcctcagcagtcccctcagcagaattccagtggtacaaggatgacaaaagactgattgaaggaaagaaaggggtgaaagtggaaaacagacctttcctctcaaaactcatcttcttcaatgtctctgaacatgactatgggaactacacttgcgtggcctccaacaagctgggccacaccaatgccagcatcatgctatttggtccaggcgccgtcagcgaggtgagcaacggcacgtcgaggagggcaggctgcgtctggctgctgcctcttctggtcttgcacctgcttctcaaattttgatgtgagtgccacttccccacccgggaaaggctgccgccaccaccaccaccaacacaacagcaatggcaacaccgacagcaaccaatcagatatatacaaatgaaattagaagaaacacagcctcatgggacagaaatttgagggaggggaacaaagaatactttggggggaaaaaagttttaaaaaagaaattgaaaattgccttgcagatatttaggtacaatggagttttcttttcccaaacgggaagaacacagcacacccggcttggacccactgcaagctgcatcgtgcaacctctttggtgccagtgtgggcaagggctcagcctctctgcccacagagtgcccccacgtggaacattctggagctggccatcccaaattcaatcagtccatagagacgaacagaatgagaccttccggcccaagcgtggcgctgcgggcactttggtagactgtgccaccacggcgtgtgttgtgaaacgtgaaataaaaagagcaagaaagaaaaaggaaacaaaataagaccgtctgacagcaacaacggtcccacaaacaagtcacaaaagataccgttaaacttttttttttttttatcattttactacatgaacatcatggataacaagggattctgattcattattaatttcattaattatattttctgatatgagtctagaacttactgcaaaaacaagacaaaactaaaaaaatacaactgagaagggtgaagagaagtatgtttgttaaacagtaaaaatgaatagtatacttcttaactaggtttacaactggtggaccacacaccaggcactaatcacctggtgaggatttggcatatccaccaaaaaatgcatccgatttaaccaacatctccaccagcgctacggactcctcccaattctgacatctcttgcagacaatactatgctctctacacactgtttagaaatggaaaggtgatctgcactgtatcttgggtttgttggctatgcttcctttgatgacatatattatacagtatatatatacatatattttttttgttagagttctagccattttatttctccgcagggtcctttctcagacattactgcatgctgtatatggcgttagctgtgtgttgatcttctaaaagatgatagagtttactggtaattgtgtaatcagctcctgcctttttattttcttgggttatttacatgtcagagacatttataaaaagtgaaaggataaaaaaaaaaaaaaacaactaataccgggcgcagcatctttccaggtgtggctctgcgctaggccaccccaggtggccccgctttctccattctgccctgtggcgttaacagacagcaagcagctgaacaagcagtaccgtcagtacccacttgctttagcccattatgggaatctctgatgcctttgtgaccactggagagtttaatcctcttggtttattttatttcccacctttgtgtgagtgtgtatgaaagagaagaaaatgcaatttttaggtaatcttttttttttttcccctcccctgaaagtctgggaacctgagagtcctcggggaggggtcctggatgtgatgagggaaagggggattgggggatccgggagggtggggttgtctctgacttgacattaaaaagtgttccatgtccctcttca

SEQ ID NO: 34277 - DNA, 1035 bp, Artificial Sequence
  derived and/or modified sequence
atgaaaaccatccaacctaagatgcataactccatcagttgggccatctttaccggcctagcagcactctgcctgttccaaggagtacccgtccgatcaggggacgctacgtttcctaaggccatggataacgtaacagtccgacagggggagtctgctacattgcggtgcaccattgacaaccgcgtgacacgggttgcgtggttaaacaggtcaaccatcctgtacgcaggtaacgataagtggtgcctcgacccgagagtggtattactaagtaatacgcagacacagtattcaattgagattcagaatgtcgacgtctacgacgaaggaccctatacatgttctgttcagacagataatcaccctaagaccagccgcgtgcaccttatcgtccaggtctcaccgaagattgttgagatcagcagcgacatctcaatcaatgaggggaacaacatctcgctgacatgtattgccaccggacgccctgaaccgacagtgacttggcggcatatctcgcccaaggcggtcggctttgtctctgaggatgaatacctagaaatacaagggataacacgggagcagagcggcgactacgagtgttccgcgtccaatgatgtggctgcccctgtcgtcagacgagtgaaagtcacggtaaactacccgccttacatttctgaagctaaaggtaccggggtacctgtcggtcagaaagggaccctccagtgcgaagcctcggcagtccctagcgcggaattccagtggtataaagacgacaaacggctgatcgagggaaagaagggggttaaagtggagaacaggccttttttatccaagctgatctttttcaacgtatcggagcacgactacgggaattacacttgcgttgcctccaataagctgggccacaccaacgcctctatcatgttatttgggccaggcgcagtctcagaagtgagtaatggtacttcccgacgagccggttgtgtttggctgctgcctctgcttgtcctacacctgctgttgaaattttag

SEQ ID NO: 34278 - DNA, 1035 bp, Artificial Sequence
  derived and/or modified sequence
atgaagaccatccagcccaagatgcacaacagcatcagctgggccatcttcaccggcctggccgccctgtgcctgttccagggcgtgcccgtgagaagcggcgacgccaccttccccaaggccatggacaacgtgaccgtgagacagggcgagagcgccaccctgagatgcaccatcgacaacagagtgaccagagtggcctggctgaacagaagcaccatcctgtacgccggcaacgacaagtggtgcctggaccccagagtggtgctgctgagcaacacccagacccagtacagcatcgagatccagaacgtggacgtgtacgacgagggcccctacacctgcagcgtgcagaccgacaaccaccccaagaccagcagagtgcacctgatcgtgcaggtgagccccaagatcgtggagatcagcagcgacatcagcatcaacgagggcaacaacatcagcctgacctgcatcgccaccggcagacccgagcccaccgtgacctggagacacatcagccccaaggccgtgggcttcgtgagcgaggacgagtacctggagatccagggcatcaccagagagcagagcggcgactacgagtgcagcgccagcaacgacgtggccgcccccgtggtgagaagagtgaaggtgaccgtgaactaccccccctacatcagcgaggccaagggcaccggcgtgcccgtgggccagaagggcaccctgcagtgcgaggccagcgccgtgcccagcgccgagttccagtggtacaaggacgacaagagactgatcgagggcaagaagggcgtgaaggtggagaacagacccttcctgagcaagctgatcttcttcaacgtgagcgagcacgactacggcaactacacctgcgtggccagcaacaagctgggccacaccaacgccagcatcatgctgttcggccccggcgccgtgagcgaggtgagcaacggcaccagcagaagagccggctgcgtgtggctgctgcccctgctggtgctgcacctgctgctgaagttctag

SEQ ID NO: 34279 - protein, 247 aa, Artificial Sequence
  derived and/or modified sequence
MGTSSTDSQQAGHRRCSTSNTSAENLTCLSLPGSPGKTAPLPGPAQAGAGQPLPKGCAAVKAEVGIPAPHTSQEVRIHIRRLLSWAAPGACGLRSTPCALPQALPQARPCPGRWFFPGCSLPTGGAQTILSLWTWRHFLNWALQQREENSGRARRVPPVPRTAPVSKGEGSHPPQNSNGEKVKTITPDVGLHQSLTSDPTVAVLRAKRAPEAHPPRSCSGSLTARVCHMGVCQGQGDTEDGRMTLMG

SEQ ID NO: 34280 - DNA, 744 bp, Artificial Sequence
  derived and/or modified sequence
atgggtacctcatccacagactcccagcaggccgggcatagacggtgttcgacctccaatacctctgccgagaatctgacgtgcctctcactccccggctctcctggcaaaaccgcacccctgcccggtcccgcgcaagccggcgccgggcagcccctgcccaagggctgcgccgcagttaaggccgaggtcggcatcccagctcctcatacctcccaagaagtgcgaatccatatccgacgcttgctgtcatgggcggcccctggtgcttgcggtcttaggtctacaccctgcgctctcccacaagcgctcccacaagcacggccatgtcctggacgatggttttttcctggctgctcactccctactggaggcgcacagactatactgtcactgtggacctggagacactttctgaattgggctctgcagcagagagaggagaactctggcagggcacgccgggtacctcctgttcccaggactgctcctgtgagcaaaggtgagggctcccaccctccacagaattcgaatggcgagaaggtcaaaaccattacgcccgacgtgggcttacaccagagcctgacatccgatcccactgttgccgtgctaagggctaaacgagctcctgaggcccacccccctaggtcctgctcagggagcctgactgctagggtttgccacatgggagtctgccagggacagggagacactgaagatgggagaatgaccttgatgggatag

SEQ ID NO: 34281 - DNA, 744 bp, Artificial Sequence
  derived and/or modified sequence
atgggcacgtcatccaccgattctcagcaagccggccaccgccgttgctcgacgagcaatactagcgctgaaaacctcacctgcctctccctccccggttcgccaggcaaaacggccccattgccaggccctgctcaagccggggcgggacagcccctgcccaaaggatgtgctgccgtcaaggccgaagtgggcatccctgctcctcacacttcccaggaggtcaggattcacatacgcagactgctttcatgggccgcccctggggcctgtggactgcggtctaccccctgcgcactgccacaagccctgcctcaggctagaccttgccccggccgctggtttttcccaggctgctccctgcccacaggcggggcacagaccattctttcgctttggacatggcgccattttttgaactgggctcttcaacagcgggaggaaaatagcggcagagctcgtagagtgcccccggtgcctcgcacggcccctgtgagcaagggcgagggaagccatcctccgcagaatagcaatggggaaaaagtgaagacaatcaccccagatgttggactgcaccagtcattaacgagcgatccaacagtggcggtactgcgggcaaaaagagccccagaagcacatccccctcgctcatgctcaggcagcctgacagcacgcgtctgccacatgggcgtgtgtcaaggccagggcgacaccgaggacgggcgcatgacacttatgggttag

SEQ ID NO: 34282 - DNA, 744 bp, Artificial Sequence
  derived and/or modified sequence
atgggcaccagcagcacagacagccagcaggccggccaccggcgctgcagcaccagcaacaccagcgctgagaacctgacctgcctgagcctgcccggcagccctgggaagacagcccccctgcccggccctgcccaggccggggccggccagcccctgcccaagggctgtgccgctgtgaaggccgaggtgggcatcccagccccccacaccagccaggaggtgcgcatccacatccggcggctgctgtcctgggccgcccctggggcctgtggcctgcggagcaccccctgtgccctgccccaggccctgccccaggcccggccctgccccggccgctggttcttccctggctgcagcctgcccactggaggagcccagaccatcctgagcctgtggacctggaggcacttcctgaactgggccctgcagcagcgggaggagaacagcggccgggcccggcgggtgccccctgtgcccaggacagcccctgtgtccaaaggagagggcagccaccccccccagaacagcaatggagagaaggtgaagaccatcaccccagatgtgggcctgcaccagagcctgaccagtgaccccaccgtggccgtgctgcgggccaagagggcccctgaggcccacccccccaggagctgcagcggcagcctgacagcccgggtgtgccacatgggcgtgtgccagggccagggcgacacagaagatggccgcatgaccctgatgggctag

SEQ ID NO: 34283 - DNA, 744 bp, Artificial Sequence
  derived and/or modified sequence
atgggcaccagcagcaccgacagccagcaggccggccaccggcggtgctccacatctaatacatctgctgagaacttgacatgcctttctctccccggaagtcccggcaaaaccgccccccttcccggcccagcccaggccggagcgggacagcctctcccaaaaggatgcgccgctgtcaaagccgaggtgggaataccagcacctcacacaagccaggaggtgcgcattcatattagaagactgctcagctgggcggcccccggagcttgcggccttcggtccacgccatgcgcactgccccaggccctcccacaagcacgtccttgtcctggtaggtggtttttcccgggctgctccctgcccaccggcggagctcagactatactctctctctggacctggagacattttctcaactgggcgctccagcagagagaggagaatagcggacgcgcgcgtagggttccgcctgtgcctcggaccgctcctgtgtccaaaggcgagggatctcacccgccacagaactccaatggcgagaaggtgaaaactataacacctgatgtaggattgcaccagtcactgacctctgaccctactgttgccgtgctgagagccaagcgagctccggaggcccatcctcccaggagctgcagtggatccttgacagccagggtttgccacatgggtgtgtgtcagggccaaggtgatacagaggacgggcggatgacactgatggggtag

SEQ ID NO: 34284 - DNA, 744 bp, Artificial Sequence
  derived and/or modified sequence
atgggcaccagcagcaccgacagccagcaggccggccaccggcggtgctcaaccagcaacacttcggctgagaatctcacctgcctgtcactcccgggctcgccgggcaagacagctcctctgccgggaccggcccaggctggtgctggacagccactcccaaagggttgtgctgccgttaaggcagaggtggggatccccgcccctcatacgagtcaggaagtcaggatacatattcggcgtctgcttagctgggccgctcctggtgcatgcggcttgcgctctacaccatgcgcgctgccccaggccttgcctcaggcacggccctgtccaggtcggtggttctttcccggatgtagcctaccaacaggcggagcgcagactatcttatcactgtggacttggcggcactttcttaactgggccctgcaacagagagaggagaacagcggcagggcgagacgggtgccgccggtacccagaacggccccagtcagtaagggcgagggcagccatcctccccaaaactccaacggagaaaaggtgaagacaattacccccgatgtgggactccaccagtctcttacctctgatcccactgttgcggttctgagggcaaaaagagctcctgaagcacacccgcctcgctcctgttccggctcactcacagcccgtgtgtgccacatgggcgtatgccaaggtcaaggagacaccgaggatgggagaatgaccctaatgggttag

SEQ ID NO: 34285 - DNA, 744 bp, Artificial Sequence
  derived and/or modified sequence
atgggaacttccagcactgactcacaacaagccggtcacagaaggtgttctaccagcaataccagtgcagaaaatctgacatgcctaagcctccctggtagccctgggaagacagctcctcttcctggtcccgctcaggctggagctggccagcccctgccaaaaggatgtgccgcagttaaagccgaagtgggaattcctgccccacacacttcccaggaagtacgcatccacatccgtaggctgctcagctgggccgctccgggagcctgcggccttcggagcacgccttgtgctctcccacaagctcttcctcaggccagaccttgtccaggtcggtggttctttcctggttgctctctgccgacgggcggtgctcagaccatcttgagtttgtggacatggcgccactttttgaattgggcccttcagcagagggaggagaattccggccgtgcacgtagagtaccccctgtccctaggactgctccagtatctaagggagagggatcccaccccccacaaaatagcaacggcgagaaagtaaaaacaattactcctgatgtcgggttgcatcagtctctgacaagcgaccccacggtggctgtcttacgagccaaacgggcacccgaggcgcatccccctagaagctgctccgggtcgcttaccgctagggtctgccacatgggagtgtgccagggtcagggcgacacagaggatgggagaatgactctcatggggtag

SEQ ID NO: 34286 - DNA, 744 bp, Artificial Sequence
  derived and/or modified sequence
atgggtacttctagcactgacagccagcaggccggtcaccggcgatgtagcacatcaaatacctcagctgagaatttgacctgtctgagcctgccaggcagccccggaaagacagctcctcttccaggccctgcccaggccggagctgggcagcctctgcctaagggttgcgctgccgtgaaggccgaggttgggattcctgctcctcacactagccaggaagtaagaatccacatcaggcggctattaagctgggcagcccctggcgcttgtggcctgcggtctaccccttgcgctttgccccaggccttaccacaagcgagaccatgccccggaagatggttcttcccaggatgcagcttgcctacaggtggcgcacagacaatcctcagtttatggacctggagacacttccttaattgggcattacagcagagggaagagaatagtggcagagccaggagggtgcctccagtccctcgcactgcacccgtgtccaagggagaggggtcccacccaccccaaaactctaatggagaaaaggtgaaaaccatcacaccagatgtgggcttgcaccaatccttaacctccgacccaaccgttgccgtgcttagggctaagcgcgctcccgaagctcacccacctcgttcttgtagtggatcattgaccgcaagagtgtgccacatgggcgtgtgtcagggacagggcgatactgaggacggccgaatgaccctgatgggttag

SEQ ID NO: 34287 - DNA, 1840 bp, Artificial Sequence
  derived and/or modified sequence
ggttacgatagttacttttgttatgtattttaccacaatttttaaaaagcaaaccaaaaccaaccaagagtgcttcccccacacctcaaaatcatcctgcagcagctccctggcccagctctctctcaccctgaccctgggcccctctcccaccacccagggctagccctgtggaccaaccatctctgccagcccctccccgaccctccagccagggaggtggggcgctggccggtgaatggggcaggccaggcccaaaggctggcccagggctcaccagctctggactgggcgtcccgtctgaggtggggatgaccaacatgccagctctgggttttagctgaggatgggcacatcaagcactgacagccagcaagctgggcacaggcgatgctcaacctctaacacatcggctgagaacctcacctgcctctccctgcctgggagccctggcaagacagctcctctcccaggcccagcacaggcaggcgctggacagccacttcctaaggggtgcgcggccgtcaaggcagaggtgggtatccctgcacctcacacctctcaggaggtcaggatccacatccgtcgcctgctttcctgggctgcccctggggcttgtgggctgagatcaaccccttgtgccctgccccaggccctccctcaggcgaggccctgcccaggcaggtggttcttccctggctgttcccttccaacaggtggggcccagaccatcctatctctttggacctggagacatttccttaactgggctttgcagcagagggaagagaacagtggcagagccaggcgcgtacctcctgtgcccaggacagcacctgtaagcaagggggaagggagccacccaccccagaactcaaatggagagaaagtcaagacaatcacccctgacgtggggctgcaccaatccctgacgtctgaccccactgtggctgtcctcagagccaagagggctccagaagcccacccgcctcgaagctgttcagggagcctcacggcccgtgtttgccacatgggtgtgtgccagggccaaggggacacagaagatggcaggatgacactaatggggtgagcagggcacactggtgcctcccatactgccctccagcaccaggcagggtcaccacagccggcaagcactgggcctggggatgtgtgaagagatagggttattgagaagagaaaacagaacgctggtcatccgtggcactcagggctaggcagtccagggagcagaaaacaggggtcccgggcccagtctccctcctggaggtcagagcggagcccctggcactgtgccctggcccagaaccaggctgtgggctccacgctgcacaccccaactcaggagcagaaagcaaacccctgactgtccacactccctgtgactggtccccttcctgccggctcttcacccccagcccatggtggcttcaccccatggcaccagccactgactgcctgcccctccctcccatagtgacactttcctggggtctgcaggtctccggtccacttcatgcagacaggccctgtcccccactggggcccaaggcccaggctaaactacagcccagccatcccaccccaggccgtgaatgccttctccaggagggcaaccaaggatggtgccacatgtgagcacaagcaaaacccggagccaaggcgagtcctgctgggtgcacgtttatcccagccaccgcctccagggcggccgcacaggccctgggcatcaatccagcagggctcccgactcactccctggagaccaggggggacacgggctcacaccacacatctcagaggctaacaggtgggcagg

SEQ ID NO: 34288 - DNA, 1374 bp, Artificial Sequence
  derived and/or modified sequence
ttacttttgttatgtattttaccacaatttttaaaaagcaaaccaaaaccaaccaagagtgcttcccccacacctcaaaatcatcctgcagcagctccctggcccagctctctctcaccctgaccctgggcccctctcccaccacccagggctagccctgtggaccaaccatctctgccagcccctccccgaccctccagccagggaggtggggcgctggccggtgaatggggcaggccaggcccaaaggctggcccagggctcaccagctctggactgggcgtcccgtctgaggtggggatgaccaacatgccagctctgggttttagctgaggatgggcacatcaagcactgacagccagcaagctgggcacaggcgatgctcaacctctaacacatcggctgagaacctcacctgcctctccctgcctgggagccctggcaagacagctcctctcccaggcccagcacaggcaggcgctggacagccacttcctaaggggtgcgcggccgtcaaggcagaggtgggtatccctgcacctcacacctctcaggaggtcaggatccacatccgtcgcctgctttcctgggctgcccctggggcttgtgggctgagatcaaccccttgtgccctgccccaggccctccctcaggcgaggccctgcccaggcaggtggttcttccctggctgttcccttccaacaggtggggcccagaccatcctatctctttggacctggagacatttccttaactgggctttgcagcagagggaagagaacagtggcagagccaggcgcgtacctcctgtgcccaggacagcacctgtaagcaagggggaagggagccacccaccccagaactcaaatggagagaaagtcaagacaatcacccctgacgtggggctgcaccaatccctgacgtctgaccccactgtggctgtcctcagagccaagagggctccagaagcccacccgcctcgaagctgttcagggagcctcacggcccgtgtttgccacatgggtgtgtgccagggccaaggggacacagaagatggcaggatgacactaatggggtgagcagggcacactggtgcctcccatactgccctccagcaccaggcagggtcaccacagccggcaagcactgggcctggggatgtgtgaagagatagggttattgagaagagaaaacagaacgctggtcatccgtggcactcagggctaggcagtccagggagcagaaaacaggggtcccgggcccagtctccctcctggaggtcagagcggagcccctggcactgtgccctggcccagaaccaggctgtgggctccacgctgcacaccccaactcaggagcagaaagcaaacccct

SEQ ID NO: 34289 - DNA, 744 bp, Artificial Sequence
  derived and/or modified sequence
atgggcaccagcagcaccgacagccagcaggccggccacagaagatgcagcaccagcaacaccagcgccgagaacctgacctgcctgagcctgcccggcagccccggcaagaccgcccccctgcccggccccgcccaggccggcgccggccagcccctgcccaagggctgcgccgccgtgaaggccgaggtgggcatccccgccccccacaccagccaggaggtgagaatccacatcagaagactgctgagctgggccgcccccggcgcctgcggcctgagaagcaccccctgcgccctgccccaggccctgccccaggccagaccctgccccggcagatggttcttccccggctgcagcctgcccaccggcggcgcccagaccatcctgagcctgtggacctggagacacttcctgaactgggccctgcagcagagagaggagaacagcggcagagccagaagagtgccccccgtgcccagaaccgcccccgtgagcaagggcgagggcagccaccccccccagaacagcaacggcgagaaggtgaagaccatcacccccgacgtgggcctgcaccagagcctgaccagcgaccccaccgtggccgtgctgagagccaagagagcccccgaggcccacccccccagaagctgcagcggcagcctgaccgccagagtgtgccacatgggcgtgtgccagggccagggcgacaccgaggacggcagaatgaccctgatgggctag

SEQ ID NO: 34290 - protein, 707 aa, Artificial Sequence
  derived and/or modified sequence
MWFFARDPVRDFPFELIPEPPEGGLPGPWALHRGRKKATGSPVSIFVYDVKPGAEEQTQVAKAAFKRFKTLRHPNILAYIDGLETEKCLHVVTEAVTPLGIYLKARVEAGGLKELEISWGLHQIVKALSFLVNDCSLIHNNVCMAAVFVDRAGEWKLGGLDYMYSAQGNGGGPPRKGIPELEQYDPPELADSSGRVVREKWSADMWRLGCLIWEVFNGPLPRAAALRNPGKIPKTLVPHYCELVGANPKVRPNPARFLQNCRAPGGFMSNRFVETNLFLEEIQIKEPAEKQKFFQELSKSLDAFPEDFCRHKVLPQLLTAFEFGNAGAVVLTPLFKVGKFLSAEEYQQKIIPVVVKMFSSTDRAMRIRLLQQMEQFIQYLDEPTVNTQIFPHVVHGFLDTNPAIREQTVKSMLLLAPKLNEANLNVELMKHFARLQAKDEQGPIRCNTTVCLGKIGSYLSASTRHRVLTSAFSRATRDPFAPSRVAGVLGFAATHNLYSMNDCAQKILPVLCGLTVDPEKSVRDQAFKAIRSFLSKLESVSEDPTQLEEVEKDVHAASSPGMGGAAASWAGWAVTGVSSLTSKLIRSHPTTAPTETNIPQRPTPEGHWETQEPPPDGTRLASEYNWGGPESSDKGDPFATLSARPSTQPRPDSWGEDNWEGLETDSRQVKAELARKKREERRREMEAKRAERKVAKGPMKLGARKLD

SEQ ID NO: 34291 - protein, 356 aa, Artificial Sequence
  derived and/or modified sequence
MWFFARDPVRDFPFELIPEPPEGGLPGPWALHRGRKKATGSPVSIFVYDVKPGAEEQTQVAKAAFKRFKTLRHPNILAYIDGLETEKCLHVVTEAVTPLGIYLKARVEAGGLKELEISWGLHQIVKALSFLVNDCSLIHNNVCMAAVFVDRAGEWKLGGLDYMYSAQGNGGGPPRKGIPELEQYDPPELADSSGRVVREKWSADMWRLGCLIWEVFNGPLPRAAALRNPGKIPKTLVPHYCELVGANPKVRPNPARFLQNCRAPGGFMSNRFVETNLFLEEIQPKDPRLKEFLPQPPPLFLPPLQPQATGRRRRRTRTQQRTAALLTDGTTKTGAAWSRRPSLCWPSRTTGAPGAK

SEQ ID NO: 34292 - protein, 791 aa, Artificial Sequence
  derived and/or modified sequence
MWFFARDPVRDFPFELIPEPPEGGLPGPWALHRGRKKATGSPVSIFVYDVKPGAEEQTQVAKAAFKRFKTLRHPNILAYIDGLETEKCLHVVTEAVTPLGIYLKARVEAGGLKELEISWGLHQIVKALSFLVNDCSLIHNNVCMAAVFVDRAGEWKLGGLDYMYSAQGNGGGPPRKGIPELEQYDPPELADSSGRVVREKWSADMWRLGCLIWEVFNGPLPRAAALRNPGKIPKTLVPHYCELVGANPKVRPNPARFLQNCRAPGGFMSNRFVETNLFLEEIQIKEPAEKQKFFQELSKSLDAFPEDFCRHKVLPQLLTAFEFGNAGAVVLTPLFKVGKFLSAEEYQQKIIPVVVKMFSSTDRAMRIRLLQQMEQFIQYLDEPTVNTQIFPHVVHGFLDTNPAIREQTVKSMLLLAPKLNEANLNVELMKHFARLQAKDEQGPIRCNTTVCLGKIGSYLSASTRHRVLTSAFSRATRDPFAPSRVAGVLGFAATHNLYSMNDCAQKILPVLCGLTVDPEKSVRDQAFKAIRSFLSKLESVSEDPTQLEEVEKDVHAASSPGMGGAAASWAGWAVTGVSSLTSKLIRSHPTTAPTETNIPQRPTPEGHWETQEEDKDTAEDSSTADRWDDEDWGSLEQEAESVLAQQDDWSTGGQVSRASQVSNSDHKSSKSPESDWSSWEAEGSWEQGWQEPSSQEPPPDGTRLASEYNWGGPESSDKGDPFATLSARPSTQPRPDSWGEDNWEGLETDSRQVKAELARKKREERRREMEAKRAERKVAKGPMKLGARKLD

SEQ ID NO: 34293 - DNA, 2124 bp, Artificial Sequence
  derived and/or modified sequence
atgtggttcttcgcccgcgacccggtgagggattttccatttgagctgattcccgagccccccgaaggcgggctgcccgggccctgggcattacacagggggaggaagaaagcaactggctccccagtctccatctttgtatacgacgttaagcccggagccgaggagcagacccaggtcgccaaggcagcatttaagaggttcaagaccctgcggcatcctaatatcctggcatacatcgatgggctcgagactgaaaagtgcctgcacgtggtgactgaagctgtcaccccactggggatttatttgaaagcccgcgttgaggccggaggactgaaggaactagagatctcctggggtctgcaccaaattgtaaaggccctcagctttctggttaatgattgcagcctgatccacaacaacgtgtgcatggccgccgtgtttgttgaccgtgctggggagtggaaattaggcggactagattacatgtatagcgctcagggcaacggaggaggtccccctcgcaagggaataccagagcttgagcagtatgacccacctgagctggctgactctagcgggcgggtcgtgagggagaagtggtcggcagacatgtggcgcctgggttgcctgatctgggaagtgttcaacgggccactgcccagggcagccgctctgcggaatcccggtaaaatccccaaaacattggtcccccactactgcgagttagtcggcgcaaacccgaaagtacgaccaaatcccgcacgattcttacaaaactgccgggcaccaggaggattcatgtccaatcggtttgtggagacgaatttattcttggaggagatccaaatcaaggagccggcggaaaagcagaaattttttcaggaactaagtaagtcactggatgccttccctgaagatttctgtcggcataaggtactgccccaactactcactgcctttgagtttggcaatgccggcgccgtcgtgctgacaccgctcttcaaagtaggcaagtttctgagcgccgaagagtaccagcagaagatcatcccagttgtggtgaaaatgttttcttcaactgatcgagctatgagaattcgtttgcttcagcagatggaacagttcattcaatatttggacgagcccacggttaacacccagatttttccacatgtggttcatggattcctagataccaacccggctattcgcgaacaaaccgtcaaatcaatgctgttgctcgcgccaaagttgaatgaggcaaacttgaatgtcgagttgatgaaacatttcgcacggctgcaggccaaggatgaacaaggaccaattagatgtaacacaactgtatgcctgggcaaaattggtagctatctatcagcctcaactcgccaccgggttctgaccagcgcgtttagcagagccactcgagacccatttgccccttcccgcgtcgccggggtgcttggtttcgcagctacacacaatctgtatagcatgaatgactgtgcgcagaagattctccctgttctatgtggcctaactgtggatcctgagaaaagtgtacgcgaccaggctttcaaggccatcagatccttcttgtcaaaactggaaagcgtatctgaagacccaacgcagctagaggaggtggagaaggatgttcacgcagcttctagccctgggatgggtggggcagcagcttcatgggcagggtgggccgttacaggtgtgtctagcctcacttcgaaactcattcgatcccatcctactacggcacctactgagacaaacattcctcagcgccccactcccgaggggcactgggagactcaggaacctccacctgatgggactcggctcgcctctgagtacaattggggaggccccgaatcctcagacaaaggtgatccctttgccaccttaagcgcccgccctagcacacaaccccgccctgactcatggggcgaagacaattgggagggcctcgagacagattctcgccaagtcaaggctgagctggcaaggaagaagcgggaagagcggagacgagagatggaggcaaagagagccgagaggaaggtggctaaggggcctatgaagctcggcgccagaaaactagactag

SEQ ID NO: 34294 - DNA, 2376 bp, Artificial Sequence
  derived and/or modified sequence
atgtggtttttcgcccgagatccagttcgggactttccattcgagctgattcccgaaccacctgagggaggactgcccgggccatgggccctgcataggggtcgcaagaaggctaccgggagcccagtgagcattttcgtgtacgacgtcaagcccggagcagaggaacagactcaagttgctaaagctgcctttaagcgatttaagactttaagacatccgaacattctggcctacatcgatggcttggagactgagaagtgcttgcacgtcgtaacagaggccgtgacacccttaggtatttatctgaaagctagggtcgaggcaggcggtcttaaggaactcgagataagctggggtctgcatcaaatagtgaaggcactaagtttcttggtcaacgattgttctctcattcataataacgtgtgtatggcagctgtgtttgtggatagggccggggagtggaaactagggggtttggattacatgtattcggcccagggtaacgggggtgggcctcctcggaaggggattccagaactggagcaatacgaccctcccgagttagctgattcctctgggagggttgttcgcgaaaagtggagcgcagatatgtggaggttaggctgcctgatctgggaagtttttaacgggccactgccacgcgccgccgcactacggaatcccggcaagatccctaaaacactggttcctcactattgcgaattggtcggggcgaatcctaaagtgcgtcctaatcctgcacggttcctgcagaattgtcgtgcccccggaggtttcatgtccaacagatttgtcgagactaatctctttcttgaagaaattcagattaaggaacccgctgagaaacagaaattttttcaggagctgtctaaaagccttgatgccttccctgaggacttttgccggcataaggtgctgccacagctgctgaccgcgtttgagttcggcaacgcaggtgcagtggtcctcaccccgctgttcaaggtaggcaagttcctgagtgcagaggaatatcagcagaagatcatccccgtggtggtgaagatgttttcatcaaccgaccgagccatgcggatacgcctgctgcaacaaatggaacagtttatccagtatttggacgaaccaacagttaacacccagatcttcccacacgttgtccacggctttttagatacgaatcctgctatacgtgaacagaccgtgaagtcaatgctcctgttggcccccaaattgaacgaggctaacttgaatgttgagctaatgaagcacttcgctcgtctgcaggcaaaggatgagcagggaccaatccgttgtaataccaccgtttgcctgggcaagataggtagctatctgtcagccagcaccaggcatcgcgtgttaacttcagctttttctagggcaacacgagatccttttgctccttccagagtggccggtgtactgggtttcgcagctactcacaacctgtatagcatgaacgattgtgcccagaagatcctgcctgtgctctgtggattgaccgttgaccccgagaaatctgttcgggaccaggcatttaaggccataaggtcatttctctcaaagctggagtcagtgtcagaggaccccacccagttagaggaagtcgagaaggacgtccacgccgcatcttcccctggtatgggaggggccgcagctagctgggctgggtgggccgtgacgggcgtcagctctctgacttctaaactcataaggagtcatccaacaactgctcccacggagaccaacatcccacagaggcccacccccgagggacattgggagacgcaggaggaagataaggataccgccgaagactcgagcaccgcagatcgctgggatgatgaggactggggaagcttagagcaggaagcagagtcagttcttgcgcagcaggatgactggtccaccggtggacaggtgtctcgggccagccaggtttccaacagcgaccacaaatcaagtaaaagccctgaaagcgactggtctagttgggaggccgagggctcctgggagcaaggatggcaggagccaagctctcaggagcctccaccagatggtacgaggctggcaagcgaatacaactggggcggccctgaaagttcagacaagggcgatcctttcgccaccctctcggctaggccctcaacacagccccgaccagattcatggggggaggacaattgggagggattggagaccgatagtcgacaggtaaaagcagaacttgcgcgaaagaaaagagaagaaaggcggagggagatggaagccaaacgggctgaaagaaaagtcgcaaaagggcccatgaaattgggggccaggaagctggactag

SEQ ID NO: 34295 - DNA, 2124 bp, Artificial Sequence
  derived and/or modified sequence
atgtggtttttcgcacgagaccccgtgcgtgatttcccttttgagcttattcctgagccccccgaagggggcctccccggaccatgggctctccaccgcgggcgaaagaaggccactggttcccctgtcagtatatttgtctatgacgtgaaacccggagccgaggagcagactcaggttgccaaggctgcatttaagaggttcaagactcttaggcatcccaatattctggcctacatcgacggtctggagacagagaagtgtctgcacgtcgtaacagaagccgttacgcccctcgggatctatttgaaggcccgggtagaggctggtgggctaaaggagctggaaatttcatgggggctacaccaaattgtcaaagctctgtcattcctcgttaacgattgcagcctgatccacaacaatgtgtgtatggcagccgttttcgtggacagagccggggagtggaaattgggaggcctggactatatgtacagtgctcagggtaatggcggtggacccccacggaagggaatacccgagttggagcagtacgacccgccagaattagccgattcgtccggtagggttgtgagggaaaagtggtccgctgacatgtggagactgggctgtctcatttgggaggtttttaacggacctctccccagggccgccgcgctcaggaatcccgggaagatacccaaaactttagtgccccactactgtgagctcgttggagctaaccctaaggtgaggccgaatccagctcgtttcttacagaactgccgggcccctgggggattcatgtcaaaccgattcgttgaaaccaatctcttcctggaagagatacagatcaaggagcctgccgaaaaacagaaattcttccaggagctgtccaagtcacttgatgcctttccagaagatttttgtaggcacaaggtcttaccccagctgttgaccgccttcgaattcggcaatgccggcgccgtggtgctgactcctcttttcaaagtgggcaagttcctttccgccgaggaataccagcagaagatcatcccagttgtggtgaaaatgttttcatctaccgaccgcgctatgcggattagattactgcagcaaatggagcagtttatacagtaccttgacgagcccaccgtgaatacacagattttcccccacgtggtccacggctttctagataccaacccagctattcgagaacagaccgtcaagtctatgcttctcctggcacccaaactcaatgaagccaatctcaacgtggaattgatgaaacacttcgctagattgcaggcgaaggacgagcaggggcctattagatgcaatacaacagtctgtcttgggaagattggctcatatctgtccgcgtccacccgacaccgagtccttacatcagctttcagcagggccaccagagacccttttgccccatcccgagttgcaggtgtactgggctttgccgccacgcataacctctacagtatgaatgactgcgctcagaagattctgcccgtcctttgcggattaacagtggatcctgagaagagcgtcagagaccaggcatttaaggccatccgcagctttctcagcaagctggagtctgtgtctgaggaccctacccagctggaagaggttgagaaagacgtgcacgccgcatcctctccaggcatgggcggagcagccgcatcatgggccgggtgggctgttacgggcgtgtcaagcctaacatcgaaactcatccggagccatcctacaaccgcacccacggaaaccaacatcccacagcgccctacccctgaaggccattgggaaacccaggagccacctcccgatggcaccagattagccagcgagtataattggggcggtcccgagagttctgataaaggcgatccatttgccaccttgagtgcccgtccctccacccagcccagaccggatagctggggagaggataactgggagggactggagaccgacagtcggcaggtgaaggctgaacttgccagaaaaaaaagagaagaacggaggcgcgaaatggaggcgaagcgggcagaacgaaaggtcgccaaagggccaatgaagttaggagctcggaagctcgactag

SEQ ID NO: 34296 - DNA, 2124 bp, Artificial Sequence
  derived and/or modified sequence
atgtggttctttgcccgggaccctgtgcgggacttcccctttgagctgatccctgagcccccagagggcggcctgcccggcccctgggccctgcaccggggcaggaagaaggccaccggcagccctgtgtccatctttgtgtatgatgtgaagccaggagctgaggagcagacccaggtggccaaggccgccttcaagcgcttcaagaccctgcggcaccccaacatcctggcctacattgatggcctggagacagagaagtgcctgcacgtggtgacagaagctgtgacccccctgggcatctacctgaaggcccgggtggaggccggcggcctgaaggagctggagatctcctggggcctgcaccagatcgtgaaggccctgtccttcctggtgaatgactgcagcctcatccacaacaacgtgtgcatggctgctgtgtttgtggaccgggccggggagtggaagctgggcggcctggactacatgtacagcgcccagggcaatggaggcggcccccccaggaagggcatccctgagctggagcagtatgaccccccagagctggccgacagcagcggccgggtggtgcgggagaagtggagcgctgacatgtggaggctgggctgcctgatctgggaggtgttcaacggccccctgcccagggctgctgccctgagaaatcctgggaagatccccaagaccctggtgccccactactgtgagctggtgggcgccaaccccaaggtgcggcccaacccagcccgcttcctgcagaactgccgggcccctgggggcttcatgagcaacagatttgtggagaccaacctcttcctggaggagatccagatcaaggagcctgctgagaagcagaagttcttccaggagctgagcaagagcctggatgccttccctgaggacttctgccgccacaaggtgctgccccagctgctgacagcctttgaatttggaaatgctggagctgtggtgctgacccccctcttcaaggtgggcaagttcctgtctgctgaggagtaccagcagaagatcatccctgtggtggtgaagatgttcagcagcacagaccgggccatgaggatccggctgctgcagcagatggagcagttcatccagtacctggatgagcccaccgtgaacacccagatcttcccccacgtggtgcacggcttcctggacaccaacccagccatccgggagcagacagtgaagtccatgctgctgctggcccccaagctgaatgaggccaacctgaatgtggagctgatgaagcactttgcccggctgcaggccaaggatgagcagggccccatccgctgcaacaccaccgtgtgcctgggcaagattggcagctacctgagcgccagcaccaggcaccgggtgctgaccagcgccttcagccgggccacccgggacccctttgcccccagccgggtggccggcgtgctgggctttgctgccacccacaacctgtacagcatgaatgactgtgcccagaagatcctgcctgtgctgtgtggcctgactgtggaccctgagaagtctgtgcgggaccaggccttcaaggccatccgctccttcctgagcaagctggagagcgtgtctgaggaccccacccagctggaggaggtggagaaggatgtgcacgccgccagcagccctggcatgggcggggccgccgcctcctgggccggctgggccgtgactggagtgagcagcctgaccagcaagctgatccgcagccaccccaccacagcccccacagagaccaacatcccccagaggcccaccccagagggccactgggagacccaggagcccccaccagatggcacccggctggccagcgagtacaactggggcggccctgagagcagtgacaagggggacccctttgccaccctgagcgcccggcccagcacccagcccaggccagacagctggggcgaggacaactgggagggcctggagacagacagccggcaggtgaaggccgagctggccaggaagaagcgggaggagcggcggcgggagatggaggccaagagagctgagaggaaggtggccaagggccccatgaagctgggcgccaggaagctggactag

SEQ ID NO: 34297 - DNA, 2376 bp, Artificial Sequence
  derived and/or modified sequence
atgtggttctttgcccgggaccctgtgcgggacttcccctttgagctgatccctgagcccccagagggcggcctgcccggcccctgggccctgcaccggggcaggaagaaggccaccggcagccctgtgtccatctttgtgtatgatgtgaagccaggagctgaggagcagacccaggtggccaaggccgccttcaagcgcttcaagaccctgcggcaccccaacatcctggcctacattgatggcctggagacagagaagtgcctgcacgtggtgacagaagctgtgacccccctgggcatctacctgaaggcccgggtggaggccggcggcctgaaggagctggagatctcctggggcctgcaccagatcgtgaaggccctgtccttcctggtgaatgactgcagcctcatccacaacaacgtgtgcatggctgctgtgtttgtggaccgggccggggagtggaagctgggcggcctggactacatgtacagcgcccagggcaatggaggcggcccccccaggaagggcatccctgagctggagcagtatgaccccccagagctggccgacagcagcggccgggtggtgcgggagaagtggagcgctgacatgtggaggctgggctgcctgatctgggaggtgttcaacggccccctgcccagggctgctgccctgagaaatcctgggaagatccccaagaccctggtgccccactactgtgagctggtgggcgccaaccccaaggtgcggcccaacccagcccgcttcctgcagaactgccgggcccctgggggcttcatgagcaacagatttgtggagaccaacctcttcctggaggagatccagatcaaggagcctgctgagaagcagaagttcttccaggagctgagcaagagcctggatgccttccctgaggacttctgccgccacaaggtgctgccccagctgctgacagcctttgaatttggaaatgctggagctgtggtgctgacccccctcttcaaggtgggcaagttcctgtctgctgaggagtaccagcagaagatcatccctgtggtggtgaagatgttcagcagcacagaccgggccatgaggatccggctgctgcagcagatggagcagttcatccagtacctggatgagcccaccgtgaacacccagatcttcccccacgtggtgcacggcttcctggacaccaacccagccatccgggagcagacagtgaagtccatgctgctgctggcccccaagctgaatgaggccaacctgaatgtggagctgatgaagcactttgcccggctgcaggccaaggatgagcagggccccatccgctgcaacaccaccgtgtgcctgggcaagattggcagctacctgagcgccagcaccaggcaccgggtgctgaccagcgccttcagccgggccacccgggacccctttgcccccagccgggtggccggcgtgctgggctttgctgccacccacaacctgtacagcatgaatgactgtgcccagaagatcctgcctgtgctgtgtggcctgactgtggaccctgagaagtctgtgcgggaccaggccttcaaggccatccgctccttcctgagcaagctggagagcgtgtctgaggaccccacccagctggaggaggtggagaaggatgtgcacgccgccagcagccctggcatgggcggggccgccgcctcctgggccggctgggccgtgactggagtgagcagcctgaccagcaagctgatccgcagccaccccaccacagcccccacagagaccaacatcccccagaggcccaccccagagggccactgggagacccaggaggaggacaaggacacagctgaggacagcagcacagctgaccgctgggatgatgaggactggggcagcctggagcaggaggccgagagcgtgctggcccagcaggatgactggagcactggaggccaggtgtcccgggccagccaggtgagcaacagcgaccacaagagcagcaagagccctgagagtgactggagctcctgggaggccgagggctcctgggagcagggctggcaggagcccagcagccaggagcccccaccagatggcacccggctggccagcgagtacaactggggcggccctgagagcagtgacaagggggacccctttgccaccctgagcgcccggcccagcacccagcccaggccagacagctggggcgaggacaactgggagggcctggagacagacagccggcaggtgaaggccgagctggccaggaagaagcgggaggagcggcggcgggagatggaggccaagagagctgagaggaaggtggccaagggccccatgaagctgggcgccaggaagctggactag

SEQ ID NO: 34298 - DNA, 2124 bp, Artificial Sequence
  derived and/or modified sequence
atgtggttcttcgcccgggaccccgtgcgggacttccccttcgagctgatccctgagccacccgaaggcggtctgcccggcccctgggcactacataggggtcgcaagaaggccaccggctctcctgtctcgatcttcgtgtacgatgtcaagccaggggccgaagagcagactcaagttgcaaaagctgctttcaagaggtttaaaacgctccgccatcctaatatcttggcttacatcgatggtctggaaacagaaaagtgcctccacgtggttacagaggctgtaaccccactggggatctatctgaaagcgagggtggaagcaggcggactcaaagagctcgagatctcatggggactccaccagattgtgaaagctctgtctttcttggttaacgattgttccctgatccacaataatgtgtgcatggctgccgtgtttgtcgacagggccggggaatggaagcttgggggtcttgattacatgtactcagcacaggggaacggtggcgggccacctcgaaaggggatcccagagttggaacagtacgaccctcccgaactagcggattcttctggtcgagtcgtgcgcgagaagtggagcgccgacatgtggagactgggctgtttaatatgggaggtgtttaatggcccccttccgcgagcagcggccctacgcaatccaggaaaaatccccaagaccctggtgcctcattactgtgagctggttggtgccaatcctaaggtgcggccaaatccagcacggtttctccagaactgtagggcccccggcggcttcatgagcaatcgcttcgtcgagacaaatctttttttagaggaaattcaaataaaggagcccgccgagaaacagaaattttttcaagaattatcaaagtccctagacgcatttcccgaagatttttgtagacataaagtgcttccacagctgctaactgccttcgaatttggaaacgccggcgcggtcgtgttgacgcccctcttcaaggtcggaaagttcttaagcgccgaggaataccagcagaagattatccctgttgtggtgaagatgttctccagtacggatcgcgccatgcggatacggctgttacaacagatggagcagttcattcagtacctcgatgaacccactgtaaatacacagatttttcctcatgtggttcatgggttccttgataccaatccagccatccgggaacagactgttaaaagcatgctgttgctggctcctaaactcaatgaggccaatttaaacgttgaactgatgaagcactttgcaagattgcaagctaaggacgaacagggacccattagatgtaacaccacggtgtgccttggaaaaataggctcatatctgtctgccagcactcgacaccgcgtccttacatcggctttctctagggcaacaagggatccatttgctccaagtcgcgtggcaggtgttttaggtttcgccgcgacacataatctctactcgatgaatgattgtgcacaaaagattctgcccgtcctctgcggactgaccgtagatccagaaaaaagcgtgcgcgaccaagctttcaaggcaatccggtcttttctttctaagctagaatcagtatcagaggatccgacccagttggaagaagtcgaaaaagatgtgcacgcggcctcttccccaggaatgggaggtgctgctgcttcctgggcgggttgggccgtaactggagtgagcagcctgacctctaagcttatccggtcccatcctaccacggcacctacagagaccaacatacctcagaggcctactccagagggacactgggagacccaagagccaccccctgacgggacacgactggcttccgaatacaattgggggggtcccgaaagcagtgataagggcgatccctttgccacccttagcgctcgtcctagtacccagccaagacccgattcctggggagaggacaactgggaggggctggagacagatagccgccaggtcaaagccgaactagctaggaagaaacgggaggaacgccgaagagagatggaagcaaaacgggccgaaagaaaggtggcgaaggggccgatgaagctgggcgcgcgcaaactcgattag

SEQ ID NO: 34299 - DNA, 2376 bp, Artificial Sequence
  derived and/or modified sequence
atgtggttcttcgcccgggaccccgtgcgggacttccccttcgagcttataccagagccccctgagggcggcctgcccggcccctgggcgcttcataggggaagaaaaaaggcaacaggcagccctgtttcgatatttgtatacgatgtgaagccaggggccgaagaacagacgcaggtcgccaaggctgctttcaaaaggttcaaaacacttagacaccctaatattctggcctacattgacggtctagaaaccgagaaatgcctgcacgtcgttaccgaggcggtcacccctctggggatatatctgaaagcaagggttgaggcgggaggattgaaagaactggaaatctcttgggggcttcatcagatcgtgaaggccctatcatttttggtcaacgattgttcccttatacacaacaacgtgtgtatggcagctgtttttgtggatagagccggagagtggaagctgggcggccttgactacatgtattcagcccagggaaacggcggtggtccaccgagaaagggaatacctgagctggaacagtacgaccctccagagttagctgacagttcagggcgcgtggttagagaaaaatggagcgccgatatgtggagactgggatgcctgatttgggaggtgttcaacggaccactgccaagggccgcagccttacggaatccaggaaagattcccaagacattggtaccccattactgtgagctggtcggtgccaatcccaaggtgagacctaaccctgcacgctttcttcagaactgtagggcccctggcggatttatgtctaatcggtttgtggaaactaatttattcctcgaggaaattcagataaaagaacccgccgagaaacagaagttcttccaagagctgtctaagtccctcgacgcctttcctgaagacttctgcagacacaaagtgctcccccaactgctgactgcctttgaatttggcaatgctggggcggtggtgctgacacctctcttcaaggttgggaagttcctgagcgctgaggagtaccagcaaaagattattcctgtggtggtaaagatgttctcttcaacagatcgcgccatgcggattcgacttttgcagcagatggagcagttcattcaatacctggatgaaccaaccgtgaacacccagatattcccacacgtggtgcatggattcctggacaccaaccccgccatcagggagcaaaccgtgaagagcatgcttctgctggcaccaaaactcaatgaggccaacctaaatgttgagttgatgaagcatttcgcgcggcttcaggcaaaagatgagcagggacctatccggtgtaataccacggtgtgccttggaaagattggctcttacctgtcggcgtcaacacggcaccgagtgttgactagtgcattcagcagagccacacgggacccattcgccccatcaagagtggcaggcgttttaggtttcgccgccactcataacctatactccatgaacgactgtgcacaaaaaattctccccgtgctgtgtggtctgactgtggatcccgaaaaaagcgtgagagaccaggcatttaaagccattcgctccttcctgtccaaactggagagtgtgagcgaggaccccacacagttggaagaagtcgaaaaggacgtccacgcagcctccagccctggcatgggcggggccgctgcaagctgggccggttgggcggtgactggagtgagtagcctgaccagcaagctcatcaggagtcaccccactacagcccccacagagaccaatatccctcagcggcctacccccgagggccactgggagacccaggaagaggataaggacaccgctgaagacagtagtaccgctgatcgatgggatgatgaggactggggaagtcttgaacaggaagctgaaagcgtcttagctcagcaagacgattggtcaacaggtggtcaggtctcacgcgctagtcaagtaagtaactcagaccacaagagtagtaaaagccccgagtctgattggagctcttgggaggccgagggatcatgggagcagggctggcaggagccctcctcccaggagcccccccccgacggcacccggctcgcctcagagtacaactggggtggccccgaaagcagtgataaaggtgaccccttcgctactctgtccgcccgccctagcacacagccccgccccgattcatggggggaagacaattgggaaggattggagacagactcaaggcaggtgaaggccgagttggcccggaagaaacgagaggagaggagacgggagatggaggctaaaagggcagagaggaaggttgccaagggcccaatgaagctcggggcacgcaagttagattag

SEQ ID NO: 34300 - DNA, 2124 bp, Artificial Sequence
  derived and/or modified sequence
atgtggttcttcgcccgggaccccgtgcgggacttccccttcgagttaattcccgagccccccgaaggagggctgcctgggccttgggctcttcataggggaagaaaaaaagctacggggagcccagtcagcatattcgtttatgacgtgaaacccggggccgaagaacagactcaagttgccaaagccgccttcaaacggtttaaaactctgcggcatccaaatattctcgcatacatcgatgggcttgagaccgagaagtgtcttcacgtggttaccgaggcagtaactcctctcgggatataccttaaagcccgggttgaagcaggcgggttaaaggaactggagattagttggggacttcaccaaattgtaaaggcgctgagttttctggtcaacgattgttccttaatacacaacaacgtgtgtatggccgccgttttcgttgaccgggccggcgagtggaaactcggagggttagattatatgtacagtgcgcagggcaatggcggcggccccccgcgtaaagggatacccgaactggagcagtacgacccccccgaactggcagactcctccggcagggtcgtgcgggagaaatggtcagctgacatgtggagactagggtgcctcatttgggaggtttttaacggcccccttccccgggccgctgccttgagaaatcccgggaagattccaaagactctggttccccactactgcgagttggtcggcgccaatcctaaggtccggcccaatcccgcccgattcctgcagaactgtagagcacccggggggtttatgtccaacagattcgtggaaactaacctgtttctggaggagatacaaattaaagaacctgcagagaagcagaaattctttcaggaactcagcaaaagcctcgatgcctttcctgaggatttctgtcggcataaagtgctcccccagcttctaactgccttcgaattcgggaatgccggcgccgtcgtccttacacccctattcaaggtggggaagttcctttcagctgaagagtatcagcagaagatcatacccgttgtggttaaaatgtttagctccacagatagggccatgaggattcggctgctgcagcagatggaacagtttatacagtacctcgacgaacccactgtgaatacacagatcttcccccatgtggtgcacgggtttctagacactaatccagccatcagggagcagacagtaaaaagtatgcttttgctggcacccaagttaaacgaggccaacttgaacgtggaactgatgaaacacttcgctcggctgcaggcaaaggatgagcagggccctataaggtgtaacaccaccgtgtgtctcggaaagataggatcttacctcagtgcgagcactaggcaccgggtgctcacctcagccttttcccgggcaactcgtgacccctttgcgccaagccgggtggccggcgtcctcggctttgctgctacacataacctctattcaatgaacgactgcgcccaaaagatccttcccgtgctgtgtggcctcacagtcgaccccgagaagagcgtgagggaccaggcctttaaagccatccgctcttttctctccaaactagaaagtgtcagtgaggatccaacgcagctggaggaggtagagaaagacgtccatgctgcctcttctcctggcatgggtggcgctgctgcatcttgggctggatgggccgtcacaggcgtatcctccctgactagcaagttaattcgaagccatcccacgaccgctccaacggagactaacatcccacagaggccaacccccgagggccattgggaaacccaggaacctccccctgatggaacacgcctggccagcgagtacaactggggagggcctgagtcttcagataaaggggatccgttcgctactctgtcagctcggccgtccacgcagccccggccagattcctggggcgaagacaattgggaggggctcgagaccgatagccgacaggtgaaagctgagctggcccgcaagaaaagggaggagaggaggcgcgaaatggaagccaaacgcgccgaaaggaaagtcgctaaagggccaatgaagctgggtgcccggaaactggattag

SEQ ID NO: 34301 - DNA, 2124 bp, Artificial Sequence
  derived and/or modified sequence
atgtggttctttgcccgagacccagtgcgtgatttcccattcgaactcatcccggagccacctgaggggggactgcctggcccttgggctttacaccggggtcgcaaaaaagccacagggtcccctgtgagtatctttgtatacgatgtaaagcctggtgcagaagagcagacacaggtggctaaagctgccttcaaaaggttcaagactctgcggcacccaaacattctggcgtacattgacggactcgaaactgagaagtgtctacacgttgtgaccgaggccgttactcccctcggcatttacctaaaagcaagagtggaggccggagggttaaaggagctagagatctcctggggcctgcatcagatcgtcaaagcactttcattcttagtcaatgattgctccctgatccacaataacgtatgtatggccgctgtttttgttgatcgcgcaggcgagtggaagctggggggtctcgattatatgtatagcgctcaggggaatggtggcggtcccccaagaaagggcatccccgaactggaacagtatgacccgcctgagttagccgattctagtggaagagttgtaagagaaaaatggtccgccgacatgtggcggcttggctgcctgatttgggaggtattcaatggtcccctgcctcgcgctgcagccctgcgcaacccaggtaaaattcctaagactctggttcctcattattgtgaactggtcggtgcaaaccccaaggttcgacccaatcccgctaggtttctccaaaattgtagagcacccggaggatttatgagtaaccggttcgtggagaccaacctctttctcgaggagattcaaattaaggaacctgcggagaagcagaaatttttccaggaactgtccaaaagcctggacgcttttcctgaggatttctgtaggcacaaggtcctgcctcaattacttactgcattcgaattcgggaacgccggagccgttgtcctgacgccgctctttaaagtcggcaagtttctgtccgcagaagaatatcagcagaaaataattcccgtcgtggtcaagatgttctcaagtaccgacagagctatgagaattaggctcctgcagcagatggaacaattcatccagtatcttgacgaaccaacggtgaacactcaaatttttccccacgtcgttcatggattcttggacacaaaccctgccatcagagagcaaaccgtcaaatctatgttactgctggccccaaagctcaatgaggctaacttgaacgtcgagctgatgaaacacttcgctagactgcaggccaaagacgagcagggtccgatcagatgcaacacaacggtgtgcctgggcaaaattgggagctacctctccgcatcaactcggcacagagtgctcaccagcgcgttcagtagggccacccgggaccctttcgccccaagtcgggtggccggtgtgttggggtttgccgcaacacataacctgtacagcatgaatgactgtgcccagaaaatcctgcccgtgctctgtggcttgactgtggatcccgaaaaaagtgtcagagatcaggccttcaaagccatcaggagcttcctgagcaagcttgagagtgtttccgaggatcctacgcagctggaagaggtcgagaaagatgtccatgcagcatcttcccctgggatgggaggggctgctgcgtcttgggcagggtgggctgtaaccggcgtgtcctctttgacgtctaagctgatcaggtcacacccaaccacggctccgaccgagacaaacatccctcaacgccctactccagaaggacattgggagacccaagaacccccaccagacggaacaaggctggcgtccgaatacaactggggcggtcccgagagctctgacaaaggcgacccgttcgcaacactgagcgcgcgaccctctacgcaacccaggcccgacagttggggtgaggacaactgggaggggctagaaaccgactcccgccaagtgaaggctgagttggcaagaaagaagagagaggagcgtcgtagggagatggaagccaaaagggcagaacgcaaggtggccaagggccctatgaagttgggggcacgcaaattggattag

SEQ ID NO: 34302 - DNA, 2376 bp, Artificial Sequence
  derived and/or modified sequence
atgtggttttttgccagagacccagtgagagattttccatttgagcttattcccgagcccccagagggcggacttcccggaccttgggcactgcatagaggacggaaaaaggccacggggtcccctgtgagcatttttgtctacgacgttaagccaggtgccgaagagcagacacaggtggccaaagctgcgtttaagcgttttaagacactcagacatcctaacatcctcgcttacatcgatgggcttgagacggaaaaatgcttgcacgtggtgacagaagccgtcaccccgctggggatctatctgaaggctcgggtggaggccggaggtctgaaggagctcgagatcagctggggactgcatcagatcgtcaaggccctgagttttttggttaatgactgcagcctgatccataacaacgtgtgcatggctgctgtctttgttgatcgcgctggggagtggaaattaggcggtctcgactatatgtacagtgcgcaggggaacgggggaggtcccccaaggaaggggattccagagcttgaacagtatgacccacccgaactcgccgactcatcaggacgtgtcgttcgagagaaatggtccgcggacatgtggcgacttggctgtctgatttgggaagtgttcaatggcccacttccaagagcagccgctctgcgcaatcctggtaaaattcccaaaacgctggtgcctcactattgcgaactcgtaggcgctaatccgaaggtgagacctaatcctgcaagattcctgcaaaattgtcgcgcacctggcggttttatgtcaaaccggtttgtggagaccaatttgttcctggaagagattcaaattaaggagccagccgaaaagcagaaattttttcaggagctgtcaaagtcattggacgccttcccagaggacttttgcaggcacaaggtgctgccacagttactgaccgccttcgagttcggcaatgcaggggcagtcgttctaactcctttatttaaagtcgggaagttcttgtctgccgaagagtaccaacagaagatcatccctgtggtcgttaaaatgtttagtagtaccgacagagctatgaggatcagactgctgcagcagatggagcagttcatccagtacttggatgagccaaccgtgaacacgcagatctttccacacgtcgtgcacggctttctggacacgaacccggctattcgggagcagaccgtgaaatccatgctcttattagcgccaaagctaaacgaagctaacctgaatgtggagctcatgaaacactttgctcggctgcaagcaaaggatgagcagggcccaattcgctgcaacactactgtttgccttggcaagatcgggtcctacttatctgccagcactcgacaccgcgtgctcacatctgccttctcccgggctactcgggatccatttgcaccttctcgggtggctggcgttctggggttcgcagcaactcataatttgtattctatgaacgattgcgcgcagaagattttaccggttctctgcggactcactgtcgacccagagaaatcagttcgggaccaggccttcaaagcaatcagatcatttctcagcaaacttgaatcagtaagtgaggacccaacccagttagaggaggtagagaaagatgtgcacgccgcatctagccccggaatgggaggtgcagcggcttcttgggccggatgggccgtgacaggcgtgtcctcactgactagtaaacttataagatcgcaccccacaacggccccaactgagacgaacatcccacagcgacctacaccagagggtcattgggagacacaagaggaggacaaggacacagccgaagacagctcgacggccgaccgctgggatgacgaagactggggctccctcgaacaggaggccgagtctgtgctggcacagcaagacgattggtcgacgggaggccaggtatcccgggcaagccaggtaagcaactcagatcataaaagttccaaatcgcccgagtccgattggagtagttgggaggctgaaggcagctgggagcagggctggcaggaaccaagctcccaggagccccctcctgatggtactcgtctggccagtgaatacaattgggggggacccgagtcctccgacaagggggatccattcgcaacattgtcagcacggccttctacccaacctagaccagattcctggggcgaggacaattgggagggattagaaaccgatagtcgacaggttaaggccgaactggcgcgaaaaaagagggaagagcgcaggagggaaatggaagccaagagagccgaacgaaaggtggccaagggcccaatgaaactaggagctcgaaaactagattag

SEQ ID NO: 34303 - DNA, 2124 bp, Artificial Sequence
  derived and/or modified sequence
atgtggttctttgccagagacccagtacgcgatttccctttcgagcttattcctgagcctccagaagggggactgccgggaccttgggcccttcatagaggaaggaaaaaagcaacgggcagccccgtgagcatctttgtttacgatgtcaaacccggagccgaagagcagacccaagtcgccaaggctgcctttaaacgattcaagacactacgacacccgaatatattggcctacatcgacggtttagaaaccgaaaaatgtctccacgtcgttaccgaggcagtgactccgttaggcatttatcttaaggccagggtagaagctggcggtctgaaggagctcgagattagctggggcttgcaccagatcgtgaaggcactctccttcctggtcaacgactgcagcttaatacacaataacgtttgcatggcagccgtgttcgtggaccgcgctggtgaatggaagctcgggggtctcgattatatgtattcggctcagggcaacgggggtggcccaccgagaaaaggtatacccgagctggagcagtacgacccccctgaactggcagacagctccggccgagtcgtgagggaaaaatggtcagcagatatgtggaggctcggctgcttgatttgggaagtgttcaatggacctctcccaagagcagcagcactcaggaatcctggcaagattccaaaaacactggtgccacattattgcgaactggtgggagctaatcccaaggtccgccctaaccccgcacgcttcttgcagaattgcagagctcccggtggattcatgtccaatcggtttgtcgaaacgaacctgtttctggaggaaattcagattaaggagcctgctgaaaagcagaaattcttccaagaactaagcaagtcactagatgctttcccagaggacttctgtaggcacaaagtccttccccagctgctgactgcattcgaattcgggaacgctggagccgtggtgttgacaccactgttcaaggtgggaaagttcctcagcgctgaggaatatcagcagaagataatacctgtggtggtgaagatgttttcttctaccgacagagctatgagaattagacttcttcaacaaatggagcagttcattcagtatcttgacgagcctactgtgaacactcagatcttcccgcatgttgtgcacggcttcctggacacaaatcccgcaatcagggaacagacggtcaaaagcatgctgctcctcgcccctaaactgaacgaagccaacctgaatgtggagctcatgaagcacttcgccagactccaggccaaagatgagcagggtcctatacggtgcaacaccaccgtgtgcctcgggaaaatagggtcatatctgagtgcaagcacccgacatcgggtgttgacctcagccttttcgcgtgccacccgagaccctttcgcaccatctcgcgttgccggagtgttgggcttcgccgctacacataatctttactccatgaatgactgtgctcagaagattctgccagtgctgtgcgggcttacagtggaccccgagaagtcagtacgcgatcaggcctttaaggctatacggtcctttttatcaaagttggaatcggtgtccgaagatcccactcaacttgaggaagtggagaaggatgtgcatgcagccagttcccctggaatgggcggtgctgctgcttcatgggctggctgggcagtcacaggggtgagctcccttacatcgaagctaatccggagtcacccaaccaccgcccctactgagaccaacatcccccagcggcctaccccagaaggtcattgggagacccaggaaccgcctccagacggtacccgcttggcatcagagtacaactggggcggtccagaaagcagcgataaaggcgatccattcgcgacgttgtccgcgagacctagcactcagcccaggccagacagctggggcgaagataattgggagggtctggagaccgattctaggcaagtaaaagccgagctggcccgaaaaaaaagagaagaaagaaggcgagagatggaggccaaaagggccgagaggaaggtcgccaagggcccaatgaaactgggcgctaggaaactcgattag

SEQ ID NO: 34304 - DNA, 2300 bp, Artificial Sequence
  derived and/or modified sequence
ccggagctaaggcgcccgaacccgcggcggcggtggggacgatgtggttctttgcccgggacccggtccgggactttccgttcgagctcatcccggagcccccagagggcggcctgcccgggccctgggccctgcaccgcggccgcaagaaggccacaggcagccccgtgtccatcttcgtctatgatgtgaagcctggcgcggaagagcagacccaggtggccaaagctgccttcaagcgcttcaaaactctacggcaccccaacatcctggcttacatcgatggactggagacagaaaaatgcctccacgtcgtgacagaggctgtgaccccgttgggaatatacctcaaggcgagagtggaggctggtggcctgaaggagctggagatctcctgggggctacaccagatcgtgaaagccctcagcttcctggtcaacgactgcagcctcatccacaacaatgtctgcatggccgccgtgttcgtggaccgagctggcgagtggaagcttgggggcctggactacatgtattcggcccagggcaacggtgggggacctccccgcaaggggatccccgagcttgagcagtatgaccccccggagttggctgacagcagtggcagagtggtcagagagaagtggtcagcagacatgtggcgcttgggctgcctcatttgggaagtcttcaatgggcccctacctcgggcagcagccctacgcaaccctgggaagatccccaaaacgctggtgccccattactgtgagctggtgggagcaaaccccaaggtgcgtcccaacccagcccgcttcctgcagaactgccgggcacctggtggcttcatgagcaaccgctttgtagaaaccaacctcttcctggaggagattcagatcaaagagccagccgagaagcaaaaattcttccaggagctgagcaagagcctggacgcattccctgaggatttctgtcggcacaaggtgctgccccagctgctgaccgccttcgagttcggcaatgctggggccgttgtcctcacgcccctcttcaaggtgggcaagttcctgagcgctgaggagtatcagcagaagatcatccctgtggtggtcaagatgttctcatccactgaccgggccatgcgcatccgcctcctgcagcagatggagcagttcatccagtaccttgacgagccaacagtcaacacccagatcttcccccacgtcgtacatggcttcctggacaccaaccctgccatccgggagcagacggtcaagtccatgctgctcctggccccaaagctgaacgaggccaacctcaatgtggagctgatgaagcactttgcacggctacaggccaaggatgaacagggccccatccgctgcaacaccacagtctgcctgggcaaaatcggctcctacctcagtgctagcaccagacacagggtccttacctctgccttcagccgagccactagggacccgtttgcaccgtcccgggttgcgggtgtcctgggctttgctgccacccacaacctctactcaatgaacgactgtgcccagaagatcctgcctgtgctctgcggtctcactgtagatcctgagaaatccgtgcgagaccaggccttcaaggccattcggagcttcctgtccaaattggagtctgtgtcggaggacccgacccagctggaggaagtggagaaggatgtccatgcagcctccagccctggcatgggaggagccgcagctagctgggcaggctgggccgtgaccggggtctcctcactcacctccaagctgatccgttcgcacccaaccactgccccaacagaaaccaacattccccaaagacccacgcctgaaggccactgggagacgcaggagccacctcctgacggtacacggctggccagcgagtataactggggtggcccagagtccagcgacaagggcgaccccttcgctaccctgtctgcacgtcccagcacccagccgaggccagactcttggggtgaggacaactgggagggcctcgagactgacagtcgacaggtcaaggctgagctggcccggaagaagcgcgaggagcggcggcgggagatggaggccaaacgcgccgagaggaaggtggccaagggccccatgaagctgggagcccggaagctggactgaaccgtggcggtggcccttcccggctgcggagagcccgccccacagatgtatttattgtacaaaccatgtgagcccggccggcccagccaggccatctcacgtgtacataatcagagccacaataaattctatttc

SEQ ID NO: 34305 - DNA, 2583 bp, Artificial Sequence
  derived and/or modified sequence
cccgccccggctcgggcggccggaggacccggagctaaggcgcccgaacccgcggcggcggtggggacgatgtggttctttgcccgggacccggtccgggactttccgttcgagctcatcccggagcccccagagggcggcctgcccgggccctgggccctgcaccgcggccgcaagaaggccacaggcagccccgtgtccatcttcgtctatgatgtgaagcctggcgcggaagagcagacccaggtggccaaagctgccttcaagcgcttcaaaactctacggcaccccaacatcctggcttacatcgatggactggagacagaaaaatgcctccacgtcgtgacagaggctgtgaccccgttgggaatatacctcaaggcgagagtggaggctggtggcctgaaggagctggagatctcctgggggctacaccagatcgtgaaagccctcagcttcctggtcaacgactgcagcctcatccacaacaatgtctgcatggccgccgtgttcgtggaccgagctggcgagtggaagcttgggggcctggactacatgtattcggcccagggcaacggtgggggacctccccgcaaggggatccccgagcttgagcagtatgaccccccggagttggctgacagcagtggcagagtggtcagagagaagtggtcagcagacatgtggcgcttgggctgcctcatttgggaagtcttcaatgggcccctacctcgggcagcagccctacgcaaccctgggaagatccccaaaacgctggtgccccattactgtgagctggtgggagcaaaccccaaggtgcgtcccaacccagcccgcttcctgcagaactgccgggcacctggtggcttcatgagcaaccgctttgtagaaaccaacctcttcctggaggagattcagatcaaagagccagccgagaagcaaaaattcttccaggagctgagcaagagcctggacgcattccctgaggatttctgtcggcacaaggtgctgccccagctgctgaccgccttcgagttcggcaatgctggggccgttgtcctcacgcccctcttcaaggtgggcaagttcctgagcgctgaggagtatcagcagaagatcatccctgtggtggtcaagatgttctcatccactgaccgggccatgcgcatccgcctcctgcagcagatggagcagttcatccagtaccttgacgagccaacagtcaacacccagatcttcccccacgtcgtacatggcttcctggacaccaaccctgccatccgggagcagacggtcaagtccatgctgctcctggccccaaagctgaacgaggccaacctcaatgtggagctgatgaagcactttgcacggctacaggccaaggatgaacagggccccatccgctgcaacaccacagtctgcctgggcaaaatcggctcctacctcagtgctagcaccagacacagggtccttacctctgccttcagccgagccactagggacccgtttgcaccgtcccgggttgcgggtgtcctgggctttgctgccacccacaacctctactcaatgaacgactgtgcccagaagatcctgcctgtgctctgcggtctcactgtagatcctgagaaatccgtgcgagaccaggccttcaaggccattcggagcttcctgtccaaattggagtctgtgtcggaggacccgacccagctggaggaagtggagaaggatgtccatgcagcctccagccctggcatgggaggagccgcagctagctgggcaggctgggccgtgaccggggtctcctcactcacctccaagctgatccgttcgcacccaaccactgccccaacagaaaccaacattccccaaagacccacgcctgaaggccactgggagacgcaggaggaggacaaggacacagcagaggacagcagcactgctgacagatgggacgacgaagactggggcagcctggagcaggaggccgagtctgtgctggcccagcaggacgactggagcaccgggggccaagtgagccgtgctagtcaggtcagcaactccgaccacaaatcctccaaatccccagagtccgactggagcagctgggaagctgagggctcctgggaacagggctggcaggagccaagctcccaggagccacctcctgacggtacacggctggccagcgagtataactggggtggcccagagtccagcgacaagggcgaccccttcgctaccctgtctgcacgtcccagcacccagccgaggccagactcttggggtgaggacaactgggagggcctcgagactgacagtcgacaggtcaaggctgagctggcccggaagaagcgcgaggagcggcggcgggagatggaggccaaacgcgccgagaggaaggtggccaagggccccatgaagctgggagcccggaagctggactgaaccgtggcggtggcccttcccggctgcggagagcccgccccacagatgtatttattgtacaaaccatgtgagcccggccggcccagccaggccatctcacgtgtacataatcagagccacaataaattctatttcaca

SEQ ID NO: 34306 - DNA, 2303 bp, Artificial Sequence
  derived and/or modified sequence
ccggagctaaggcgcccgaacccgcggcggcggtggggacgatgtggttctttgcccgggacccggtccgggactttccgttcgagctcatcccggagcccccagagggcggcctgcccgggccctgggccctgcaccgcggccgcaagaaggccacaggcagccccgtgtccatcttcgtctatgatgtgaagcctggcgcggaagagcagacccaggtggccaaagctgccttcaagcgcttcaaaactctacggcaccccaacatcctggcttacatcgatggactggagacagaaaaatgcctccacgtcgtgacagaggctgtgaccccgttgggaatatacctcaaggcgagagtggaggctggtggcctgaaggagctggagatctcctgggggctacaccagatcgtgaaagccctcagcttcctggtcaacgactgcagcctcatccacaacaatgtctgcatggccgccgtgttcgtggaccgagctggcgagtggaagcttgggggcctggactacatgtattcggcccagggcaacggtgggggacctccccgcaaggggatccccgagcttgagcagtatgaccccccggagttggctgacagcagtggcagagtggtcagagagaagtggtcagcagacatgtggcgcttgggctgcctcatttgggaagtcttcaatgggcccctacctcgggcagcagccctacgcaaccctgggaagatccccaaaacgctggtgccccattactgtgagctggtgggagcaaaccccaaggtgcgtcccaacccagcccgcttcctgcagaactgccgggcacctggtggcttcatgagcaaccgctttgtagaaaccaacctcttcctggaggagattcagatcaaagagccagccgagaagcaaaaattcttccaggagctgagcaagagcctggacgcattccctgaggatttctgtcggcacaaggtgctgccccagctgctgaccgccttcgagttcggcaatgctggggccgttgtcctcacgcccctcttcaaggtgggcaagttcctgagcgctgaggagtatcagcagaagatcatccctgtggtggtcaagatgttctcatccactgaccgggccatgcgcatccgcctcctgcagcagatggagcagttcatccagtaccttgacgagccaacagtcaacacccagatcttcccccacgtcgtacatggcttcctggacaccaaccctgccatccgggagcagacggtcaagtccatgctgctcctggccccaaagctgaacgaggccaacctcaatgtggagctgatgaagcactttgcacggctacaggccaaggatgaacagggccccatccgctgcaacaccacagtctgcctgggcaaaatcggctcctacctcagtgctagcaccagacacagggtccttacctctgccttcagccgagccactagggacccgtttgcaccgtcccgggttgcgggtgtcctgggctttgctgccacccacaacctctactcaatgaacgactgtgcccagaagatcctgcctgtgctctgcggtctcactgtagatcctgagaaatccgtgcgagaccaggccttcaaggccattcggagcttcctgtccaaattggagtctgtgtcggaggacccgacccagctggaggaagtggagaaggatgtccatgcagcctccagccctggcatgggaggagccgcagctagctgggcaggctgggccgtgaccggggtctcctcactcacctccaagctgatccgttcgcacccaaccactgccccaacagaaaccaacattccccaaagacccacgcctgaaggccactgggagacgcaggagccacctcctgacggtacacggctggccagcgagtataactggggtggcccagagtccagcgacaagggcgaccccttcgctaccctgtctgcacgtcccagcacccagccgaggccagactcttggggtgaggacaactgggagggcctcgagactgacagtcgacaggtcaaggctgagctggcccggaagaagcgcgaggagcggcggcgggagatggaggccaaacgcgccgagaggaaggtggccaagggccccatgaagctgggagcccggaagctggactgaaccgtggcggtggcccttcccggctgcggagagcccgccccacagatgtatttattgtacaaaccatgtgagcccggccggcccagccaggccatctcacgtgtacataatcagagccacaataaattctatttcaca

SEQ ID NO: 34307 - DNA, 2124 bp, Artificial Sequence
  derived and/or modified sequence
atgtggttcttcgccagagaccccgtgagagacttccccttcgagctgatccccgagccccccgagggcggcctgcccggcccctgggccctgcacagaggcagaaagaaggccaccggcagccccgtgagcatcttcgtgtacgacgtgaagcccggcgccgaggagcagacccaggtggccaaggccgccttcaagagattcaagaccctgagacaccccaacatcctggcctacatcgacggcctggagaccgagaagtgcctgcacgtggtgaccgaggccgtgacccccctgggcatctacctgaaggccagagtggaggccggcggcctgaaggagctggagatcagctggggcctgcaccagatcgtgaaggccctgagcttcctggtgaacgactgcagcctgatccacaacaacgtgtgcatggccgccgtgttcgtggacagagccggcgagtggaagctgggcggcctggactacatgtacagcgcccagggcaacggcggcggcccccccagaaagggcatccccgagctggagcagtacgacccccccgagctggccgacagcagcggcagagtggtgagagagaagtggagcgccgacatgtggagactgggctgcctgatctgggaggtgttcaacggccccctgcccagagccgccgccctgagaaaccccggcaagatccccaagaccctggtgccccactactgcgagctggtgggcgccaaccccaaggtgagacccaaccccgccagattcctgcagaactgcagagcccccggcggcttcatgagcaacagattcgtggagaccaacctgttcctggaggagatccagatcaaggagcccgccgagaagcagaagttcttccaggagctgagcaagagcctggacgccttccccgaggacttctgcagacacaaggtgctgccccagctgctgaccgccttcgagttcggcaacgccggcgccgtggtgctgacccccctgttcaaggtgggcaagttcctgagcgccgaggagtaccagcagaagatcatccccgtggtggtgaagatgttcagcagcaccgacagagccatgagaatcagactgctgcagcagatggagcagttcatccagtacctggacgagcccaccgtgaacacccagatcttcccccacgtggtgcacggcttcctggacaccaaccccgccatcagagagcagaccgtgaagagcatgctgctgctggcccccaagctgaacgaggccaacctgaacgtggagctgatgaagcacttcgccagactgcaggccaaggacgagcagggccccatcagatgcaacaccaccgtgtgcctgggcaagatcggcagctacctgagcgccagcaccagacacagagtgctgaccagcgccttcagcagagccaccagagaccccttcgcccccagcagagtggccggcgtgctgggcttcgccgccacccacaacctgtacagcatgaacgactgcgcccagaagatcctgcccgtgctgtgcggcctgaccgtggaccccgagaagagcgtgagagaccaggccttcaaggccatcagaagcttcctgagcaagctggagagcgtgagcgaggaccccacccagctggaggaggtggagaaggacgtgcacgccgccagcagccccggcatgggcggcgccgccgccagctgggccggctgggccgtgaccggcgtgagcagcctgaccagcaagctgatcagaagccaccccaccaccgcccccaccgagaccaacatcccccagagacccacccccgagggccactgggagacccaggagcccccccccgacggcaccagactggccagcgagtacaactggggcggccccgagagcagcgacaagggcgaccccttcgccaccctgagcgccagacccagcacccagcccagacccgacagctggggcgaggacaactgggagggcctggagaccgacagcagacaggtgaaggccgagctggccagaaagaagagagaggagagaagaagagagatggaggccaagagagccgagagaaaggtggccaagggccccatgaagctgggcgccagaaagctggactag

SEQ ID NO: 34308 - DNA, 2376 bp, Artificial Sequence
  derived and/or modified sequence
atgtggttcttcgccagagaccccgtgagagacttccccttcgagctgatccccgagccccccgagggcggcctgcccggcccctgggccctgcacagaggcagaaagaaggccaccggcagccccgtgagcatcttcgtgtacgacgtgaagcccggcgccgaggagcagacccaggtggccaaggccgccttcaagagattcaagaccctgagacaccccaacatcctggcctacatcgacggcctggagaccgagaagtgcctgcacgtggtgaccgaggccgtgacccccctgggcatctacctgaaggccagagtggaggccggcggcctgaaggagctggagatcagctggggcctgcaccagatcgtgaaggccctgagcttcctggtgaacgactgcagcctgatccacaacaacgtgtgcatggccgccgtgttcgtggacagagccggcgagtggaagctgggcggcctggactacatgtacagcgcccagggcaacggcggcggcccccccagaaagggcatccccgagctggagcagtacgacccccccgagctggccgacagcagcggcagagtggtgagagagaagtggagcgccgacatgtggagactgggctgcctgatctgggaggtgttcaacggccccctgcccagagccgccgccctgagaaaccccggcaagatccccaagaccctggtgccccactactgcgagctggtgggcgccaaccccaaggtgagacccaaccccgccagattcctgcagaactgcagagcccccggcggcttcatgagcaacagattcgtggagaccaacctgttcctggaggagatccagatcaaggagcccgccgagaagcagaagttcttccaggagctgagcaagagcctggacgccttccccgaggacttctgcagacacaaggtgctgccccagctgctgaccgccttcgagttcggcaacgccggcgccgtggtgctgacccccctgttcaaggtgggcaagttcctgagcgccgaggagtaccagcagaagatcatccccgtggtggtgaagatgttcagcagcaccgacagagccatgagaatcagactgctgcagcagatggagcagttcatccagtacctggacgagcccaccgtgaacacccagatcttcccccacgtggtgcacggcttcctggacaccaaccccgccatcagagagcagaccgtgaagagcatgctgctgctggcccccaagctgaacgaggccaacctgaacgtggagctgatgaagcacttcgccagactgcaggccaaggacgagcagggccccatcagatgcaacaccaccgtgtgcctgggcaagatcggcagctacctgagcgccagcaccagacacagagtgctgaccagcgccttcagcagagccaccagagaccccttcgcccccagcagagtggccggcgtgctgggcttcgccgccacccacaacctgtacagcatgaacgactgcgcccagaagatcctgcccgtgctgtgcggcctgaccgtggaccccgagaagagcgtgagagaccaggccttcaaggccatcagaagcttcctgagcaagctggagagcgtgagcgaggaccccacccagctggaggaggtggagaaggacgtgcacgccgccagcagccccggcatgggcggcgccgccgccagctgggccggctgggccgtgaccggcgtgagcagcctgaccagcaagctgatcagaagccaccccaccaccgcccccaccgagaccaacatcccccagagacccacccccgagggccactgggagacccaggaggaggacaaggacaccgccgaggacagcagcaccgccgacagatgggacgacgaggactggggcagcctggagcaggaggccgagagcgtgctggcccagcaggacgactggagcaccggcggccaggtgagcagagccagccaggtgagcaacagcgaccacaagagcagcaagagccccgagagcgactggagcagctgggaggccgagggcagctgggagcagggctggcaggagcccagcagccaggagcccccccccgacggcaccagactggccagcgagtacaactggggcggccccgagagcagcgacaagggcgaccccttcgccaccctgagcgccagacccagcacccagcccagacccgacagctggggcgaggacaactgggagggcctggagaccgacagcagacaggtgaaggccgagctggccagaaagaagagagaggagagaagaagagagatggaggccaagagagccgagagaaaggtggccaagggccccatgaagctgggcgccagaaagctggactag

SEQ ID NO: 34309 - protein, 73 aa, Artificial Sequence
  derived and/or modified sequence
MIEVVCNDRLGKKVRVKCNTDDTIGDLKKLIAAQTGTRWNKIVLKKWYTIFKDHVSLGDYEIHDGMNLELYYQ

SEQ ID NO: 34310 - DNA, 222 bp, Artificial Sequence
  derived and/or modified sequence
atgatcgaggtggtgtgcaacgacagactgggcaagaaggtgagagtgaagtgcaacaccgacgacaccatcggcgacctgaagaagctgatcgccgcccagaccggcaccagatggaacaagatcgtgctgaagaagtggtacaccatcttcaaggaccacgtgagcctgggcgactacgagatccacgacggcatgaacctggagctgtactaccagtag

SEQ ID NO: 34311 - DNA, 222 bp, Artificial Sequence
  derived and/or modified sequence
atgattgaggtggtttgcaatgatcgcctaggcaagaaggtaagagtcaagtgtaacacagacgacactatcggcgacctgaagaagctgatcgctgcgcagaccggcaccaggtggaataagatcgtgctcaaaaagtggtacactatttttaaggaccacgtgtcattgggggactacgaaatccacgacgggatgaacctagagctgtactaccagtag

SEQ ID NO: 34312 - DNA, 222 bp, Artificial Sequence
  derived and/or modified sequence
atgatagaggtggtgtgtaatgacagattgggtaagaaagtgagagtgaagtgcaacacagacgacaccatcggtgaccttaagaaactgatcgccgcccagactggcacacgttggaacaagatagtcctgaagaagtggtatactatttttaaagaccacgtgtccctcggtgattatgagatacacgatggaatgaatctggaattgtactatcagtag

SEQ ID NO: 34313 - DNA, 222 bp, Artificial Sequence
  derived and/or modified sequence
atgattgaggtggtgtgcaatgaccggctgggcaagaaggtgcgggtgaagtgcaacacagatgacaccatcggggacctgaagaagctgattgctgcccagacaggcacccgctggaacaagatcgtgctgaagaagtggtacaccatcttcaaggaccacgtgtccctgggggactatgagatccatgatggcatgaacctggagctgtactaccagtag

SEQ ID NO: 34314 - DNA, 222 bp, Artificial Sequence
  derived and/or modified sequence
atgatcgaggtggtgtgcaacgaccggctgggcaagaaggtgcgggtgaaatgtaatacagacgacacaatcggcgatctgaagaaattaatcgccgcacagaccggcactagatggaataagatcgtgctgaagaaatggtacactatttttaaggatcacgtctcactgggtgactacgagatccacgatgggatgaatctggaactatactaccagtag

SEQ ID NO: 34315 - DNA, 222 bp, Artificial Sequence
  derived and/or modified sequence
atgatcgaggtggtgtgcaacgaccggctgggcaagaaggtgcgggtgaagtgtaataccgacgacaccatcggtgacctgaagaagctgattgctgcccagaccggcacacggtggaataaaattgttctgaaaaaatggtatactatttttaaggatcacgtgagtctcggcgattatgagatccacgacggtatgaatctggagttgtactaccaatag

SEQ ID NO: 34316 - DNA, 222 bp, Artificial Sequence
  derived and/or modified sequence
atgattgaagttgtctgtaacgataggctgggaaagaaggtccgagtgaagtgcaatacagatgacactataggtgaccttaagaaactgattgccgcacaaacaggcacacgatggaacaagattgtattgaaaaaatggtacactatctttaaggaccacgtgagtctcggcgattacgaaatccatgacggcatgaatttggaattgtattaccagtag

SEQ ID NO: 34317 - DNA, 222 bp, Artificial Sequence
  derived and/or modified sequence
atgatcgaggtcgtatgtaacgaccgtctggggaagaaagtgagggtgaaatgcaacacagatgataccatcggcgacttaaaaaaactcatcgccgctcagacgggaactcggtggaacaaaattgtgttgaagaaatggtacaccattttcaaagaccatgtgtcactgggagactacgaaatccacgatggaatgaatctggaattgtattatcagtag

SEQ ID NO: 34318 - DNA, 519 bp, Artificial Sequence
  derived and/or modified sequence
aacttccgcttccggttcctagcgttaactgcgaccggggttcagcgctcgggtgaggagctggtggcgtcggcaggttcgaggcgattcgaggtgagggggtcaagcggagaggctcggagtcggagaaagctgtcgcgacccagccacccagggtctggggtcggtgggagctccagctaggatgatcgaggttgtttgcaacgaccgtctggggaagaaggtccgcgttaaatgcaacacggatgataccatcggggaccttaagaagctgattgcagcccaaactggtacccgttggaacaagattgtcctgaagaagtggtacacgatttttaaggaccacgtgtctctgggggactatgaaatccacgatgggatgaacctggagctttattatcaatagatgagaatcctcatcttcctgccccgctttcctctcccatcctcatcccccacactgggatagatgcttgtttgtaaaaactcaccttaataaagacttagatgttgctttgt

SEQ ID NO: 34319 - DNA, 432 bp, Artificial Sequence
  derived and/or modified sequence
aacttccgcttccggttcctagcgttaactgcgaccggggttcagcgctcgggtgaggagctggtggcgtcggcaggttcgaggcgattcgagctccagctaggatgatcgaggttgtttgcaacgaccgtctggggaagaaggtccgcgttaaatgcaacacggatgataccatcggggaccttaagaagctgattgcagcccaaactggtacccgttggaacaagattgtcctgaagaagtggtacacgatttttaaggaccacgtgtctctgggggactatgaaatccacgatgggatgaacctggagctttattatcaatagatgagaatcctcatcttcctgccccgctttcctctcccatcctcatcccccacactgggatagatgcttgtttgtaaaaactcaccttaataaagacttagatgtt

SEQ ID NO: 34320 - protein, 74 aa, Artificial Sequence
  derived and/or modified sequence
MFDIKAWAEYVVEWAAKDPYGFLTTVILALTPLFLASAVLSWKLAKMIEAREKEQKKKQKRQENIAKAKRLKKD

SEQ ID NO: 34321 - DNA, 2889 bp, Artificial Sequence
  derived and/or modified sequence
acttccgccttcctgcttccggtctggcggtgagtggggagtgggatccgatcccgtggggctatgtaggggaagttggtggctgcagctgccgtggttttctcctggtgtccagcagaaacggcggcggcgcaaggtgtggctgggccaacccaggatctcccaggaccctccgctctgcgcgacaaggggcccgcgcttgccaaggccgacgggcaggagtgaacgtggcctccgtgggtctgcagccccgataggccaattgtacagaatttaaaccgtctctcagatgtgtacagtagaactcaagaagacagactaccaagggtcatctgaagtcgtgattgggtcactaataacaccaggacaaagttaagggatcactactcaagcataagccccagttttcataagactgctgtgaagatgtttgatataaaggcttgggctgagtatgttgtggaatgggctgcaaaggacccctatggcttccttacaaccgttattttggcccttactccactgttcctagcaagtgctgtactgtcttggaaattggccaagatgattgaggccagggagaaggagcaaaagaagaagcaaaaacgccaagaaaacattgcaaaagctaaacgactaaaaaaggattgaaggactgaacaggctttgcaaccagaggaaaatcatttggaaaattacacagctttggaagaatccactaaagtttcttctttggatttcttgacagtatgatttagtaaatgaaatttgaccaaatggaagaatcatgttagttctgacctcaatactatagtaacttttaggcgtgggtgtagaagtttataggtttctattgacagttattgtaaattagcatttactgtggtacaaattctttataactgacttagtcatttgccgcttagcagtttatatactgaaatgaaaacatcttgtggggaaaagtgactttagattatgaactcaattcaaatgaactctatttaaaatggggtcctattttggacaaaggaaattaagaatgtaaaagtcagaacagtcttgaggtaaaaagtgtgctttggcttaaaagggatacagtatattaattacatcttttattattattgtttatttcttagaatcatttctggctttctcaaaacaaaataatattaatgagtacttctatttgctgcatttttcttattacagcctttgagacagctggtaattataagtcattttccattttttaaaacataattttataaagaattctcttatctcgactatgtagaataccacctactggacagaacaatttttgtactcacaaacactgccattttcttagagatggcttgagaggagtaacactatggtttaaagcttgcagtaaaaatgccaaacactgtagtaccttggaacccagtttattcttgtgctaagcagaactgtaaaatagttaaaatgtcttatcaagtaattcgccgattacaaagacaccatttgttttttatttcattctttgttttaactcatgtggtagtgatatttaatactttctgatcaaacaggttcaaagtaaaacgttaaatttcacatttcttttaaagaactcttaaagtgtaacagttacgccatacttcataagtggtaaagaaaggtataaaatttggaaacattttgttgggcatagtagtgattgggtgaaaaggataaattatatcaaaatgagaatgtgctgtaattggaagtagggagctaaaggatgtttctttcagtttagtagaactggaacgttttactattaaacatggcttttataaatgcatggtccaataattttattcactgttagtatttaattcactgtcagcttattaatgttttctgtacccattaatgaattttaaattacaaaaaattgtctagcagctacagtttaaaaatgaaactagacattaaaataaatttgataattttttataaagaggtcctggattttttttttttttttggaggaactaacattttaagttacattatgttatgcaagttagaatttcagttacagctaagcatacttgtaaaatttcaggactgtatctctcagaacctaaggaccactgagaatgtttatggaccagtttgaataacacttaatgctattcttttagattatcagtctctacttggtgccagtgtgagcaacacattataactcaaggcactgaaattattcagtgttaagatatatctataatatgtttggttttctgcaatcaagctgttcatggaaagaatttatgtacatgttttacttagggtcacattttagagtaaaagtattgaagcaaaggatatagtcataattctcagttacctactaaagttatggtttcatcagttctgttgtaacaacttaaaggtatttaaaggtctgtttttctataatttattagtcttaacacatgccagttttgtatttgtttgacatatgctttttttttccacttttttccatcatttagagagcctttctatatatgtgagattcatactttacagtgtgtgtgtgtgtgtgtgtgtgtgtgtgtgtgtaaggggctggagtatagagaatattgtgaggtttgggattcttcagaaaaatcacctctcactgcaacagagtactgttgttaaagaatcccatttgctattatctagaatacttttaagaaattgtttacttattacattgtttctgaagttctgagaactaagtacaatcaattaccattctaaagctggtcttgggggagaaagaaagctgtcccctggctgcctctaacaaacattttatcaaaaatcagcaaataaataaaagtttgtatgtcagaa

SEQ ID NO: 34322 - DNA, 584 bp, Artificial Sequence
  derived and/or modified sequence
gccttcctgcttccggtctggcgcagaaacggcggcggcgcaaggtgtggctgggccaacccaggatctcccaggaccctccgctctgcgcgacaaggggcccgcgcttgccaaggccgacgggcaggagtgaacgtggcctccgtgggtctgcagccccgataggccaattgtacagaatttaaaccgtctctcagatgtgtacagtagaactcaagaagacagactaccaagggtcatctgaagtcgtgattgggtcactaataacaccaggacaaagttaagggatcactactcaagcataagccccagttttcataagactgctgtgaagatgtttgatataaaggcttgggctgagtatgttgtggaatgggctgcaaaggacccctatggcttccttacaaccgttattttggcccttactccactgttcctagcaagtgctgtactgtcttggaaattggccaagatgattgaggccagggagaaggagcaaaagaagaagcaaaaacgccaagaaaacattgcaaaagctaaacgactaaaaaaggattgaaggactgaacaggctttgcaaccag

SEQ ID NO: 34323 - DNA, 225 bp, Artificial Sequence
  derived and/or modified sequence
atgttcgacatcaaggcctgggccgagtacgtggtggagtgggccgccaaggacccctacggcttcctgaccaccgtgatcctggccctgacccccctgttcctggccagcgccgtgctgagctggaagctggccaagatgatcgaggccagagagaaggagcagaagaagaagcagaagagacaggagaacatcgccaaggccaagagactgaagaaggactag

SEQ ID NO: 34324 - DNA, 225 bp, Artificial Sequence
  derived and/or modified sequence
atgtttgatattaaggcctgggccgagtatgtggtggaatgggccgcaaaggacccatacggctttttaaccacagtaatcttagcattgacccccctctttctggcctccgcagtactctcatggaagctggccaaaatgatcgaggcccgcgaaaaggaacaaaagaagaagcagaagagacaggaaaacattgccaaggctaaaaggctgaagaaagactag

SEQ ID NO: 34325 - DNA, 225 bp, Artificial Sequence
  derived and/or modified sequence
atgtttgacatcaaagcctgggccgaatacgtagtggaatgggcagccaaagacccctacggatttctcaccaccgtgatcctagcactcacacccctgttcctggccagcgccgtgcttagctggaagttggccaagatgatcgaggcaagagagaaggagcagaagaaaaagcaaaagcgccaggagaatatcgctaaagcaaaaaggttgaagaaagactag

SEQ ID NO: 34326 - DNA, 225 bp, Artificial Sequence
  derived and/or modified sequence
atgtttgacatcaaggcctgggccgagtatgtggtggagtgggccgccaaggacccctacggcttcctgaccaccgtcatcctggccctgacccccctcttcctggccagcgctgtgctgtcctggaagctggccaagatgattgaggcccgggagaaggagcagaagaagaagcagaagaggcaggagaacatcgccaaggccaagaggctgaagaaggactag

SEQ ID NO: 34327 - DNA, 225 bp, Artificial Sequence
  derived and/or modified sequence
atgttcgacatcaaggcctgggccgagtacgtggtggagtgggccgctaaagacccctatggctttttgacaaccgtaatcctagcgctaacgcccttgtttctcgcgagcgcagtcttgtcttggaagctggccaaaatgattgaggctagagagaaggaacaaaagaagaaacagaaaagacaagaaaatattgccaaggcgaaacgcctgaaaaaagattag

SEQ ID NO: 34328 - DNA, 225 bp, Artificial Sequence
  derived and/or modified sequence
atgttcgacatcaaggcctgggccgagtacgtggtggagtgggccgctaaggatccatatggcttcttaacgactgtcatcctggctctgacccctttgttcctcgcttcagccgtgctctcctggaaactggcaaagatgatcgaagctcgcgagaaagagcagaagaagaagcagaagagacaggaaaacatcgcaaaggcaaagcggctcaagaaggactag

SEQ ID NO: 34329 - DNA, 225 bp, Artificial Sequence
  derived and/or modified sequence
atgtttgatattaaggcatgggcggagtatgtggtagagtgggctgccaaggatccctacggcttcctgaccaccgtgatattggctcttacaccccttttcctggcctccgccgtgcttagctggaaactagctaagatgattgaggcccgagaaaaggaacagaaaaagaaacagaaacggcaggagaatatcgcaaaagccaaaaggcttaaaaaagactag

SEQ ID NO: 34330 - DNA, 225 bp, Artificial Sequence
  derived and/or modified sequence
atgttcgatatcaaggcctgggctgaatatgtggtggaatgggctgcaaaggatccctacggttttcttacaaccgttatcttggctctgactcccctgtttctggcgtcggcagtcctgagctggaaactcgcaaagatgattgaggcaagagaaaaggagcagaagaagaagcagaagagacaggagaacattgctaaggcaaaacggttgaaaaaagattag

SEQ ID NO: 34331 - protein, 81 aa, Artificial Sequence
  derived and/or modified sequence
MDGGQPIPSSLVPLGNESADSSMSLEQKMTFVFVILLFIFLGILIVRCFRILLDPYRSMPTSTWADGLEGLEKGQFDHALA

SEQ ID NO: 34332 - DNA, 1660 bp, Artificial Sequence
  derived and/or modified sequence
agacacactgctaggatactgcctctactcgctgaagcagaatcctctgaagagttgctgaggcagaactgaaatcatggctcacctcaaagaagcagcagtattggccgttaatgatgcctcacacagaaagacgatgctcctttaactcggggttttaatgggaagtttctaagcctgaaacaacagctttagacctggggtgtgccatcagctgccttgcagctaccactgtctactgctttcacacagcgtggtcgggaagaatggaaactaaagaggcttgtaactacctgtaactgttccaccaggaaatggatcaagtgtttgttcagccagagccagtattaaaattagactctatttcctgagcacccacaaatggacctgacaaagggaagacacagatgtactgcgtgatgaggaaagcctatcaggattaaaatatggctataactcagcctctccagagtgcagccaccatgacctccgcagattgatgatggaagaaaagaaaaccaggatatcctgtgctctggcttccctggaccatggatggaggacagcccatcccctcatccctagtgccccttgggaacgaatcagcagattctagcatgtccctggagcagaaaatgacatttgtttttgtgattctgttgtttattttcttgggcattctcattgtccggtgcttccggattcttttggatccatatcgaagcatgccaacctctacctgggctgatggacttgaaggcctggagaaagggcagttcgaccatgcccttgcttaggagggatggtgtgggatctcctcctgaggagatgaagtgctttgtgtcttggtgaggattccctttatttagtgttctcaacaaatcaaatttaaacaatatttggtcccaggaccataatccattattccataaatatgcagttgggttaaagacatttgaggatgttggaaatggacacttatataactaatccaacataagaaggtttaaatttttatgtttgctcaatgaatgagtactcttaaaattgtgtgattgtgaaaccaagagcgttaatactgacatagatttgccatcaaacaaaacaccacctgatctgactaaagaataaaagactagaaaggatctcatatgaatctggtgacaaggccaggaagagatttccttgctctaattatgtctatatttgttttatttcatgggcacctatctgggtcctgagcagaatgaggaagattgtgctgaatggacccaaagtagtttcttgttttctcccaaagcagggagctttgggaagcaatggaaaagcttaaaagagatgattctgtccttggtaaatgtgagtgagaatagcgttttgtttttcaagtaaaacttaattcaaaggctacaaagttttaaaaactatttaccaagccaactacattatatgtattcatattaataacatgtgtagaggtagctatacattacttgaatttacactttacacaaatgatttaaaaaataggttgcaagtgcagcttaaagttttttttcaatgaaaagttaattgtttagaggagaagacttttatagtcttcagaggaatgtgtatttatgattgtatatagtcaccaaataaaacttttcaagaaaca

SEQ ID NO: 34333 - DNA, 1458 bp, Artificial Sequence
  derived and/or modified sequence
ggcttaaaaagatgaatcgagatgcagtgtgtaggaagcatgggcaagggatgaggaacgccactttgaaaattactaaaactaaagcaagtgactaagagtgtgaatgaccctggctgcaatgactacgcctgctgggcttctattaaaattagactctatttcctgagcacccacaaatggacctgacaaagggaagacacagatgtactgcgtgatgaggaaagcctatcaggattaaaatatggctataactcagcctctccagagtgcagccaccatgacctccgcagattgatgatggaagaaaagaaaaccaggatatcctgtgctctggcttccctggaccatggatggaggacagcccatcccctcatccctagtgccccttgggaacgaatcagcagattctagcatgtccctggagcagaaaatgacatttgtttttgtgattctgttgtttattttcttgggcattctcattgtccggtgcttccggattcttttggatccatatcgaagcatgccaacctctacctgggctgatggacttgaaggcctggagaaagggcagttcgaccatgcccttgcttaggagggatggtgtgggatctcctcctgaggagatgaagtgctttgtgtcttggtgaggattccctttatttagtgttctcaacaaatcaaatttaaacaatatttggtcccaggaccataatccattattccataaatatgcagttgggttaaagacatttgaggatgttggaaatggacacttatataactaatccaacataagaaggtttaaatttttatgtttgctcaatgaatgagtactcttaaaattgtgtgattgtgaaaccaagagcgttaatactgacatagatttgccatcaaacaaaacaccacctgatctgactaaagaataaaagactagaaaggatctcatatgaatctggtgacaaggccaggaagagatttccttgctctaattatgtctatatttgttttatttcatgggcacctatctgggtcctgagcagaatgaggaagattgtgctgaatggacccaaagtagtttcttgttttctcccaaagcagggagctttgggaagcaatggaaaagcttaaaagagatgattctgtccttggtaaatgtgagtgagaatagcgttttgtttttcaagtaaaacttaattcaaaggctacaaagttttaaaaactatttaccaagccaactacattatatgtattcatattaataacatgtgtagaggtagctatacattacttgaatttacactttacacaaatgatttaaaaaataggttgcaagtgcagcttaaagttttttttcaatgaaaagttaattgtttagaggagaagacttttatagtcttcagaggaatgtgtatttatgattgtatatagtcaccaaataaaacttttcaagaaaca

SEQ ID NO: 34334 - DNA, 246 bp, Artificial Sequence
  derived and/or modified sequence
atggacggcggccagcccatccccagcagcctggtgcccctgggcaacgagagcgccgacagcagcatgagcctggagcagaagatgaccttcgtgttcgtgatcctgctgttcatcttcctgggcatcctgatcgtgagatgcttcagaatcctgctggacccctacagaagcatgcccaccagcacctgggccgacggcctggagggcctggagaagggccagttcgaccacgccctggcctag

SEQ ID NO: 34335 - DNA, 246 bp, Artificial Sequence
  derived and/or modified sequence
atggacggcggccaacctattccaagctcactcgtaccactgggcaacgagtcagccgactctagcatgagtctggaacagaaaatgacattcgtctttgtgatccttctgttcatctttctcggcatcttaattgtacgctgctttcggattttactggacccgtatcgctcaatgcccaccagtacttgggccgatggtctagagggtctggagaaaggccagttcgaccacgctctcgcgtag

SEQ ID NO: 34336 - DNA, 246 bp, Artificial Sequence
  derived and/or modified sequence
atggatggaggccaacctattcccagttcactggtaccccttggcaacgagtccgcagatagttccatgagcctggagcagaagatgacgtttgtatttgtcatcttgctgttcatcttcctcggtatcctaatcgtgaggtgcttccggattctcttggacccataccggagcatgcccactagcacctgggccgacgggctcgaggggttggagaaagggcagtttgaccatgccctggcctag

SEQ ID NO: 34337 - DNA, 246 bp, Artificial Sequence
  derived and/or modified sequence
atggatggcggccagcccatccccagcagcctggtgcccctgggcaatgaatctgctgacagctccatgagcctggagcagaagatgacctttgtgtttgtgatcctgctcttcatcttcctgggcatcctgattgtgcgctgcttccgcatcctgctggacccctaccgctccatgcccaccagcacctgggcagatggcctggagggcctggagaagggccagtttgaccacgccctggcctag

SEQ ID NO: 34338 - DNA, 246 bp, Artificial Sequence
  derived and/or modified sequence
atggacggcggccagcccatccccagcagcctggtgcccctgggcaacgaaagcgcagacagcagcatgagtttggaacagaagatgacattcgttttcgttatcttgttgtttatatttctgggaatcttgatcgtccgttgttttcgcatcctgcttgatccatacagaagcatgcccacttcaacctgggctgatgggttagaagggctggaaaaaggccagttcgatcacgcacttgcatag

SEQ ID NO: 34339 - DNA, 246 bp, Artificial Sequence
  derived and/or modified sequence
atggacggcggccagcccatccccagcagcctggtgcccctgggcaacgaatccgccgattcttcgatgagtttagaacagaaaatgactttcgtttttgtgatcctcctgtttatctttttgggaatccttatagtgaggtgttttaggatcctgctggatccataccgatcaatgcccaccagcacctgggcagacggcctggagggtctggagaaggggcagtttgaccatgcacttgcatag

SEQ ID NO: 34340 - DNA, 246 bp, Artificial Sequence
  derived and/or modified sequence
atggatggaggccagcccataccttccagcctcgttcctctgggcaacgagtcggccgatagctccatgagcttagaacagaagatgacattcgtctttgtgattctattgtttatttttctgggtattctgattgttcgctgtttcagaatcctgctggacccttatcgatctatgcccactagcacgtgggctgacggcctggagggcctcgaaaaaggccagtttgatcatgccctggcttag

SEQ ID NO: 34341 - DNA, 246 bp, Artificial Sequence
  derived and/or modified sequence
atggacggcggacaacctataccgtcaagtttggtcccgctgggcaatgaaagcgctgacagctcaatgtccctcgaacagaaaatgacatttgtgttcgtaattctacttttcatctttttggggattcttatcgtgcgatgcttccgcattctcctcgacccttaccgttccatgcctacttcaacttgggccgatggactagaaggcctggaaaaagggcagttcgaccatgccctggcttag

SEQ ID NO: 34342 - protein, 388 aa, Artificial Sequence
  derived and/or modified sequence
MSAPSTLPPGGEEGLGTAWPSAANASSAPAEAEEAVAGPGDARAAGMVAIQCIYALVCLVGLVGNALVIFVILRYAKMKTATNIYLLNLAVADELFMLSVPFVASSAALRHWPFGSVLCRAVLSVDGLNMFTSVFCLTVLSVDRYVAVVHPLRAATYRRPSVAKLINLGVWLASLLVTLPIAIFADTRPARGGQAVACNLQWPHPAWSAVFVVYTFLLGFLLPVLAIGLCYLLIVGKMRAVALRAGWQQRRRSEKKITRLVLMVVVVFVLCWMPFYVVQLLNLFVTSLDATVNHVSLILSYANSCANPILYGFLSDNFRRFFQRVLCLRCCLLEGAGGAEEEPLDYYATALKSKGGAGCMCPPLPCQQEALQPEPGRKRIPLTRTTTF

SEQ ID NO: 34343 - DNA, 1167 bp, Artificial Sequence
  derived and/or modified sequence
atgagcgcccccagcaccctgccccccggcggcgaggagggcctgggcaccgcctggcccagcgccgccaacgccagcagcgcccccgccgaggccgaggaggccgtggccggccccggcgacgccagagccgccggcatggtggccatccagtgcatctacgccctggtgtgcctggtgggcctggtgggcaacgccctggtgatcttcgtgatcctgagatacgccaagatgaagaccgccaccaacatctacctgctgaacctggccgtggccgacgagctgttcatgctgagcgtgcccttcgtggccagcagcgccgccctgagacactggcccttcggcagcgtgctgtgcagagccgtgctgagcgtggacggcctgaacatgttcaccagcgtgttctgcctgaccgtgctgagcgtggacagatacgtggccgtggtgcaccccctgagagccgccacctacagaagacccagcgtggccaagctgatcaacctgggcgtgtggctggccagcctgctggtgaccctgcccatcgccatcttcgccgacaccagacccgccagaggcggccaggccgtggcctgcaacctgcagtggccccaccccgcctggagcgccgtgttcgtggtgtacaccttcctgctgggcttcctgctgcccgtgctggccatcggcctgtgctacctgctgatcgtgggcaagatgagagccgtggccctgagagccggctggcagcagagaagaagaagcgagaagaagatcaccagactggtgctgatggtggtggtggtgttcgtgctgtgctggatgcccttctacgtggtgcagctgctgaacctgttcgtgaccagcctggacgccaccgtgaaccacgtgagcctgatcctgagctacgccaacagctgcgccaaccccatcctgtacggcttcctgagcgacaacttcagaagattcttccagagagtgctgtgcctgagatgctgcctgctggagggcgccggcggcgccgaggaggagcccctggactactacgccaccgccctgaagagcaagggcggcgccggctgcatgtgcccccccctgccctgccagcaggaggccctgcagcccgagcccggcagaaagagaatccccctgaccagaaccaccaccttctag

SEQ ID NO: 34344 - DNA, 1167 bp, Artificial Sequence
  derived and/or modified sequence
atgtcagccccatccacactgccgcctggcggggaagagggactgggtactgcctggcccagtgccgcaaacgccagctccgcccccgcagaagcggaagaggctgtggccgggccaggcgacgctcgcgctgccgggatggttgctatacaatgtatatacgctctagtgtgtctggtgggccttgtggggaatgccctggtaatttttgttatcctcagatatgcaaaaatgaagaccgctactaatatttacctattgaatcttgctgtggccgatgagctgtttatgctctcagtcccctttgtggcatcaagtgccgccctgaggcactggcctttcggctcagttctctgtagggctgtcctctccgtggacggtctcaacatgttcacaagcgtcttttgcctcaccgtcctgtctgttgaccggtacgtagctgtagtgcatcctttgcgcgccgcaacctaccgacggccctccgtcgccaagttaattaacttaggtgtctggctggccagccttctggtcactctaccaatagctatcttcgccgatactcgccccgcccggggagggcaggcggtggcctgcaacctccagtggccccatcccgcctggagtgcagtgtttgtggtgtacaccttcctcctgggctttctgctacctgtgctggcaatcggcctgtgttacctgttgattgtcggcaagatgcgcgccgtggctcttagggcaggctggcagcaaagacgtcggagtgagaaaaaaattactcggctggttcttatggtggtcgtggttttcgtgctgtgctggatgcctttttacgtcgtacagctactgaatttatttgtgacaagtctggacgccactgtaaatcacgtttcactaattctgagttatgccaactcctgtgccaaccctattctgtacggattcctgagcgacaactttaggcgattttttcaaagggtgctctgtctcaggtgctgtcttcttgaaggtgccggcggggcagaagaggaacctctggattattacgcaaccgcattaaagtccaaggggggagctgggtgtatgtgtccacccctcccatgtcagcaggaagccttgcaaccagaacccgggcgcaaacggattccattgacgaggacgacgaccttttag

SEQ ID NO: 34345 - DNA, 1167 bp, Artificial Sequence
  derived and/or modified sequence
atgtctgcccccagcaccctgcccccaggaggagaggagggcctgggcacagcctggcccagcgctgccaatgccagcagcgccccagctgaggccgaggaggccgtggccggccctggagatgcccgggctgctggcatggtggccatccagtgcatctatgccctggtgtgcctggtgggcctggtgggcaatgccctggtgatcttcgtcatcctgcgctatgccaagatgaagacagccaccaacatctacctgctgaacctggccgtggctgatgagctgttcatgctgtctgtgccctttgtggccagcagcgctgccctgcggcactggcccttcggctctgtgctgtgcagagctgtgctgtctgtggatggcctgaacatgttcacctctgtgttctgcctgactgtgctgtctgtggacagatatgtggccgtggtgcaccccctgcgggccgccacctaccgccggcccagcgtggccaagctgatcaacctgggcgtgtggctggccagcctgctggtgaccctgcccatcgccatctttgctgacaccaggcctgcccggggcggccaggccgtggcctgcaacctgcagtggccccacccagcctggagcgctgtgtttgtggtgtacaccttcctgctgggcttcctgctgcctgtgctggccatcggcctgtgctacctgctgattgtgggcaagatgagagctgtggccctgcgggccggctggcagcagaggagaagaagtgagaagaagatcacccggctggtgctgatggtggtggtggtgtttgtgctgtgctggatgcccttctacgtggtgcagctgctgaacctgtttgtgaccagcctggatgccaccgtgaaccacgtgtccctcatcctgtcctatgccaacagctgtgccaaccccatcctgtatggcttcctgagtgacaacttccgccgcttcttccagagggtgctgtgcctgcgctgctgcctgctggagggcgctgggggcgctgaggaggagcccctggactactatgccacagccctgaagagcaagggcggggccggctgcatgtgcccccccctgccctgccagcaggaggccctgcagcctgagcccggcaggaagaggatccccctgaccaggaccaccaccttctag

SEQ ID NO: 34346 - DNA, 1167 bp, Artificial Sequence
  derived and/or modified sequence
atgagcgcccccagcaccctgccccccggcggcgaggagggcctggggactgcctggcccagcgctgctaacgcgagcagtgctccagcagaggctgaggaagccgttgcaggcccgggggatgcgagggcagccggaatggtggctatccagtgcatctatgccctcgtgtgtctcgtgggtctcgttggtaacgctctggtcattttcgtcattctgcgctatgcaaagatgaagacagctactaatatttatctccttaacctggctgtggccgatgaactgtttatgcttagcgtacccttcgtcgccagctcagcagcactgaggcattggccgttcggaagcgtgctctgtcgggcagtcttgagcgtggatggactcaacatgttcacctctgtgttttgccttactgtcttatccgttgatcgatacgttgctgtggtgcaccccctgagagccgcgacctatcgtagaccatcagtagctaaactcatcaaccttggggtgtggctggcctcactcctggtgacattacccatcgcgatctttgctgacactcggccagcacgtggcggtcaggctgtggcttgcaatctgcagtggcctcatccagcgtggagcgccgtgtttgtggtgtacactttcctcttaggcttcttgcttcccgtgctagccatcggactgtgctacctattaattgtgggcaagatgcgtgcagtcgctcttagagccggctggcagcagcggaggcggtctgagaaaaaaatcacgcgactggtcttaatggtagtcgtagttttcgtactttgttggatgcctttctatgtggtgcagctgttaaacttgttcgtcacgtccctcgatgccacagtgaatcacgtgagcctgattttatcctacgcgaacagctgtgccaatccaattttgtatgggttccttagtgataactttcgcaggttcttccagcgggtactctgcctgaggtgctgtctgctggaaggtgcaggtggcgctgaagaggagcccttagattattacgccactgctctgaagtctaaggggggcgcaggttgcatgtgtccgccccttccttgtcagcaggaggccctacaaccagagccaggtcggaagagaatcccattgacgcgcactaccactttctag

SEQ ID NO: 34347 - DNA, 1167 bp, Artificial Sequence
  derived and/or modified sequence
atgagtgctccctccaccctccctcccggtggtgaggaagggctgggcaccgcctggccctctgccgcaaacgcgagctctgcacctgctgaggctgaggaagctgtggccggacctggggatgctagagccgcaggcatggtggctatccaatgtatatatgccctggtttgtttagtcggattggtgggcaacgctcttgtgattttcgtgattctccgttatgctaaaatgaaaacagctacaaatatatacctgcttaacctggctgtggcagacgagctttttatgctttcggttccatttgtcgcctcctcggccgcactccggcactggccattcggaagtgttctctgccgagcagtcttgagcgtggacgggctgaatatgtttaccagcgttttttgcctgactgtcctatctgtggatcgatacgtggccgtcgtgcacccccttcgcgctgcaacctatagaaggccaagcgttgccaagctgatcaatctgggcgtgtggctcgcctccctcttggtcactctcccaattgctatcttcgccgacaccaggcccgcaagaggagggcaagccgtggcctgcaatctgcaatggcctcaccctgcctggtctgccgtgtttgtcgtctatacattcctgctcggatttcttctcccagtgttagccattgggctttgctacctactgatcgttggcaagatgagggcagtggctttacgtgccggatggcaacagcgcagacgctccgagaagaagattacacgcctggtgctcatggttgttgtggtgtttgtgctttgctggatgcctttctacgtagttcagttgctcaaccttttcgtgactagcctcgatgctaccgtgaaccatgtgagtctgatattgtcttatgcaaactcatgtgctaatccaatcttgtatggattcttgtctgataatttccgacggtttttccaaagagtcctgtgcctacggtgctgcctgttagaaggagccggaggtgcagaggaagagccgcttgactattacgccacggcactgaaatcaaaaggtggcgctgggtgtatgtgccccccactgccatgtcagcaagaggctctccagcccgagcctggaaggaaaaggattccactgactcgcaccactacattttag

SEQ ID NO: 34348 - DNA, 1258 bp, Artificial Sequence
  derived and/or modified sequence
ccgagctctctggcgcagcgctagctccgccgcgctcagctgccctgcgccggcacccctggtcatgagcgccccctcgacgctgccccccgggggcgaggaagggctggggacggcctggccctctgcagccaatgccagtagcgctccggcggaggcggaggaggcggtggcggggcccggggacgcgcgggcggcgggcatggtcgctatccagtgcatctacgcgctggtgtgcctggtggggctggtgggcaacgccctggtcatcttcgtgatccttcgctacgccaagatgaagacggctaccaacatctacctgctcaacctggccgtagccgacgagctcttcatgctgagcgtgcccttcgtggcctcgtcggccgccctgcgccactggcccttcggctccgtgctgtgccgcgcggtgctcagcgtcgacggcctcaacatgttcaccagcgtcttctgtctcaccgtgctcagcgtggaccgctacgtggccgtggtgcaccctctgcgcgcggcgacctaccggcggcccagcgtggccaagctcatcaacctgggcgtgtggctggcatccctgttggtcactctccccatcgccatcttcgcagacaccagaccggctcgcggcggccaggccgtggcctgcaacctgcagtggccacacccggcctggtcggcagtcttcgtggtctacactttcctgctgggcttcctgctgcccgtgctggccattggcctgtgctacctgctcatcgtgggcaagatgcgcgccgtggccctgcgcgctggctggcagcagcgcaggcgctcggagaagaaaatcaccaggctggtgctgatggtcgtggtcgtctttgtgctctgctggatgcctttctacgtggtgcagctgctgaacctcttcgtgaccagccttgatgccaccgtcaaccacgtgtcccttatccttagctatgccaacagctgcgccaaccccattctctatggcttcctctccgacaacttccgccgattcttccagcgggttctctgcctgcgctgctgcctcctggaaggtgctggaggtgctgaggaggagcccctggactactatgccactgctctcaagagcaaaggtggggcagggtgcatgtgccccccactcccctgccagcaggaagccctgcaaccagaacccggccgcaagcgcatccccctcaccaggaccaccaccttctgaggagcccttcccctacccaccctgcgt

SEQ ID NO: 34349 - protein, 296 aa, Artificial Sequence
  derived and/or modified sequence
MALTSDLGKQIKLKEVEGTLLQPATVDNWSQIQSFEAKPDDLLICTYPKAGTTWIQEIVDMIEQNGDVEKCQRAIIQHRHPFIEWARPPQPSGVEKAKAMPSPRILKTHLSTQLLPPSFWENNCKFLYVARNAKDCMVSYYHFQRMNHMLPDPGTWEEYFETFINGKVVWGSWFDHVKGWWEMKDRHQILFLFYEDIKRDPKHEIRKVMQFMGKKVDETVLDKIVQETSFEKMKENPMTNRSTVSKSILDQSISSFMRKGTVGDWKNHFTVAQNERFDEIYRRKMEGTSINFCMEL

SEQ ID NO: 34350 - protein, 310 aa, Artificial Sequence
  derived and/or modified sequence
MALTSDLGKQIKLKEVEGTLLQPATVDNWSQIQSFEAKPDDLLICTYPKAGTTWIQEIVDMIEQNGDVEKCQRAIIQHRHPFIEWARPPQPSVLVLRRCFLLSYFKGVEKAKAMPSPRILKTHLSTQLLPPSFWENNCKFLYVARNAKDCMVSYYHFQRMNHMLPDPGTWEEYFETFINGKVVWGSWFDHVKGWWEMKDRHQILFLFYEDIKRDPKHEIRKVMQFMGKKVDETVLDKIVQETSFEKMKENPMTNRSTVSKSILDQSISSFMRKGTVGDWKNHFTVAQNERFDEIYRRKMEGTSINFCMEL

SEQ ID NO: 34351 - DNA, 891 bp, Artificial Sequence
  derived and/or modified sequence
atggccctgaccagcgacctgggcaagcagatcaagctgaaggaggtggagggcaccctgctgcagcccgccaccgtggacaactggagccagatccagagcttcgaggccaagcccgacgacctgctgatctgcacctaccccaaggccggcaccacctggatccaggagatcgtggacatgatcgagcagaacggcgacgtggagaagtgccagagagccatcatccagcacagacaccccttcatcgagtgggccagacccccccagcccagcggcgtggagaaggccaaggccatgcccagccccagaatcctgaagacccacctgagcacccagctgctgccccccagcttctgggagaacaactgcaagttcctgtacgtggccagaaacgccaaggactgcatggtgagctactaccacttccagagaatgaaccacatgctgcccgaccccggcacctgggaggagtacttcgagaccttcatcaacggcaaggtggtgtggggcagctggttcgaccacgtgaagggctggtgggagatgaaggacagacaccagatcctgttcctgttctacgaggacatcaagagagaccccaagcacgagatcagaaaggtgatgcagttcatgggcaagaaggtggacgagaccgtgctggacaagatcgtgcaggagaccagcttcgagaagatgaaggagaaccccatgaccaacagaagcaccgtgagcaagagcatcctggaccagagcatcagcagcttcatgagaaagggcaccgtgggcgactggaagaaccacttcaccgtggcccagaacgagagattcgacgagatctacagaagaaagatggagggcaccagcatcaacttctgcatggagctgtag

SEQ ID NO: 34352 - DNA, 933 bp, Artificial Sequence
  derived and/or modified sequence
atggccctgaccagcgacctgggcaagcagatcaagctgaaggaggtggagggcaccctgctgcagcccgccaccgtggacaactggagccagatccagagcttcgaggccaagcccgacgacctgctgatctgcacctaccccaaggccggcaccacctggatccaggagatcgtggacatgatcgagcagaacggcgacgtggagaagtgccagagagccatcatccagcacagacaccccttcatcgagtgggccagacccccccagcccagcgtgctggtgctgagaagatgcttcctgctgagctacttcaagggcgtggagaaggccaaggccatgcccagccccagaatcctgaagacccacctgagcacccagctgctgccccccagcttctgggagaacaactgcaagttcctgtacgtggccagaaacgccaaggactgcatggtgagctactaccacttccagagaatgaaccacatgctgcccgaccccggcacctgggaggagtacttcgagaccttcatcaacggcaaggtggtgtggggcagctggttcgaccacgtgaagggctggtgggagatgaaggacagacaccagatcctgttcctgttctacgaggacatcaagagagaccccaagcacgagatcagaaaggtgatgcagttcatgggcaagaaggtggacgagaccgtgctggacaagatcgtgcaggagaccagcttcgagaagatgaaggagaaccccatgaccaacagaagcaccgtgagcaagagcatcctggaccagagcatcagcagcttcatgagaaagggcaccgtgggcgactggaagaaccacttcaccgtggcccagaacgagagattcgacgagatctacagaagaaagatggagggcaccagcatcaacttctgcatggagctgtag

SEQ ID NO: 34353 - DNA, 891 bp, Artificial Sequence
  derived and/or modified sequence
atggcccttacctctgatctgggaaaacagataaaactgaaggaagtagaaggaacacttctccaaccagccacagtggacaattggtcacagatccagtcttttgaggctaaacctgatgacctgttgatctgcacctaccctaaggctggcacaacttggatacaagagatcgtcgatatgattgagcaaaatggagacgttgaaaaatgccagagagctatcattcagcacagacacccattcatcgagtgggcccgccctcctcagcccagtggagtggagaaagcgaaagccatgccatctccaagaattctgaagacccatctctccacacaactcctgcctccctcgttttgggagaataattgtaaatttctgtatgtggctagaaatgccaaggactgcatggtctcctattaccacttccaaaggatgaaccatatgcttcctgatccagggacctgggaagagtattttgagacatttatcaacggaaaggttgtttggggcagttggtttgaccacgttaagggatggtgggagatgaaggacaggcatcagatcctgtttctgttctacgaggacatcaaaagggaccctaaacatgagattaggaaggtaatgcaattcatgggcaagaaagtggatgagactgtattagataagatcgtgcaagaaacttctttcgagaaaatgaaggagaaccccatgaccaaccggtcgacggtgtccaaatccatactggatcagagcatcagctctttcatgcgcaaagggactgtcggagactggaagaaccactttaccgtcgcacaaaacgaacgatttgatgagatatatagacgcaagatggaaggcacaagcattaacttctgtatggaactgtag

SEQ ID NO: 34354 - DNA, 933 bp, Artificial Sequence
  derived and/or modified sequence
atggccctgacatcagatctggggaagcagattaaactgaaggaagtggagggaaccctgctgcagcctgctactgtcgacaactggtcacagatccaatcctttgaagccaaaccggacgatctgcttatatgcacctacccgaaagccggcacaacttggattcaggaaatcgtggacatgatcgagcagaatggggacgtggaaaaatgtcagagggcaatcattcagcatcggcaccctttcattgagtgggccaggccaccacagccaagcgtcctcgtgctccgccgttgttttctgctgagttattttaagggcgtggagaaagccaaggccatgccatctccccggatactcaagacgcatctttctacacagctcctgcctccctcattttgggaaaataattgtaaattcctgtatgtcgctcgaaatgccaaggactgtatggtttcttactaccatttccagagaatgaaccatatgctacccgaccccggcacatgggaggagtacttcgagacttttattaacggtaaggtggtgtggggttcctggttcgatcacgtcaagggatggtgggagatgaaggatagacaccagatccttttcctgttctacgaagacatcaaaagagatccaaaacatgaaatcaggaaggtcatgcaatttatgggcaaaaaagtggacgagaccgtcctcgacaaaatcgtccaggagacctcttttgaaaaaatgaaagagaacccaatgaccaataggtcaactgtgtctaaatctatacttgatcagtctataagtagcttcatgagaaaaggaaccgtgggggattggaaaaatcatttcactgtagctcaaaacgaacgattcgatgaaatttatagaaggaaaatggaagggacctcaattaacttttgtatggagctgtag

SEQ ID NO: 34355 - DNA, 891 bp, Artificial Sequence
  derived and/or modified sequence
atggccctgaccagtgacctgggcaagcagatcaagctgaaggaggtggagggcaccctgctgcagcctgccaccgtggacaactggagccagatccagagctttgaggccaagccagatgacctgctgatctgcacctaccccaaggccggcaccacctggatccaggagatcgtggacatgattgagcagaatggagatgtggagaagtgccagagggccatcatccagcaccgccaccccttcatcgagtgggcccggcccccccagcccagcggcgtggagaaggccaaggccatgcccagcccccgcatcctgaagacccacctgagcacccagctgctgccccccagcttctgggagaacaactgcaagttcctgtatgtggccagaaatgccaaggactgcatggtgtcctactaccacttccagaggatgaaccacatgctgcctgaccccggcacctgggaggagtactttgagaccttcatcaatggcaaggtggtgtggggctcctggtttgaccacgtgaagggctggtgggagatgaaggacagacaccagatcctcttcctgttctatgaggacatcaagagggaccccaagcatgagatcaggaaggtgatgcagttcatgggcaagaaggtggatgaaacagtgctggacaagatcgtgcaggagaccagctttgagaagatgaaggagaaccccatgaccaacagaagcacagtgtccaagagcatcctggaccagagcatcagcagcttcatgaggaaaggaacagtgggggactggaagaaccacttcaccgtggcccagaatgaaagatttgatgagatctacagaaggaagatggagggcaccagcatcaacttctgcatggagctgtag

SEQ ID NO: 34356 - DNA, 933 bp, Artificial Sequence
  derived and/or modified sequence
atggccctgaccagtgacctgggcaagcagatcaagctgaaggaggtggagggcaccctgctgcagcctgccaccgtggacaactggagccagatccagagctttgaggccaagccagatgacctgctgatctgcacctaccccaaggccggcaccacctggatccaggagatcgtggacatgattgagcagaatggagatgtggagaagtgccagagggccatcatccagcaccgccaccccttcatcgagtgggcccggcccccccagcccagcgtgctggtgctgcggcgctgcttcctgctgagctacttcaagggcgtggagaaggccaaggccatgcccagcccccgcatcctgaagacccacctgagcacccagctgctgccccccagcttctgggagaacaactgcaagttcctgtatgtggccagaaatgccaaggactgcatggtgtcctactaccacttccagaggatgaaccacatgctgcctgaccccggcacctgggaggagtactttgagaccttcatcaatggcaaggtggtgtggggctcctggtttgaccacgtgaagggctggtgggagatgaaggacagacaccagatcctcttcctgttctatgaggacatcaagagggaccccaagcatgagatcaggaaggtgatgcagttcatgggcaagaaggtggatgaaacagtgctggacaagatcgtgcaggagaccagctttgagaagatgaaggagaaccccatgaccaacagaagcacagtgtccaagagcatcctggaccagagcatcagcagcttcatgaggaaaggaacagtgggggactggaagaaccacttcaccgtggcccagaatgaaagatttgatgagatctacagaaggaagatggagggcaccagcatcaacttctgcatggagctgtag

SEQ ID NO: 34357 - DNA, 891 bp, Artificial Sequence
  derived and/or modified sequence
atggccctgaccagcgacctgggcaagcagatcaagctgaaggaggttgaggggacactgctgcagccagccacagtagacaattggagtcagattcagagtttcgaggctaaaccagacgacttactcatatgcacctatccgaaggcaggcaccacctggatccaggaaattgttgacatgatcgagcaaaacggggacgtcgagaagtgccagcgcgccattatacagcatcgccatccattcatcgagtgggccaggcccccacagccctcgggtgtggaaaaggcaaaggctatgccctccccacgcatcctgaaaacacatctgagtacgcaactgttaccccccagtttctgggagaacaattgcaaattcctctacgtggctcgcaacgccaaagactgcatggtaagttattaccatttccaaagaatgaaccacatgctgcccgatccgggtacctgggaagagtacttcgagaccttcatcaacggaaaggtagtctggggtagctggtttgaccatgtaaaggggtggtgggagatgaaagaccgacaccagatactgtttctgttctacgaagacattaaacgagacccaaaacatgaaatccgtaaggtgatgcagttcatgggaaagaaggtcgacgagaccgtgttggataagattgtgcaggaaacttcctttgaaaagatgaaggagaatcctatgacgaatcgctccaccgtttctaaatccatactagatcagagcattagttctttcatgcggaagggcacagtgggggattggaagaaccacttcaccgtggcccagaatgagcgattcgatgaaatataccggcgcaagatggaaggcacatcgattaatttctgcatggaactgtag

SEQ ID NO: 34358 - DNA, 933 bp, Artificial Sequence
  derived and/or modified sequence
atggccctgaccagcgacctgggcaagcagatcaagctgaaggaggtggagggtacactactgcaacctgcaactgtggataactggtctcagatccagagtttcgaggctaaaccggatgatctgctgatatgtacatatcccaaggctggcaccacatggatacaggagatagtcgacatgattgagcagaacggcgatgtggagaaatgtcaacgtgccattatccaacaccgacatccattcattgagtgggccagaccgccacaaccctccgtgttagttctgagaaggtgtttcctcctgagctatttcaagggggtggaaaaagctaaggcaatgccttcgcctagaatcctcaagacccacctgtctacccagttgctcccgccgagcttctgggaaaacaactgtaagttcctgtacgtcgcaagaaacgctaaggattgcatggtgtcatattatcacttccaacgtatgaatcacatgctgcctgaccctggcacttgggaggagtatttcgagacatttatcaacggaaaggttgtctggggaagttggtttgatcatgtgaaaggctggtgggagatgaaggaccgccatcaaattttgttcctgttctacgaggatatcaaacgcgacccaaagcatgaaatccgcaaggtgatgcagtttatggggaagaaggttgacgaaactgtgctcgacaaaatcgtgcaggaaaccagtttcgaaaagatgaaggagaacccgatgacaaataggtcaaccgtgtctaagtctatcctggatcagtccatcagttccttcatgcgaaagggaaccgtgggagactggaagaaccacttcacagtagcccagaacgagagatttgacgaaatttacagaaggaagatggagggaacaagtattaatttctgtatggaactgtag

SEQ ID NO: 34359 - DNA, 891 bp, Artificial Sequence
  derived and/or modified sequence
atggccctaacttccgacctgggcaagcagatcaaactgaaagaagtcgagggaactctactgcagcctgcaactgtggataactggagtcagatccaatcatttgaggcgaagccagacgacttactgatatgcacctaccccaaggcgggaaccacttggatacaggagattgtggatatgattgagcagaatggcgatgtggagaagtgccagcgcgctatcattcagcacaggcaccctttcattgaatgggcacgccctccccagccaagcggtgtcgaaaaggcaaaagctatgccgtcaccacgaatcttaaaaacccacctttctacccagctgctgcctccaagtttctgggagaataactgtaaatttctgtacgtagcgagaaatgccaaggattgcatggtgtcctactaccactttcagcgtatgaatcatatgttgccagacccaggcacttgggaggagtacttcgaaaccttcataaatggcaaggtggtgtggggctcctggttcgatcacgttaagggttggtgggagatgaaggatagacaccagatcctgttccttttctatgaagacattaaaagggatccaaaacacgaaattcgtaaggtgatgcaattcatgggaaaaaaagtggacgaaaccgtactggataagattgtgcaagagacatctttcgagaagatgaaagagaacccaatgactaacagatctacagtatcaaaatcaattctggaccaatctatctcttccttcatgcgcaagggtacggtgggtgactggaagaaccacttcactgtggcccagaatgagagattcgacgaaatttatagaaggaagatggaggggacgtccattaatttttgcatggaactgtag

SEQ ID NO: 34360 - DNA, 933 bp, Artificial Sequence
  derived and/or modified sequence
atggcgctgacatcagacctagggaagcagattaaactaaaggaggttgaaggcaccctgctgcagcctgccactgttgataactggtcccagattcagagcttcgaagcaaaaccagacgatcttcttatatgcacttacccaaaagccggtacaacctggatccaggagatagtggatatgatcgagcagaacggtgacgtggagaaatgtcagcgcgcaatcattcaacatagacatccatttatagaatgggcacgcccaccacagccgagtgtcctggtgctccgtcgctgctttctcctctcctactttaagggcgtggagaaggctaaggcgatgccctcccccagaattctgaagactcatctgagtacccagctgttgccaccatcattttgggaaaacaactgcaaattcctctacgttgctagaaatgccaaagactgcatggtgtcctattaccacttccagaggatgaaccacatgctgcctgaccctggcacctgggaagaatatttcgagacctttatcaacgggaaggtggtgtggggttcctggtttgaccacgtcaaggggtggtgggaaatgaaagatcgacaccagatcctttttttgttttacgaagatatcaagagggacccgaagcatgagatccgaaaggtgatgcagtttatgggtaagaaggtggacgaaacagttctggataagatcgttcaggagacctcttttgagaagatgaaggagaatcccatgaccaacagatcaaccgtttcgaaatctatattggatcagagcatctcctccttcatgcgcaaaggaactgtgggagattggaaaaaccactttactgtcgctcagaatgaaagattcgacgagatttacaggagaaagatggaggggacctctatcaacttttgcatggagctgtag

SEQ ID NO: 34361 - DNA, 2795 bp, Artificial Sequence
  derived and/or modified sequence
agcttcgaggccagtgggaggagggaggggccaggcagctgagggccaggaaagatgtgaaaaactctagctggtgaccgagaggaggagtagagtgtgcccttagttcatatgaactagagggagttggtatttgcacagcagtcagggtcacatgagtgatcatggtacagtgagaagttctccctcccagggccaggtcacagggtttgtttctgttcaatccggattcttccagtaaaagcttcaacttcccacactgaagctgagagcctcccaaagtgctggctacctgctgagcgcccccgtaactctgacacagtagtaatttgagcctctgcaattgccgtctgcttcctgtgaaagtcctttccgtgcccactgacccttgagtgggcctttgagctgctgactttcagctggaacttgaagggaccccaaccctgagacactatggccctgacctcagacctggggaaacagataaaactgaaagaggtggaggggaccctcctgcagcctgcaactgtggacaactggagccagatccagagcttcgaggccaaaccagatgatctcctcatctgcacctaccctaaagcagggacaacgtggattcaggaaattgtggatatgattgaacagaatggggacgtggagaagtgccagcgagccatcatccaacaccgccatcctttcattgagtgggctcggccaccccaaccttctggtgtggaaaaagccaaagcaatgccctctccacggatactaaagactcacctttccactcagctgctgccaccgtctttctgggaaaacaactgcaagttcctttatgtagctcgaaatgccaaagactgtatggtttcctactaccatttccaaaggatgaaccacatgcttcctgaccctggtacctgggaagagtattttgaaaccttcatcaatggaaaagtggtttggggttcctggtttgaccacgtgaaaggatggtgggagatgaaagacagacaccagattctcttcctcttctatgaggacataaagagggacccaaagcatgaaattcggaaggtgatgcagttcatgggaaagaaggtggatgaaacagtgctagataaaattgtccaggagacgtcatttgagaaaatgaaagaaaatcccatgacaaatcgttctacagtttccaaatctatcttggaccagtcaatttcctccttcatgagaaaaggaactgtgggggattggaaaaaccacttcactgttgcccagaatgagaggtttgatgaaatctatagaagaaagatggaaggaacctccataaacttctgcatggaactctgagcaagatgtaaataaaattaaaaggtggatggcaagagtgcaaatactatcttcaatccttcagtcccagccagaagaatctctgaaagcatattgtgaatgtatacaatgtagtacaaacaatctctgtgatgattaacagtatgtcaccacttcattttttaaaaaggatcacgtctaatgcccattttcccaactattctttccaaagtaagatataaggtagcttaataaactaagtaaaacgtatgacttgagtacaaaaggattgttttaatccccattattctggaaagtgcatcctagtctcccagtctataacatcataataccttgagtataagtccaaatattaggttatatctatattaaaaacaaaatttctgtcatctgtcctggccattcaggcaactccagcctgggctcaatcctggagttctgtctggtcactatcagaaggaacactttgagggaaaccctggtgcagccagccctgaggaaacatggcctgagtgccctcactggtgggtgggaataaaatggaagtgcacagaggagatgtcagaagaccaaaacttggtgaatagtcccagtgctaggtcatataggaaacagaaagcatgacagtggccttttgggaacccaagttacgtcctggtgaaagcagaaaggaggagacaggatggctgtcaacaacgtcagcatgggcatggctcccaggcatggaggtaattgggtcttggcttcaatgccacccttttgggaagccctaaaccaagtgaggtgttcttttcccttgcttcccatatttgtcccagttgcagccctgttgttatgtatttactcttcaatttcttatttatacctctcactcaattgttaattctttgggttcagtctcatgccatatttactcctagtacctaatgcagtgcctggcacacagcaagtgcccttgagaacttgtagagggagtaaaaaagtgcatggataaatgactgcagcaaatcacaaattttgaactttgacccttttcttttagtcccaaatagtggcattccatagctgagggtagtaggagcagttcaccctgggagcagacaataagaggaagaatgaagccaactaaaattctgaatgctttttgttggatttcgtagggtattttttttaaaatagggtcttgctatgttgcccaggctggtcttaactgactgctttttattattaccatgcactggcaattccaaacaatgtcagtgttaaaatgcttctccctgaaaaagagaaaaaaaaaaggaaaaaaagaaaagaaaagtgaaaagaaaaactcttattggcctaagttctaaataatagctaggttaccactgagttttaactatatgtatatgagcttcaaataagcacctttttattatgtaaataaataaaagttatctgtatcccca

SEQ ID NO: 34362 - DNA, 1359 bp, Artificial Sequence
  derived and/or modified sequence
ccaaagtgctggctacctgctgagcgcccccgtaactctgacacagtagtaatttgagcctctgcaattgccgtctgcttcctgtgaaagtcctttccgtgcccactgacccttgagtgggcctttgagctgctgactttcagctggaacttgaagggaccccaaccctgagacactatggccctgacctcagacctggggaaacagataaaactgaaagaggtggaggggaccctcctgcagcctgcaactgtggacaactggagccagatccagagcttcgaggccaaaccagatgatctcctcatctgcacctaccctaaagcagggacaacgtggattcaggaaattgtggatatgattgaacagaatggggacgtggagaagtgccagcgagccatcatccaacaccgccatcctttcattgagtgggctcggccaccccaaccttctgtgcttgtactacgcagatgtttcctcttgagctattttaaaggtgtggaaaaagccaaagcaatgccctctccacggatactaaagactcacctttccactcagctgctgccaccgtctttctgggaaaacaactgcaagttcctttatgtagctcgaaatgccaaagactgtatggtttcctactaccatttccaaaggatgaaccacatgcttcctgaccctggtacctgggaagagtattttgaaaccttcatcaatggaaaagtggtttggggttcctggtttgaccacgtgaaaggatggtgggagatgaaagacagacaccagattctcttcctcttctatgaggacataaagagggacccaaagcatgaaattcggaaggtgatgcagttcatgggaaagaaggtggatgaaacagtgctagataaaattgtccaggagacgtcatttgagaaaatgaaagaaaatcccatgacaaatcgttctacagtttccaaatctatcttggaccagtcaatttcctccttcatgagaaaaggaactgtgggggattggaaaaaccacttcactgttgcccagaatgagaggtttgatgaaatctatagaagaaagatggaaggaacctccataaacttctgcatggaactctgagcaagatgtaaataaaattaaaaggtggatggcaagagtgcaaatactatcttcaatccttcagtcccagccagaagaatctctgaaagcatattgtgaatgtatacaatgtagtacaaacaatctctgtgatgattaacagtatgtcaccacttcattttttaaaaaggatcacgtctaatgcccattttcccaactattctttccaaagtaagatataaggtagcttaataaactaagtaaaacgta

SEQ ID NO: 34363 - protein, 398 aa, Artificial Sequence
  derived and/or modified sequence
MGTCDIVTEANISSGPESNTTGITAFSMPSWQLALWATAYLALVLVAVTGNAIVIWIILAHRRMRTVTNYFIVNLALADLCMAAFNAAFNFVYASHNIWYFGRAFCYFQNLFPITAMFVSIYSMTAIAADRYMAIVHPFQPRLSAPSTKAVIAGIWLVALALASPQCFYSTVTMDQGATKCVVAWPEDSGGKTLLLYHLVVIALIYFLPLAVMFVAYSVIGLTLWRRAVPGHQAHGANLRHLQAMKKFVKTMVLVVLTFAICWLPYHLYFILGSFQEDIYCHKFIQQVYLALFWLAMSSTMYNPIIYCCLNHRFRSGFRLAFRCCPWVTPTKEDKLELTPTTSLSTRVNRCHTKETLFMAGDTAPSEATSGEAGRPQDGSGLWFGYGLLAPTKTHVEI

SEQ ID NO: 34364 - protein, 186 aa, Artificial Sequence
  derived and/or modified sequence
MFVAYSVIGLTLWRRAVPGHQAHGANLRHLQAMKKFVKTMVLVVLTFAICWLPYHLYFILGSFQEDIYCHKFIQQVYLALFWLAMSSTMYNPIIYCCLNHRFRSGFRLAFRCCPWVTPTKEDKLELTPTTSLSTRVNRCHTKETLFMAGDTAPSEATSGEAGRPQDGSGLWFGYGLLAPTKTHVEI

SEQ ID NO: 34365 - DNA, 1197 bp, Artificial Sequence
  derived and/or modified sequence
atgggcacctgcgacatcgtgaccgaggccaacatcagcagcggccccgagagcaacaccaccggcatcaccgccttcagcatgcccagctggcagctggccctgtgggccaccgcctacctggccctggtgctggtggccgtgaccggcaacgccatcgtgatctggatcatcctggcccacagaagaatgagaaccgtgaccaactacttcatcgtgaacctggccctggccgacctgtgcatggccgccttcaacgccgccttcaacttcgtgtacgccagccacaacatctggtacttcggcagagccttctgctacttccagaacctgttccccatcaccgccatgttcgtgagcatctacagcatgaccgccatcgccgccgacagatacatggccatcgtgcaccccttccagcccagactgagcgcccccagcaccaaggccgtgatcgccggcatctggctggtggccctggccctggccagcccccagtgcttctacagcaccgtgaccatggaccagggcgccaccaagtgcgtggtggcctggcccgaggacagcggcggcaagaccctgctgctgtaccacctggtggtgatcgccctgatctacttcctgcccctggccgtgatgttcgtggcctacagcgtgatcggcctgaccctgtggagaagagccgtgcccggccaccaggcccacggcgccaacctgagacacctgcaggccatgaagaagttcgtgaagaccatggtgctggtggtgctgaccttcgccatctgctggctgccctaccacctgtacttcatcctgggcagcttccaggaggacatctactgccacaagttcatccagcaggtgtacctggccctgttctggctggccatgagcagcaccatgtacaaccccatcatctactgctgcctgaaccacagattcagaagcggcttcagactggccttcagatgctgcccctgggtgacccccaccaaggaggacaagctggagctgacccccaccaccagcctgagcaccagagtgaacagatgccacaccaaggagaccctgttcatggccggcgacaccgcccccagcgaggccaccagcggcgaggccggcagaccccaggacggcagcggcctgtggttcggctacggcctgctggcccccaccaagacccacgtggagatctag

SEQ ID NO: 34366 - DNA, 561 bp, Artificial Sequence
  derived and/or modified sequence
atgttcgtggcctacagcgtgatcggcctgaccctgtggagaagagccgtgcccggccaccaggcccacggcgccaacctgagacacctgcaggccatgaagaagttcgtgaagaccatggtgctggtggtgctgaccttcgccatctgctggctgccctaccacctgtacttcatcctgggcagcttccaggaggacatctactgccacaagttcatccagcaggtgtacctggccctgttctggctggccatgagcagcaccatgtacaaccccatcatctactgctgcctgaaccacagattcagaagcggcttcagactggccttcagatgctgcccctgggtgacccccaccaaggaggacaagctggagctgacccccaccaccagcctgagcaccagagtgaacagatgccacaccaaggagaccctgttcatggccggcgacaccgcccccagcgaggccaccagcggcgaggccggcagaccccaggacggcagcggcctgtggttcggctacggcctgctggcccccaccaagacccacgtggagatctag

SEQ ID NO: 34367 - DNA, 1197 bp, Artificial Sequence
  derived and/or modified sequence
atggggacttgtgatattgtgacagaggccaacatttctagcggcccagaatccaacaccacggggatcaccgctttttcaatgccttcctggcaactcgcactgtgggcaaccgcttacctggcactcgtgctggtggccgtcacgggtaacgcaatcgttatctggattattctggcccaccgcagaatgaggaccgtcaccaattactttattgtcaacctcgcgcttgccgatttatgcatggccgctttcaatgcagctttcaactttgtttacgcgtcccacaacatctggtacttcggaagggccttttgttatttccaaaacctcttccctatcacagccatgtttgtgagcatatattcgatgacagctatcgcagcagataggtacatggctattgtccacccatttcagccccgtctgtccgctccctctaccaaagccgtaattgctgggatctggctcgtggccctagccctggcttctccccagtgtttctacagcacggttacaatggatcaaggtgctacaaagtgcgtggtggcctggccagaagattctgggggaaaaacattgttactgtaccatctggtggttatcgctttgatttattttctccccttggcggttatgttcgtcgcctactctgtcattggcctgaccctctggcgccgtgcagtcccggggcatcaagcacatggagctaaccttagacacctgcaagcaatgaaaaaatttgtaaagaccatggtcctggtggtcttaacttttgccatttgctggctgccataccatttgtatttcattttgggaagcttccaggaggatatctactgccacaaatttatccagcaagtctatctcgcacttttctggctggccatgagttcgaccatgtacaatccaatcatttactgctgccttaaccaccggttcaggagtgggtttaggcttgcgttcaggtgttgcccgtgggtgactccgacaaaggaagacaagctggaactgacccccactaccagtctaagtacccgcgtcaataggtgtcataccaaagaaaccctctttatggccggggacaccgcgccaagtgaggccacatctggcgaagccggacgtccccaagatggatcaggcttgtggtttggctatggattactggccccaaccaaaactcatgttgaaatctag

SEQ ID NO: 34368 - DNA, 561 bp, Artificial Sequence
  derived and/or modified sequence
atgttcgtggcttatagtgtgatcggtcttacactctggaggagagctgtccccggccaccaagctcacggagctaacctcagacatctccaggccatgaagaaatttgtcaagacaatggtattggtggtgctcacatttgctatttgctggctgccatatcacttgtatttcatcttgggatcattccaggaagatatttattgccacaaattcattcagcaggtttacctggctttgttctggctggctatgtcttccactatgtacaacccaatcatttactgttgcctcaatcatcgctttcgaagtgggtttagactggctttccggtgttgtccctgggtcacaccaactaaagaggacaaactggagctgactcctacaacatcactgagcaccagggtcaaccgctgccacaccaaggaaacgctgttcatggctggagatactgcgccaagcgaggcaacctctggagaggccgggaggccccaggacggatcaggtctgtggttcgggtatgggctgttagctcccaccaagacccatgtggagatctag

SEQ ID NO: 34369 - DNA, 1197 bp, Artificial Sequence
  derived and/or modified sequence
atgggcacctgtgacatcgtgacagaggccaacatcagcagcggccctgagagcaacaccaccggcatcacagccttctccatgcccagctggcagctggccctgtgggccacagcctacctggccctggtgctggtggccgtgactggaaatgccatcgtcatctggatcatcctggcccacaggaggatgaggacagtgaccaactacttcatcgtgaacctggccctggccgacctgtgcatggccgccttcaatgctgccttcaactttgtgtatgccagccacaacatctggtacttcggccgggccttctgctacttccagaacctcttccccatcacagccatgtttgtgtccatctacagcatgacagccatcgctgctgaccgctacatggccatcgtgcaccccttccagccccggctgagcgcccccagcaccaaggctgtgattgctggcatctggctggtggccctggccctggccagcccccagtgcttctacagcacagtgaccatggaccagggcgccaccaagtgtgtggtggcctggccagaagattctgggggcaagaccctgctgctgtaccacctggtggtgattgccctgatctacttcctgcccctggccgtgatgtttgtggcctacagcgtcatcggcctgaccctgtggaggagagctgtgcccggccaccaggcccatggagccaacctgcggcacctgcaggccatgaagaagtttgtgaagaccatggtgctggtggtgctgacctttgccatctgctggctgccctaccacctgtacttcatcctgggcagcttccaggaggacatctactgccacaagttcatccagcaggtgtacctggccctcttctggctggccatgagcagcaccatgtacaaccccatcatctactgctgcctgaaccaccgcttccgcagcggcttccggctggccttccgctgctgcccctgggtgacccccaccaaggaggacaagctggagctgacccccaccaccagcctgagcaccagggtgaaccgctgccacaccaaggagaccctcttcatggccggggacacagcccccagcgaggccaccagcggggaggccggccggccccaggacggcagcggcctgtggtttggctacggcctgctggcccccaccaagacccacgtggagatctag

SEQ ID NO: 34370 - DNA, 561 bp, Artificial Sequence
  derived and/or modified sequence
atgtttgtggcctacagcgtcatcggcctgaccctgtggaggagagctgtgcccggccaccaggcccatggagccaacctgcggcacctgcaggccatgaagaagtttgtgaagaccatggtgctggtggtgctgacctttgccatctgctggctgccctaccacctgtacttcatcctgggcagcttccaggaggacatctactgccacaagttcatccagcaggtgtacctggccctcttctggctggccatgagcagcaccatgtacaaccccatcatctactgctgcctgaaccaccgcttccgcagcggcttccggctggccttccgctgctgcccctgggtgacccccaccaaggaggacaagctggagctgacccccaccaccagcctgagcaccagggtgaaccgctgccacaccaaggagaccctcttcatggccggggacacagcccccagcgaggccaccagcggggaggccggccggccccaggacggcagcggcctgtggtttggctacggcctgctggcccccaccaagacccacgtggagatctag

SEQ ID NO: 34371 - DNA, 1197 bp, Artificial Sequence
  derived and/or modified sequence
atgggcacctgcgacatcgtgaccgaggccaacatcagcagcggcccggaatccaacacaactggaatcacggccttctccatgccttcttggcagctggccctgtgggctacggcatatcttgccctggtgctggtggcagtgacaggaaacgccatagtgatatggatcattttggcccaccggcgcatgcggaccgtgaccaactattttatagtgaatcttgctcttgccgatttgtgcatggcagccttcaatgcagcctttaactttgtatatgctagccacaatatatggtacttcggcagagcattctgttactttcagaacctatttcccatcacagcaatgttcgtcagcatatattctatgacagcgattgcagccgaccgctacatggcgattgtacatcctttccagccccgcttgtcagctcccagtaccaaggcagttatcgctgggatctggctggtggcccttgcgcttgctagcccacagtgtttttactctactgtgaccatggaccagggtgccaccaaatgtgtcgtggcttggcctgaggattcaggaggcaagacactgcttctttaccacctcgtggtcatcgccctcatctactttctgccactcgcagtgatgttcgtcgcttacagcgttattggtcttacactgtggcggcgggccgttcctggccatcaggcacatggcgctaacctgagacacctgcaggccatgaaaaagttcgtaaagaccatggtgctggttgtgctgaccttcgccatctgttggctcccgtatcatctctacttcatcctaggtagctttcaagaagatatttattgccacaaatttattcagcaggtctatctcgcacttttttggctcgccatgtccagcactatgtataaccccatcatctactgctgtttgaatcatcggtttcgaagtgggtttcgcctcgcattcaggtgttgtccttgggtcacccccactaaggaagataagctcgagctgacccccacaacatctctgtccacacgggtgaaccgctgccatactaaagaaacattatttatggccggagacacagctcccagcgaagccacctccggcgaagccggccgaccacaggatggaagcgggctctggtttgggtatggcctgctggcacctaccaagacacatgtcgagatatag

SEQ ID NO: 34372 - DNA, 561 bp, Artificial Sequence
  derived and/or modified sequence
atgttcgtggcctacagcgtgatcggcctgaccctgtggcggcgggccgtccctggccatcaggctcacggggccaatctccgacacctgcaggctatgaaaaaatttgtcaaaacgatggttctggtagttctgacgtttgctatttgttggctgccataccatctctattttattctggggtcctttcaggaggatatctattgccacaagttcattcaacaagtctacctggccttgttttggctggcaatgtcctccaccatgtacaaccccataatttattgctgcctcaatcataggtttaggagcggcttccggctagcttttcggtgctgcccgtgggtgacccccacgaaggaagataaactagagctcactccgactaccagtctatccacacgcgttaacagatgtcacactaaagaaacacttttcatggctggtgatacagccccgtctgaggcaacctccggggaagcgggacgaccgcaggacgggagcggcttgtggttcggctacgggctgctggctcctacaaagactcatgtggaaatatag

SEQ ID NO: 34373 - DNA, 1197 bp, Artificial Sequence
  derived and/or modified sequence
atgggaacctgtgacatcgttactgaagcaaatatttcttccggtcccgagagtaatacgacaggaatcaccgcattctccatgccttcctggcagctggcgctctgggccacagcctacctggctctggtactggtggcagtgaccggcaatgccatcgtcatttggatcatccttgcccatcgaagaatgcgtacagtgacaaactacttcatcgtcaacctcgcacttgccgatctatgcatggctgcctttaacgctgccttcaactttgtgtatgcctcacacaatatatggtacttcggcagggcgttttgctatttccagaacctgttccctattaccgcgatgttcgtgtcaatttacagcatgaccgccatcgctgcggacaggtacatggctattgtccacccatttcagccaaggttaagcgctccgagcaccaaagcagtaatcgccggtatctggttagtagccttggccttagcgagccctcagtgcttttatagcaccgtcactatggaccaaggggcaactaaatgcgttgttgcatggcctgaagactctggcggaaagacactacttctgtatcaccttgtggtcattgcactgatctatttcttgcccctagctgtcatgtttgttgcgtattcagtgattgggttaactctgtggcgacgcgcagtccctggacatcaggcacatggcgctaacctcaggcacctccaagcaatgaaaaagttcgtcaagaccatggtgttggtggtgctgaccttcgccatctgttggctaccctatcacctatattttattctgggtagcttccaggaggatatatactgtcacaaattcattcagcaggtgtacttggctcttttctggctggccatgtcgagcacgatgtacaatccgattatttactgttgtctgaaccaccggtttcgaagtggattccggctggctttcaggtgctgcccttgggtgaccccaaccaaagaggataaactcgaactgactcctaccaccagcctctccacacgtgtaaaccggtgtcacacaaaggagacactatttatggcaggggatacagctccaagcgaagcaacatcgggagaagccggaaggccacaggatggctctggtttatggttcgggtatgggttactggcacccaccaaaacgcatgtcgaaatttag

SEQ ID NO: 34374 - DNA, 561 bp, Artificial Sequence
  derived and/or modified sequence
atgtttgtggcttatagtgtcatagggctgacactgtggaggcgggctgtcccaggacaccaggcccacggagccaatctccggcacttgcaagctatgaagaaatttgtgaaaacaatggtgctggtggttcttaccttcgctatctgttggctcccctaccacttgtattttatcttgggctcttttcaggaagacatctactgtcataagtttatccaacaggtgtacttagccctgttctggctcgccatgtcttccaccatgtacaaccccatcatctactgttgccttaaccatcggttcaggagcgggtttaggctggcttttcggtgttgtccatgggtgacccctactaaagaggacaaattggagctgactccaacaacctccctgtcaactagagtgaaccggtgccatactaaagagaccctctttatggctggcgatacagccccaagtgaagccacatcaggagaagccggtcgcccacaggacggatctgggctatggttcgggtacggtctactggcaccaactaaaacgcacgtggaaatctag

SEQ ID NO: 34375 - DNA, 2083 bp, Artificial Sequence
  derived and/or modified sequence
gcacccagcacccagcccggcttgcagcccaaagcctggagagaggctgctgcgccattgacctgtggactccagagactcccgctgtgcattcctctgatctggaaggtttcctgaattacgtgacgagaaacctgggttcgagtcctaacttgtcaccaacttcctgagtgacctgggctggtcccgtcccctcttggaatctctgtcttccatctcttcagcgaaggggttgatttataagggtgttttctgctctgacactgtgatttgaattctgtgtttccacatgatattcgagaagtctggccggaaggatggaatctgaaatgacaatggttctggactgggctttgtgctcagcccagctcatctttgcctgagacctaggagtggccccaggctctcctgatgtgccaccacgcttggcatctgctcctctccctgcccccatattcccatgctctgaaggggagttctctttcatagcaaatccgagaggagccgaggagccaggtcctttgttccagacccagaagcagccatggggacctgtgacattgtgactgaagccaatatctcatctggccctgagagcaacaccacgggcatcacagccttctccatgcccagctggcaactggcactgtgggccacagcctacctggccctggtgctggtggccgtgacgggtaatgccatcgtcatctggatcatcctggcccatcggaggatgcgcacagtcaccaactacttcatcgtcaatctggcgctggctgacctctgcatggctgccttcaatgccgccttcaactttgtctatgccagccacaacatctggtactttggccgtgccttctgctacttccagaacctcttccccatcacagccatgtttgtcagcatctactccatgaccgccattgctgccgacaggtacatggccatcgtccaccccttccagcctcggctttcagctcccagcaccaaggcggttattgctggcatctggctggtggctctcgccctggcctcccctcagtgcttctactccaccgtcaccatggaccagggtgccaccaagtgcgtggtggcctggcccgaagacagcgggggcaagacgctcctcctgtaccacctcgtggtgatcgccctcatctacttcctgccgctcgcggtgatgtttgtagcctacagcgtcatcggcctcacgctctggaggcgcgcagtgcccggacatcaggcgcacggtgccaacctgcgccacctgcaggccatgaagaagtttgtgaagaccatggtgctggtggtgctgacgtttgccatctgctggctgccctaccacctctacttcatcctgggcagcttccaggaggacatctactgccacaagttcatccagcaagtctacctggcactcttctggttggccatgagctctaccatgtacaatcccatcatctactgctgtctcaaccacaggtttcgctctggattccggcttgccttccgctgctgcccatgggtcacacccaccaaggaagataagctcgagctgactcccacgacctccctctccacgagagtcaacaggtgtcacactaaggagactttgttcatggctggggacacagccccctccgaggctaccagtggggaggcggggcgtccccaggatggatcagggctatggtttgggtatggtttgcttgcccccaccaaaactcatgttgaaatttgatcccaatgtggcagtgttgggaggtaggggttagtgggaggtgtttgggtattggggatggatcccttatgaatagattaatgccttccagttgaagtgaatcatcactcttgtgggaatggactagttcccaaaataacaagttgttagaaagagtgtggtgtcctcagtttccctgtcttgcttcctctctcaccatgtgatctctttgcacacaacacttcccttccactttccaccatgacaagaagcagcctgaggccttcaccagatgcagctgcccaatcttggatattccagccaccagaatcatgagccaaataaacctcttttctttataaa

SEQ ID NO: 34376 - DNA, 1740 bp, Artificial Sequence
  derived and/or modified sequence
ccttttgcagggaagccgtctcctggcacacaggctacccaatgccacctttatttttgtttaaatcaaaccaagtccctgggaggcgcccagggtgggcccgcaggggcggctccacagtgcccgcggggtcccaggaccaggcgctggcagacttcggagtcgcccccgggccctccgctgcccaggcctcggctctccctgcaggtaccacctcgtggtgatcgccctcatctacttcctgccgctcgcggtgatgtttgtagcctacagcgtcatcggcctcacgctctggaggcgcgcagtgcccggacatcaggcgcacggtgccaacctgcgccacctgcaggccatgaagaagtttgtgaagaccatggtgctggtggtgctgacgtttgccatctgctggctgccctaccacctctacttcatcctgggcagcttccaggaggacatctactgccacaagttcatccagcaagtctacctggcactcttctggttggccatgagctctaccatgtacaatcccatcatctactgctgtctcaaccacaggtttcgctctggattccggcttgccttccgctgctgcccatgggtcacacccaccaaggaagataagctcgagctgactcccacgacctccctctccacgagagtcaacaggtgtcacactaaggagactttgttcatggctggggacacagccccctccgaggctaccagtggggaggcggggcgtccccaggatggatcagggctatggtttgggtatggtttgcttgcccccaccaaaactcatgttgaaatttgatcccaatgtggcagtgttgggaggtaggggttagtgggaggtgtttgggtattggggatggatcccttatgaatagattaatgccttccagttgaagtgaatcatcactcttgtgggaatggactagttcccaaaataacaagttgttagaaagagtgtggtgtcctcagtttccctgtcttgcttcctctctcaccatgtgatctctttgcacacaacacttcccttccactttccaccatgacaagaagcagcctgaggccttcaccagatgcagctgcccaatcttggatattccagccaccagaatcatgagccaaataaacctcttttctttataaattacctagtctcaggtattccatgaaagcaacacaaatggactgagataggtgcctattgaaccctgaagccttgtgcctggctgcagaatgaggtgtagcaccctttgagaagtagccaatcgagaagaccacatctgaaagttcagctcatgccccatccttcagtataccaatacaaagacaacatggggccagaactccagaaaggatgctgactttaagaggactcagccacccatctcagagagcacttcagaggatccagtaagggtcagaaaagacagtgtaagctgatatttatctaatttaagagatgcaagctcaaatgccttcctggggcatacaagaatatgtataaaagaaaaactgcaaatgtgatgataaaaggcaactgacttccaccctcagtttgagctaatagggaatggtgggggccatggcaacctggagaggacaggcattcaaaggggacaagaactactcagctctggacaaacgttgccacatgataatgggagcccactgttgctagatcttctaaatctttcaagagaagctataaatccacatttgtatgtg

SEQ ID NO: 34377 - protein, 407 aa, Artificial Sequence
  derived and/or modified sequence
MDNVLPVDSDLSPNISTNTSEPNQFVQPAWQIVLWAAAYTVIVVTSVVGNVVVMWIILAHKRMRTVTNYFLVNLAFAEASMAAFNTVVNFTYAVHNEWYYGLFYCKFHNFFPIAAVFASIYSMTAVAFDRYMAIIHPLQPRLSATATKVVICVIWVLALLLAFPQGYYSTTETMPSRVVCMIEWPEHPNKIYEKVYHICVTVLIYFLPLLVIGYAYTVVGITLWASEIPGDSSDRYHEQVSAKRKVVKMMIVVVCTFAICWLPFHIFFLLPYINPDLYLKKFIQQVYLAIMWLAMSSTMYNPIIYCCLNDRFRLGFKHAFRCCPFISAGDYEGLEMKSTRYLQTQGSVYKVSRLETTISTVVGAHEEEPEDGPKATPSSLDLTSNCSSRSDSKTMTESFSFSSNVLS

SEQ ID NO: 34378 - protein, 311 aa, Artificial Sequence
  derived and/or modified sequence
MDNVLPVDSDLSPNISTNTSEPNQFVQPAWQIVLWAAAYTVIVVTSVVGNVVVMWIILAHKRMRTVTNYFLVNLAFAEASMAAFNTVVNFTYAVHNEWYYGLFYCKFHNFFPIAAVFASIYSMTAVAFDRYMAIIHPLQPRLSATATKVVICVIWVLALLLAFPQGYYSTTETMPSRVVCMIEWPEHPNKIYEKVYHICVTVLIYFLPLLVIGYAYTVVGITLWASEIPGDSSDRYHEQVSAKRKVVKMMIVVVCTFAICWLPFHIFFLLPYINPDLYLKKFIQQVYLAIMWLAMSSTMYNPIIYCCLNDR

SEQ ID NO: 34379 - DNA, 1224 bp, Artificial Sequence
  derived and/or modified sequence
atggacaacgtgctgcccgtggacagcgacctgagccccaacatcagcaccaacaccagcgagcccaaccagttcgtgcagcccgcctggcagatcgtgctgtgggccgccgcctacaccgtgatcgtggtgaccagcgtggtgggcaacgtggtggtgatgtggatcatcctggcccacaagagaatgagaaccgtgaccaactacttcctggtgaacctggccttcgccgaggccagcatggccgccttcaacaccgtggtgaacttcacctacgccgtgcacaacgagtggtactacggcctgttctactgcaagttccacaacttcttccccatcgccgccgtgttcgccagcatctacagcatgaccgccgtggccttcgacagatacatggccatcatccaccccctgcagcccagactgagcgccaccgccaccaaggtggtgatctgcgtgatctgggtgctggccctgctgctggccttcccccagggctactacagcaccaccgagaccatgcccagcagagtggtgtgcatgatcgagtggcccgagcaccccaacaagatctacgagaaggtgtaccacatctgcgtgaccgtgctgatctacttcctgcccctgctggtgatcggctacgcctacaccgtggtgggcatcaccctgtgggccagcgagatccccggcgacagcagcgacagataccacgagcaggtgagcgccaagagaaaggtggtgaagatgatgatcgtggtggtgtgcaccttcgccatctgctggctgcccttccacatcttcttcctgctgccctacatcaaccccgacctgtacctgaagaagttcatccagcaggtgtacctggccatcatgtggctggccatgagcagcaccatgtacaaccccatcatctactgctgcctgaacgacagattcagactgggcttcaagcacgccttcagatgctgccccttcatcagcgccggcgactacgagggcctggagatgaagagcaccagatacctgcagacccagggcagcgtgtacaaggtgagcagactggagaccaccatcagcaccgtggtgggcgcccacgaggaggagcccgaggacggccccaaggccacccccagcagcctggacctgaccagcaactgcagcagcagaagcgacagcaagaccatgaccgagagcttcagcttcagcagcaacgtgctgagctag

SEQ ID NO: 34380 - DNA, 1224 bp, Artificial Sequence
  derived and/or modified sequence
atggacaacgtgctgccagtcgactccgatctttcccccaatatttctactaacacatctgagccaaatcagttcgtccagccggcatggcagatcgtcctatgggccgccgcgtacaccgtgatcgtggtcacgtcagttgtcggcaatgttgtggtgatgtggataatacttgcccacaagcgcatgaggacagtcactaactactttctggtcaacttagcattcgccgaggctagtatggctgcatttaacaccgtagtcaattttacgtatgctgttcataatgagtggtattatggcctattttactgtaagttccacaatttctttcccatcgcagctgtgttcgcatctatctatagtatgacagccgtcgcctttgatcgctacatggctatcatccaccctctgcagcctaggctgagcgcaacagcgaccaaagtcgtgatatgcgtaatatgggtgttagccctgttgctggcctttccacagggttattactcgactactgagactatgccatcccgcgtcgtgtgtatgatcgaatggccagagcatccgaataaaatttatgaaaaggtgtatcacatctgtgtcaccgttctcatttattttctgcccctgctggtgatcgggtacgcttacaccgtggtcggcatcacattgtgggcgtctgaaatccccggcgattcatccgaccgctaccacgagcaggtaagcgccaagcgtaaggtcgtgaaaatgatgatcgtggtggtatgtaccttcgcgatctgctggctgccgtttcacatcttttttctcttgccctatataaacccggatctctacctgaagaagttcattcagcaggtatatcttgctatcatgtggctcgccatgagttctaccatgtacaatccaatcatttattgctgcctaaacgatagattccggttgggctttaagcacgcttttcggtgctgcccattcataagcgccggagactacgagggtctggagatgaaatccacccggtacttgcaaacacagggctcagtatacaaagtgtccagacttgaaactaccatcagcacagttgtgggcgctcacgaggaagaacccgaggacgggcctaaagctacccccagctcactggatctgactagcaactgctcctcgcgctccgattctaagacaatgactgaatcgttttccttttcatcaaacgtcctttcttag

SEQ ID NO: 34381 - DNA, 1224 bp, Artificial Sequence
  derived and/or modified sequence
atggacaacgtgctgcctgtggacagcgacctgagccccaacatcagcaccaacaccagcgagcccaaccagtttgtgcagcctgcctggcagatcgtgctgtgggccgccgcctacaccgtcatcgtggtgacctctgtggtgggcaatgtggtggtgatgtggatcatcctggcccacaagaggatgaggacagtgaccaactacttcctggtgaacctggcctttgctgaggcctccatggccgccttcaacacagtggtgaacttcacctatgctgtgcacaatgagtggtactacggcctcttctactgcaagttccacaacttcttccccatcgctgctgtgtttgccagcatctacagcatgacagctgtggcctttgaccgctacatggccatcatccaccccctgcagccccggctgagcgccacagccaccaaggtggtgatctgtgtgatctgggtgctggccctgctgctggccttcccccagggctactacagcaccacagagaccatgcccagccgggtggtgtgcatgattgagtggccagagcaccccaacaagatctatgagaaggtgtaccacatctgtgtgacagtgctgatctacttcctgcccctgctggtgattggctacgcctacacagtggtgggcatcaccctgtgggccagcgagatccctggggacagcagtgaccgctaccacgagcaggtgtctgccaagaggaaggtggtgaagatgatgattgtggtggtgtgcacctttgccatctgctggctgcccttccacatcttcttcctgctgccctacatcaacccagacctgtacctgaagaagttcatccagcaggtgtacctggccatcatgtggctggccatgagcagcaccatgtacaaccccatcatctactgctgcctgaatgaccgcttccggctgggcttcaagcacgccttccgctgctgccccttcatctctgctggggactatgagggcctggagatgaagagcacccgctacctgcagacccagggctctgtgtacaaggtgtcccggctggagaccaccatcagcacagtggtgggcgcccacgaggaggagccagaagatggccccaaggccacccccagcagcctggacctgaccagcaactgcagcagcagaagtgacagcaagaccatgacagagagcttctccttcagcagcaatgtgctgtcctag

SEQ ID NO: 34382 - DNA, 1224 bp, Artificial Sequence
  derived and/or modified sequence
atggacaacgtgctgcccgtggacagcgacctgagccccaacatctctaccaacacaagcgagcccaaccagtttgtgcagcctgcctggcaaattgtgctatgggccgctgcctacacagtcatcgtggtgacctctgtggtcgggaacgttgtggtgatgtggattatattggctcacaaaagaatgagaacagtgaccaactacttccttgttaacctagcgttcgctgaggcttcgatggccgccttcaatacagtcgtgaactttacctacgcagtgcacaatgaatggtactacggcctcttttattgtaagttccacaatttctttcctatcgccgccgtatttgccagcatctattcaatgacagccgtggctttcgatcggtatatggccattattcatcctctgcaaccgaggctatcagctacagcaacaaaggtggtaatttgcgttatctgggtgctggccctcctacttgcattcccccaaggctactacagcaccaccgaaaccatgccatcaagagtcgtgtgcatgattgagtggccggaacaccctaacaagatatacgagaaggtatatcacatttgtgtgacagtcctcatttatttcctgccactcctggtgatcggatacgcctatactgtcgtggggatcaccctctgggcctccgagatacctggcgatagcagcgataggtaccacgaacaagtcagtgcaaagaggaaggtcgtcaagatgatgattgtggtagtttgcacctttgccatctgctggctcccattccatatcttctttctgcttccctatatcaacccggacctatacttaaagaagttcatacagcaggtgtacttggcgattatgtggctggctatgtcctcgacaatgtataacccgatcatttactgttgcttaaacgatcgattcagattgggtttcaagcacgccttcagatgttgtcccttcatctccgctggcgattacgagggcctggaaatgaagtccacgcggtatctgcagactcaggggtctgtctataaagttagcagacttgaaactacgatctccaccgtggtgggcgcccacgaggaggagccggaagacggccctaaggccacaccttcatcgctggatctgacatccaactgctcatctcgctctgactccaaaaccatgacagagtcgttttccttttctagtaatgtactcagctag

SEQ ID NO: 34383 - DNA, 1224 bp, Artificial Sequence
  derived and/or modified sequence
atggacaacgtgctgcctgtcgatagtgacttgtctcccaacatctccacaaacactagtgagcccaaccagtttgttcaaccagcatggcagattgtcctgtgggcggctgcctatactgtaattgtcgtgacgagtgttgttggcaacgtggtggtgatgtggataatcctagcccacaagaggatgcggactgttaccaattatttcctggtgaacctagcgtttgcagaggccagcatggcagccttcaacacagtggtgaactttacttacgccgttcataacgaatggtattatggtttattttattgtaagtttcacaacttcttccccatagccgctgtatttgcctcgatctactccatgaccgccgtggcattcgacaggtacatggccattatccatccgctccagccgagactgagtgcgaccgctacaaaggtggttatttgtgtgatctgggttctcgcactgctgctggccttccctcaaggctactatagcaccacagagacaatgccaagtagagtcgtctgtatgatcgagtggcctgagcatccaaacaaaatctatgagaaagtttaccatatttgtgtgaccgttttgatctattttctgccgttactggtcataggatacgcttacacagtcgttggtatcaccctatgggctagtgagatcccaggcgatagctcagaccggtaccacgaacaggtcagtgcgaagcgaaaagttgtcaaaatgatgatagtggtagtgtgcaccttcgccatctgttggttgccctttcacatattctttttgctgccttacatcaatcccgatctgtatcttaaaaaattcattcagcaggtctaccttgcaattatgtggctcgccatgagttcaaccatgtataatcccatcatctattgctgccttaacgatcggttccggctcggattcaagcatgcctttaggtgttgtcctttcatatccgccggtgattatgagggacttgaaatgaaatccacgcgttacttgcaaactcagggatctgtttacaaagtgtcccggctcgagacaaccatatcaacagtagttggcgcacacgaggaggagcccgaagacggaccgaaagcaactccgtctagtttggatctcacttccaattgctccagcaggagtgactcaaagacaatgacagaatcttttagtttcagcagcaatgtgcttagttag

SEQ ID NO: 34384 - DNA, 2318 bp, Artificial Sequence
  derived and/or modified sequence
acggcaagtagcaagcagcaaaaggcgtggtagctgcggcggtggaatgagacagttgtcaacagctggcgcagctgccgcgctgcgcaccgggactggcgagtacgcagcccaggtactgccccttcccagtgacgtctctgcagggggttataaaagcctcgtgcgcagctaactcgcgagctgagcaacccgaaccgagaggtgcccgcgaaactgcaggcggcggcagcggcagcaaaagagaaggaaaaatctccagctggatacgaagctccagaatcctggccataggctcagaacttttacaggtcgcgctgcaatgggcccccacttcgctcctaagtcctcacgcagcacagggctttgcctttccctgcggaggaaggagaaataggagttgcaggcagcagcaggtgcataaatgcgggggatctcttgcttcctagaactgtgaccggtggaatttctttccctttttcagtttaccgcaagagagatgctgtctccagacttctgaactcaaacgtctcctgaagcttgaaagtggaggaattcagagccaccgcgggcaggcgggcagtgcatccagaagcgtttatattctgagcgccagttcagctttcaaaaagagtgctgcccagaaaaagccttccaccctcctgtctggctttagaaggaccctgagccccaggcgccagccacaggactctgctgcagaggggggttgtgtacagatagtagggctttaccgcctagcttcgaaatggataacgtcctcccggtggactcagacctctccccaaacatctccactaacacctcggaacccaatcagttcgtgcaaccagcctggcaaattgtcctttgggcagctgcctacacggtcattgtggtgacctctgtggtgggcaacgtggtagtgatgtggatcatcttagcccacaaaagaatgaggacagtgacgaactattttctggtgaacctggccttcgcggaggcctccatggctgcattcaatacagtggtgaacttcacctatgctgtccacaacgaatggtactacggcctgttctactgcaagttccacaacttctttcccatcgccgctgtcttcgccagtatctactccatgacggctgtggcctttgataggtacatggccatcatacatcccctccagccccggctgtcagccacagccaccaaagtggtcatctgtgtcatctgggtcctggctctcctgctggccttcccccagggctactactcaaccacagagaccatgcccagcagagtcgtgtgcatgatcgaatggccagagcatccgaacaagatttatgagaaagtgtaccacatctgtgtgactgtgctgatctacttcctccccctgctggtgattggctatgcatacaccgtagtgggaatcacactatgggccagtgagatccccggggactcctctgaccgctaccacgagcaagtctctgccaagcgcaaggtggtcaaaatgatgattgtcgtggtgtgcaccttcgccatctgctggctgcccttccacatcttcttcctcctgccctacatcaacccagatctctacctgaagaagtttatccagcaggtctacctggccatcatgtggctggccatgagctccaccatgtacaaccccatcatctactgctgcctcaatgacaggttccgtctgggcttcaagcatgccttccggtgctgccccttcatcagcgccggcgactatgaggggctggaaatgaaatccacccggtatctccagacccagggcagtgtgtacaaagtcagccgcctggagaccaccatctccacagtggtgggggcccacgaggaggagccagaggacggccccaaggccacaccctcgtccctggacctgacctccaactgctcttcacgaagtgactccaagaccatgacagagagcttcagcttctcctccaatgtgctctcctaggccacagggcctttggcaggtgcagcccccactgcctttgacctgcctcccttcatgcatggaaattcccttcatctggaaccatcagaaacaccctcacactgggacttgcaaaaagggtcagtatgggttagggaaaacattccatccttgagtcaaaaaatctcaattcttccctatctttgccaccctcatgctgtgtgactcaaaccaaatcactgaactttgctgagcctgtaaaataaaaggtcggaccagcttttcccaaaagcccattcattccattctggaagtgactttggctgcatgcgagtgctcatttcaggat

SEQ ID NO: 34385 - protein, 465 aa, Artificial Sequence
  derived and/or modified sequence
MATLPAAETWIDGGGGVGADAVNLTASLAAGAATGAVETGWLQLLDQAGNLSSSPSALGLPVASPAPSQPWANLTNQFVQPSWRIALWSLAYGVVVAVAVLGNLIVIWIILAHKRMRTVTNYFLVNLAFSDASMAAFNTLVNFIYALHSEWYFGANYCRFQNFFPITAVFASIYSMTAIAVDRYMAIIDPLKPRLSATATKIVIGSIWILAFLLAFPQCLYSKTKVMPGRTLCFVQWPEGPKQHFTYHIIVIILVYCFPLLIMGITYTIVGITLWGGEIPGDTCDKYHEQLKAKRKVVKMMIIVVMTFAICWLPYHIYFILTAIYQQLNRWKYIQQVYLASFWLAMSSTMYNPIIYCCLNKRFRAGFKRAFRWCPFIKVSSYDELELKTTRFHPNRQSSMYTVTRMESMTVVFDPNDADTTRSSRKKRATPRDPSFNGCSRRNSKSASATSSFISSPYTSVDEYS

SEQ ID NO: 34386 - DNA, 1398 bp, Artificial Sequence
  derived and/or modified sequence
atggccaccctgcccgccgccgagacctggatcgacggcggcggcggcgtgggcgccgacgccgtgaacctgaccgccagcctggccgccggcgccgccaccggcgccgtggagaccggctggctgcagctgctggaccaggccggcaacctgagcagcagccccagcgccctgggcctgcccgtggccagccccgcccccagccagccctgggccaacctgaccaaccagttcgtgcagcccagctggagaatcgccctgtggagcctggcctacggcgtggtggtggccgtggccgtgctgggcaacctgatcgtgatctggatcatcctggcccacaagagaatgagaaccgtgaccaactacttcctggtgaacctggccttcagcgacgccagcatggccgccttcaacaccctggtgaacttcatctacgccctgcacagcgagtggtacttcggcgccaactactgcagattccagaacttcttccccatcaccgccgtgttcgccagcatctacagcatgaccgccatcgccgtggacagatacatggccatcatcgaccccctgaagcccagactgagcgccaccgccaccaagatcgtgatcggcagcatctggatcctggccttcctgctggccttcccccagtgcctgtacagcaagaccaaggtgatgcccggcagaaccctgtgcttcgtgcagtggcccgagggccccaagcagcacttcacctaccacatcatcgtgatcatcctggtgtactgcttccccctgctgatcatgggcatcacctacaccatcgtgggcatcaccctgtggggcggcgagatccccggcgacacctgcgacaagtaccacgagcagctgaaggccaagagaaaggtggtgaagatgatgatcatcgtggtgatgaccttcgccatctgctggctgccctaccacatctacttcatcctgaccgccatctaccagcagctgaacagatggaagtacatccagcaggtgtacctggccagcttctggctggccatgagcagcaccatgtacaaccccatcatctactgctgcctgaacaagagattcagagccggcttcaagagagccttcagatggtgccccttcatcaaggtgagcagctacgacgagctggagctgaagaccaccagattccaccccaacagacagagcagcatgtacaccgtgaccagaatggagagcatgaccgtggtgttcgaccccaacgacgccgacaccaccagaagcagcagaaagaagagagccacccccagagaccccagcttcaacggctgcagcagaagaaacagcaagagcgccagcgccaccagcagcttcatcagcagcccctacaccagcgtggacgagtacagctag

SEQ ID NO: 34387 - DNA, 1398 bp, Artificial Sequence
  derived and/or modified sequence
atggccaccctgcccgccgctgagacatggatagatggggggggaggcgtgggtgctgacgcagtgaatctgacagcaagcttagctgccggcgctgccacaggcgcagttgagacgggctggttacagctgctcgatcaggctggaaatctgagttcctctccctcagccctggggcttccagtggctagcccagccccctcccaaccatgggctaacctcactaaccagttcgtgcagccaagttggagaattgctctatggagcctggcctatggtgtggtggtggctgtggcggttcttggcaatctgatagtaatttggatcatactggcacacaaacgcatgcgaaccgtgaccaactatttcctggtcaatcttgcctttagcgacgcctccatggcagcatttaacactctcgtcaatttcatatatgccctccattcggagtggtactttggagctaactattgccggtttcagaactttttccccatcactgcagttttcgcatccatttactctatgaccgctatagcggtggaccgttacatggcgatcatcgatcccctcaaaccccggctgtcagcgaccgctaccaagatcgtcataggatctatctggattctcgccttcctgctggcttttccccagtgtctgtactctaagaccaaggtaatgccgggccggacactctgcttcgtgcagtggccggaagggcccaagcagcactttacctaccacattatcgttatcatcctcgtgtactgtttccctctcctgatcatgggtattacgtatacgattgtgggaatcacactatggggtggcgagataccgggcgatacgtgcgataagtaccacgagcagctaaaggccaagaggaaggtggtaaaaatgatgatcatcgtggttatgactttcgcaatttgttggctgccctaccacatctattttattttgaccgccatctaccagcagctcaatcgatggaagtatatacagcaagtgtatctcgcatctttttggttggctatgtcctctacgatgtacaatccaattatatactgttgcctcaacaaacgctttcgggcaggcttcaagcgggctttccgatggtgtccatttatcaaggtgtcatcatacgacgaattggaattgaagacaacacggtttcaccctaatcgacaatctagtatgtatacagtcacacgcatggaatcgatgacggttgtttttgaccctaatgatgccgatactaccagaagcagccggaagaaacgagccacaccccgagatccatcatttaacggctgtagccgtaggaactctaagagcgcatccgcgacaagctctttcatctcgagtccttacactagcgtcgatgaatatagctag

SEQ ID NO: 34388 - DNA, 1398 bp, Artificial Sequence
  derived and/or modified sequence
atggccaccctgcctgctgctgagacctggattgatggcggcggcggcgtgggcgcagatgctgtgaacctgacagccagcctggccgccggggccgccaccggggctgtggagaccggctggctgcagctgctggaccaggccggcaacctgagcagcagccccagcgccctgggcctgcctgtggccagccctgcccccagccagccctgggccaacctgaccaaccagtttgtgcagcccagctggagaattgccctgtggagcctggcctacggcgtggtggtggccgtggccgtgctgggcaacctgattgtcatctggatcatcctggcccacaagaggatgaggacagtgaccaactacttcctggtgaacctggccttcagtgatgcctccatggccgccttcaacaccctggtgaacttcatctatgccctgcacagcgagtggtactttggagccaactactgccgcttccagaacttcttccccatcacagctgtgtttgccagcatctacagcatgacagccatcgctgtggaccgctacatggccatcatcgaccccctgaagccccggctgagcgccacagccaccaagatcgtcatcggcagcatctggatcctggccttcctgctggccttcccccagtgcctgtacagcaagaccaaggtgatgcctggccgcaccctgtgctttgtgcagtggccagagggccccaagcagcacttcacctaccacatcatcgtcatcatcctggtgtactgcttccccctgctgatcatgggcatcacctacaccatcgtgggcatcaccctgtggggcggggagatccctggggacacctgtgacaagtaccacgagcagctgaaggccaagaggaaggtggtgaagatgatgatcatcgtggtgatgacctttgccatctgctggctgccctaccacatctacttcatcctgacagccatctaccagcagctgaaccgctggaagtacatccagcaggtgtacctggccagcttctggctggccatgagcagcaccatgtacaaccccatcatctactgctgcctgaacaagcgcttccgggccggcttcaagagggccttccgctggtgccccttcatcaaggtgtcctcctatgatgagctggagctgaagaccacccgcttccaccccaaccggcagagctccatgtacacagtgaccaggatggagagcatgacagtggtgtttgaccccaatgatgctgacaccaccaggagcagcaggaagaagagggccaccccccgggaccccagcttcaacggctgcagcagaagaaacagcaagagcgccagcgccaccagcagcttcatcagcagcccctacacctctgtggatgagtacagctag

SEQ ID NO: 34389 - DNA, 1398 bp, Artificial Sequence
  derived and/or modified sequence
atggccaccctgcccgccgccgagacctggatcgacggcggcggcggtgttggggcggatgctgtgaatctgactgcaagcctcgccgctggggcagcaactggcgcagtcgaaaccggatggcttcagttgcttgaccaggccggtaatctgtctagttctcccagtgcgttaggacttcccgtcgcatcccccgctccgtcccagccatgggctaatctgacgaaccagttcgttcaacctagctggaggatcgccctctggagtcttgcctatggagtagtggttgcggtggccgtgttgggaaacctgattgttatctggatcattttggcccataagcgcatgcggacggtaacaaattactttctcgtaaacctagccttttctgacgccagcatggcagcttttaacaccctcgtgaattttatctatgccctgcattccgagtggtacttcggcgctaactactgtagattccagaatttcttccctattacggcagtcttcgcctcaatatactcaatgacagccattgcagtggaccgctatatggccattatagatccactgaagccacgccttagcgctacggctactaaaattgtgatcgggtccatttggattctggcctttcttctggcatttccccaatgcctctacagtaagaccaaggtcatgcccggtaggaccctttgtttcgtccagtggcccgagggccccaaacagcatttcacgtaccacatcatcgtgatcatcctcgtttattgcttcccactcctgattatggggatcacatatactattgtgggaattaccctatggggcggcgagatccccggagatacctgtgataagtaccacgaacagctgaaggcgaagagaaaggtcgtgaagatgatgataatcgtagtgatgacattcgcaatctgctggcttccttaccacatctactttatcttaactgccatttatcagcaacttaatagatggaagtacatccagcaggtctatctggcgagcttttggctcgcaatgtcttccactatgtataaccctatcatctactgctgtctgaataagagattccgtgcaggttttaaaagggcctttcggtggtgtccttttattaaagtgtcatcctacgatgagctcgagcttaagacaacccgcttccatccaaacaggcaatctagcatgtatactgtgactcgtatggagtcgatgacagttgtcttcgacccaaacgatgccgacactacacggtcttcccgcaaaaaacgcgccactcctagagacccaagttttaatggatgcagtagacgcaattcaaaatccgcttccgccacctcatcttttatttcttcaccatacacgagcgtagacgaatattcttag

SEQ ID NO: 34390 - DNA, 1398 bp, Artificial Sequence
  derived and/or modified sequence
atggccaccctaccggctgccgagacatggatagatggaggcggaggcgtgggagctgatgcggtgaacctgaccgcctccctggccgcaggcgcagctactggagccgtcgaaactggatggcttcagctgctcgaccaggctgggaatctctcctccagccctagcgcccttggacttcccgtggcctccccagctccgtctcagccctgggccaacttgacgaatcagtttgtccaaccatcttggaggatcgcactgtggagccttgcatacggcgttgtcgtcgccgtcgcagttctggggaacctcatagtgatctggattattctggcccacaagcgcatgcggaccgtgactaattacttcctggtcaacctcgcgttctctgacgcaagtatggccgcatttaacacgctcgtcaattttatatacgccctccacagcgaatggtacttcggggcaaactactgtagatttcaaaacttttttcctatcacagctgtgttcgcaagcatctattccatgaccgccattgccgttgaccggtatatggcgattatcgatcccttaaagccccgactttccgccacggctacaaagatcgtgattgggtccatttggatcctcgcctttctgctagcgttccctcaatgtttgtattccaaaaccaaggtcatgccagggagaactctgtgttttgtccagtggccggaaggcccaaaacagcattttacctaccatatcattgtcattattctggtttactgttttcctctcttaatcatgggtataacttatacgatagtgggcattactctatgggggggtgagattcccggagatacatgtgacaaatatcatgagcaacttaaggctaagcgaaaggtggttaaaatgatgattatagtggtgatgaccttcgcaatttgttggctcccttaccacatctactttatcctcaccgccatctaccagcagcttaataggtggaagtacattcagcaggtttacctcgcatccttctggctcgcaatgtctagcactatgtataaccccataatatactgctgcttgaacaaacggtttcgtgccggtttcaagcgggctttcagatggtgcccattcatcaaggtttcatcatatgacgaattagagctcaagacaacccgcttccaccccaatagacagtcatccatgtataccgtgacccggatggaaagtatgaccgtggtcttcgacccaaatgatgcagacaccacccggtctagcaggaagaagcgcgctaccccaagggatccttcgttcaacggctgctcacggagaaactctaaatctgcctctgctaccagtagtttcattagtagcccatataccagcgtggacgagtactcttag

SEQ ID NO: 34391 - DNA, 5190 bp, Artificial Sequence
  derived and/or modified sequence
attgcagtatctttcagcttccagtcttatctgaagactccggcaccaaagtgaccaggaggcagagaagaacttcagaggagtctcgtcttgggctgcccgtgggtgagtgggagggtccgggactgcagaccggtggcgatggccactctcccagcagcagaaacctggatagacgggggtggaggcgtgggtgcagacgccgtgaacctgaccgcctcgctagctgccggggcggccacgggggcagttgagactgggtggctgcaactgctggaccaagctggcaacctctcctcctccccttccgcgctgggactgcctgtggcttcccccgcgccctcccagccctgggccaacctcaccaaccagttcgtgcagccgtcctggcgcatcgcgctctggtccctggcgtatggtgtggtggtggcagtggcagttttgggaaatctcatcgtcatctggatcatcctggcccacaagcgcatgaggactgtcaccaactacttccttgtgaacctggctttctccgacgcctccatggccgccttcaacacgttggtcaatttcatctacgcgcttcatagcgagtggtactttggcgccaactactgccgcttccagaacttctttcctatcacagctgtgttcgccagcatctactccatgacggccattgcggtggacaggtatatggctattattgatcccttgaaacccagactgtctgctacagcaaccaagattgtcattggaagtatttggattctagcatttctacttgccttccctcagtgtctttattccaaaaccaaagtcatgccaggccgtactctctgctttgtgcaatggccagaaggtcccaaacaacatttcacttaccatattatcgtcattatactggtgtactgtttcccattgctcatcatgggtattacatacaccattgttggaattactctctggggaggagaaatcccaggagatacctgtgacaagtatcatgagcagctaaaggccaaaagaaaggttgtcaaaatgatgattattgttgtcatgacatttgctatctgctggctgccctatcatatttacttcattctcactgcaatctatcaacaactaaatagatggaaatacatccagcaggtctacctggctagcttttggctggcaatgagctcaaccatgtacaatcccatcatctactgctgtctgaataaaagatttcgagctggcttcaagagagcatttcgctggtgtcctttcatcaaagtttccagctatgatgagctagagctcaagaccaccaggtttcatccaaaccggcaaagcagtatgtacaccgtgaccagaatggagtccatgacagtcgtgtttgaccccaacgatgcagacaccaccaggtccagtcggaagaaaagagcaacgccaagagacccaagtttcaatggctgctctcgcaggaattccaaatctgcctccgccacttcaagtttcataagctcaccctatacctctgtggatgaatattcttaattccatttcctgaggtaaaagattagtgtgagaccatcatggtgccagtctaggaccccattctcctatttaccagtcctgtcctatataccctctagaaacagaaagcaatttttaggcagctatggtcaaattgagaaaggtagtgtataaatgtgacaaagacactaataacatgttagcctccacccaaaataaaatgggctttaaatttattctttgaaaactctaaattattatatgcaatgaacaaaaatatgtcaggaaaatacttgtaaactcgccagtctatctcatttacaaattgcaatatacatttgtgacattaaaatgatatatagtttttccaagagattaaagaatctttaaaacataatattgtaagtgaagggaaacaaaatctgtataaaatctgtataaaataggcttttttgcctagagatataaaatgggaaaaaaagttaaatgattcattttcccactagagtaatggaaaattaacctcaagaagtaggaactgaaaatctttgctcaagaaaactcattttgtagaatgtaaagatttaaagatttaaagatttcttccatggcatttaactgaaaaggaaatctagttaaatcattaggcaaatgtatatttcattctcttgattttttttctgagaaagtgaaattttaaaaaattatatactttttgaccattacttatttttgaataccaagctaaaaagtagtcagttaagaccctaaaaatatgaagaaaattcctatcattttttatttttcacagattttttaaatagctagattataaaacagtaaaggtacattccaataaatagaggaagaatactatttatgttctcttcctctcccctcactgaaaatagaataaggactaggagaaaatatcttcaaaggcaactccttagggaaaaaaagtcacaagtgtgacaaaagactatatggttgaaaaataccaatatatgttacatatgagtaaactaggcaaggtgtagacaagtgaattacctcttagaaaacgaatctgcacaatagtttggatacatgtaaactaataacagctgagcaagagggtgagtttaacacacatccttccacagaaagaccttttctttcatttgcttagattattcagaagtcttaccagaaagaaatgagataatagtcctaagaaagcatcacatttactacaagaagatatatactagcacatttctgagactcataacataacaagaaatacttttaagtgtaaaaagtaacatccaggcctcagtgcttacagatcatctttccttgaattagggatactgttaatcctgctcaagaaagcagaaactttttgagaatgtgaatgtgtagtacaaacttctcctttaaactcttcagtttgatttttaaagatatttgtctaaaataatactctctaacaaacactttactgttgtgcctccaccgatattaaaacaaaatatttttgaagaacagaataaaagcaaatattcaatggcaaatcatggtctatttctcaaatctcttccctattttgaagccaaaaccagaaatatccaattgttacaaaaagttcggagtctaaacaagctaaacatatgtgttccagctgaatttcttctgatgataccaataaacaaagagacacacacacacacacacacacatacaaatgtgcctacacattcaatcatttaatgaatgcaacaacttcaaagaattaaaatcaaatactgaaatgataagtggtcattacagcattgccatatgctcaataaagtctgtgaagcttgtgtgcatgttttaaataagcaaatttaatatatagtatctaattgtttgaatataatgtttttgaatgttcattcttaaaacatatatttatcatacaatgttaaagtgtcaagaaaaagcctaatatgtaaaaagttattattttcttaaatttatgaatgatatggtactagcattaattaatgttttagacatatggaaccatattcagctgtaaaatatgaatatgaagtttagccctcaaatttaatgtcatcagccactaccaaagtatcatacatttgaaaaatataactcctggccctcacatattagagaaattcagtagaattttctaagacatttatttctaaggaaaaatactggcctcgtcagttggattgttggtttgctttggcttctgtgaacatacatattgttgtgttgcttaccgagcacctcccttctagtgtgacagaaatacccagacagtattttttcaatgctttccagaaaaaaactggcatcattcactcactactcatggcccttaaactgagacctataggcagaattttttaagttcaaaaatttaaacgacaataataaaacaagagtgaaatataaaagagaagatttttcactcttttgtctgcattttgacaataagaattacagaataatgcacaaaatcaaattcagtgagattcatttttaaataaagtcatcccagtgttttcatatttgctaagcttggaaagaatctgccttcaaaatttactctaccctctgtttctaaagttcagtatgaatctttccattgtttgaaggcaaacactggctcagactactaggcagatggttaaaacagcccaggtttttttacttagatcagtatcagaaaaattcaaaatatttttaaacaaatatgaaagaatcaaaaaggcttacatcattgtaagtattctcttttaaacaaaatacattaaatcaaaaataaacattgcttactattttgcatctggacaaagtacaagatattgaaattacctgtatgggaaaatattaaagcggacataattgttacagaattcactctcacacttttttattttttaccaagtacagcacactgttgcattattccatcttctaacttcatgatggtgacatttctgacccagcagctgaattcatgtccttttccaaatcctgccaatgtcttagaaacagtgaactgagcaatttcagagtgaaccccgcccttacaaagcacataaagaataccaagaagcttggtatcaagcctatgaaatacaaaataaatgtgaaaaataaatgctggccagctcaacatttgaatttagtttttgcaaatgcaaaatttcctctaaaaatttatgattagtacctggtaaactatttcatcaaatagaaaagcaggagacttacaaacatttctcacacttctaacagtaacaatttcctacttatcattgataatatgtcaaaagctaaggaaatccagaatgacatggaccatgtagaacaataaggttggaataatttcccttagggccaagcaggaatagagaataaagttcagaagggctgtacaaggtcattagttttgtgttttcatacatatatatatatatatgaaaaatctgtttatataagaagtaaatgtatataaagtttgtagtgaataaagtattttcaagttgtggtaattatattgaatatgtttaatgtatttacaccctttgcatatgtgataatgtgacagatttaatttctattttttctttaaaaacattaaaactaatattaaaagtaaaa

SEQ ID NO: 34392 - protein, 534 aa, Artificial Sequence
  derived and/or modified sequence
MMEALGFLKLEVNGPMVTVALSVALLALLKWYSTSAFSRLEKLGLRHPKPSPFIGNLTFFRQGFWESQMELRKLYGPLCGYYLGRRMFIVISEPDMIKQVLVENFSNFTNRMASGLEFKSVADSVLFLRDKRWEEVRGALMSAFSPEKLNEMVPLISQACELLLAHLKRYAESGDAFDIQRCYCNYTTDVVASVAFGTPVDSWQAPEDPFVKHCKRFFEFCIPRPILVLLLSFPSIMVPLARILPNKNRDELNGFFNKLIRNVIALRDQQAAEERRRDFLQMVLDARHSASPMGVQDFDIVRDVFSSTGCKPNPSRQHQPSPMARPLTVDEIVGQAFIFLIAGYEIITNTLSFATYLLATNPDCQEKLLREVDVFKEKHMAPEFCSLEEGLPYLDMVIAETLRMYPPAFRFTREAAQDCEVLGQRIPAGAVLEMAVGALHHDPEHWPSPETFNPERFTAEARQQHRPFTYLPFGAGPRSCLGVRLGLLEVKLTLLHVLHKFRFQACPETQVPLQLESKSALGPKNGVYIKIVSR

SEQ ID NO: 34393 - protein, 533 aa, Artificial Sequence [sequence omitted]

SEQ ID NO: 34394 - protein, 466 aa, Artificial Sequence
  derived and/or modified sequence
MELRKLYGPLCGYYLGRRMFIVISEPDMIKQVLVENFSNFTNRMASGLEFKSVADSVLFLRDKRWEEVRGALMSAFSPEKLNEMVPLISQACELLLAHLKRYAESGDAFDIQRCYCNYTTDVVASVAFGTPVDSWQAPEDPFVKHCKRFFEFCIPRPILVLLLSFPSIMVPLARILPNKNRDELNGFFNKLIRNVIALRDQQAAEERRRDFLQMVLDARHSASPMGVQDFDIVRDVFSSTGCKPNPSRQHQPSPMARPLTVDEIVGQAFIFLIAGYEIITNTLSFATYLLATNPDCQEKLLREVDVFKEKHMAPEFCSLEEGLPYLDMVIAETLRMYPPAFRFTREAAQDCEVLGQRIPAGAVLEMAVGALHHDPEHWPSPETFNPERFTAEARQQHRPFTYLPFGAGPRSCLGVRLGLLEVKLTLLHVLHKFRFQACPETQVPLQLESKSALGPKNGVYIKIVSR

SEQ ID NO: 34395 - DNA, 1605 bp, Artificial Sequence
  derived and/or modified sequence
atgatggaggccctgggcttcctgaagctggaggtgaacggccccatggtgaccgtggccctgagcgtggccctgctggccctgctgaagtggtacagcaccagcgccttcagcagactggagaagctgggcctgagacaccccaagcccagccccttcatcggcaacctgaccttcttcagacagggcttctgggagagccagatggagctgagaaagctgtacggccccctgtgcggctactacctgggcagaagaatgttcatcgtgatcagcgagcccgacatgatcaagcaggtgctggtggagaacttcagcaacttcaccaacagaatggccagcggcctggagttcaagagcgtggccgacagcgtgctgttcctgagagacaagagatgggaggaggtgagaggcgccctgatgagcgccttcagccccgagaagctgaacgagatggtgcccctgatcagccaggcctgcgagctgctgctggcccacctgaagagatacgccgagagcggcgacgccttcgacatccagagatgctactgcaactacaccaccgacgtggtggccagcgtggccttcggcacccccgtggacagctggcaggcccccgaggaccccttcgtgaagcactgcaagagattcttcgagttctgcatccccagacccatcctggtgctgctgctgagcttccccagcatcatggtgcccctggccagaatcctgcccaacaagaacagagacgagctgaacggcttcttcaacaagctgatcagaaacgtgatcgccctgagagaccagcaggccgccgaggagagaagaagagacttcctgcagatggtgctggacgccagacacagcgccagccccatgggcgtgcaggacttcgacatcgtgagagacgtgttcagcagcaccggctgcaagcccaaccccagcagacagcaccagcccagccccatggccagacccctgaccgtggacgagatcgtgggccaggccttcatcttcctgatcgccggctacgagatcatcaccaacaccctgagcttcgccacctacctgctggccaccaaccccgactgccaggagaagctgctgagagaggtggacgtgttcaaggagaagcacatggcccccgagttctgcagcctggaggagggcctgccctacctggacatggtgatcgccgagaccctgagaatgtacccccccgccttcagattcaccagagaggccgcccaggactgcgaggtgctgggccagagaatccccgccggcgccgtgctggagatggccgtgggcgccctgcaccacgaccccgagcactggcccagccccgagaccttcaaccccgagagattcaccgccgaggccagacagcagcacagacccttcacctacctgcccttcggcgccggccccagaagctgcctgggcgtgagactgggcctgctggaggtgaagctgaccctgctgcacgtgctgcacaagttcagattccaggcctgccccgagacccaggtgcccctgcagctggagagcaagagcgccctgggccccaagaacggcgtgtacatcaagatcgtgagcagatag

SEQ ID NO: 34396 - DNA, 1602 bp, Artificial Sequence
  derived and/or modified sequence
atggaggccctgggcttcctgaagctggaggtgaacggccccatggtgaccgtggccctgagcgtggccctgctggccctgctgaagtggtacagcaccagcgccttcagcagactggagaagctgggcctgagacaccccaagcccagccccttcatcggcaacctgaccttcttcagacagggcttctgggagagccagatggagctgagaaagctgtacggccccctgtgcggctactacctgggcagaagaatgttcatcgtgatcagcgagcccgacatgatcaagcaggtgctggtggagaacttcagcaacttcaccaacagaatggccagcggcctggagttcaagagcgtggccgacagcgtgctgttcctgagagacaagagatgggaggaggtgagaggcgccctgatgagcgccttcagccccgagaagctgaacgagatggtgcccctgatcagccaggcctgcgagctgctgctggcccacctgaagagatacgccgagagcggcgacgccttcgacatccagagatgctactgcaactacaccaccgacgtggtggccagcgtggccttcggcacccccgtggacagctggcaggcccccgaggaccccttcgtgaagcactgcaagagattcttcgagttctgcatccccagacccatcctggtgctgctgctgagcttccccagcatcatggtgcccctggccagaatcctgcccaacaagaacagagacgagctgaacggcttcttcaacaagctgatcagaaacgtgatcgccctgagagaccagcaggccgccgaggagagaagaagagacttcctgcagatggtgctggacgccagacacagcgccagccccatgggcgtgcaggacttcgacatcgtgagagacgtgttcagcagcaccggctgcaagcccaaccccagcagacagcaccagcccagccccatggccagacccctgaccgtggacgagatcgtgggccaggccttcatcttcctgatcgccggctacgagatcatcaccaacaccctgagcttcgccacctacctgctggccaccaaccccgactgccaggagaagctgctgagagaggtggacgtgttcaaggagaagcacatggcccccgagttctgcagcctggaggagggcctgccctacctggacatggtgatcgccgagaccctgagaatgtacccccccgccttcagattcaccagagaggccgcccaggactgcgaggtgctgggccagagaatccccgccggcgccgtgctggagatggccgtgggcgccctgcaccacgaccccgagcactggcccagccccgagaccttcaaccccgagagattcaccgccgaggccagacagcagcacagacccttcacctacctgcccttcggcgccggccccagaagctgcctgggcgtgagactgggcctgctggaggtgaagctgaccctgctgcacgtgctgcacaagttcagattccaggcctgccccgagacccaggtgcccctgcagctggagagcaagagcgccctgggccccaagaacggcgtgtacatcaagatcgtgagcagatag

SEQ ID NO: 34397 - DNA, 1605 bp, Artificial Sequence
  derived and/or modified sequence
atgatggaagccctcggattcctgaagttggaagtcaacggccccatggttaccgttgccctaagtgttgccctgctcgcgttgctgaagtggtacagcacttccgcattctcccggctggagaaactagggcttcggcaccccaagccgagccctttcattgggaatttaacttttttccgtcagggattctgggagtctcagatggagctgagaaaattgtacggcccgctgtgcgggtattatttgggacgtcgaatgtttatcgtgatctctgaaccagacatgatcaagcaggtcctcgtcgaaaacttctcaaatttcaccaaccgcatggcaagcggcctcgaattcaagagcgtggccgatagcgtcctgttcctcagagacaaacgctgggaagaggtgcgaggagcactcatgtcagccttttcacctgagaaactcaacgagatggttccgttgatctcgcaggcctgcgagttacttctggcccatcttaagcgctacgccgagagcggcgatgcctttgacattcagcgctgttattgtaattacactactgacgtagtggcctcagtggcgttcgggaccccagtggacagctggcaggctcccgaggatccgtttgtcaagcactgcaagcgcttctttgagttttgcataccaaggcctatcttggtgcttctgctgtccttcccgtcaattatggttcctctcgcacggatcctacccaataagaatcgcgacgagctgaatggctttttcaataagctgatccgtaatgtgattgctctgagagatcaacaggcggcagaggaaagacgcagagactttcttcagatggtgctcgacgcgaggcactcagcctctcctatgggggtgcaagattttgacatcgtcagggatgtattttccagcaccggctgtaaacctaatccatcaaggcagcaccaaccctctcccatggcccgaccccttaccgtagacgagatcgtcgggcaggcatttatctttttgattgctggctatgagatcatcaccaataccctgagctttgccacttatcttcttgcaaccaatccagactgccaagaaaagctactgcgagaagtggacgtctttaaagagaagcacatggccccggaattttgcagtttggaggagggactaccttacctcgacatggtaattgcggagacactgcggatgtaccccccggcctttaggttcacccgggaggccgcccaggattgcgaagtcctgggacaacggattcccgcaggagccgtcctggaaatggccgtcggagctttacaccatgatcctgaacactggccatcgccggagacttttaaccccgagcgatttaccgcagaagcccggcaacaacataggccatttacctatctgccgtttggagccggacctcggtcctgtctgggagtaaggttaggtctgttggaagtcaaactgacgcttctgcatgtgctccacaaatttaggttccaggcgtgccctgaaacccaggttcccttgcaactggagtccaaatccgccttgggacccaagaatggagtgtacattaagatcgtgagccggtag

SEQ ID NO: 34398 - DNA, 1602 bp, Artificial Sequence
  derived and/or modified sequence
atggaagccttgggctttctgaagctggaggtaaacggacccatggtgacagtggccctgtcggtggcactcctagccctcctcaaatggtattcgacgtcagcttttagccgactcgagaaactgggactgcgacatcccaagccttctccatttatagggaatctgactttctttcggcagggcttctgggaatcccagatggaactgaggaagctatatggtcccctgtgtggatattacctggggagaaggatgttcatcgtaatctcggagcctgacatgatcaaacaggtgctggtggaaaacttctcgaactttactaaccgtatggcgtccgggctcgagtttaaaagcgtggctgactcagtcctgttcctacgggacaagcggtgggaggaagttcggggagctttgatgtccgcgttttctcctgaaaagcttaacgagatggtgccactcatcagtcaggcatgcgagctgctcctagctcacttaaaacgatacgcagagtccggggatgctttcgatattcaaaggtgttattgcaattacaccaccgatgtggttgcttctgtagcttttggcaccccagtcgattcctggcaggcacccgaagatccttttgttaagcactgcaaacggttcttcgagttttgcattccacgtcccatcctggtcctgttactttcatttccgagtatcatggtgcccctggccagaatactgccaaataagaatcgagatgaactgaatggctttttcaacaaactaatcaggaatgtcattgctctgcgggaccagcaggcagctgaagaaagacgcagagacttcctgcagatggttctcgacgcaaggcatagcgcttcgcccatgggtgtgcaggatttcgatatcgttcgcgacgtcttcagctctactggatgcaagcctaatccctcaaggcagcatcagccctcccccatggcgcgtcctctgaccgtcgacgagatcgtgggacaggcctttatttttttgatagccggctatgagatcatcacaaacaccttgtccttcgccacctacctgctggcaaccaacccagactgtcaagaaaaactgttgcgagaggtagacgtgttcaaggagaagcacatggcgccagaattttgtagcctggaagagggtctcccgtaccttgacatggtgatcgccgagacgctccgcatgtatcctccggccttcaggtttacacgcgaggccgctcaagactgcgaggtactggggcagcgcatcccggctggagccgttctggagatggctgttggcgccctgcaccacgatcctgaacactggccttcaccggaaacctttaacccggaacggttcactgctgaagcccggcagcagcatagaccttttacctacctgccgtttggcgctggccctcggagctgcctgggggtgagattgggtctgctcgaggtgaaattaactctgctgcacgtgttgcataagttccgcttccaggcttgtccagagacacaggtgccactgcaactggagagcaagtcggctctggggccgaagaatggggtgtacatcaaaattgtctctcggtag

SEQ ID NO: 34399 - DNA, 1605 bp, Artificial Sequence
  derived and/or modified sequence
atgatggaggccctggggttccttaaacttgaagtgaacggacccatggtcacagttgcactgtcagtggctttgctcgcactgcttaaatggtactccacatccgcgttcagccggctcgagaagctcggactgcgccaccccaagccttcgcccttcatcggcaaccttacattcttccgccaggggttctgggaatcccagatggagctgaggaagttgtatggtcccttatgtggttattatttgggccgaagaatgttcatcgtcatcagtgaacccgatatgatcaagcaggttctagtcgaaaatttctcgaattttactaataggatggcgtccggcctagaattcaagtctgtggccgatagtgtgttgtttctgagagataagcgctgggaagaagtgcggggagcccttatgtcagctttctctcctgagaaactgaatgagatggtgccgctgatctcacaagcgtgcgagcttctgctggctcacctcaagcgctacgccgaaagcggagatgcatttgacatccagcgttgttattgcaattacacgactgatgtcgtggcctccgttgctttcgggacacctgttgattcatggcaggcacccgaagatcctttcgttaaacattgcaaaaggttcttcgagttctgtattccaagacctatcctcgtgctactcttatcattcccgtcaattatggtgcctctggctagaattctcccaaataaaaatcgggacgagctgaacgggttttttaataaactcattagaaatgtgattgccctgagagatcagcaggcggcagaagagcggcgaagggatttcctgcagatggtgctcgatgctcggcattccgcctcgccaatgggggtacaagacttcgacattgtcagagatgttttcagctccaccgggtgtaaacctaaccctagcagacagcaccagcccagcccaatggctcgcccactgactgtggacgaaatcgtcggccaggcatttatatttctaatcgccgggtacgaaatcatcacaaacacactcagctttgccacttatctcctggcaacaaaccccgattgccaggagaagctcctgcgagaggtggacgtgtttaaggagaaacatatggcgcctgagttctgttccctcgaggaaggattgccgtatctcgacatggtcattgctgaaaccctcagaatgtacccacccgcattcaggtttactagggaagccgcccaggattgtgaagtactgggacagagaatccccgcaggcgccgtgttggaaatggctgtgggagccctccaccatgacccagaacactggcccagcccagagacctttaatcccgaacgcttcaccgctgaggccaggcagcaacatagaccttttacttacctacctttcggtgccggaccacgtagctgtctgggggtgaggctcggtctgctggaggtgaagcttacgttgcttcatgttcttcacaaattcagatttcaggcttgcccggagacccaggtgccactccagctggagtcgaagagcgcgctcggccccaaaaatggcgtctacatcaaaatagtgtcaaggtag

SEQ ID NO: 34400 - DNA, 1602 bp, Artificial Sequence
  derived and/or modified sequence
atggaggccctgggctttctgaaactggaagtgaacggacctatggtcaccgtggccctcagtgtggcactcctggccctgctgaaatggtattccacaagcgcattttctcggctggaaaaactcggcctacggcatccgaagccttctccctttattggcaaccttaccttcttccggcagggattttgggagtcacagatggaactccggaagctgtacggccctctgtgtgggtactacctggggcgccgtatgtttatagtcatctcggagcctgacatgataaagcaggttctggtcgaaaacttcagcaatttcactaataggatggcgtctgggctggaatttaagtccgttgccgacagcgtcctgtttctaagggataagcggtgggaggaagtgaggggtgcactaatgtctgcctttagtcctgagaagctgaatgagatggtgccactgatttcacaggcatgtgagttactcctggctcacctcaagagatatgcggaaagcggtgatgcctttgacatccagaggtgttattgcaattacaccactgacgtagtggccagtgtggcatttggaaccccggtggatagttggcaggctcccgaggacccctttgtgaagcattgtaaacgcttttttgagttttgtatccctagaccaattctggtgctgctcctgtcctttcctagcatcatggtcccccttgctcggatcctccctaacaagaatcgcgacgagctcaacggatttttcaacaagcttataagaaacgtcattgcactgcgggatcagcaagcggctgaagagagacggcgtgactttctgcagatggtactggacgcccgtcatagtgctagccctatgggagttcaggatttcgatattgtgcgcgatgttttctccagcactggttgcaaacctaatccatcacgccagcaccagccttccccaatggccagaccccttacggtggacgagatcgtggggcaggcatttattttcttgatagcagggtacgaaataataacaaacactctgtcatttgccacgtacctgctcgcaacaaatcctgactgccaagagaagctccttcgtgaggtagatgttttcaaggagaagcacatggctcccgagttctgttccctagaagaaggtctgccttatctggacatggttatagctgaaaccttgagaatgtaccctccagccttccggttcacaagagaggcagcacaggactgtgaggtacttggtcagaggattccggccggggccgtgcttgagatggcggtgggcgccttgcaccatgatccagaacattggccctctccggaaaccttcaacccagagcggttcacagccgaagcgaggcagcagcatcggccctttacgtacctgccttttggggcaggacctagaagctgtctgggtgtgagactgggcctcctggaagtcaagcttacattgcttcacgtgctccacaaattccgatttcaggcttgcccagaaactcaggtgcctcttcaacttgaaagtaagtccgcccttggacctaagaatggagtctatataaaaatcgtgtctcgatag

SEQ ID NO: 34401 - DNA, 1605 bp, Artificial Sequence
  derived and/or modified sequence
atgatggaggccctgggcttcctgaagctggaggtgaatggccccatggtgacagtggccctgtctgtggccctgctggccctgctgaagtggtacagcaccagcgccttcagccggctggagaagctgggcctgcggcaccccaagcccagccccttcatcggcaacctgaccttcttccggcagggcttctgggagagccagatggagctgaggaagctgtatggccccctgtgtggctactacctgggccgcaggatgtttattgtcatcagcgagccagacatgatcaagcaggtgctggtggagaacttcagcaacttcaccaacaggatggccagcggcctggagttcaagtctgtggccgacagcgtgctcttcctgcgggacaagcgctgggaggaggtgcggggggccctgatgtctgccttcagccctgagaagctgaatgagatggtgcccctcatcagccaggcctgtgagctgctgctggcccacctgaagagatatgcagagagcggagatgcctttgacatccagcgctgctactgcaactacaccacagatgtggtggcctctgtggccttcggcacccctgtggacagctggcaggcccctgaggacccctttgtgaagcactgcaagcgcttctttgagttctgcatcccccggcccatcctggtgctgctgctgtccttccccagcatcatggtgcccctggcccgcatcctgcccaacaagaacagagatgagctgaatggcttcttcaacaagctgatcagaaatgtcatcgccctgcgggaccagcaggccgctgaggagcggcggcgggacttcctgcagatggtgctggatgcccggcacagcgccagccccatgggcgtgcaggactttgacatcgtgagagatgtgttcagcagcacaggctgcaagcccaaccccagccggcagcaccagcccagccccatggcccggcccctgactgtggatgagatcgtgggccaggccttcatcttcctgattgctggctatgagatcatcaccaacaccctgagctttgccacctacctgctggccaccaacccagactgccaggagaagctgctgcgggaggtggatgtgttcaaggagaagcacatggcccctgagttctgcagcctggaggagggcctgccctacctggacatggtgattgctgagaccctgaggatgtaccccccagccttccgcttcacccgggaggccgcccaggactgtgaggtgctgggccagaggatcccagctggagctgtgctggagatggctgtgggcgccctgcaccacgaccctgagcactggcccagccctgagaccttcaaccctgagcgcttcaccgctgaggcccggcagcagcaccggcccttcacctacctgccctttggagctggccccaggagctgcctgggcgtgcggctgggcctgctggaggtgaagctgaccctgctgcacgtgctgcacaagttccgcttccaggcctgcccagagacccaggtgcccctgcagctggagagcaagagcgccctgggccccaagaatggagtgtacatcaagatcgtgtccaggtag

SEQ ID NO: 34402 - DNA, 1602 bp, Artificial Sequence
  derived and/or modified sequence
atggaggccctgggcttcctgaagctggaggtgaatggccccatggtgacagtggccctgtctgtggccctgctggccctgctgaagtggtacagcaccagcgccttcagccggctggagaagctgggcctgcggcaccccaagcccagccccttcatcggcaacctgaccttcttccggcagggcttctgggagagccagatggagctgaggaagctgtatggccccctgtgtggctactacctgggccgcaggatgttcatcgtcatcagcgagccagacatgatcaagcaggtgctggtggagaacttcagcaacttcaccaacaggatggccagcggcctggagttcaagtctgtggccgacagcgtgctcttcctgcgggacaagcgctgggaggaggtgcggggggccctgatgtctgccttcagccctgagaagctgaatgagatggtgcccctcatcagccaggcctgtgagctgctgctggcccacctgaagagatatgcagagagcggagatgcctttgacatccagcgctgctactgcaactacaccacagatgtggtggcctctgtggccttcggcacccctgtggacagctggcaggcccctgaggacccctttgtgaagcactgcaagcgcttctttgagttctgcatcccccggcccatcctggtgctgctgctgtccttccccagcatcatggtgcccctggcccgcatcctgcccaacaagaacagagatgagctgaatggcttcttcaacaagctgatcagaaatgtgattgccctgcgggaccagcaggccgctgaggagaggagaagagacttcctgcagatggtgctggatgcccggcacagcgccagccccatgggcgtgcaggactttgatattgtgagagatgtgttcagcagcacaggctgcaagcccaaccccagccggcagcaccagcccagccccatggcccggcccctgactgtggatgaaattgtgggccaggccttcatcttcctgattgctggctatgagatcatcaccaacaccctgagctttgccacctacctgctggccaccaacccagactgccaggagaagctgctgcgggaggtggatgtgttcaaggagaagcacatggcccctgagttctgcagcctggaggagggcctgccctacctggacatggtgattgctgagaccctgaggatgtaccccccagccttccgcttcacccgggaggccgcccaggactgtgaggtgctgggccagaggatcccagctggagctgtgctggagatggctgtgggcgccctgcaccacgaccctgagcactggcccagccctgagaccttcaaccctgagcgcttcaccgctgaggcccggcagcagcaccggcccttcacctacctgccctttggagctggccccaggagctgcctgggcgtgcggctgggcctgctggaggtgaagctgaccctgctgcacgtgctgcacaagttccgcttccaggcctgcccagagacccaggtgcccctgcagctggagagcaagagcgccctgggccccaagaatggagtgtacatcaagatcgtgtccaggtag

SEQ ID NO: 34403 - DNA, 1605 bp, Artificial Sequence
  derived and/or modified sequence
atgatggaggccctgggcttcctgaagctggaggtgaacggccccatggtgacagttgcactgtctgtcgcacttcttgctttactgaagtggtatagcacttctgccttcagccggctcgaaaagttagggctccgccaccccaagccctccccctttattggcaacttaaccttttttcgccagggattctgggaaagccaaatggagctcaggaaactctacggcccgctgtgcggatactacctgggaagacggatgttcatcgtgatatcagaaccggatatgatcaagcaggtgctggtcgaaaatttcagtaactttacaaaccgaatggcaagtggacttgagttcaaatctgttgctgactccgtcctgttcctgcgcgacaagaggtgggaggaggtcaggggggcactcatgagtgctttctccccagagaaactgaacgaaatggtccccctgatcagtcaggcatgcgagctgttactagctcatcttaagagatatgcggagtctggcgacgctttcgacatccagcgttgctactgcaactatactacagatgtcgtggcctccgtcgccttcggaacccccgtggatagctggcaggcacctgaagatccatttgtaaagcactgtaagagatttttcgagttttgcatcccgcggcccatacttgtcctgctgctcagctttccaagtataatggttcccttggcacgcattctgcccaataagaatagagatgagctgaatggctttttcaataaactgattagaaacgttattgccctgcgcgatcagcaggccgcagaggagaggaggagagattttctccagatggtgttagatgctagacattccgcgtctcctatgggcgtccaggactttgacattgtcagagatgtcttttccagtacgggttgcaagccaaatccttctcgacagcaccagccgagccctatggcccgcccgctgactgtagacgagatagtagggcaggcctttatctttcttatagcaggctatgaaatcatcaccaacactctgagttttgccacatacctgctggctaccaacccagattgccaagagaaactgctgcgggaagtggatgtcttcaaggaaaaacatatggccccagaattttgctccctggaggaaggcctaccttatttggatatggtcattgccgagaccctaagaatgtatcctcctgcgtttcggtttacaagggaagctgcgcaggattgtgaggttctgggtcagagaattcctgctggggccgtgctggaaatggctgtcggtgcactgcaccacgatcccgaacattggccctccccagagacttttaatccagagagattcactgccgaggctaggcagcagcacagacctttcacttacctgcccttcggcgccggtccaagatcgtgtctcggagtgcggctggggctgctggaggtgaaactaaccctcctacacgtgcttcacaaattcagatttcaggcctgccctgagacccaggtgccacttcagctggagtctaagtcagcgctcgggcctaagaatggagtctatatcaagatcgtcagtcggtag

SEQ ID NO: 34404 - DNA, 1602 bp, Artificial Sequence
  derived and/or modified sequence
atggaggccctgggcttcctgaagctggaggtgaacggccccatggtcacagtcgctctatccgtcgcactgcttgctctgctcaagtggtatagtactagcgctttctccaggctcgagaagctcggcttacgccaccctaaaccttctcccttcattggtaatcttacgttttttcgccagggattttgggagagccagatggaactccgcaagctgtatggacccctgtgcggatactatcttggtcgacggatgttcatagtaatctctgagcccgacatgataaagcaggttttagtcgaaaattttagcaatttcactaacaggatggccagcggtctagagtttaagagtgtggccgattcagtgttatttttgagagataagcgatgggaggaggtgcgaggcgcgctcatgtcagctttttcccccgagaagttgaatgagatggtccctctgatcagccaggcctgtgaactgcttctggctcatctcaagaggtatgccgaatctggtgatgcattcgatatacagcggtgctattgtaattataccactgacgttgtggcgtccgtggcctttggaacgcccgtggacagctggcaggctccagaggaccccttcgtgaagcattgcaagcggttcttcgagttttgcatcccaagacctatcctcgtgttgctgcttagtttcccatctattatggtgcccctggcccgaattctgcctaataagaaccgcgacgagttgaacggatttttcaacaagctgatccgcaatgtaatagccctacgtgatcagcaggccgccgaggagaggcgtagagacttcctgcagatggtcttagatgcccggcatagtgctagtcccatgggggtgcaggacttcgatatcgtgcgcgatgttttctccagcacaggttgcaaaccaaatccatctagacagcaccagcccagtccaatggcccgacctctgaccgtggatgagattgttggacaggcctttatatttctcatcgccggctatgaaatcattactaacaccttatctttcgccacgtatctgctagccactaatcccgattgtcaggagaaactgttgcgcgaggttgacgtgttcaaggaaaagcacatggcacctgagttctgcagtctggaggaaggactcccttatttagatatggtgatcgccgagaccctgcgtatgtatccccctgccttccgatttaccagagaggccgctcaggactgtgaggtcctgggacaacggatccccgcaggagcagttttagagatggccgtcggggcccttcaccatgacccagagcactggccaagccctgaaacctttaaccctgagcgtttcacagccgaggcccggcagcagcatcgtcctttcacttacctaccattcggggcaggaccacggagttgtctcggcgttcggcttggcctcttggaggtgaagttaactctactacacgttctccacaaattccggttccaggcatgtcctgaaacgcaggtccccctgcagctggagagcaagagcgcgctgggccctaaaaatggggtttatataaaaatcgttagcagatag

SEQ ID NO: 34405 - DNA, 1605 bp, Artificial Sequence
  derived and/or modified sequence
atgatggaggccctgggcttcctgaagctggaggtgaacggccccatggtgacagttgctctcagcgtcgccctattagccctgcttaagtggtattcaaccagcgccttttcacggcttgagaagctgggtcttagacatcctaagccaagtccctttattggcaacctgacgtttttccgacagggcttttgggaatcccagatggagttgaggaagctgtatggacccctttgtgggtattacctagggcggagaatgttcattgtgatttctgagcccgacatgataaaacaggtgctcgtggaaaactttagcaattttactaaccggatggccagcgggctggagtttaaaagtgtggccgactccgtcttattcctgcgggataaacgctgggaggaggtgagaggtgccttgatgagcgccttttcccctgaaaaactgaacgagatggttccgctcatcagtcaagcatgcgagttactgctcgctcatctaaagcggtatgctgaatctggcgacgcgtttgacatccagcgttgctattgcaattacacaacggacgtggtggcatccgtcgcttttggtactccagtagactcatggcaggcccctgaagaccctttcgtcaagcattgcaagaggtttttcgaattctgtatcccaagacccatcctcgttctactgctcagtttccccagcatcatggtgccactagccagaatcctgccgaacaagaacagggatgaacttaatggtttttttaacaagctgatccgcaatgtcattgctctgagggaccaacaggcagccgaggagcgaagacgggatttcttgcagatggtcctggacgctcgccactccgcttccccaatgggcgttcaggatttcgatatcgtccgggacgtgttttcctctaccggctgcaaacccaatccatccaggcagcatcagccttcgccaatggctaggcctttgaccgtcgacgagatcgtgggacaggctttcatctttctcattgcaggttatgagattataactaataccttgtcctttgcaacataccttcttgccactaaccccgactgtcaggagaagctcctgcgcgaggtggacgttttcaaagagaagcacatggctccagagttctgtagcctggaagaaggtttgccctacttagatatggtgatagcagagacccttcggatgtatccgcctgctttccgtttcacccgggaagctgcacaggattgtgaggtgttaggacagcggatccccgcaggagcagtgctagagatggccgtgggagccctgcaccatgatccagagcactggccatctccggaaacattcaatccagagcgcttcacggctgaagcccggcagcagcacaggccatttacgtatttgccattcggtgctggaccgagatcatgcctgggcgtgaggctaggcttactcgaagtgaagctgaccttactgcatgtgctgcacaagttccggttccaggcgtgccctgagacacaggtgcccctacagctggagtcaaaatccgctcttgggcctaaaaacggtgtctatatcaagatcgtaagcaggtag

SEQ ID NO: 34406 - DNA, 1602 bp, Artificial Sequence
  derived and/or modified sequence
atggaggccctgggcttcctgaagctggaggtgaacggccccatggtgaccgttgcgctcagtgtagccctcctggcccttcttaagtggtattctactagcgccttcagtagattagagaaactcggtctgagacaccccaaaccaagccctttcattgggaatcttacatttttcaggcaagggttttgggagtctcagatggaactccggaaactgtacggccccctttgtggctattacctgggaagaaggatgttcatcgtcataagcgagcctgacatgattaaacaagtgctggttgaaaattttagcaacttcactaacagaatggccagcgggctggaattcaaatcagtggctgatagcgtcctattcttgcgggataagagatgggaagaagtgcggggagccttgatgagcgccttttcacctgaaaaactgaatgaaatggtgccccttatctctcaggcttgcgagcttctgctagcccatcttaaacgctacgctgagtcgggagatgcctttgacatccagcggtgctactgtaactatacaactgacgtagtggcaagtgtggccttcggaactccagtggatagctggcaggcgcccgaggatccttttgtgaaacactgtaagagatttttcgaattctgcatacctcgaccaatcctggttctgctcctgtcattcccttccatcatggtgcctctagcaaggatacttcctaataagaaccgtgacgaactgaatggattttttaataaattgatccggaacgtgatcgctctgagggaccaacaggctgctgaagaaagaagaagagactttctgcagatggtgcttgacgccaggcacagtgcttctcctatgggagtccaggactttgacatcgtgagagacgtattcagttccaccggatgcaaacctaatccaagtcgtcagcatcaaccatcgccgatggctcgtcccctgaccgttgacgaaatagttggtcaggccttcatcttcttaatcgccggatacgagatcatcaccaatactctaagttttgctacctatctgcttgccacaaacccagattgccaggagaaactactgcgcgaagtggatgtctttaaagagaagcatatggcgcccgaattttgcagtcttgaggagggtctgccatacttggacatggtcatcgccgaaacgctccggatgtatccaccggcattcagatttactcgggaggcggctcaggattgcgaagtcctcgggcagagaatccctgccggcgctgtgttggaaatggccgtgggggctcttcaccatgaccccgagcactggcctagtccagaaacgtttaaccccgagcgcttcaccgcagaagcccgtcagcagcatagaccatttacatacctgccatttggcgccgggccacgcagttgcctgggagtgcgtctcggcctcctggaagtgaagctcaccttgctacacgtgctccacaaattccgatttcaggcttgccccgagacccaggttccactgcaattggaaagcaagagcgctcttggtcctaagaacggggtgtacattaaaattgtatcccgatag

SEQ ID NO: 34407 - DNA, 1605 bp, Artificial Sequence
  derived and/or modified sequence
atgatggaggccctcggcttcctgaaactggaggtgaacggacctatggtgactgtggcactgtctgtcgccctattagccctgcttaagtggtattctacgtcagcctttagccggctcgaaaaattggggctgcggcacccgaaaccaagcccatttatcgggaaccttaccttcttcaggcaggggttctgggagagccaaatggagctgagaaaactctatggcccactgtgcgggtactacctgggtcggcgaatgtttattgtaatctcagaaccagacatgattaagcaagtactcgtggagaacttcagtaatttcactaaccggatggccagtggattagagttcaaatccgtggcagacagcgttctattcctgcgcgataaacgatgggaagaggtgcgtggagctctgatgtccgccttttctcccgagaaacttaacgagatggttccactgatctcacaggcttgcgaactgctcctggcccacctgaagagatacgcggaatcaggggatgcgtttgatattcagcgctgctactgtaattacactaccgatgttgtcgcctctgtcgcatttggaactcccgtcgacagttggcaggcaccagaagaccccttcgtgaagcactgcaagcgcttcttcgaattctgtataccgcgtcccatattggtactgctactgtccttcccctctattatggtacccctggcaagaattctgcccaataagaaccgtgacgagctcaatggctttttcaacaagctgattaggaacgttatagcactgcgcgaccagcaggccgctgaggagagaaggcgcgacttcctgcagatggtgctcgatgcacggcactctgcttcccctatgggcgtgcaggacttcgacattgtgagggatgtcttcagctctacagggtgcaaacctaacccaagccgacaacaccagcctagtcctatggccaggccactgaccgtggacgaaatcgtcgggcaggcttttatatttctcatcgcgggttacgaaattatcaccaacaccttgagctttgcaacctacttactcgcaacaaaccctgactgccaggaaaaactcctccgcgaagtggatgtcttcaaagaaaagcacatggccccagaattttgttctctggaagaaggtctcccctatctggatatggtcatcgccgaaacactgagaatgtatccgcctgcttttcgctttactcgcgaagcggctcaagactgcgaggtccttggccagcgaattcccgctggtgctgtcctggaaatggccgttggcgcactgcatcacgatcctgaacattggcccagcccggaaactttcaaccctgaaaggttcacggctgaagcaagacaacaacaccgcccttttacttacctcccctttggcgcaggccctcgctcctgcctcggcgtgaggttggggctgctggaagttaagctgaccctgctgcacgttctccacaagtttcggttccaggcgtgccctgaaacacaggtgccgttgcagctggagagcaaatcagcgttgggccctaagaatggggtgtacatcaaaatcgtttcaagatag

SEQ ID NO: 34408 - DNA, 1602 bp, Artificial Sequence
  derived and/or modified sequence
atggaggcccttgggtttttgaagcttgaggtaaacggccctatggtgacagtagctctgtccgttgctctcctggcgctccttaagtggtactcgacatccgcctttagcagattagaaaagcttggacttcgtcatcctaaaccatcccccttcatcggcaatttaacatttttccgccaggggttctgggagtcgcagatggaattgagaaagctttacggaccattgtgcggctactacctaggccgtagaatgtttatcgtgattagcgagcctgacatgattaaacaggtactggtcgagaacttctctaatttcaccaacaggatggccagcgggctggagtttaagtcagtggcagacagcgtgttgttcctcagagataagaggtgggaggaagtcagaggggctctgatgtcagcgttcagccccgaaaaactcaacgagatggtccctttgatctctcaggcgtgcgagctgcttctggcccacttaaaaagatacgcagagtcaggcgatgcctttgatattcaacggtgctattgtaactacacaacggacgtagtggccagcgtcgcctttggtaccccagtcgacagttggcaagcccctgaggaccctttcgtgaagcactgtaagaggttctttgagttctgtatccccaggcctattttagtactcttactcagctttccctcaatcatggttcccttagcacgaattctgcccaacaagaaccgtgatgagctgaacgggttctttaataaactgattcggaatgtcatcgccttacgggatcagcaggcagcagaggagcgacgaagagattttctccagatggtgcttgacgcgagacattcagcgtcacccatgggggtgcaagactttgacattgtgcgggatgtgttctcctccactggctgcaaacctaacccttccagacagcaccaaccaagcccaatggccagacccctgacagtcgatgagatcgttggccaagctttcattttcttaattgctggatacgagataatcactaatactctatcgttcgctacgtacctcctggccacgaacccggattgccaggagaaactgctacgtgaagtggacgttttcaaggaaaagcacatggctcccgaattctgttccctcgaagagggcctgccgtacttggatatggtgattgcggaaacactccggatgtatccccctgcatttagatttactagagaggccgcacaggactgcgaggtgctcgggcagaggatccctgcaggtgctgttctggagatggctgtaggcgctctacaccacgacccagagcactggcccagtcctgagactttcaacccagagaggtttaccgcagaggctaggcaacagcataggccgttcacttaccttccatttggcgcaggaccaaggtcttgcctgggggtgcggttgggactgttggaggtcaaacttacacttttacacgtgctccataaatttcggtttcaggcctgccccgagactcaggtgcccctgcagctggaatctaagagtgcactgggtcctaaaaacggggtgtacatcaagattgtgagcagatag

SEQ ID NO: 34409 - DNA, 1605 bp, Artificial Sequence
  derived and/or modified sequence
atgatggaagcactcggcttccttaaactcgaggtgaacggacccatggtgaccgtggcactgtccgtggcactgttagctctgttgaagtggtactccacctctgctttctcaaggctcgaaaagttggggttgcgacatcccaaaccatcaccatttatcggcaacctcacattttttcgccaggggttctgggagagtcagatggaactgcgaaaactgtacggtccactgtgcggctactatctcggccgtaggatgttcatcgttatcagcgaacccgatatgatcaagcaagtcctcgtggagaacttctccaacttcaccaataggatggcgagtggcttagaattcaagagcgtagcagatagcgtgctgttcctccgcgataaacgttgggaggaggtcagaggggctcttatgtccgccttctcgcccgaaaagttgaacgaaatggtgcccctcatctcacaggcctgtgaactgctgctcgcccatctgaagaggtacgccgaaagcggcgacgctttcgatatccagaggtgttactgtaattacaccacagatgtcgtggcgtccgtggcctttggaacacctgtcgattcctggcaagcccctgaggatccatttgtgaagcattgcaagagattcttcgagttctgcatacctagacctatcttagtgttgttgttatcctttcccagtatcatggtaccactcgcaagaatccttcccaacaaaaatagagatgagctgaatggtttctttaataagctgatcaggaatgtaattgcactgcgcgaccagcaggccgctgaggaacgaaggcgcgacttcctccagatggttctcgacgccaggcattccgcttctcccatgggtgtacaggacttcgacatcgtgcgagacgttttcagctcgactgggtgtaagcctaacccctccaggcagcaccagccctcacccatggcccgacccttaacggtagatgaaatagtggggcaggcatttatttttctgatcgctggctatgaaattataaccaacacactgtctttcgcaacatatctgctcgccaccaaccccgactgccaggagaaactgttgagggaggtagatgtttttaaggaaaagcacatggccccagaattctgttcactagaggagggcctgccgtatctggacatggtcatcgcggaaaccctccgcatgtaccccccagcattccggttcacccgcgaagcagcccaagattgcgaagttctaggccagagaatccccgcaggagctgtcctggaaatggctgtcggggcattgcaccatgatcctgaacattggccaagtcccgagaccttcaatcccgagcgcttcaccgccgaggcgcgtcagcagcacagaccattcacgtatttgcccttcggcgctggcccacgtagctgcctgggagtaaggctgggtcttctggaagtgaagctgacacttcttcacgttctgcataaattcagattccaggcatgccccgagacacaggtccccctacagttggagtccaaatccgctctggggcctaaaaacggtgtatacattaagatcgtctcccgatag

SEQ ID NO: 34410 - DNA, 1602 bp, Artificial Sequence
  derived and/or modified sequence
atggaagctctgggtttcttaaaactcgaggtgaatgggccaatggtgactgtcgctctgagtgttgctctgctggccttactgaaatggtactcgacaagcgcattttcccgtcttgaaaagttaggcctcaggcaccccaaaccctccccattcatcggcaacctaaccttcttccgccagggcttctgggagagtcaaatggaattgaggaagctttacgggccattatgtggctactaccttggcagaagaatgttcattgtgatttccgaaccggatatgatcaagcaggtactggtggaaaacttcagcaattttaccaatcggatggctagcggcttggaatttaagtctgtcgccgattcagtgctctttttacgtgataagaggtgggaggaagtgcggggagccttgatgtctgcctttagccccgagaaattaaacgagatggtacccctgatctcccaagcctgtgagcttctgctagcccacctgaagagatacgccgagagcggcgacgctttcgatattcaacgatgttactgcaactacacaacagacgttgtggcctccgttgcttttggtacgccagtggatagctggcaggccccagaagatcccttcgtcaaacactgcaaaagattttttgagttctgcatcccacggccaattctggttctgctcctgagttttccatccattatggtaccccttgccagaatcctgccaaacaaaaatcgggatgagctcaatggattttttaacaaactcatccggaacgtgatcgccctgcgggaccagcaggccgcagaggagcggagacgagacttcctccagatggtgttggacgcgcgacattccgcaagtcctatgggagtgcaggacttcgacattgtgagggatgtattcagttccacagggtgtaagcccaacccatcgcgacagcatcagccatccccgatggcccgtccgctgactgtggacgagattgtgggacaggcttttatctttctcattgccggatatgagataataaccaataccctgtctttcgccacatacttgcttgctaccaatcctgattgccaagaaaagcttttgagagaggtcgatgtctttaaagagaagcacatggcacccgagttctgttcactggaggaaggtcttccatatctcgatatggtgattgcagagaccctccggatgtatccacccgcattcagattcacccgagaagccgcacaggactgtgaggttctcggccaaaggattccagctggtgcggtgttggaaatggctgtgggagcactgcatcacgatcctgagcattggccctcccccgagaccttcaatccggaaagattcacagctgaggccagacaacagcaccgtccttttacctatttgccttttggtgccggacccaggagctgtcttggggttaggctgggcctgctggaggtgaagctcacgctgctgcacgtgttgcataagtttaggttccaggcctgcccagagacacaggtgccgctgcaactggagtctaagagcgcgttgggaccaaagaatggagtctacataaagattgttagccgttag

SEQ ID NO: 34411 - DNA, 2367 bp, Artificial Sequence
  derived and/or modified sequence
gagggccggcctggacccggcgggcgcacggctccgagcccagcgcagccgagccggtctgcagaggggcccccagaactttgtgtgtgtgtgtgcacgcgcgcgcgtgtgtgcccaggtgcgagggttcgcgcgtgtgctggcggggagggaaccgacccgaaagagagccccacgctggcaaagtggctcgcccatctcacagccggttggcgctcgcggaggctcacagaacatttcctgcctgttgctcacactctgttgtccacagcatacccgcaccctagatggctgactcttgtcttctgtctctttattttccatgtgtgagcctgtgcctgtggtttatctctggaggatgtgcctgagggaggagacatatactgcctggactgcctggctgatgtgagctagtttgtctggttgagttggatgtttaaatagaaggcagaacaacaacagagcacggttcccataagggcggcgagatcagcctcctgtctcatctggaagaccaccactctggggtctcagaggaatgatggaagccttggggtttctaaaattggaagtgaatggccccatggtgacggtggccctgtcagtggctctcttggccctcctgaaatggtactccacatcagcattctcaagactggagaagttaggcctcagacatcccaagccttctcctttcattggaaacttgacatttttccgccagggtttttgggaaagccaaatggagctcagaaagctgtatggacctctgtgtgggtactatcttggtcgtcggatgtttattgttatttctgagccagacatgatcaagcaggtgttggttgagaacttcagtaactttaccaacagaatggcgtcgggtttggagttcaagtcggtagccgacagcgttctgtttttacgtgacaaaagatgggaagaggtcagaggtgccctgatgtctgctttcagtcctgaaaagctgaacgagatggttcccctcatcagccaagcctgcgaacttctcctggctcatttaaaacgctatgcggaatctggggacgcatttgacatccagaggtgctactgcaattacaccacagatgtggttgccagcgtcgcctttggcaccccggtggactcctggcaggcccctgaggatccctttgtgaaacactgcaagcgtttcttcgaattctgcatccccagacctatcctggttttactcttatcatttccatccataatggtcccactggcccggattttgcccaataagaaccgagacgaactgaatggcttttttaacaaactcattaggaatgtgattgccttgcgggaccagcaagctgccgaagagaggcggagagacttcctccaaatggtcctggatgcccgacattctgcaagtcccatgggcgtgcaagactttgacatcgtcagagacgttttctcctctactgggtgcaagccgaacccttcccggcaacaccagcccagccctatggccaggcctttgactgtggatgagattgtgggccaggccttcatcttcctcatcgctggctatgaaatcatcaccaacacactttcttttgccacctacctactggccaccaaccctgactgccaagagaagcttctgagagaggtagacgtttttaaggagaaacacatggcccctgagttctgcagcctcgaggaaggcctgccctatctggacatggtgattgcagagacgctgaggatgtacccgccagctttcagattcacacgggaggcagctcaggactgcgaggtgctggggcagcgcatccccgcaggcgctgtgctagagatggccgtgggtgccctgcaccatgaccctgagcactggccaagcccggagaccttcaaccctgaaaggttcacggctgaggcccggcagcagcaccggcccttcacgtacctgcccttcggggccggcccacggagctgcctcggggtgcgtctagggctgcttgaggtcaagttgacactgctccacgtgctgcacaagttccggttccaagcctgccctgagacccaggtaccgctgcagctagaatccaaatctgccctaggtccaaaaaatggtgtctatatcaagatcgtatcccgctgacacagaaggctgccgggtggggggagggcacccccaaattcaaagaaaaccctaagtgtggatgttcagaattttggaaaaatgtcactgaagtgattgaaagagtgcctggcatgcaaggataagaggttctttacataacatttcctaaatgcttaataaacgtttgttgcacttggttttgacattgccaatggggtttgaaccagtgctctctctaaatg

SEQ ID NO: 34412 - DNA, 2185 bp, Artificial Sequence
  derived and/or modified sequence
aaccgacccgaaagagagccccacgctggcaaagtggctcgcccatctcacagccggttggcgctcgcggaggctcacagaacatttcctgcctgttgctcacactctgttgtccacagcatacccgcaccctagatggctgactcttgtcttctgtctctttattttccatgtgtgagcctgtgcctgtggtttatctctggaggatgtgcctgagggaggagacatatactgcctggactgcctggctgatgtgagctagtttgtctggttgagttggatgtttaaatagaaggcagaacaacaacagagcacggttcccataagggcggcgagatcagcctcctgtctcatctggaagaccaccactctggggtctcagaggaatgatggaagccttggggtttctaaaattggaagtgaatggccccatggtgacggtggccctgtcagtggctctcttggccctcctgaaatggtactccacatcagcattctcaagactggagaagttaggcctcagacatcccaagccttctcctttcattggaaacttgacatttttccgccagggtttttgggaaagccaaatggagctcagaaagctgtatggacctctgtgtgggtactatcttggtcgtcggatgtttattgttatttctgagccagacatgatcaagcaggtgttggttgagaacttcagtaactttaccaacagaatggcgtcgggtttggagttcaagtcggtagccgacagcgttctgtttttacgtgacaaaagatgggaagaggtcagaggtgccctgatgtctgctttcagtcctgaaaagctgaacgagatggttcccctcatcagccaagcctgcgaacttctcctggctcatttaaaacgctatgcggaatctggggacgcatttgacatccagaggtgctactgcaattacaccacagatgtggttgccagcgtcgcctttggcaccccggtggactcctggcaggcccctgaggatccctttgtgaaacactgcaagcgtttcttcgaattctgcatccccagacctatcctggttttactcttatcatttccatccataatggtcccactggcccggattttgcccaataagaaccgagacgaactgaatggcttttttaacaaactcattaggaatgtgattgccttgcgggaccagcaagctgccgaagagaggcggagagacttcctccaaatggtcctggatgcccgacattctgcaagtcccatgggcgtgcaagactttgacatcgtcagagacgttttctcctctactgggtgcaagccgaacccttcccggcaacaccagcccagccctatggccaggcctttgactgtggatgagattgtgggccaggccttcatcttcctcatcgctggctatgaaatcatcaccaacacactttcttttgccacctacctactggccaccaaccctgactgccaagagaagcttctgagagaggtagacgtttttaaggagaaacacatggcccctgagttctgcagcctcgaggaaggcctgccctatctggacatggtgattgcagagacgctgaggatgtacccgccagctttcagattcacacgggaggcagctcaggactgcgaggtgctggggcagcgcatccccgcaggcgctgtgctagagatggccgtgggtgccctgcaccatgaccctgagcactggccaagcccggagaccttcaaccctgaaaggttcacggctgaggcccggcagcagcaccggcccttcacgtacctgcccttcggggccggcccacggagctgcctcggggtgcgtctagggctgcttgaggtcaagttgacactgctccacgtgctgcacaagttccggttccaagcctgccctgagacccaggtaccgctgcagctagaatccaaatctgccctaggtccaaaaaatggtgtctatatcaagatcgtatcccgctgacacagaaggctgccgggtggggggagggcacccccaaattcaaagaaaaccctaagtgtggatgttcagaattttggaaaaatgtcactgaagtgattgaaagagtgcctggcatgcaaggataagaggttctttacataacatttcctaaatgcttaataaacgtttgttgcacttggttttgacattgccaa

SEQ ID NO: 34413 - DNA, 2064 bp, Artificial Sequence
  derived and/or modified sequence
aaggaataaagttgctgattcattcctttacactgaaaccctttgttgtgccctcctcttccttcctctttatagggagacactctgagaaagagcacattgtgggggcccactccatgtgatgtttgcttggttgcctgttcccttttctacctgcagagcacggttcccataagggcggcgagatcagcctcctgtctcatctggaagaccaccactctggggtctcagaggaatgatggaagccttggggtttctaaaattggaagtgaatggccccatggtgacggtggccctgtcagtggctctcttggccctcctgaaatggtactccacatcagcattctcaagactggagaagttaggcctcagacatcccaagccttctcctttcattggaaacttgacatttttccgccagggtttttgggaaagccaaatggagctcagaaagctgtatggacctctgtgtgggtactatcttggtcgtcggatgtttattgttatttctgagccagacatgatcaagcaggtgttggttgagaacttcagtaactttaccaacagaatggcgtcgggtttggagttcaagtcggtagccgacagcgttctgtttttacgtgacaaaagatgggaagaggtcagaggtgccctgatgtctgctttcagtcctgaaaagctgaacgagatggttcccctcatcagccaagcctgcgaacttctcctggctcatttaaaacgctatgcggaatctggggacgcatttgacatccagaggtgctactgcaattacaccacagatgtggttgccagcgtcgcctttggcaccccggtggactcctggcaggcccctgaggatccctttgtgaaacactgcaagcgtttcttcgaattctgcatccccagacctatcctggttttactcttatcatttccatccataatggtcccactggcccggattttgcccaataagaaccgagacgaactgaatggcttttttaacaaactcattaggaatgtgattgccttgcgggaccagcaagctgccgaagagaggcggagagacttcctccaaatggtcctggatgcccgacattctgcaagtcccatgggcgtgcaagactttgacatcgtcagagacgttttctcctctactgggtgcaagccgaacccttcccggcaacaccagcccagccctatggccaggcctttgactgtggatgagattgtgggccaggccttcatcttcctcatcgctggctatgaaatcatcaccaacacactttcttttgccacctacctactggccaccaaccctgactgccaagagaagcttctgagagaggtagacgtttttaaggagaaacacatggcccctgagttctgcagcctcgaggaaggcctgccctatctggacatggtgattgcagagacgctgaggatgtacccgccagctttcagattcacacgggaggcagctcaggactgcgaggtgctggggcagcgcatccccgcaggcgctgtgctagagatggccgtgggtgccctgcaccatgaccctgagcactggccaagcccggagaccttcaaccctgaaaggttcacggctgaggcccggcagcagcaccggcccttcacgtacctgcccttcggggccggcccacggagctgcctcggggtgcgtctagggctgcttgaggtcaagttgacactgctccacgtgctgcacaagttccggttccaagcctgccctgagacccaggtaccgctgcagctagaatccaaatctgccctaggtccaaaaaatggtgtctatatcaagatcgtatcccgctgacacagaaggctgccgggtggggggagggcacccccaaattcaaagaaaaccctaagtgtggatgttcagaattttggaaaaatgtcactgaagtgattgaaagagtgcctggcatgcaaggataagaggttctttacataacatttcctaaatgcttaataaacgtttgttgcacttggttttgacattgccaatggggtttgaaccagtgctctctctaaatg

SEQ ID NO: 34414 - DNA, 1963 bp, Artificial Sequence
  derived and/or modified sequence
atagggagacactctgagaaagagcacattgtgggggcccactccatgtgatgtttgcttggttgcctgttcccttttctacctgcagagcacggttcccataagggcggcgagatcagcctcctgtctcatctggaagaccaccactctggggtctcagaggaatgatggaagccttggggtttctaaaattggaagtgaatggccccatggtgacggtggccctgtcagtggctctcttggccctcctgaaatggtactccacatcagcattctcaagactggagaagttaggcctcagacatcccaagccttctcctttcattggaaacttgacatttttccgccagggtttttgggaaagccaaatggagctcagaaagctgtatggacctctgtgtgggtactatcttggtcgtcggatgtttattgttatttctgagccagacatgatcaagcaggtgttggttgagaacttcagtaactttaccaacagaatggcgtcgggtttggagttcaagtcggtagccgacagcgttctgtttttacgtgacaaaagatgggaagaggtcagaggtgccctgatgtctgctttcagtcctgaaaagctgaacgagatggttcccctcatcagccaagcctgcgaacttctcctggctcatttaaaacgctatgcggaatctggggacgcatttgacatccagaggtgctactgcaattacaccacagatgtggttgccagcgtcgcctttggcaccccggtggactcctggcaggcccctgaggatccctttgtgaaacactgcaagcgtttcttcgaattctgcatccccagacctatcctggttttactcttatcatttccatccataatggtcccactggcccggattttgcccaataagaaccgagacgaactgaatggcttttttaacaaactcattaggaatgtgattgccttgcgggaccagcaagctgccgaagagaggcggagagacttcctccaaatggtcctggatgcccgacattctgcaagtcccatgggcgtgcaagactttgacatcgtcagagacgttttctcctctactgggtgcaagccgaacccttcccggcaacaccagcccagccctatggccaggcctttgactgtggatgagattgtgggccaggccttcatcttcctcatcgctggctatgaaatcatcaccaacacactttcttttgccacctacctactggccaccaaccctgactgccaagagaagcttctgagagaggtagacgtttttaaggagaaacacatggcccctgagttctgcagcctcgaggaaggcctgccctatctggacatggtgattgcagagacgctgaggatgtacccgccagctttcagattcacacgggaggcagctcaggactgcgaggtgctggggcagcgcatccccgcaggcgctgtgctagagatggccgtgggtgccctgcaccatgaccctgagcactggccaagcccggagaccttcaaccctgaaaggttcacggctgaggcccggcagcagcaccggcccttcacgtacctgcccttcggggccggcccacggagctgcctcggggtgcgtctagggctgcttgaggtcaagttgacactgctccacgtgctgcacaagttccggttccaagcctgccctgagacccaggtaccgctgcagctagaatccaaatctgccctaggtccaaaaaatggtgtctatatcaagatcgtatcccgctgacacagaaggctgccgggtggggggagggcacccccaaattcaaagaaaaccctaagtgtggatgttcagaattttggaaaaatgtcactgaagtgattgaaagagtgcctggcatgcaaggataagaggttctttacataacatttcctaaatgcttaataaacgtttgttgcacttggttttgacattgccaa

SEQ ID NO: 34415 - DNA, 2080 bp, Artificial Sequence
  derived and/or modified sequence
gagggccggcctggacccggcgggcgcacggctccgagcccagcgcagccgagccggtctgcagaggggcccccagaactttgtgtgtgtgtgtgcacgcgcgcgcgtgtgtgcccaggtgcgagggttcgcgcgtgtgctggcggggagggaaccgacccgaaagagagccccacgctggcaaagtggctcgcccatctcacagccggttggcgctcgcggagctctttattttccatgtgtgagcctgtgcctgtggtttatctctggaggatgtgcctgagggaggagacatatactgcctggactgcctggctgatgtgagctagtttgtctggttgagttggatgtttaaatagaaggcagaacaacaacaggtactccacatcagcattctcaagactggagaagttaggcctcagacatcccaagccttctcctttcattggaaacttgacatttttccgccagggtttttgggaaagccaaatggagctcagaaagctgtatggacctctgtgtgggtactatcttggtcgtcggatgtttattgttatttctgagccagacatgatcaagcaggtgttggttgagaacttcagtaactttaccaacagaatggcgtcgggtttggagttcaagtcggtagccgacagcgttctgtttttacgtgacaaaagatgggaagaggtcagaggtgccctgatgtctgctttcagtcctgaaaagctgaacgagatggttcccctcatcagccaagcctgcgaacttctcctggctcatttaaaacgctatgcggaatctggggacgcatttgacatccagaggtgctactgcaattacaccacagatgtggttgccagcgtcgcctttggcaccccggtggactcctggcaggcccctgaggatccctttgtgaaacactgcaagcgtttcttcgaattctgcatccccagacctatcctggttttactcttatcatttccatccataatggtcccactggcccggattttgcccaataagaaccgagacgaactgaatggcttttttaacaaactcattaggaatgtgattgccttgcgggaccagcaagctgccgaagagaggcggagagacttcctccaaatggtcctggatgcccgacattctgcaagtcccatgggcgtgcaagactttgacatcgtcagagacgttttctcctctactgggtgcaagccgaacccttcccggcaacaccagcccagccctatggccaggcctttgactgtggatgagattgtgggccaggccttcatcttcctcatcgctggctatgaaatcatcaccaacacactttcttttgccacctacctactggccaccaaccctgactgccaagagaagcttctgagagaggtagacgtttttaaggagaaacacatggcccctgagttctgcagcctcgaggaaggcctgccctatctggacatggtgattgcagagacgctgaggatgtacccgccagctttcagattcacacgggaggcagctcaggactgcgaggtgctggggcagcgcatccccgcaggcgctgtgctagagatggccgtgggtgccctgcaccatgaccctgagcactggccaagcccggagaccttcaaccctgaaaggttcacggctgaggcccggcagcagcaccggcccttcacgtacctgcccttcggggccggcccacggagctgcctcggggtgcgtctagggctgcttgaggtcaagttgacactgctccacgtgctgcacaagttccggttccaagcctgccctgagacccaggtaccgctgcagctagaatccaaatctgccctaggtccaaaaaatggtgtctatatcaagatcgtatcccgctgacacagaaggctgccgggtggggggagggcacccccaaattcaaagaaaaccctaagtgtggatgttcagaattttggaaaaatgtcactgaagtgattgaaagagtgcctggcatgcaaggataagaggttctttacataacatttcctaaatgcttaataaacgtttgttgcacttggttttgacattg

SEQ ID NO: 34416 - protein, 433 aa, Artificial Sequence
  derived and/or modified sequence
MRQSHQLPLVGLLLFSFIPSQLCEICEVSEENYIRLKPLLNTMIQSNYNRGTSAVNVVLSLKLVGIQIQTLMQKMIQQIKYNVKSRLSDVSSGELALIILALGVCRNAEENLIYDYHLIDKLENKFQAEIENMEAHNGTPLTNYYQLSLDVLALCLFNGNYSTAEVVNHFTPENKNYYFGSQFSVDTGAMAVLALTCVKKSLINGQIKADEGSLKNISIYTKSLVEKILSEKKENGLIGNTFSTGEAMQALFVSSDYYNENDWNCQQTLNTVLTEISQGAFSNPNAAAQVLPALMGKTFLDINKDSSCVSASGNFNISADEPITVTPPDSQSYISVNYSVRINETYFTNVTVLNGSVFLSVMEKAQKMNDTIFGFTMEERSWGPYITCIQGLCANNNDRTYWELLSGGEPLSQGAGSYVVRNGENLEVRWSKY

SEQ ID NO: 34417 - DNA, 1302 bp, Artificial Sequence
  derived and/or modified sequence
atgagacagagccaccagctgcccctggtgggcctgctgctgttcagcttcatccccagccagctgtgcgagatctgcgaggtgagcgaggagaactacatcagactgaagcccctgctgaacaccatgatccagagcaactacaacagaggcaccagcgccgtgaacgtggtgctgagcctgaagctggtgggcatccagatccagaccctgatgcagaagatgatccagcagatcaagtacaacgtgaagagcagactgagcgacgtgagcagcggcgagctggccctgatcatcctggccctgggcgtgtgcagaaacgccgaggagaacctgatctacgactaccacctgatcgacaagctggagaacaagttccaggccgagatcgagaacatggaggcccacaacggcacccccctgaccaactactaccagctgagcctggacgtgctggccctgtgcctgttcaacggcaactacagcaccgccgaggtggtgaaccacttcacccccgagaacaagaactactacttcggcagccagttcagcgtggacaccggcgccatggccgtgctggccctgacctgcgtgaagaagagcctgatcaacggccagatcaaggccgacgagggcagcctgaagaacatcagcatctacaccaagagcctggtggagaagatcctgagcgagaagaaggagaacggcctgatcggcaacaccttcagcaccggcgaggccatgcaggccctgttcgtgagcagcgactactacaacgagaacgactggaactgccagcagaccctgaacaccgtgctgaccgagatcagccagggcgccttcagcaaccccaacgccgccgcccaggtgctgcccgccctgatgggcaagaccttcctggacatcaacaaggacagcagctgcgtgagcgccagcggcaacttcaacatcagcgccgacgagcccatcaccgtgaccccccccgacagccagagctacatcagcgtgaactacagcgtgagaatcaacgagacctacttcaccaacgtgaccgtgctgaacggcagcgtgttcctgagcgtgatggagaaggcccagaagatgaacgacaccatcttcggcttcaccatggaggagagaagctggggcccctacatcacctgcatccagggcctgtgcgccaacaacaacgacagaacctactgggagctgctgagcggcggcgagcccctgagccagggcgccggcagctacgtggtgagaaacggcgagaacctggaggtgagatggagcaagtactag

SEQ ID NO: 34418 - DNA, 1302 bp, Artificial Sequence
  derived and/or modified sequence
atgcggcagtcccatcagctccctctggtgggactgttgcttttcagctttatccccagtcagctatgtgaaatctgcgaggtctcggaggagaactacatccggttgaagccattgctcaacaccatgatacaatccaactacaaccgcggaaccagtgctgttaatgtggtcctgagcctaaagctcgtcgggattcaaatccaaaccctgatgcagaaaatgatccagcagatcaagtataacgtcaaatctcgcctgtccgacgtgtcatccggcgaattggctctcattatacttgccctaggtgtgtgccgcaatgctgaggagaacctcatctacgattatcacttaattgataaactggagaataaatttcaggctgagatcgagaacatggaggcccacaacggcacaccactcaccaattactatcagctgtccctcgacgtattggctctttgcttgtttaatggaaactactccactgcagaagtggttaatcactttactccagagaacaagaattattactttggaagtcagttcagcgtggacacaggggctatggccgttctggcattgacctgtgtgaaaaagtccctgatcaacggccaaattaaggcagacgaaggcagcctgaagaacataagcatctacacaaagagcttggtcgaaaagatcctgagtgagaagaaggagaacggcctgattggcaatacattcagtactggtgaggccatgcaggccctgttcgtctcaagtgactattataatgagaatgactggaattgtcagcagacgctcaatacagtgttaactgaaatttctcagggcgcattctccaatcccaatgccgccgctcaagtactgcccgctctgatgggaaagacatttctggacataaataaggatagcagctgcgtgtctgccagcggcaatttcaacattagcgctgatgagcccatcacagttacgccaccagattctcagtcatatatcagcgtaaactacagcgtgaggataaatgagacttattttacaaacgtgacagtcctgaacgggtctgtgttcctgtccgtcatggaaaaggcccaaaagatgaatgacaccatcttcggttttacaatggaagagaggtcctggggaccctacatcacttgcattcaaggcttgtgtgccaacaataacgatcgaacctactgggaactgctgagtggtggggagcccctgtcacagggggccggatcatacgttgtgcggaatggcgagaatttggaggtgcgctggtctaagtactag

SEQ ID NO: 34419 - DNA, 1302 bp, Artificial Sequence
  derived and/or modified sequence
atgaggcagagccaccagctgcccctggtgggcctgctgctcttctccttcatccccagccagctgtgtgagatctgtgaggtgtctgaggagaactacatccggctgaagcccctgctgaacaccatgatccagagcaactacaacagaggcaccagcgctgtgaatgtggtgctgagcctgaagctggtgggcatccagatccagaccctgatgcagaagatgatccagcagatcaagtacaacgtgaagagccggctgagtgatgtgagcagcggggagctggccctgatcatcctggccctgggcgtgtgcagaaatgctgaggagaacctgatctatgactaccacctgattgacaagctggagaacaagttccaggccgagattgagaacatggaggcccacaacggcacccccctgaccaactactaccagctgagcctggatgtgctggccctgtgcctcttcaacggcaactacagcacagctgaggtggtgaaccacttcaccccagagaacaagaactactacttcggcagccagttctctgtggacacaggagccatggctgtgctggccctgacctgtgtgaagaagagcctcatcaatggccagatcaaggcagatgagggcagcctgaagaacatcagcatctacaccaagagcctggtggagaagatcctgtctgagaagaaggaaaatggcctcatcggcaacaccttcagcactggagaggccatgcaggccctgtttgtgtccagtgactactacaatgaaaatgactggaactgccagcagaccctgaacacagtgctgacagagatcagccagggcgccttcagcaaccccaatgctgctgcccaggtgctgcctgccctgatgggcaagaccttcctggacatcaacaaggacagcagctgtgtgtctgccagcggcaacttcaacatctctgcagatgagcccatcaccgtgaccccaccagacagccagagctacatctctgtgaactacagcgtgcgcatcaatgagacctacttcaccaacgtgacagtgctgaatggcagcgtcttcctgtctgtgatggagaaggcccagaagatgaatgacaccatcttcggcttcaccatggaggagaggtcctggggcccctacatcacctgcatccagggcctgtgtgccaacaacaatgacaggacctactgggagctgctgagcggcggggagcccctgagccagggcgccggcagctatgtggtgagaaatggagagaacctggaggtgcgctggagcaagtactag

SEQ ID NO: 34420 - DNA, 1302 bp, Artificial Sequence
  derived and/or modified sequence
atgcggcagagccaccagctgcccctggtgggcctgctgctgttctccttcatcccttctcaactgtgcgaaatttgcgaggtgagcgaagagaactacatacgcctgaaacctcttctaaatactatgatccaaagtaactacaatcgtggcacgagcgcggtgaatgtggttctcagcctgaaactagtggggatacagattcaaaccctgatgcagaagatgattcagcagataaagtacaatgtgaagagcaggttgtccgatgtgtcgtcaggcgagctggccctgatcatacttgccctcggagtgtgccgaaatgccgaggagaacttgatctacgactaccacctgattgacaaacttgagaacaaatttcaagccgagattgaaaatatggaggcacacaacggaactcctctgaccaattattaccagctctcattggacgtgttagcactgtgcctgtttaatggtaactatagcactgccgaagtggtcaaccacttcacccccgaaaacaaaaattattattttggctcccagtttagcgtcgataccggcgccatggcggttctcgctctgacttgtgtgaaaaaaagcctaattaacgggcagatcaaggccgacgaaggtagtctgaaaaacattagcatttataccaaaagcctcgtcgagaaaattctgagtgaaaaaaaggaaaatgggctgatagggaacacgttctctactggagaagccatgcaggccctgtttgtatctagcgactactataacgaaaatgattggaactgccagcagacactgaataccgttttaactgaaatcagtcaaggcgcttttagcaacccaaacgccgccgcacaggtgctgcccgcgctgatgggaaagacttttttggacatcaataaagatagctcttgtgtgtcagcgagcggcaacttcaatatttctgccgatgagcccattaccgtgactcctcccgattcacaaagttatataagcgttaactatagcgtccggattaacgagacctatttcactaacgtcacagtgctcaatgggtccgtgttcctctccgtgatggaaaaggcccagaagatgaatgacactatcttcggctttaccatggaagaaagaagctggggaccctacatcacctgtatccaagggctgtgtgcaaataataacgaccgcacctactgggagctgttatccgggggtgaacccctcagtcagggagccgggtcatacgtggttcgtaatggcgaaaatctggaagtccggtggagcaagtattag

SEQ ID NO: 34421 - DNA, 1302 bp, Artificial Sequence
  derived and/or modified sequence
atgcgtcaatctcatcagctccccctcgttggtttactgctgttttctttcattcccagtcagctgtgtgagatctgtgaggtttctgaagaaaactacatccgcctcaagcccctcctgaacaccatgatccaaagcaattataacaggggaacctctgctgttaatgtagtcctcagcctgaaattggtgggaatccagatccaaacccttatgcagaagatgatccagcagattaagtacaatgttaagtctcggctgagcgacgtctctagtggggaattggcactcatcattctcgcccttggggtgtgccgcaacgctgaagagaatttgatctatgactaccacctgatagacaagctggaaaataagttccaggccgaaatagaaaacatggaggcacataatggaactcccctaacaaactactaccagttgtcacttgacgtgctggctctgtgcctgtttaacggcaattattccacggcggaggtagtgaaccacttcacccccgaaaataagaattactacttcgggagccagttctctgtagacacaggggcaatggcagtccttgcactgacctgcgtgaaaaaatctctgatcaacggacagatcaaagccgacgaaggttcgctgaaaaatattagcatctacactaaatccctggtcgagaaaatcctttcagaaaaaaaggagaacggtttgataggtaacaccttcagtacaggggaagccatgcaggctctatttgtgtcatctgactattataatgagaatgattggaactgtcaacagaccctcaatacggttcttacagagatctcccaaggggcattcagcaatccaaacgccgctgcccaggtactgcctgccctcatggggaaaactttcttagacatcaacaaagattctagctgtgtttctgcctctgggaacttcaacatctcagccgacgagccaatcactgtcactcctccagacagtcaatcctatatatccgttaactattctgtgcgcattaacgagacctacttcacaaatgtgaccgtgctcaacggatcagtgtttctgagcgtgatggaaaaggctcagaagatgaacgacacaatctttggctttacaatggaagagaggtcctggggcccatatattacgtgcatccaaggcttatgcgccaacaataatgaccggacttactgggaactgctaagcggaggggaacctttgagccagggcgctgggagctatgtggtccgaaatggcgaaaacctcgaggttaggtggtccaagtactag

SEQ ID NO: 34422 - DNA, 1582 bp, Artificial Sequence
  derived and/or modified sequence
gaaaagaggctgaggcaacctgaaggaggagctctcattaccttctgcccatcacttaataaatagccagccaattcatcaacattctggtacactgttggagagatgagacagtcacaccagctgcccctagtggggctcttactgttttcttttattccaagccaactatgcgagatttgtgaggtaagtgaagaaaactacatccgcctaaaacctctgttgaatacaatgatccagtcaaactataacaggggaaccagcgctgtcaatgttgtgttgtccctcaaacttgttggaatccagatccaaaccctgatgcaaaagatgatccaacaaatcaaatacaatgtgaaaagcagattgtcagatgtaagctcgggagagcttgccttgattatactggctttgggagtatgtcgtaacgctgaggaaaacttaatatatgattaccacctgatcgacaagctagaaaataaattccaagcagaaattgaaaatatggaagcacacaatggcactcccctgactaactactaccagctcagcctggacgttttggccttgtgtctgttcaatgggaactactcaaccgccgaagttgtcaaccacttcactcctgaaaataaaaactattattttggtagccagttctcagtagatactggtgcaatggctgtcctggctctgacctgtgtgaagaagagtctaataaatgggcagatcaaagcagatgaaggcagtttaaagaacatcagtatttatacaaagtcactggtagaaaagattctgtctgagaaaaaagaaaatggtctcattggaaacacatttagcacaggagaagccatgcaggccctctttgtatcatcagactattataatgaaaatgactggaattgccaacaaactctgaatacagtgctcacggaaatttctcaaggagcattcagcaatccaaacgctgcagcccaggtcttacctgccctgatgggaaagaccttcttggatattaacaaagactcttcttgcgtctctgcttcaggtaacttcaacatctccgctgatgagcctataactgtgacacctcctgactcacaatcatatatctccgtcaattactctgtgagaatcaatgaaacatatttcaccaatgtcactgtgctaaatggttctgtcttcctcagtgtgatggagaaagcccagaaaatgaatgatactatatttggtttcacaatggaggagcgctcatgggggccctatatcacctgtattcagggcctatgtgccaacaataatgacagaacctactgggaacttctgagtggaggcgaaccactgagccaaggagctggtagttacgttgtccgcaatggagaaaacttggaggttcgctggagcaaatactaataagcccaaactttcctcagctgcataaaatccatttgcagtggagttccatgtttattgtccttatgccttcttcttcatttatcccagtacgagcaggagagttaataacctccccttctctctctacatgttcaataaaagttgttgaaagattaacaactatacaaaaaga

SEQ ID NO: 34423 - protein, 455 aa, Artificial Sequence
  derived and/or modified sequence
MGLSTVPDLLLPLVLLELLVGIYPSGVIGLVPHLGDREKRDSVCPQGKYIHPQNNSICCTKCHKGTYLYNDCPGPGQDTDCRECESGSFTASENHLRHCLSCSKCRKEMGQVEISSCTVDRDTVCGCRKNQYRHYWSENLFQCFNCSLCLNGTVHLSCQEKQNTVCTCHAGFFLRENECVSCSNCKKSLECTKLCLPQIENVKGTEDSGTTVLLPLVIFFGLCLLSLLFIGLMYRYQRWKSKLYSIVCGKSTPEKEGELEGTTTKPLAPNPSFSPTPGFTPTLGFSPVPSSTFTSSSTYTPGDCPNFAAPRREVAPPYQGADPILATALASDPIPNPLQKWEDSAHKPQSLDTDDPATLYAVVENVPPLRWKEFVRRLGLSDHEIDRLELQNGRCLREAQYSMLATWRRRTPRREATLELLGRVLRDMDLLGCLEDIEEALCGPAALPPAPSLLR

SEQ ID NO: 34424 - protein, 218 aa, Artificial Sequence
  derived and/or modified sequence
MGLSTVPDLLLPLVLLELLVGIYPSGVIGLVPHLGDREKRDSVCPQGKYIHPQNNSICCTKCHKGTYLYNDCPGPGQDTDCRECESGSFTASENHLRHCLSCSKCRKEMGQVEISSCTVDRDTVCGCRKNQYRHYWSENLFQCFNCSLCLNGTVHLSCQEKQNTVCTCHAGFFLRENECVSCSKVLLCRPGWNAVARSRLTATSASQIQAILLLQPPK

SEQ ID NO: 34425 - DNA, 1368 bp, Artificial Sequence
  derived and/or modified sequence
atgggcctgagcaccgtgcccgacctgctgctgcccctggtgctgctggagctgctggtgggcatctaccccagcggcgtgatcggcctggtgccccacctgggcgacagagagaagagagacagcgtgtgcccccagggcaagtacatccacccccagaacaacagcatctgctgcaccaagtgccacaagggcacctacctgtacaacgactgccccggccccggccaggacaccgactgcagagagtgcgagagcggcagcttcaccgccagcgagaaccacctgagacactgcctgagctgcagcaagtgcagaaaggagatgggccaggtggagatcagcagctgcaccgtggacagagacaccgtgtgcggctgcagaaagaaccagtacagacactactggagcgagaacctgttccagtgcttcaactgcagcctgtgcctgaacggcaccgtgcacctgagctgccaggagaagcagaacaccgtgtgcacctgccacgccggcttcttcctgagagagaacgagtgcgtgagctgcagcaactgcaagaagagcctggagtgcaccaagctgtgcctgccccagatcgagaacgtgaagggcaccgaggacagcggcaccaccgtgctgctgcccctggtgatcttcttcggcctgtgcctgctgagcctgctgttcatcggcctgatgtacagataccagagatggaagagcaagctgtacagcatcgtgtgcggcaagagcacccccgagaaggagggcgagctggagggcaccaccaccaagcccctggcccccaaccccagcttcagccccacccccggcttcacccccaccctgggcttcagccccgtgcccagcagcaccttcaccagcagcagcacctacacccccggcgactgccccaacttcgccgcccccagaagagaggtggcccccccctaccagggcgccgaccccatcctggccaccgccctggccagcgaccccatccccaaccccctgcagaagtgggaggacagcgcccacaagccccagagcctggacaccgacgaccccgccaccctgtacgccgtggtggagaacgtgccccccctgagatggaaggagttcgtgagaagactgggcctgagcgaccacgagatcgacagactggagctgcagaacggcagatgcctgagagaggcccagtacagcatgctggccacctggagaagaagaacccccagaagagaggccaccctggagctgctgggcagagtgctgagagacatggacctgctgggctgcctggaggacatcgaggaggccctgtgcggccccgccgccctgccccccgcccccagcctgctgagatag

SEQ ID NO: 34426 - DNA, 657 bp, Artificial Sequence
  derived and/or modified sequence
atgggcctgagcaccgtgcccgacctgctgctgcccctggtgctgctggagctgctggtgggcatctaccccagcggcgtgatcggcctggtgccccacctgggcgacagagagaagagagacagcgtgtgcccccagggcaagtacatccacccccagaacaacagcatctgctgcaccaagtgccacaagggcacctacctgtacaacgactgccccggccccggccaggacaccgactgcagagagtgcgagagcggcagcttcaccgccagcgagaaccacctgagacactgcctgagctgcagcaagtgcagaaaggagatgggccaggtggagatcagcagctgcaccgtggacagagacaccgtgtgcggctgcagaaagaaccagtacagacactactggagcgagaacctgttccagtgcttcaactgcagcctgtgcctgaacggcaccgtgcacctgagctgccaggagaagcagaacaccgtgtgcacctgccacgccggcttcttcctgagagagaacgagtgcgtgagctgcagcaaggtgctgctgtgcagacccggctggaacgccgtggccagaagcagactgaccgccaccagcgccagccagatccaggccatcctgctgctgcagccccccaagtag

SEQ ID NO: 34427 - DNA, 1368 bp, Artificial Sequence
  derived and/or modified sequence
atgggcctgtcaaccgttccagatctgctgttgccactcgttctccttgagctccttgttggcatttaccctagcggggtgatagggctggtgccccacctgggcgacagggaaaaacgggacagtgtatgtccgcagggcaagtacatccacccccagaataattccatttgctgtaccaaatgccataaaggcacctatctgtacaatgactgtccaggtcccggacaggataccgattgtagagagtgcgagagtggatcatttacagcctcagaaaatcacctgaggcactgtctctcctgcagcaagtgcagaaaagagatggggcaggtggagatatcttcatgtacagttgatagagacacagtatgtggctgccgcaagaatcagtacaggcactactggagcgagaatttgttccaatgtttcaactgctccctatgtcttaatggaacggttcatttgagttgccaggagaaacagaacaccgtctgcacctgccacgctggctttttccttagagagaatgaatgcgtgagctgtagtaactgtaagaagagcctggaatgtactaagttgtgtctgcctcagatcgagaacgtgaagggcacggaagacagcggaacgaccgtcctcctccctttagtcattttcttcgggctctgtttactttcgttgctcttcatcggactgatgtaccgatatcagcgctggaaatcaaagctttactccattgtatgcggcaagtctacaccagaaaaggaaggtgaactcgagggaaccaccacaaagcccctggctccgaaccctagcttcagcccaacaccaggattcactccaaccttagggttcagccccgtgccttcatcaacctttacctcctcatctacatacactcctggagattgtccaaacttcgccgctccccggagagaagtggccccaccctaccagggcgctgacccaatcctggcaaccgccctggcttcagaccccattcccaacccactgcagaaatgggaagacagcgcccacaagcctcaatctctcgacaccgacgaccccgctaccctgtacgcagtcgttgaaaacgtgccacctctccggtggaaggaatttgtacgtaggcttggactgtctgatcatgagatagatcggcttgagctacagaacggccgctgccttagggaggcccaatacagtatgctggccacttggcgaagacggaccccccgcagagaggccaccttggaacttctgggacgggttctgcgcgacatggacttgttagggtgcctggaggatatcgaagaagctctttgcggcccagctgcactgcctccagctccttcacttttaagatag

SEQ ID NO: 34428 - DNA, 657 bp, Artificial Sequence
  derived and/or modified sequence
atggggttaagtaccgtcccagacttgctgttgcctttagtgctcctagagctgttggtgggcatctatccgtccggagttatcgggttggtgccacaccttggagaccgagaaaagcgcgattccgtgtgtccccagggcaagtatattcatccccagaataactctatttgttgtaccaagtgtcacaagggtacatacttgtataacgactgtccggggcctggtcaggacaccgactgtcgagaatgtgagtcaggatcattcactgcatcggagaatcatctgcgtcattgtctgtcgtgttcaaagtgcagaaaggagatgggccaggtggagatttcgagctgtaccgtggacagagacaccgtctgtgggtgccgaaaaaatcagtacaggcactactggagcgagaatctctttcagtgcttcaattgtagcctttgtctgaatggcactgtacatttatcgtgtcaggaaaaacaaaacacagtttgtacctgtcacgctggtttctttctgcgcgaaaatgaatgtgtcagctgctcaaaagtgctgctgtgcagacctggctggaatgctgtcgcccgatccagacttaccgccacctctgcatcccagatccaggctatattgcttcttcagccacccaaatag

SEQ ID NO: 34429 - DNA, 1368 bp, Artificial Sequence
  derived and/or modified sequence
atgggcctgagcacagtgcctgacctgctgctgcccctggtgctgctggagctgctggtgggcatctaccccagcggggtcatcggcctggtgccccacctgggggaccgggagaagagggacagcgtgtgcccccagggcaagtacatccacccccagaacaacagcatctgctgcaccaagtgccacaagggcacctacctgtacaatgactgccccggccctggccaggacacagactgcagagaatgtgagagcggcagcttcaccgccagcgagaaccacctgcggcactgcctgagctgcagcaagtgcaggaaggagatgggccaggtggagatcagcagctgcaccgtggaccgggacacagtgtgtggctgcaggaagaaccagtaccgccactactggagcgagaacctcttccagtgcttcaactgcagcctgtgcctgaatggaacagtgcacctgagctgccaggagaagcagaacacagtgtgcacctgccacgccggcttcttcctgcgggagaatgaatgtgtgtcctgcagcaactgcaagaagagcctggagtgcaccaagctgtgcctgccccagattgaaaatgtgaagggcacagaggacagcggcaccaccgtgctgctgcccctggtgatcttcttcggcctgtgcctgctgagcctgctcttcatcggcctgatgtaccgctaccagcgctggaagagcaagctgtacagcatcgtgtgtgggaagagcaccccagagaaggagggggagctggagggcaccaccaccaagcccctggcccccaaccccagcttcagccccaccccaggcttcacccccaccctgggcttcagccctgtgcccagcagcaccttcaccagcagcagcacctacacccctggggactgccccaactttgctgccccccggcgggaggtggccccaccctaccagggcgctgaccccatcctggccacagccctggccagtgaccccatccccaaccccctgcagaagtgggaggacagcgcccacaagccccagagcctggacacagatgatcctgccaccctgtatgctgtggtggagaatgtgccccccctgcgctggaaggagtttgtgcggcggctgggcctgagtgaccatgaaattgaccggctggagctgcagaatggccgctgcctgcgggaggcccagtacagcatgctggccacctggaggaggaggaccccaagaagagaggccaccctggagctgctgggccgggtgctgcgggacatggacctgctgggctgcctggaggacatcgaggaggccctgtgtggccctgctgccctgcccccagcccccagcctgctgaggtag

SEQ ID NO: 34430 - DNA, 657 bp, Artificial Sequence
  derived and/or modified sequence
atgggcctgagcacagtgcctgacctgctgctgcccctggtgctgctggagctgctggtgggcatctaccccagcggggtcatcggcctggtgccccacctgggggaccgggagaagagggacagcgtgtgcccccagggcaagtacatccacccccagaacaacagcatctgctgcaccaagtgccacaagggcacctacctgtacaatgactgccccggccctggccaggacacagactgcagagaatgtgagagcggcagcttcaccgccagcgagaaccacctgcggcactgcctgagctgcagcaagtgcaggaaggagatgggccaggtggagatcagcagctgcaccgtggaccgggacacagtgtgtggctgcaggaagaaccagtaccgccactactggagcgagaacctcttccagtgcttcaactgcagcctgtgcctgaatggaacagtgcacctgagctgccaggagaagcagaacacagtgtgcacctgccacgccggcttcttcctgcgggagaatgaatgtgtgtcctgcagcaaggtgctgctgtgccggcccggctggaatgctgtggcccggagccggctgacagccaccagcgccagccagatccaggccatcctgctgctgcagccccccaagtag

SEQ ID NO: 34431 - DNA, 1368 bp, Artificial Sequence
  derived and/or modified sequence
atgggcctgagcaccgtgcccgacctgctgctgcccctggtgctgctggaactgctcgtcgggatttatccaagtggggttataggcttagtgccacatcttggcgatcgtgaaaaacgcgatagcgtttgcccacagggcaagtatattcacccacaaaataacagcatctgttgtactaaatgccacaagggcacatatctttataatgactgccctggacccggccaagatacggactgcagagagtgcgaaagcggctctttcactgcgtcagaaaaccacttgcgccattgcctgtcttgcagcaaatgtcgaaaggagatgggtcaagtggagattagctcctgcaccgtggaccgcgacacagtgtgcggctgccggaagaaccagtatcgccactactggtccgaaaacctgttccaatgtttcaactgcagcctttgtctgaatggtaccgttcatttgagttgtcaagagaaacagaataccgtttgcacttgccatgctgggttttttttacgggagaacgaatgtgtatcctgttccaattgtaaaaaaagtctggaatgcaccaagctgtgtttgcctcagattgagaatgtcaaaggcacagaagatagtggcacaacagtcctgctacctctagtcatattcttcggactctgtctactgtccctgctgtttattggactaatgtatcgctatcagcgatggaaaagcaagctatactccatcgtatgcggcaaatccaccccagagaaggagggtgaactggaaggcaccactacgaagcccttagccccgaaccctagcttctctcctactcctggattcacgcccacgctgggattctcccccgtcccatcctctacatttacctcaagctccacatacaccccgggggactgcccaaactttgccgccccccggcgcgaggtggcgcctccctatcagggcgccgatcctatcttggccaccgctttggccagcgatcctatccctaatccgctgcagaagtgggaagattctgcgcacaagccccagtctcttgataccgatgatcctgccactctttatgcagtggtcgagaacgtcccccctctgcggtggaaggagtttgtgagaagactgggactgagcgaccatgaaatagatcgcctggagttgcagaacggtcgctgcctccgagaagctcaatactccatgctggcgacatggagacgcagaacacctaggcgcgaagctacccttgaactcctgggaagggtattgagagatatggacctgctgggttgtctagaggatattgaggaggctctatgtggccccgccgcactacctcccgcgccgtcattactgcggtag

SEQ ID NO: 34432 - DNA, 657 bp, Artificial Sequence
  derived and/or modified sequence
atgggcctgagcaccgtgcccgacctgctgctgcccctggtgctgcttgaactactggttggcatatatccttcaggagtgatcggactggtcccccatttaggagaccgggagaagcgagactccgtttgccctcagggtaagtatatccatccacagaataattccatctgttgtactaagtgtcacaagggtacatacctctataacgactgtcccggcccaggccaggatacggattgtcgggagtgcgagtctggcagctttacagcaagtgaaaaccacctgcgccattgcttgagttgttcaaagtgtagaaaagagatggggcaagtcgagatctcatcatgtacagtggaccgcgacaccgtgtgcggctgcagaaaaaaccagtaccgacactattggtcggagaatctgttccagtgctttaattgctctctctgcctgaacggcacagtgcacctatcctgccaggagaaacagaacaccgtgtgtacctgccacgctggttttttcctgcgcgaaaacgagtgtgtgtcatgctctaaagttctcttgtgcagaccagggtggaatgcagttgctagatcaaggctgacagccacctctgcatcgcagattcaggcgattctgctgttgcagcctcccaaatag

SEQ ID NO: 34433 - DNA, 1368 bp, Artificial Sequence
  derived and/or modified sequence
atgggcctgagtaccgtccctgatttgttgctgccccttgtgcttctagaactgctcgtgggtatttacccttcgggagtgataggcctcgtgccccacttaggagacagagagaagcgcgactctgtgtgtccacagggaaagtatattcaccctcagaataactccatttgttgtactaagtgtcataagggaacgtatttatataacgattgccctggtcctgggcaagatacagactgtagagaatgtgaatctggatcattcactgcttctgagaaccatctgcgacactgtctgtcctgcagcaaatgccggaaagagatggggcaagtggaaatctcgtcctgcactgtcgacagggacacagtgtgtggttgccgcaagaaccagtatcgtcattattggagcgaaaatctgtttcagtgcttcaattgctcactctgtctgaacggcaccgtccatctctcttgtcaggagaaacaaaatacagtctgtacatgtcacgctggtttcttccttcgcgagaacgagtgtgtgtcttgtagcaattgcaagaagagccttgaatgcaccaaattgtgccttccgcagattgagaacgttaaaggcactgaggatagcggtaccaccgtactcctgccccttgtcatcttcttcggcctgtgcctactgagtctcctattcataggcctgatgtatagataccagcgctggaagtcaaagctttattctattgtctgcgggaagtccacccccgaaaaggaaggggaacttgagggcaccacaaccaagccactcgctcctaacccgtcattctcgccaacacccggattcacaccgacgctaggtttcagccctgtgcctagttccacatttacgtccagcagtacgtatacgcccggtgactgccctaacttcgcagcccctagacgggaggtcgcacccccatatcagggagcagatcctattcttgccaccgccctggcatctgatccaatacccaatcctctgcaaaaatgggaggactctgctcataaacctcagtctctggacactgatgatccagcgaccttgtacgccgtggtggagaacgtgcctcccctccggtggaaagaattcgtcaggaggcttggactcagcgatcatgagatagacagactggagctgcagaacggtaggtgtttgagggaagctcagtatagcatgttggctacgtggaggcggcgtacccctcgccgagaagcaacactcgagctcctcggcagggtcttgagagacatggatctcctgggttgtctggaagatatcgaagaggcactgtgcggccctgctgcgctccccccagcgccttccctcctgagatag

SEQ ID NO: 34434 - DNA, 657 bp, Artificial Sequence
  derived and/or modified sequence
atgggactttccaccgtccccgaccttttgttgccccttgttctgctggaactgctagttgggatctatccctctggcgtcattgggctagtgccccacctgggagaccgcgaaaagagggacagcgtgtgccctcaagggaagtatattcacccccagaacaactccatttgctgcacaaagtgtcacaaaggtacatatctatacaatgactgcccaggcccaggacaggacaccgactgtcgggagtgcgagtccgggagtttcactgctagcgaaaaccatctgagacactgcctcagctgcagtaaatgccggaaagagatgggccaggtggagatctcgtcctgtacagtggaccgggacacagtctgtggctgtagaaagaaccagtaccgtcattattggtcagagaacctgtttcaatgttttaattgttccctgtgtctcaacgggacggtgcacctctcatgtcaggaaaaacaaaacaccgtctgcacgtgtcatgcaggattcttcctgagggagaatgaatgtgtcagttgttcaaaggtactgctgtgcagaccaggctggaacgccgtggcccgaagcagattgactgccacttctgcctcccaaatccaggctattctgttgctgcaacctcccaagtag

SEQ ID NO: 34435 - DNA, 1368 bp, Artificial Sequence
  derived and/or modified sequence
atgggcctgtctacagtgccagatctgttattgcccctggttcttctcgaattgctcgtaggcatttaccccagtggtgtaatcggcctggtcccccacttaggcgatcgggaaaagagagattccgtctgcccgcagggaaaatatatccatccacagaacaactctatttgctgcaccaaatgccataaaggcacatacctgtataacgactgtcctggccctgggcaggatacagactgtagggaatgcgagagtggcagcttcactgctagtgaaaatcacttgcgtcattgcttgagctgttccaaatgcagaaaagagatgggacaggttgaaatctcatcatgcacagtggatcgcgataccgtctgcggttgtagaaagaaccaatacagacattactggtcagagaacttgttccaatgttttaattgtagcctctgcctgaacggaaccgtccacctgtcttgccaagagaaacagaataccgtatgcacgtgccacgctggatttttcctgcgcgaaaatgaatgtgtctcctgcagcaactgcaagaagtctttggaatgtaccaagctgtgtttacctcaaattgagaatgtaaagggcactgaggactctggaacaaccgtgttactacccttagtcattttttttggtctctgcctgttgtctctcttattcatcgggctcatgtataggtatcagcggtggaagtcgaagctgtatagcattgtttgcggtaaaagcactcccgaaaaggagggagagctagaaggcaccaccactaaacctttagcacccaaccctagctttagcccaactcctggattcacccccacattaggattttcacctgtgccatctagcacctttacatcaagtagcacatacaccccgggggattgcccaaattttgctgctcctcgcagagaagtggctcccccctaccagggagcagaccctatacttgccacggcactggcttcggaccccattccaaacccgctccaaaaatgggaagactcagcccataagcctcaatcgctagatactgatgatcccgctactttgtacgcagtggttgagaatgtaccacctttgaggtggaaggagtttgtgagacgccttggcctctccgatcacgagattgatcgtctcgagctacaaaatggccgatgcctcagggaggcacagtacagcatgttggcaacctggcggagacggacaccacggagagaagcaacactcgaattgctgggccgggtcctaagggatatggacctgctgggctgcttagaggatatagaggaggcactgtgtggtcccgcagctttgccccctgctccatcgcttttgcgatag

SEQ ID NO: 34436 - DNA, 657 bp, Artificial Sequence
  derived and/or modified sequence
atggggttgtcaacggtcccagacttgttgctgccactcgtcctcctcgaacttcttgtgggcatttacccatctggggtaataggcctggtgccccatctgggcgatagggagaagcgagactcagtatgcccccaaggaaaatacattcatccccagaataatagcatctgttgtaccaagtgccataagggaacatatctctataatgattgtcccggtccaggtcaggatacagattgcagagaatgtgaatccggttctttcactgcttctgagaatcatcttcggcactgtctgtcctgcagtaagtgcagaaaagagatgggccaagtcgaaatttcaagctgcacagttgacagagataccgtctgcggctgtcggaaaaatcagtatagacactactggagcgagaacctgtttcagtgcttcaattgtagcctgtgtctgaacggcacggtacacctgtcatgccaggaaaagcagaacaccgtgtgcacctgccatgctggcttctttttacgcgaaaacgaatgtgttagttgttctaaagtgttactgtgccggcccggatggaacgccgttgcaagaagtcgcctgaccgctactagtgcctcacaaattcaagccattttactccttcagcctcccaagtag

SEQ ID NO: 34437 - DNA, 1368 bp, Artificial Sequence
  derived and/or modified sequence
atgggtcttagcacagttcccgacctgttgcttcccttggtgctgcttgaactcctggtaggtatataccccagcggagttattggcctggtccctcatctcggcgaccgcgaaaagcgagatagcgtgtgtccccagggaaagtatatccacccccagaataatagtatctgttgcaccaagtgccacaaaggaacatatttatataacgactgccccggacctgggcaggacactgactgtagagaatgcgaatctggctcctttaccgcctccgagaatcacctgcgacactgcttgagctgttccaaatgcagaaaagagatgggacaggttgaaatctcatcatgcacagtggatcgcgataccgtctgcggttgtagaaagaaccaatacagacattactggtcagagaacttgttccaatgttttaattgtagcctctgcctgaacggaaccgtccacctgtcttgccaagagaaacagaataccgtatgcacgtgccacgctggatttttcctgcgcgaaaatgaatgtgtctcctgcagcaactgcaagaagtctttggaatgtaccaagctgtgtttacctcaaattgagaatgtcaagggaaccgaagattcaggtacaaccgttctgctgccactcgtgatcttcttcgggctttgcctcctttctctgctcttcattgggttaatgtatagatatcagaggtggaagagcaagctctactcaatagtctgcggcaaatccacgccagagaaagagggcgagttagagggtaccaccacaaagccactggcgccaaacccaagtttcagtcccacacccggctttacaccaacactcggcttttctcccgttcctagtagcacattcacgagttcctctacctatacccctggcgactgcccaaatttcgctgccccacggcgcgaagtcgccccaccatatcagggagcagacccaatcctggctaccgcgcttgcatccgatcctatccccaaccctcttcagaaatgggaagactccgcgcacaagccccagtcattagataccgacgaccctgccacactttatgccgtggtggagaacgtacctcctttgcgctggaaagaattcgtacgccgcctaggcctgtctgaccatgagattgaccgcctagaacttcagaatggacgttgcctgagggaggctcagtattcaatgctcgcaacgtggcgcagaagaacgcctcgccgagaagcaacactcgaactcttaggacgcgtgttacgcgacatggacctgctggggtgtttggaagatatcgaagaagctctgtgcggacccgctgcattaccacctgctccctccctgttaaggtag

SEQ ID NO: 34438 - DNA, 657 bp, Artificial Sequence
  derived and/or modified sequence
atgggcctctcgaccgtgccagatctattattgccactggtattgctggaactgctggtaggcatctacccttcaggggtgatagggttggttcctcacttaggcgaccgcgaaaaaagagattccgtttgtccacaagggaaatatatccatccccaaaacaacagtatttgctgcaccaagtgccataagggaacatacctgtataatgactgtccaggtccaggccaggacactgactgccgcgaatgtgagtccggaagctttactgccagcgagaaccatctgcgtcattgtctgtcctgttccaaatgtcggaaggagatgggccaggtggagatttcaagctgcactgtcgatagagataccgtgtgtggctgtcggaaaaaccaatatcgccactattggtctgagaacctttttcagtgctttaattgctccctgtgtctcaatggtaccgtgcacctatcctgtcaggaaaagcaaaacacagtgtgtacctgccatgccggattctttctgcgcgaaaacgagtgtgtctcatgttctaaagtgctgttgtgccgacccgggtggaatgctgttgcccggtctcgcctgaccgcaacctccgccagccagatacaagcgattctccttttacaaccacccaaatag

SEQ ID NO: 34439 - DNA, 2223 bp, Artificial Sequence
  derived and/or modified sequence
ctccagctcttcctgtcccgctgttgcaacactgcctcactcttcccctcccaccttctctcccctcctctctgctttaattttctcagaattctctggactgaggctccagttctggcctttggggttcaagatcactgggaccaggccgtgatctctatgcccgagtctcaaccctcaactgtcaccccaaggcacttgggacgtcctggacagaccgagtcccgggaagccccagcactgccgctgccacactgccctgagcccaaatgggggagtgagaggccatagctgtctggcatgggcctctccaccgtgcctgacctgctgctgccactggtgctcctggagctgttggtgggaatatacccctcaggggttattggactggtccctcacctaggggacagggagaagagagatagtgtgtgtccccaaggaaaatatatccaccctcaaaataattcgatttgctgtaccaagtgccacaaaggaacctacttgtacaatgactgtccaggcccggggcaggatacggactgcagggagtgtgagagcggctccttcaccgcttcagaaaaccacctcagacactgcctcagctgctccaaatgccgaaaggaaatgggtcaggtggagatctcttcttgcacagtggaccgggacaccgtgtgtggctgcaggaagaaccagtaccggcattattggagtgaaaaccttttccagtgcttcaattgcagcctctgcctcaatgggaccgtgcacctctcctgccaggagaaacagaacaccgtgtgcacctgccatgcaggtttctttctaagagaaaacgagtgtgtctcctgtagtaactgtaagaaaagcctggagtgcacgaagttgtgcctaccccagattgagaatgttaagggcactgaggactcaggcaccacagtgctgttgcccctggtcattttctttggtctttgccttttatccctcctcttcattggtttaatgtatcgctaccaacggtggaagtccaagctctactccattgtttgtgggaaatcgacacctgaaaaagagggggagcttgaaggaactactactaagcccctggccccaaacccaagcttcagtcccactccaggcttcacccccaccctgggcttcagtcccgtgcccagttccaccttcacctccagctccacctatacccccggtgactgtcccaactttgcggctccccgcagagaggtggcaccaccctatcagggggctgaccccatccttgcgacagccctcgcctccgaccccatccccaacccccttcagaagtgggaggacagcgcccacaagccacagagcctagacactgatgaccccgcgacgctgtacgccgtggtggagaacgtgcccccgttgcgctggaaggaattcgtgcggcgcctagggctgagcgaccacgagatcgatcggctggagctgcagaacgggcgctgcctgcgcgaggcgcaatacagcatgctggcgacctggaggcggcgcacgccgcggcgcgaggccacgctggagctgctgggacgcgtgctccgcgacatggacctgctgggctgcctggaggacatcgaggaggcgctttgcggccccgccgccctcccgcccgcgcccagtcttctcagatgaggctgcgcccctgcgggcagctctaaggaccgtcctgcgagatcgccttccaaccccacttttttctggaaaggaggggtcctgcaggggcaagcaggagctagcagccgcctacttggtgctaacccctcgatgtacatagcttttctcagctgcctgcgcgccgccgacagtcagcgctgtgcgcgcggagagaggtgcgccgtgggctcaagagcctgagtgggtggtttgcgaggatgagggacgctatgcctcatgcccgttttgggtgtcctcaccagcaaggctgctcgggggcccctggttcgtccctgagcctttttcacagtgcataagcagttttttttgtttttgttttgttttgttttgtttttaaatcaatcatgttacactaatagaaacttggcactcctgtgccctctgcctggacaagcacatagcaagctgaactgtcctaaggcaggggcgagcacggaacaatggggccttcagctggagctgtggacttttgtacatacactaaaattctgaagttaaagctctgctcttgga

SEQ ID NO: 34440 - DNA, 1339 bp, Artificial Sequence
  derived and/or modified sequence
caaatgggggagtgagaggccatagctgtctggcatgggcctctccaccgtgcctgacctgctgctgccactggtgctcctggagctgttggtgggaatatacccctcaggggttattggactggtccctcacctaggggacagggagaagagagatagtgtgtgtccccaaggaaaatatatccaccctcaaaataattcgatttgctgtaccaagtgccacaaaggaacctacttgtacaatgactgtccaggcccggggcaggatacggactgcagggagtgtgagagcggctccttcaccgcttcagaaaaccacctcagacactgcctcagctgctccaaatgccgaaaggaaatgggtcaggtggagatctcttcttgcacagtggaccgggacaccgtgtgtggctgcaggaagaaccagtaccggcattattggagtgaaaaccttttccagtgcttcaattgcagcctctgcctcaatgggaccgtgcacctctcctgccaggagaaacagaacaccgtgtgcacctgccatgcaggtttctttctaagagaaaacgagtgtgtctcctgtagtaaagtcctgctctgtcgcccaggctggaatgcagtggcgcgatctcggctcactgcaacctctgcctcccagattcaagcaattctcctgcttcagcctcccaagtagctgggattacaggcacgtgccaccatgcctggctaatttttgtatttttagtagagatggggtttcaccatcttggtcaggctggtctcaaactcctggtgatccacctgcctctgcctcccaaagtgctgggattacagccgtgagccactgcacccagccggcttcatctcttcttgaaatcacttttataccattctatgtggttctcaccatgagcttgagtggtgggctaaagtgcctctccctgctttcagcttcctgctgggaactcactctctcaagttccttccagcaccaccccatagagttcccatcactccacactgtccagtgacaactcccaacatggaagatctgctagttctacagggtgctctctggctgccccagtaacatgtgtttttaaatttttcacatgcatgtttgaccccgactccccgaagtcaggtactgtaactagcagtgtcatttaagaaaaagccctttaacctctctttgccaaaggattcttatcagcaaaacagtgatgaaacaacaatcccataacagctagctggctaccttctcaagcacttattaaatgaggcataatgattttgcttaatcctcaatcctgagaggtgggcgatccctgtggtgatgagg

SEQ ID NO: 34441 - RNA, 1368 nt, Artificial Sequence
  derived and/or modified sequence
augggccugucuacagugccagaucuguuauugccccugguucuucucgaauugcucguaggcauuuaccccagugguguaaucggccuggucccccacuuaggcgaucgggaaaagagagauuccgucugcccgcagggaaaauauauccauccacagaacaacucuauuugcugcaccaaaugccauaaaggcacauaccuguauaacgacuguccuggcccugggcaggauacagacuguagggaaugcgagaguggcagcuucacugcuagugaaaaucacuugcgucauugcuugagcuguuccaaaugcagaaaagagaugggacagguugaaaucucaucaugcacaguggaucgcgauaccgucugcgguuguagaaagaaccaauacagacauuacuggucagagaacuuguuccaauguuuuaauuguagccucugccugaacggaaccguccaccugucuugccaagagaaacagaauaccguaugcacgugccacgcuggauuuuuccugcgcgaaaaugaaugugucuccugcagcaacugcaagaagucuuuggaauguaccaagcuguguuuaccucaaauugagaauguaaagggcacugaggacucuggaacaaccguguuacuacccuuagucauuuuuuuuggucucugccuguugucucucuuauucaucgggcucauguauagguaucagcgguggaagucgaagcuguauagcauuguuugcgguaaaagcacucccgaaaaggagggagagcuagaaggcaccaccacuaaaccuuuagcacccaacccuagcuuuagcccaacuccuggauucacccccacauuaggauuuucaccugugccaucuagcaccuuuacaucaaguagcacauacaccccgggggauugcccaaauuuugcugcuccucgcagagaaguggcuccccccuaccagggagcagacccuauacuugccacggcacuggcuucggaccccauuccaaacccgcuccaaaaaugggaagacucagcccauaagccucaaucgcuagauacugaugaucccgcuacuuuguacgcagugguugagaauguaccaccuuugagguggaaggaguuugugagacgccuuggccucuccgaucacgagauugaucgucucgagcuacaaaauggccgaugccucagggaggcacaguacagcauguuggcaaccuggcggagacggacaccacggagagaagcaacacucgaauugcugggccggguccuaagggauauggaccugcugggcugcuuagaggauauagaggaggcacuguguggucccgcagcuuugcccccugcuccaucgcuuuugcgauag

SEQ ID NO: 34442 - RNA, 657 nt, Artificial Sequence
  derived and/or modified sequence
augggguugucaacggucccagacuuguugcugccacucguccuccucgaacuucuugugggcauuuacccaucugggguaauaggccuggugccccaucugggcgauagggagaagcgagacucaguaugcccccaaggaaaauacauucauccccagaauaauagcaucuguuguaccaagugccauaagggaacauaucucuauaaugauugucccgguccaggucaggauacagauugcagagaaugugaauccgguucuuucacugcuucugagaaucaucuucggcacugucuguccugcaguaagugcagaaaagagaugggccaagucgaaauuucaagcugcacaguugacagagauaccgucugcggcugucggaaaaaucaguauagacacuacuggagcgagaaccuguuucagugcuucaauuguagccugugucugaacggcacgguacaccugucaugccaggaaaagcagaacaccgugugcaccugccaugcuggcuucuuuuuacgcgaaaacgaauguguuaguuguucuaaaguguuacugugccggcccggauggaacgccguugcaagaagucgccugaccgcuacuagugccucacaaauucaagccauuuuacuccuucagccucccaaguag

SEQ ID NO: 34443 - RNA, 1368 nt, Artificial Sequence
  derived and/or modified sequence
augggucuuagcacaguucccgaccuguugcuucccuuggugcugcuugaacuccugguagguauauaccccagcggaguuauuggccuggucccucaucucggcgaccgcgaaaagcgagauagcguguguccccagggaaaguauauccacccccagaauaauaguaucuguugcaccaagugccacaaaggaacauauuuauauaacgacugccccggaccugggcaggacacugacuguagagaaugcgaaucuggcuccuuuaccgccuccgagaaucaccugcgacacugcuugagcuguuccaaaugcagaaaagagaugggacagguugaaaucucaucaugcacaguggaucgcgauaccgucugcgguuguagaaagaaccaauacagacauuacuggucagagaacuuguuccaauguuuuaauuguagccucugccugaacggaaccguccaccugucuugccaagagaaacagaauaccguaugcacgugccacgcuggauuuuuccugcgcgaaaaugaaugugucuccugcagcaacugcaagaagucuuuggaauguaccaagcuguguuuaccucaaauugagaaugucaagggaaccgaagauucagguacaaccguucugcugccacucgugaucuucuucgggcuuugccuccuuucucugcucuucauuggguuaauguauagauaucagagguggaagagcaagcucuacucaauagucugcggcaaauccacgccagagaaagagggcgaguuagaggguaccaccacaaagccacuggcgccaaacccaaguuucagucccacacccggcuuuacaccaacacucggcuuuucucccguuccuaguagcacauucacgaguuccucuaccuauaccccuggcgacugcccaaauuucgcugccccacggcgcgaagucgccccaccauaucagggagcagacccaauccuggcuaccgcgcuugcauccgauccuauccccaacccucuucagaaaugggaagacuccgcgcacaagccccagucauuagauaccgacgacccugccacacuuuaugccgugguggagaacguaccuccuuugcgcuggaaagaauucguacgccgccuaggccugucugaccaugagauugaccgccuagaacuucagaauggacguugccugagggaggcucaguauucaaugcucgcaacguggcgcagaagaacgccucgccgagaagcaacacucgaacucuuaggacgcguguuacgcgacauggaccugcugggguguuuggaagauaucgaagaagcucugugcggacccgcugcauuaccaccugcucccucccuguuaagguag

SEQ ID NO: 34444 - RNA, 657 nt, Artificial Sequence
  derived and/or modified sequence
augggccucucgaccgugccagaucuauuauugccacugguauugcuggaacugcugguaggcaucuacccuucaggggugauaggguugguuccucacuuaggcgaccgcgaaaaaagagauuccguuuguccacaagggaaauauauccauccccaaaacaacaguauuugcugcaccaagugccauaagggaacauaccuguauaaugacuguccagguccaggccaggacacugacugccgcgaaugugaguccggaagcuuuacugccagcgagaaccaucugcgucauugucuguccuguuccaaaugucggaaggagaugggccagguggagauuucaagcugcacugucgauagagauaccguguguggcugucggaaaaaccaauaucgccacuauuggucugagaaccuuuuucagugcuuuaauugcucccugugucucaaugguaccgugcaccuauccugucaggaaaagcaaaacacaguguguaccugccaugccggauucuuucugcgcgaaaacgagugugucucauguucuaaagugcuguugugccgacccggguggaaugcuguugcccggucucgccugaccgcaaccuccgccagccagauacaagcgauucuccuuuuacaaccacccaaauag

SEQ ID NO: 34445 - protein, 1554 aa, Artificial Sequence
  derived and/or modified sequence
QVSPSHPVNENMQVNKIKKNEDAKKRLSVERIYQKKTQLEHILLRPDTYIGSVELVTQQMWVYDEDVGINYREVTFVPGLYKIFDEILVNAADNKQRDPKMSCIRVTIDPENNLISIWNNGKGIPVVEHKVEKMYVPALIFGQLLTSSNYDDDEKKVTGGRNGYGAKLCNIFSTKFTVETASREYKKMFKQTWMDNMGRAGEMELKPFNGEDYTCITFQPDLSKFKMQSLDKDIVALMVRRAYDIAGSTKDVKVFLNGNKLPVKGFRSYVDMYLKDKLDETGNSLKVIHEQVNHRWEVCLTMSEKGFQQISFVNSIATSKGGRHVDYVADQIVTKLVDVVKKKNKGGVAVKAHQVKNHMWIFVNALIENPTFDSQTKENMTLQPKSFGSTCQLSEKFIKAAHLYSRFLIDPFFPNMIPNMNLFQAIGCGIVESILNWVKFKAQVQLNKKCSAVKHNRIKGIPKLDDANDAGGRNSTECTLILTEGDSAKTLAVSGLGVVGRDKYGVFPLRGKILNVREASHKQIMENAEINNIIKIVGLQYKKNYEDEDSLKTLRYGKIMIMTDQDQDGSHIKGLLINFIHHNWPSLLRHRFLEEFITPIVKVSKNKQEMAFYSLPEFEEWKSSTPNHKKWKVKYYKGLGTSTSKEAKEYFADMKRHRIQFKYSGPEDDAAISLAFSKKQIDDRKEWLTNFMEDRRQRKLLGLPEDYLYGQTTTYLTYNDFINKELILFSNSDNERSIPSMVDGLKPGQRKVLFTCFKRNDKREVKVAQLAGSVAEMSSYHHGEMSLMMTIINLAQNFVGSNNLNLLQPIGQFGTRLHGGKDSASPRYIFTMLSSLARLLFPPKDDHTLKFLYDDNQRVEPEWYIPIIPMVLINGAEGIGTGWSCKIPNFDVREIVNNIRRLMDGEEPLPMLPSYKNFKGTIEELAPNQYVISGEVAILNSTTIEISELPVRTWTQTYKEQVLEPMLNGTEKTPPLITDYREYHTDTTVKFVVKMTEEKLAEAERVGLHKVFKLQTSLTCNSMVLFDHVGCLKKYDTVLDILRDFFELRLKYYGLRKEWLLGMLGAESAKLNNQARFILEKIDGKIIIENKPKKELIKVLIQRGYDSDPVKAWKEAQQKVPDEEENEESDNEKETEKSDSVTDSGPTFNYLLDMPLWYLTKEKKDELCRLRNEKEQELDTLKRKSPSDLWKEDLATFIEELEAVEAKEKQDEQVGLPGKGGKAKGKKTQMAEVLPSPRGQRVIPRITIEMKAEAEKKNKKKIKNENTEGSPQEDGVELEGLKQRLEKKQKREPGTKTKKQTTLAFKPIKKGKKRNPWSDSESDRSSDESNFDVPPRETEPRRAATKTKFTMDLDSDEDFSDFDEKTDDEDFVPSDASPPKTKTSPKLSNKELKPQKSVVSDLEADDVKGSVPLSSSPPATHFPDETEITNPVPKKNVTVKKTAAKSQSSTSTTGAKKRAAPKGTKRDPALNSGVSQKPDPAKTKNRRKRKPSTSDDSDSNFEKIVSKAVTSKKSKGESDDFHMDFDSAVAPRAKSVRAKKPIKYLEESDEDDLF

SEQ ID NO: 34446 - protein, 1568 aa, Artificial Sequence
  derived and/or modified sequence
MEVSPLQPVNENMQVNKIKKNEDAKKRLSVERIYQKKTQLEHILLRPDTYIGSVELVTQQMWVYDEDVGINYREVTFVPGLYKIFDEILVNAADNKQRDPKMSCIRVTIDPENNLISIWNNGKGIPVVEHKVEKMYVPALIFGQLLTSSNYDDDEKKVTGGRNGYGAKLCNIFSTKFTVETASREYKKMFKQAITWMDNMGRAGEMELKPFNGEDYTCITFQPDLSKFKMQSLDKDIVALMVRRAYDIAGSTKDVKVFLNGNKLPVKGFRSYVDMYLKDKLDETGNSLKVIHEQVNHRWEVCLTMSEKGFQQISFVNSIATSKVILFLNYMIYLYIYVFLLFLIYKVDLNIGLAYFTGGRHVDYVADQIVTKLVDVVKKKNKGGVAVKAHQVKNHMWIFVNALIENPTFDSQTKENMTLQPKSFGSTCQLSEKFIKAAIGCGIVESILNWVKFKAQVQLNKKCSAVKHNRIKGIPKLDDANDAGGRNSTECTLILTEGDSAKTLAVSGLGVVGRDKYGVFPLRGKILNVREASHKQIMENAEINNIIKIVGLQYKKNYEDEDSLKTLRYGKIMIMTDQDQDGSHIKGLLINFIHHNWPSLLRHRFLEEFITPIVKVSKNKQEMAFYSLPEFEEWKSSTPNHKKWKVKYYKGLGTSTSKEAKEYFADMKRHRIQFKYSGPEDDAAISLAFSKKQIDDRKEWLTNFMEDRRQRKLLGLPEDYLYGQTTTYLTYNDFINKELILFSNSDNERSIPSMVDGLKPGQRKVLFTCFKRNDKREVKVAQLAGSVAEMSSYHHGEMSLMMTIINLAQNFVGSNNLNLLQPIGQFGTRLHGGKDSASPRYIFTMLSSLARLLFPPKDDHTLKFLYDDNQRVEPEWYIPIIPMVLINGAEGIGTGWSCKIPNFDVREIVNNIRRLMDGEEPLPMLPSYKNFKGTIEELAPNQYVISGEVAILNSTTIEISELPVRTWTQTYKEQVLEPMLNGTEKTPPLITDYREYHTDTTVKFVVKMTEEKLAEAERVGLHKVFKLQTSLTCNSMVLFDHVGCLKKYDTVLDILRDFFELRLKYYGLRKEWLLGMLGAESAKLNNQARFILEKIDGKIIIENKPKKELIKVLIQRGYDSDPVKAWKEAQQKVPDEEENEESDNEKETEKSDSVTDSGPTFNYLLDMPLWYLTKEKKDELCRLRNEKEQELDTLKRKSPSDLWKEDLATFIEELEAVEAKEKQDEQVGLPGKGGKAKGKKTQMAEVLPSPRGQRVIPRITIEMKAEAEKKNKKKIKNENTEGSPQEDGVELEGLKQRLEKKQKREPGTKTKKQTTLAFKPIKKGKKRNPWSDSESDRSSDESNFDVPPRETEPRRAATKTKFTMDLDSDEDFSDFDEKTDDEDFVPSDASPPKTKTSPKQNCNKELKPQKSVVSDLEADDVKGSVPLSSSPPATHFPDETEITNPVPKKNVTVKKTAAKSQSSTSTTGAKKRAAPKGTKRDPALNSGVSQKPDPAKTKNRRKRKPSTSDDSDSNFEKIVSKAVTSKKSKGESDDFHMDFDSAVAPRAKSVRAKKPIKYLEESDEDDLF

SEQ ID NO: 34447 - protein, 1531 aa, Artificial Sequence
  derived and/or modified sequence
MEVSPLQPVNENMQVNKIKKNEDAKKRLSVERIYQKKTQLEHILLRPDTYIGSVELVTQQMWVYDEDVGINYREVTFVPGLYKIFDEILVNAADNKQRDPKMSCIRVTIDPENNLISIWNNGKGIPVVEHKVEKMYVPALIFGQLLTSSNYDDDEKKVTGGRNGYGAKLCNIFSTKFTVETASREYKKMFKQTWMDNMGRAGEMELKPFNGEDYTCITFQPDLSKFKMQSLDKDIVALMVRRAYDIAGSTKDVKVFLNGNKLPVKGFRSYVDMYLKDKLDETGNSLKVIHEQVNHRWEVCLTMSEKGFQQISFVNSIATSKGGRHVDYVADQIVTKLVDVVKKKNKGGVAVKAHQVKNHMWIFVNALIENPTFDSQTKENMTLQPKSFGSTCQLSEKFIKAAIGCGIVESILNWVKFKAQVQLNKKCSAVKHNRIKGIPKLDDANDAGGRNSTECTLILTEGDSAKTLAVSGLGVVGRDKYGVFPLRGKILNVREASHKQIMENAEINNIIKIVGLQYKKNYEDEDSLKTLRYGKIMIMTDQDQDGSHIKGLLINFIHHNWPSLLRHRFLEEFITPIVKVSKNKQEMAFYSLPEFEEWKSSTPNHKKWKVKYYKGLGTSTSKEAKEYFADMKRHRIQFKYSGPEDDAAISLAFSKKQIDDRKEWLTNFMEDRRQRKLLGLPEDYLYGQTTTYLTYNDFINKELILFSNSDNERSIPSMVDGLKPGQRKVLFTCFKRNDKREVKVAQLAGSVAEMSSYHHGEMSLMMTIINLAQNFVGSNNLNLLQPIGQFGTRLHGGKDSASPRYIFTMLSSLARLLFPPKDDHTLKFLYDDNQRVEPEWYIPIIPMVLINGAEGIGTGWSCKIPNFDVREIVNNIRRLMDGEEPLPMLPSYKNFKGTIEELAPNQYVISGEVAILNSTTIEISELPVRTWTQTYKEQVLEPMLNGTEKTPPLITDYREYHTDTTVKFVVKMTEEKLAEAERVGLHKVFKLQTSLTCNSMVLFDHVGCLKKYDTVLDILRDFFELRLKYYGLRKEWLLGMLGAESAKLNNQARFILEKIDGKIIIENKPKKELIKVLIQRGYDSDPVKAWKEAQQKVPDEEENEESDNEKETEKSDSVTDSGPTFNYLLDMPLWYLTKEKKDELCRLRNEKEQELDTLKRKSPSDLWKEDLATFIEELEAVEAKEKQDEQVGLPGKGGKAKGKKTQMAEVLPSPRGQRVIPRITIEMKAEAEKKNKKKIKNENTEGSPQEDGVELEGLKQRLEKKQKREPGTKTKKQTTLAFKPIKKGKKRNPWSDSESDRSSDESNFDVPPRETEPRRAATKTKFTMDLDSDEDFSDFDEKTDDEDFVPSDASPPKTKTSPKLSNKELKPQKSVVSDLEADDVKGSVPLSSSPPATHFPDETEITNPVPKKNVTVKKTAAKSQSSTSTTGAKKRAAPKGTKRDPALNSGVSQKPDPAKTKNRRKRKPSTSDDSDSNFEKIVSKAVTSKKSKGESDDFHMDFDSAVAPRAKSVRAKKPIKYLEESDEDDLF

SEQ ID NO: 34448 - DNA, 4665 bp, Artificial Sequence
  derived and/or modified sequence
caggtgagccccagccaccccgtgaacgagaacatgcaggtgaacaagatcaagaagaacgaggacgccaagaagagactgagcgtggagagaatctaccagaagaagacccagctggagcacatcctgctgagacccgacacctacatcggcagcgtggagctggtgacccagcagatgtgggtgtacgacgaggacgtgggcatcaactacagagaggtgaccttcgtgcccggcctgtacaagatcttcgacgagatcctggtgaacgccgccgacaacaagcagagagaccccaagatgagctgcatcagagtgaccatcgaccccgagaacaacctgatcagcatctggaacaacggcaagggcatccccgtggtggagcacaaggtggagaagatgtacgtgcccgccctgatcttcggccagctgctgaccagcagcaactacgacgacgacgagaagaaggtgaccggcggcagaaacggctacggcgccaagctgtgcaacatcttcagcaccaagttcaccgtggagaccgccagcagagagtacaagaagatgttcaagcagacctggatggacaacatgggcagagccggcgagatggagctgaagcccttcaacggcgaggactacacctgcatcaccttccagcccgacctgagcaagttcaagatgcagagcctggacaaggacatcgtggccctgatggtgagaagagcctacgacatcgccggcagcaccaaggacgtgaaggtgttcctgaacggcaacaagctgcccgtgaagggcttcagaagctacgtggacatgtacctgaaggacaagctggacgagaccggcaacagcctgaaggtgatccacgagcaggtgaaccacagatgggaggtgtgcctgaccatgagcgagaagggcttccagcagatcagcttcgtgaacagcatcgccaccagcaagggcggcagacacgtggactacgtggccgaccagatcgtgaccaagctggtggacgtggtgaagaagaagaacaagggcggcgtggccgtgaaggcccaccaggtgaagaaccacatgtggatcttcgtgaacgccctgatcgagaaccccaccttcgacagccagaccaaggagaacatgaccctgcagcccaagagcttcggcagcacctgccagctgagcgagaagttcatcaaggccgcccacctgtacagcagattcctgatcgaccccttcttccccaacatgatccccaacatgaacctgttccaggccatcggctgcggcatcgtggagagcatcctgaactgggtgaagttcaaggcccaggtgcagctgaacaagaagtgcagcgccgtgaagcacaacagaatcaagggcatccccaagctggacgacgccaacgacgccggcggcagaaacagcaccgagtgcaccctgatcctgaccgagggcgacagcgccaagaccctggccgtgagcggcctgggcgtggtgggcagagacaagtacggcgtgttccccctgagaggcaagatcctgaacgtgagagaggccagccacaagcagatcatggagaacgccgagatcaacaacatcatcaagatcgtgggcctgcagtacaagaagaactacgaggacgaggacagcctgaagaccctgagatacggcaagatcatgatcatgaccgaccaggaccaggacggcagccacatcaagggcctgctgatcaacttcatccaccacaactggcccagcctgctgagacacagattcctggaggagttcatcacccccatcgtgaaggtgagcaagaacaagcaggagatggccttctacagcctgcccgagttcgaggagtggaagagcagcacccccaaccacaagaagtggaaggtgaagtactacaagggcctgggcaccagcaccagcaaggaggccaaggagtacttcgccgacatgaagagacacagaatccagttcaagtacagcggccccgaggacgacgccgccatcagcctggccttcagcaagaagcagatcgacgacagaaaggagtggctgaccaacttcatggaggacagaagacagagaaagctgctgggcctgcccgaggactacctgtacggccagaccaccacctacctgacctacaacgacttcatcaacaaggagctgatcctgttcagcaacagcgacaacgagagaagcatccccagcatggtggacggcctgaagcccggccagagaaaggtgctgttcacctgcttcaagagaaacgacaagagagaggtgaaggtggcccagctggccggcagcgtggccgagatgagcagctaccaccacggcgagatgagcctgatgatgaccatcatcaacctggcccagaacttcgtgggcagcaacaacctgaacctgctgcagcccatcggccagttcggcaccagactgcacggcggcaaggacagcgccagccccagatacatcttcaccatgctgagcagcctggccagactgctgttcccccccaaggacgaccacaccctgaagttcctgtacgacgacaaccagagagtggagcccgagtggtacatccccatcatccccatggtgctgatcaacggcgccgagggcatcggcaccggctggagctgcaagatccccaacttcgacgtgagagagatcgtgaacaacatcagaagactgatggacggcgaggagcccctgcccatgctgcccagctacaagaacttcaagggcaccatcgaggagctggcccccaaccagtacgtgatcagcggcgaggtggccatcctgaacagcaccaccatcgagatcagcgagctgcccgtgagaacctggacccagacctacaaggagcaggtgctggagcccatgctgaacggcaccgagaagaccccccccctgatcaccgactacagagagtaccacaccgacaccaccgtgaagttcgtggtgaagatgaccgaggagaagctggccgaggccgagagagtgggcctgcacaaggtgttcaagctgcagaccagcctgacctgcaacagcatggtgctgttcgaccacgtgggctgcctgaagaagtacgacaccgtgctggacatcctgagagacttcttcgagctgagactgaagtactacggcctgagaaaggagtggctgctgggcatgctgggcgccgagagcgccaagctgaacaaccaggccagattcatcctggagaagatcgacggcaagatcatcatcgagaacaagcccaagaaggagctgatcaaggtgctgatccagagaggctacgacagcgaccccgtgaaggcctggaaggaggcccagcagaaggtgcccgacgaggaggagaacgaggagagcgacaacgagaaggagaccgagaagagcgacagcgtgaccgacagcggccccaccttcaactacctgctggacatgcccctgtggtacctgaccaaggagaagaaggacgagctgtgcagactgagaaacgagaaggagcaggagctggacaccctgaagagaaagagccccagcgacctgtggaaggaggacctggccaccttcatcgaggagctggaggccgtggaggccaaggagaagcaggacgagcaggtgggcctgcccggcaagggcggcaaggccaagggcaagaagacccagatggccgaggtgctgcccagccccagaggccagagagtgatccccagaatcaccatcgagatgaaggccgaggccgagaagaagaacaagaagaagatcaagaacgagaacaccgagggcagcccccaggaggacggcgtggagctggagggcctgaagcagagactggagaagaagcagaagagagagcccggcaccaagaccaagaagcagaccaccctggccttcaagcccatcaagaagggcaagaagagaaacccctggagcgacagcgagagcgacagaagcagcgacgagagcaacttcgacgtgccccccagagagaccgagcccagaagagccgccaccaagaccaagttcaccatggacctggacagcgacgaggacttcagcgacttcgacgagaagaccgacgacgaggacttcgtgcccagcgacgccagcccccccaagaccaagaccagccccaagctgagcaacaaggagctgaagccccagaagagcgtggtgagcgacctggaggccgacgacgtgaagggcagcgtgcccctgagcagcagcccccccgccacccacttccccgacgagaccgagatcaccaaccccgtgcccaagaagaacgtgaccgtgaagaagaccgccgccaagagccagagcagcaccagcaccaccggcgccaagaagagagccgcccccaagggcaccaagagagaccccgccctgaacagcggcgtgagccagaagcccgaccccgccaagaccaagaacagaagaaagagaaagcccagcaccagcgacgacagcgacagcaacttcgagaagatcgtgagcaaggccgtgaccagcaagaagagcaagggcgagagcgacgacttccacatggacttcgacagcgccgtggcccccagagccaagagcgtgagagccaagaagcccatcaagtacctggaggagagcgacgaggacgacctgttctag

SEQ ID NO: 34449 - DNA, 4707 bp, Artificial Sequence
  derived and/or modified sequence
atggaggtgagccccctgcagcccgtgaacgagaacatgcaggtgaacaagatcaagaagaacgaggacgccaagaagagactgagcgtggagagaatctaccagaagaagacccagctggagcacatcctgctgagacccgacacctacatcggcagcgtggagctggtgacccagcagatgtgggtgtacgacgaggacgtgggcatcaactacagagaggtgaccttcgtgcccggcctgtacaagatcttcgacgagatcctggtgaacgccgccgacaacaagcagagagaccccaagatgagctgcatcagagtgaccatcgaccccgagaacaacctgatcagcatctggaacaacggcaagggcatccccgtggtggagcacaaggtggagaagatgtacgtgcccgccctgatcttcggccagctgctgaccagcagcaactacgacgacgacgagaagaaggtgaccggcggcagaaacggctacggcgccaagctgtgcaacatcttcagcaccaagttcaccgtggagaccgccagcagagagtacaagaagatgttcaagcaggccatcacctggatggacaacatgggcagagccggcgagatggagctgaagcccttcaacggcgaggactacacctgcatcaccttccagcccgacctgagcaagttcaagatgcagagcctggacaaggacatcgtggccctgatggtgagaagagcctacgacatcgccggcagcaccaaggacgtgaaggtgttcctgaacggcaacaagctgcccgtgaagggcttcagaagctacgtggacatgtacctgaaggacaagctggacgagaccggcaacagcctgaaggtgatccacgagcaggtgaaccacagatgggaggtgtgcctgaccatgagcgagaagggcttccagcagatcagcttcgtgaacagcatcgccaccagcaaggtgatcctgttcctgaactacatgatctacctgtacatctacgtgttcctgctgttcctgatctacaaggtggacctgaacatcggcctggcctacttcaccggcggcagacacgtggactacgtggccgaccagatcgtgaccaagctggtggacgtggtgaagaagaagaacaagggcggcgtggccgtgaaggcccaccaggtgaagaaccacatgtggatcttcgtgaacgccctgatcgagaaccccaccttcgacagccagaccaaggagaacatgaccctgcagcccaagagcttcggcagcacctgccagctgagcgagaagttcatcaaggccgccatcggctgcggcatcgtggagagcatcctgaactgggtgaagttcaaggcccaggtgcagctgaacaagaagtgcagcgccgtgaagcacaacagaatcaagggcatccccaagctggacgacgccaacgacgccggcggcagaaacagcaccgagtgcaccctgatcctgaccgagggcgacagcgccaagaccctggccgtgagcggcctgggcgtggtgggcagagacaagtacggcgtgttccccctgagaggcaagatcctgaacgtgagagaggccagccacaagcagatcatggagaacgccgagatcaacaacatcatcaagatcgtgggcctgcagtacaagaagaactacgaggacgaggacagcctgaagaccctgagatacggcaagatcatgatcatgaccgaccaggaccaggacggcagccacatcaagggcctgctgatcaacttcatccaccacaactggcccagcctgctgagacacagattcctggaggagttcatcacccccatcgtgaaggtgagcaagaacaagcaggagatggccttctacagcctgcccgagttcgaggagtggaagagcagcacccccaaccacaagaagtggaaggtgaagtactacaagggcctgggcaccagcaccagcaaggaggccaaggagtacttcgccgacatgaagagacacagaatccagttcaagtacagcggccccgaggacgacgccgccatcagcctggccttcagcaagaagcagatcgacgacagaaaggagtggctgaccaacttcatggaggacagaagacagagaaagctgctgggcctgcccgaggactacctgtacggccagaccaccacctacctgacctacaacgacttcatcaacaaggagctgatcctgttcagcaacagcgacaacgagagaagcatccccagcatggtggacggcctgaagcccggccagagaaaggtgctgttcacctgcttcaagagaaacgacaagagagaggtgaaggtggcccagctggccggcagcgtggccgagatgagcagctaccaccacggcgagatgagcctgatgatgaccatcatcaacctggcccagaacttcgtgggcagcaacaacctgaacctgctgcagcccatcggccagttcggcaccagactgcacggcggcaaggacagcgccagccccagatacatcttcaccatgctgagcagcctggccagactgctgttcccccccaaggacgaccacaccctgaagttcctgtacgacgacaaccagagagtggagcccgagtggtacatccccatcatccccatggtgctgatcaacggcgccgagggcatcggcaccggctggagctgcaagatccccaacttcgacgtgagagagatcgtgaacaacatcagaagactgatggacggcgaggagcccctgcccatgctgcccagctacaagaacttcaagggcaccatcgaggagctggcccccaaccagtacgtgatcagcggcgaggtggccatcctgaacagcaccaccatcgagatcagcgagctgcccgtgagaacctggacccagacctacaaggagcaggtgctggagcccatgctgaacggcaccgagaagaccccccccctgatcaccgactacagagagtaccacaccgacaccaccgtgaagttcgtggtgaagatgaccgaggagaagctggccgaggccgagagagtgggcctgcacaaggtgttcaagctgcagaccagcctgacctgcaacagcatggtgctgttcgaccacgtgggctgcctgaagaagtacgacaccgtgctggacatcctgagagacttcttcgagctgagactgaagtactacggcctgagaaaggagtggctgctgggcatgctgggcgccgagagcgccaagctgaacaaccaggccagattcatcctggagaagatcgacggcaagatcatcatcgagaacaagcccaagaaggagctgatcaaggtgctgatccagagaggctacgacagcgaccccgtgaaggcctggaaggaggcccagcagaaggtgcccgacgaggaggagaacgaggagagcgacaacgagaaggagaccgagaagagcgacagcgtgaccgacagcggccccaccttcaactacctgctggacatgcccctgtggtacctgaccaaggagaagaaggacgagctgtgcagactgagaaacgagaaggagcaggagctggacaccctgaagagaaagagccccagcgacctgtggaaggaggacctggccaccttcatcgaggagctggaggccgtggaggccaaggagaagcaggacgagcaggtgggcctgcccggcaagggcggcaaggccaagggcaagaagacccagatggccgaggtgctgcccagccccagaggccagagagtgatccccagaatcaccatcgagatgaaggccgaggccgagaagaagaacaagaagaagatcaagaacgagaacaccgagggcagcccccaggaggacggcgtggagctggagggcctgaagcagagactggagaagaagcagaagagagagcccggcaccaagaccaagaagcagaccaccctggccttcaagcccatcaagaagggcaagaagagaaacccctggagcgacagcgagagcgacagaagcagcgacgagagcaacttcgacgtgccccccagagagaccgagcccagaagagccgccaccaagaccaagttcaccatggacctggacagcgacgaggacttcagcgacttcgacgagaagaccgacgacgaggacttcgtgcccagcgacgccagcccccccaagaccaagaccagccccaagcagaactgcaacaaggagctgaagccccagaagagcgtggtgagcgacctggaggccgacgacgtgaagggcagcgtgcccctgagcagcagcccccccgccacccacttccccgacgagaccgagatcaccaaccccgtgcccaagaagaacgtgaccgtgaagaagaccgccgccaagagccagagcagcaccagcaccaccggcgccaagaagagagccgcccccaagggcaccaagagagaccccgccctgaacagcggcgtgagccagaagcccgaccccgccaagaccaagaacagaagaaagagaaagcccagcaccagcgacgacagcgacagcaacttcgagaagatcgtgagcaaggccgtgaccagcaagaagagcaagggcgagagcgacgacttccacatggacttcgacagcgccgtggcccccagagccaagagcgtgagagccaagaagcccatcaagtacctggaggagagcgacgaggacgacctgttctag

SEQ ID NO: 34450 - DNA, 4596 bp, Artificial Sequence
  derived and/or modified sequence
atggaggtgagccccctgcagcccgtgaacgagaacatgcaggtgaacaagatcaagaagaacgaggacgccaagaagagactgagcgtggagagaatctaccagaagaagacccagctggagcacatcctgctgagacccgacacctacatcggcagcgtggagctggtgacccagcagatgtgggtgtacgacgaggacgtgggcatcaactacagagaggtgaccttcgtgcccggcctgtacaagatcttcgacgagatcctggtgaacgccgccgacaacaagcagagagaccccaagatgagctgcatcagagtgaccatcgaccccgagaacaacctgatcagcatctggaacaacggcaagggcatccccgtggtggagcacaaggtggagaagatgtacgtgcccgccctgatcttcggccagctgctgaccagcagcaactacgacgacgacgagaagaaggtgaccggcggcagaaacggctacggcgccaagctgtgcaacatcttcagcaccaagttcaccgtggagaccgccagcagagagtacaagaagatgttcaagcagacctggatggacaacatgggcagagccggcgagatggagctgaagcccttcaacggcgaggactacacctgcatcaccttccagcccgacctgagcaagttcaagatgcagagcctggacaaggacatcgtggccctgatggtgagaagagcctacgacatcgccggcagcaccaaggacgtgaaggtgttcctgaacggcaacaagctgcccgtgaagggcttcagaagctacgtggacatgtacctgaaggacaagctggacgagaccggcaacagcctgaaggtgatccacgagcaggtgaaccacagatgggaggtgtgcctgaccatgagcgagaagggcttccagcagatcagcttcgtgaacagcatcgccaccagcaagggcggcagacacgtggactacgtggccgaccagatcgtgaccaagctggtggacgtggtgaagaagaagaacaagggcggcgtggccgtgaaggcccaccaggtgaagaaccacatgtggatcttcgtgaacgccctgatcgagaaccccaccttcgacagccagaccaaggagaacatgaccctgcagcccaagagcttcggcagcacctgccagctgagcgagaagttcatcaaggccgccatcggctgcggcatcgtggagagcatcctgaactgggtgaagttcaaggcccaggtgcagctgaacaagaagtgcagcgccgtgaagcacaacagaatcaagggcatccccaagctggacgacgccaacgacgccggcggcagaaacagcaccgagtgcaccctgatcctgaccgagggcgacagcgccaagaccctggccgtgagcggcctgggcgtggtgggcagagacaagtacggcgtgttccccctgagaggcaagatcctgaacgtgagagaggccagccacaagcagatcatggagaacgccgagatcaacaacatcatcaagatcgtgggcctgcagtacaagaagaactacgaggacgaggacagcctgaagaccctgagatacggcaagatcatgatcatgaccgaccaggaccaggacggcagccacatcaagggcctgctgatcaacttcatccaccacaactggcccagcctgctgagacacagattcctggaggagttcatcacccccatcgtgaaggtgagcaagaacaagcaggagatggccttctacagcctgcccgagttcgaggagtggaagagcagcacccccaaccacaagaagtggaaggtgaagtactacaagggcctgggcaccagcaccagcaaggaggccaaggagtacttcgccgacatgaagagacacagaatccagttcaagtacagcggccccgaggacgacgccgccatcagcctggccttcagcaagaagcagatcgacgacagaaaggagtggctgaccaacttcatggaggacagaagacagagaaagctgctgggcctgcccgaggactacctgtacggccagaccaccacctacctgacctacaacgacttcatcaacaaggagctgatcctgttcagcaacagcgacaacgagagaagcatccccagcatggtggacggcctgaagcccggccagagaaaggtgctgttcacctgcttcaagagaaacgacaagagagaggtgaaggtggcccagctggccggcagcgtggccgagatgagcagctaccaccacggcgagatgagcctgatgatgaccatcatcaacctggcccagaacttcgtgggcagcaacaacctgaacctgctgcagcccatcggccagttcggcaccagactgcacggcggcaaggacagcgccagccccagatacatcttcaccatgctgagcagcctggccagactgctgttcccccccaaggacgaccacaccctgaagttcctgtacgacgacaaccagagagtggagcccgagtggtacatccccatcatccccatggtgctgatcaacggcgccgagggcatcggcaccggctggagctgcaagatccccaacttcgacgtgagagagatcgtgaacaacatcagaagactgatggacggcgaggagcccctgcccatgctgcccagctacaagaacttcaagggcaccatcgaggagctggcccccaaccagtacgtgatcagcggcgaggtggccatcctgaacagcaccaccatcgagatcagcgagctgcccgtgagaacctggacccagacctacaaggagcaggtgctggagcccatgctgaacggcaccgagaagaccccccccctgatcaccgactacagagagtaccacaccgacaccaccgtgaagttcgtggtgaagatgaccgaggagaagctggccgaggccgagagagtgggcctgcacaaggtgttcaagctgcagaccagcctgacctgcaacagcatggtgctgttcgaccacgtgggctgcctgaagaagtacgacaccgtgctggacatcctgagagacttcttcgagctgagactgaagtactacggcctgagaaaggagtggctgctgggcatgctgggcgccgagagcgccaagctgaacaaccaggccagattcatcctggagaagatcgacggcaagatcatcatcgagaacaagcccaagaaggagctgatcaaggtgctgatccagagaggctacgacagcgaccccgtgaaggcctggaaggaggcccagcagaaggtgcccgacgaggaggagaacgaggagagcgacaacgagaaggagaccgagaagagcgacagcgtgaccgacagcggccccaccttcaactacctgctggacatgcccctgtggtacctgaccaaggagaagaaggacgagctgtgcagactgagaaacgagaaggagcaggagctggacaccctgaagagaaagagccccagcgacctgtggaaggaggacctggccaccttcatcgaggagctggaggccgtggaggccaaggagaagcaggacgagcaggtgggcctgcccggcaagggcggcaaggccaagggcaagaagacccagatggccgaggtgctgcccagccccagaggccagagagtgatccccagaatcaccatcgagatgaaggccgaggccgagaagaagaacaagaagaagatcaagaacgagaacaccgagggcagcccccaggaggacggcgtggagctggagggcctgaagcagagactggagaagaagcagaagagagagcccggcaccaagaccaagaagcagaccaccctggccttcaagcccatcaagaagggcaagaagagaaacccctggagcgacagcgagagcgacagaagcagcgacgagagcaacttcgacgtgccccccagagagaccgagcccagaagagccgccaccaagaccaagttcaccatggacctggacagcgacgaggacttcagcgacttcgacgagaagaccgacgacgaggacttcgtgcccagcgacgccagcccccccaagaccaagaccagccccaagctgagcaacaaggagctgaagccccagaagagcgtggtgagcgacctggaggccgacgacgtgaagggcagcgtgcccctgagcagcagcccccccgccacccacttccccgacgagaccgagatcaccaaccccgtgcccaagaagaacgtgaccgtgaagaagaccgccgccaagagccagagcagcaccagcaccaccggcgccaagaagagagccgcccccaagggcaccaagagagaccccgccctgaacagcggcgtgagccagaagcccgaccccgccaagaccaagaacagaagaaagagaaagcccagcaccagcgacgacagcgacagcaacttcgagaagatcgtgagcaaggccgtgaccagcaagaagagcaagggcgagagcgacgacttccacatggacttcgacagcgccgtggcccccagagccaagagcgtgagagccaagaagcccatcaagtacctggaggagagcgacgaggacgacctgttctag

SEQ ID NO: 34451 - DNA, 4665 bp, Artificial Sequence
  derived and/or modified sequence
caggttagtccatcacaccccgtgaacgagaatatgcaggtgaacaagatcaagaagaatgaggacgccaagaagagacttagtgtcgaaaggatataccagaaaaagacccagctcgaacacattctcctgcgtcctgacacgtatataggatccgtggaactggtgacccaacagatgtgggtatatgacgaggacgtcggcattaattatcgcgaagtcaccttcgttcctggtctctataagatttttgatgagatcctcgtgaatgctgccgataacaaacagcgtgatcccaagatgagctgcattagggtcactatagatcctgagaataatctgatctctatttggaacaatggtaaggggattcccgtggtcgaacataaggtcgagaagatgtatgtgccagccctcatcttcggccagttgttgacatcctcgaactacgatgacgacgaaaagaaagtgaccggggggcggaatgggtacggagccaaactgtgcaatattttcagcaccaagttcacagtggaaaccgcaagtcgggagtacaaaaagatgtttaagcaaacctggatggataacatggggcgggctggagaaatggagcttaaaccgttcaacggcgaagactatacatgcatcacattccagcccgacctgagcaaatttaaaatgcaaagtctggataaagatattgttgcacttatggtacgccgtgcatatgacatcgcaggcagcaccaaggacgttaaagtctttctaaacgggaacaagctgcctgtgaaggggttccggagctatgtggacatgtatctcaaggacaaactagatgagacaggcaatagcctgaaggtgatccacgagcaggtgaatcacaggtgggaggtgtgtctgacaatgtcggagaaaggttttcagcagatatctttcgtgaattccatagcgactagcaaaggcgggcggcatgttgattacgttgctgaccaaatagtgacaaagctggtggacgtcgtcaagaaaaagaataaagggggtgtcgctgtgaaagctcaccaggtgaagaaccacatgtggattttcgtaaatgcactgattgagaacccaacatttgactctcagacaaaagagaatatgaccctccaacctaaaagctttggctctacttgccagctctccgaaaagttcataaaagccgcccacctgtacagccgctttcttatcgacccattttttcctaacatgattcccaatatgaatctcttccaagccattggatgtggcatcgtcgaatcgattctgaattgggtaaaatttaaggcgcaggtgcaattgaacaagaagtgcagcgccgtgaagcacaataggatcaagggcattcctaaactggacgatgccaatgatgcagggggcagaaactccaccgagtgcacactcattttgaccgagggtgactccgctaagaccctggctgtttccgggctgggtgtggttggccgagacaaatacggcgtttttcctttacgggggaaaatcctgaatgtccgcgaggcttcgcacaagcagataatggagaatgctgaaataaacaacataatcaagatcgttggattgcagtacaagaaaaactacgaggatgaggactcactgaagactctccgatacggaaagataatgatcatgacagatcaggatcaagacgggtcgcatataaaagggcttctcattaatttcattcatcataattggccatcgcttctcagacatagattcctcgaagagtttataacgcctatcgtgaaggtatctaaaaacaagcaagaaatggctttttactcactaccagagttcgaggaatggaagagctcgactccgaatcataagaagtggaaagtgaagtattacaaggggctgggaactagcacgtccaaagaagccaaggagtacttcgcagatatgaagcggcacaggatccagtttaaatactcaggccccgaagatgacgccgcaatttccctggccttttcgaaaaagcaaatagatgatcgcaaagaatggctgaccaattttatggaagacaggcgccagcgcaagcttttaggcctgccagaggactacttgtatggacagacgaccacctatctcacgtacaacgattttattaacaaagagctcatcctgttttctaactccgataatgaacgttctattccgagcatggtggatggactgaagcctggccagcggaaggtactgttcacatgttttaagcggaacgataagcgagaggtgaaagtggcccagctggccggcagcgtagcagagatgagctcgtaccaccatggcgagatgtcactaatgatgacgatcatcaatttagcccagaatttcgtgggcagtaataacctcaacctattacagcctataggacagtttggaactaggctgcatggcggaaaagattcagccagtcctcgctacattttcaccatgctgagtagcctggctagactgctctttcccccaaaagatgatcacacactaaagtttctgtacgatgataaccagcgcgtggaacctgagtggtacatcccaatcattcccatggttctgatcaacggcgcagaggggatcggaacagggtggtcttgcaagattccaaatttcgacgtgcgcgagattgttaacaatattcggcgtttgatggacggtgaagagccattgccaatgttaccatcctacaaaaatttcaaaggaactattgaggaactggcacccaatcagtatgtgatttctggggaggtcgccattctcaacagcactactatagaaatcagcgaactccccgtgaggacatggactcagacttataaggaacaggtgcttgaacccatgctaaacggcacagagaagacacctcctctgatcacagactatcgggagtaccacacggacaccaccgtgaaatttgttgtgaaaatgacggaggagaaattggccgaagcagagagagtggggcttcacaaggtttttaagctgcaaactagcttaacatgcaactccatggtgttgtttgaccacgtgggctgcctgaagaagtatgacacagtcctagatatcctccgcgacttctttgaactgagactcaaatactacggattgcggaaagagtggttgctaggcatgctgggggctgaaagcgccaagctgaacaatcaggcccgctttatccttgagaagattgatgggaagatcattatcgaaaacaaaccaaagaaggaactgataaaagtgttgatccagagagggtacgattccgatccagttaaagcctggaaggaagcccagcagaaggtaccagatgaggaagagaacgaggagtcagataatgaaaaagagacagaaaagtccgatagcgtcaccgattccggaccgaccttcaactacttgctggatatgcctctgtggtatctgacaaaggagaagaaagacgaactatgccggttaagaaatgaaaaagaacaagagttggacaccctgaagaggaagagcccttccgatctttggaaggaagacctggccacattcatcgaggagctcgaggccgtggaggctaaagaaaaacaggatgaacaggtagggcttccggggaaaggaggtaaagcaaaggggaaaaagacgcaaatggcagaggttctgccttctcctagggggcagcgcgttatccctcgtattactattgagatgaaggctgaagccgagaaaaaaaacaaaaaaaaaataaaaaacgagaacactgaaggaagcccacaagaagacggcgtagagctcgaagggctgaaacagcgcctggagaaaaagcagaagcgagaaccgggaacgaaaacaaaaaaacagactacgcttgccttcaaaccaatcaagaaaggtaagaaaagaaatccttggtccgattcggagtcggaccgcagctcagacgagtccaatttcgacgtgcccccccgagagaccgagcccagaagggccgccaccaagacgaagtttacaatggacctcgattctgacgaggactttagcgatttcgacgaaaaaactgatgatgaagacttcgtgccatcggacgcatccccccctaagaccaaaacctcccccaaattatccaacaaggaacttaaaccccagaaaagcgtcgtttctgacctcgaggctgatgacgtgaaaggctccgtgccgttgagctcaagcccgcccgccacacatttccctgacgaaacggaaataactaatccagtccctaaaaaaaatgtcacggtgaagaagaccgccgcgaagtctcagagtagcacttccactaccggcgccaagaagcgcgccgccccaaaaggaaccaagagggatcctgcgctgaactccggggttagccagaagcctgacccggcaaagacgaaaaatcgcaggaagcgcaaaccgagtacatctgatgactccgattccaatttcgagaagattgtgtctaaagccgttacatcaaagaagagtaagggcgaatcagacgacttccatatggacttcgatagtgccgtggccccccgggctaagagtgtgagagctaaaaagccaatcaaatatcttgaggaatccgatgaggatgaccttttctag

SEQ ID NO: 34452 - DNA, 4707 bp, Artificial Sequence
  derived and/or modified sequence
atggaggtgtcaccgctgcaaccggtcaatgaaaacatgcaagtgaacaagattaaaaagaacgaggacgctaagaagaggcttagcgtggagagaatctaccagaagaaaacacagctggaacatatcctgctcagaccagatacatacatagggagtgttgagctggtaacacaacagatgtgggtgtatgatgaggatgtcggcataaactacagggaagtgacattcgttccgggactgtataaaattttcgacgagatccttgtgaacgctgcggacaacaagcagagagatcctaagatgagttgcatcagagttactatcgaccctgagaacaatctgattagtatctggaacaatggaaaggggatccccgtggtcgagcacaaggtggagaaaatgtatgtcccagcactgatttttgggcagctcttgacctcttctaactatgatgacgacgagaagaaggtgaccggcgggaggaacggttatggagcgaaactctgcaacatcttcagcacaaagttcactgtcgaaacagcaagccgggaatacaaaaagatgttcaagcaggcaatcacttggatggacaatatgggccgggcaggagagatggagctgaaaccctttaatggcgaggattacacctgtatcacatttcagcctgacctgtccaaatttaaaatgcagtctctggacaaggacatcgtggctctaatggttaggcgagcctacgatatagccggcagtacaaaagacgtcaaggtattcctgaacgggaataagctgcccgtaaaaggctttcgctcctatgtggatatgtacctcaaagataagctagatgagactggtaatagcctgaaagtgatccacgagcaggtcaaccaccgatgggaagtctgtttgactatgagtgaaaagggctttcagcaaattagcttcgtaaactccatagcaacctcgaaagtcatcctgtttctcaattacatgatttacttgtacatctacgtgttcctgctgttcctcatttacaaagttgatctgaatatcggtttagcctattttaccggtggacgacacgtggactatgtggcggaccagatagtgaccaagttggtagacgtggtcaagaagaagaacaaaggtggagttgccgtaaaggcacatcaagttaaaaaccacatgtggattttcgtgaacgcactgattgagaaccctacgtttgactcccaaaccaaggaaaatatgacactgcagccaaagagcttcggctctacatgccagctgtcagagaagttcattaaagcagcaattggctgcggcattgttgagagtattttgaattgggtaaaattcaaggctcaggttcaactgaataaaaagtgcagcgcggtcaaacataataggataaagggaattcccaagctggacgatgctaacgacgccggcgggcggaactcaaccgagtgcactttgatcctaactgaaggagatagcgcgaaaacactggctgtatccggactgggcgttgttgggcgagataaatacggcgtatttcctttaagaggaaaaatcttaaatgtgcgcgaagcttctcataaacagatcatggaaaatgccgagatcaataatattattaagatagtaggacttcagtataaaaaaaactatgaagatgaagactcgctgaagactctgaggtatgggaaaattatgatcatgacagatcaggaccaagacggctcccatatcaagggcctcctgatcaacttcatacaccacaattggcccagcctcttgcggcacaggtttctggaggagtttatcactccaattgtgaaggtgtcaaaaaacaaacaggaaatggctttttactctctgcctgaatttgaagaatggaagtcctctactcctaaccataagaaatggaaagttaagtattacaaaggacttggcacttctacctctaaggaggcgaaggaatactttgctgatatgaagaggcataggatccagtttaaatattcaggtcctgaggacgatgctgcaatttctcttgctttttccaaaaaacagatagatgaccggaaagagtggttaacgaactttatggaagacaggcgtcagcggaagctgctgggcctgcccgaggattacttatacggccagactacgacatatctaacgtacaatgatttcattaacaaagaactgatcctgttctcgaattcggacaacgagcggtccatcccaagcatggtggatggactgaagcctgggcagaggaaggtgctcttcacctgctttaaacggaacgacaaacgagaggtgaaagtggcacaattagccggcagtgttgctgagatgagtagctaccatcacggggagatgagcctgatgatgaccataattaatcttgctcagaatttcgttggcagcaataacctcaatctgttacaacctattgggcaattcggaactcgcttgcatggtggaaaagattcggcctccccgcggtacattttcacaatgttgagctctctcgcaagactcttgttccctccaaaagatgaccacaccttgaagtttctctatgacgataaccagagagtggaacccgagtggtacattcccatcatcccaatggttctgatcaatggggcagaggggattggtacaggatggtcatgtaagattccaaacttcgatgttcgtgagatcgtaaataacatccgaagattgatggacggtgaggaaccactgcctatgctacccagctataagaattttaaagggacaatcgaagagcttgcgcccaatcagtatgttatcagtggtgaagttgctattttgaatagtacgaccatcgaaattagcgaactgcccgttcgaacctggacccaaacgtataaggaacaggtgctggaacccatgttaaacggtacagaaaagaccccccctctgatcacagattatagagaataccacacagacactaccgtcaagtttgtggtaaagatgacagaggaaaaactggccgaggcggaaagagtgggtctgcataaggtcttcaaattacagacgtctctgacctgcaatagcatggtcctgtttgaccatgtgggctgtcttaagaaatacgacaccgtcctggatattctccgcgactttttcgaattacgcttaaaatattacggcttgcggaaagaatggctcctaggcatgctcggagcagaatccgccaagctcaataatcaggctaggttcattttagagaagattgatggcaaaataatcatagaaaacaagcctaaaaaggaacttattaaagtactgatccagcggggctacgacagcgatccagtaaaggcctggaaggaggcccagcagaaagtccctgacgaagaggaaaatgaagagagtgataatgagaaggagaccgaaaagagcgactcagtcacggactctggtcccacgttcaattacctactcgacatgccactctggtatctgacaaaggagaaaaaggatgaactttgccgcctgcgcaatgaaaaggagcaagagctagataccctcaagcgcaagagcccatccgacctgtggaaagaggatctggcaacctttatcgaggagttggaggcggtagaggcaaaagaaaagcaagatgagcaagtaggattaccggggaagggcggcaaagctaaggggaagaaaacacagatggctgaggttttgccttcaccccgcggtcagagggtgattccccgtattaccatagagatgaaggccgaggccgagaagaagaataagaaaaaaatcaaaaatgagaacaccgaagggtcaccccaggaggacggagttgagctggagggcctgaaacaacgcctggagaaaaagcagaaaagggagcctggcactaagaccaaaaaacagacgactctcgctttcaaacctatcaagaaggggaaaaaacgcaacccctggtcagacagcgagtcagataggtctagcgatgagagtaactttgacgtccctccccgagagacagagccacgtcgagctgcaaccaagactaaatttaccatggatctggattctgacgaagatttctccgatttcgacgagaaaactgacgatgaggatttcgtgccatccgatgcctccccgcctaagacgaagacttcccccaaacagaattgcaataaagagctgaagccgcaaaaaagcgtggtctctgatcttgaagcggacgacgtgaaaggttcagttccactctcctcgtcacccccagcaactcacttccctgatgaaactgagattaccaatcccgtccccaagaaaaacgtaactgtaaagaagacagccgccaaaagccagagtagtacgtctactacaggcgccaaaaagcgcgcagcgcctaaaggaactaaacgggaccctgccctgaatagtggtgtgtcacagaagccggaccctgcaaaaaccaagaatcgtcgcaaacgcaagccttccaccagcgacgattcggattctaacttcgagaagatcgtctcaaaggccgtgacatcaaagaaatctaaaggggagtccgacgacttccacatggatttcgatagcgcagtcgccccccgcgccaagtcagtaagagccaaaaagcctattaaatacctggaggaatccgacgaagacgacctgttttag

SEQ ID NO: 34453 - DNA, 4596 bp, Artificial Sequence
  derived and/or modified sequence
atggaagtgagcccgctgcagccggtgaacgaaaatatgcaagtcaacaaaattaagaaaaatgaggacgcaaagaaacggctctccgtagagagaatctatcaaaaaaaaacccaactcgaacatatcctgttgcggcccgacacctacattgggtccgtggagttagtgacacagcagatgtgggtgtacgatgaggatgtgggaattaactaccgcgaagtgaccttcgtgccaggactctacaagatcttcgacgaaatcctcgtcaatgcagctgataacaagcaaagagatccaaaaatgagctgtatccgcgtgactattgatcccgagaacaatctcatctccatttggaacaacggaaaaggaattccagtggtggagcataaagtagagaagatgtacgtcccggcgctgatttttggccagctcctgacaagcagcaattatgacgatgatgaaaagaaggtgaccggaggtaggaacggctacggagctaagctgtgtaacatcttttccaccaagtttaccgtagaaaccgccagccgggaatacaagaaaatgtttaaacagacgtggatggacaatatggggcgcgccggggaaatggaattgaagcctttcaatggcgaggactatacatgcatcacatttcagcctgatttatctaagttcaagatgcaatcactcgataaagatatcgttgccctgatggtcaggcgggcttacgatatagcaggcagtaccaaagacgttaaggttttcttgaatggaaataaattgccggtcaaggggttcagatcttacgtcgacatgtatctgaaggataaactggacgagactggcaatagtctcaaagtgatacacgaacaggtaaatcataggtgggaagtctgtctcaccatgagtgagaagggcttccagcagatctcgtttgtcaactccattgctacaagcaaaggcggccgacatgtcgactatgtggccgatcagattgttacaaagcttgtggatgtggtcaaaaagaaaaataaaggtggtgtggcagtcaaagctcaccaggtgaaaaaccatatgtggattttcgtcaatgcactaatcgagaatcctacgttcgattcccaaaccaaagaaaatatgactctgcagccaaaaagttttggctctacatgccagctgtcagaaaaatttatcaaagcagccatcgggtgtggtatagtggagtctatcctgaactgggtcaaattcaaggcacaggtgcagctgaacaaaaaatgcagcgccgtgaaacacaataggatcaaggggatcccaaagttggacgacgccaacgatgctgggggcaggaatagtacagagtgtacattaatacttaccgagggggatagtgctaaaacgctcgccgtatcaggcctgggagttgttggtcgcgacaagtacggggtattccctttgaggggtaagattctgaatgtgagggaagctagtcacaagcaaattatggaaaacgctgagattaacaacatcattaagatagtgggactgcagtataaaaaaaactatgaagacgaagactccctcaaaactcttaggtacggcaaaattatgataatgacagaccaagaccaggacggtagccacatcaaaggactcctcattaacttcatccatcacaattggccctcactgctaagacaccgcttcctagaggagttcatcacccctattgttaaagtgtccaagaacaagcaggaaatggctttctattccctgccagagtttgaagagtggaaaagcagcactcctaatcacaaaaagtggaaagttaagtattataaaggactcggcacgtcaaccagcaaggaagcaaaggaatactttgccgatatgaaacggcatcggatccaatttaaatactctggtcccgaggacgacgccgcaatcagtcttgctttttcaaagaagcagatcgatgacagaaaagagtggctgaccaacttcatggaggaccgtcgtcagagaaaattacttggactgccagaagattacctctatggccaaaccacgacctaccttacttacaacgattttatcaataaggaactgattctttttagcaattccgacaatgaacgctcaatcccctcgatggtcgacggcctgaaaccgggacagcggaaggttctgtttacatgctttaaaagaaatgataagagggaggtgaaggtggcacagctggcgggcagcgtggctgagatgtccagctatcaccatggggagatgagcctgatgatgactatcattaatctggcccagaacttcgtaggatccaataacctgaacctcctgcagcccatcggccaatttggtacaaggttacatggagggaaggattcagcctcaccacgttacatatttacgatgctgtcgagtttagccaggctgctcttcccccctaaggatgatcacacactgaaattcctgtatgatgataatcagcgagtcgagcctgaatggtatattcctatcatcccgatggtgctgattaatggcgcagaggggatcggaactggctggtcgtgcaaaattcctaacttcgacgtgcgtgagatcgtgaacaacatcaggcgcctgatggacggtgaagaacccctcccaatgctgccctcttataaaaactttaaaggaacgatcgaggaactggcccccaaccagtatgtcatctcgggcgaggttgccatcctgaattctacaacgatcgagatttctgagctgcctgtgcggacttggacacagacctataaagaacaggtcctcgagcccatgttgaatgggaccgagaagactccccctctcatcactgattatcgagaatatcacaccgataccactgtaaaattcgtcgtgaaaatgacagaggagaagttggcggaggcagagagggttggcttgcataaggttttcaaattacaaaccagtctcacctgtaactctatggttctgtttgaccatgtggggtgcctgaaaaaatacgataccgtcttggacattctcagggatttcttcgagctgcggttgaagtattacggactccgcaaagagtggctgcttggcatgctaggcgccgagtctgccaagctgaataaccaggcccgattcattctggagaagattgacggcaaaattataatcgaaaataaaccaaagaaagaactcattaaggtattgatccaaaggggttatgattcggatcccgtcaaggcatggaaagaggcgcaacagaaggttccggacgaagaagaaaatgaagagagcgacaatgaaaaggaaaccgaaaaaagtgattcggttaccgacagtgggccaaccttcaactacctgttagacatgcccctgtggtacctaaccaaggaaaagaaagacgaactgtgtcgtctgaggaatgagaaagagcaggagctcgacactttgaagaggaaatctccctccgacctgtggaaagaggatctagccactttcatcgaagagttggaagcagtcgaagcaaaggagaagcaggacgaacaagtggggctccccgggaagggaggcaaggctaagggtaagaaaacccaaatggccgaagtgctgccttcacccagaggccagcgcgtgatcccacgcattacaatcgaaatgaaggccgaagccgaaaagaagaataagaagaagatcaagaatgaaaacaccgagggctcaccccaggaagacggagtggagctcgaaggcctcaaacagagactggaaaaaaagcagaagcgggagccaggaaccaaaacgaagaagcaaaccactctggcctttaagcccattaagaagggcaagaagcgaaatccctggtccgactcagaatctgacagaagctccgacgagtccaactttgatgtgcccccccgggaaacggagccccggagggcggccactaagaccaaatttactatggacctagacagcgacgaagatttcagcgactttgacgagaagaccgatgacgaagacttcgtgccatctgatgccagcccccctaaaaccaaaaccagtccaaagctatctaacaaagaattgaagccccagaagtcagtggtgtccgacctggaggcagacgatgttaaaggttccgtgcccctctccagttctccccctgcaacccactttccagacgagaccgagatcacaaatccagttcccaagaagaatgtcactgtgaagaagacggcagccaagagtcagtccagcacatctactactggggcaaaaaaacgcgcggcgcccaaaggtaccaagcgggatccggcgttaaactcaggagtcagccagaagcccgatcccgctaagacaaaaaacagacggaagagaaagccatccaccagcgacgacagcgattctaacttcgaaaagatcgtaagcaaagctgtgaccagtaaaaaatctaaaggcgaaagcgacgattttcacatggactttgactcagctgtggctcctcgcgccaaatcggtgcgcgctaagaagccaattaaatacctggaggagagcgatgaggacgacctgttctag

SEQ ID NO: 34454 - DNA, 4665 bp, Artificial Sequence
  derived and/or modified sequence
caggtgagccccagccaccctgtgaatgaaaacatgcaggtgaacaagatcaagaagaatgaagatgccaagaagaggctgtctgtggagcgcatctaccagaagaagacccagctggagcacatcctgctgcggccagacacctacatcggctctgtggagctggtgacccagcagatgtgggtgtatgatgaagatgtgggcatcaactaccgggaggtgacctttgtgcccggcctgtacaagatctttgatgagatcctggtgaatgctgctgacaacaagcagagggaccccaagatgagctgcatccgggtgaccatcgaccctgagaacaacctgatcagcatctggaacaacgggaagggcatccctgtggtggagcacaaggtggagaagatgtatgtgcctgccctgatcttcggccagctgctgaccagcagcaactatgatgatgatgagaagaaggtgactggaggaagaaatggctacggggccaagctgtgcaacatcttcagcaccaagttcaccgtggagacagccagccgggagtacaagaagatgttcaagcagacctggatggacaacatgggccgggccggggagatggagctgaagcccttcaatggagaggactacacctgcatcaccttccagcctgacctgagcaagttcaagatgcagagcctggacaaggacatcgtggccctgatggtgcggcgggcctatgacattgctggcagcaccaaggatgtgaaggtgttcctgaatggaaacaagctgcctgtgaagggcttccgctcctatgtggacatgtacctgaaggacaagctggatgaaacaggcaacagcctgaaggtgattcatgagcaggtgaaccaccgctgggaggtgtgcctgaccatgtctgagaagggcttccagcagatcagctttgtgaacagcatcgccaccagcaagggcggccgccacgtggactatgtggccgaccagatcgtgaccaagctggtggatgtggtgaagaagaagaacaagggcggcgtggccgtgaaggcccaccaggtgaagaaccacatgtggatctttgtgaatgccctgattgagaaccccacctttgacagccagaccaaggagaacatgaccctgcagcccaagagctttggcagcacctgccagctgtctgagaagttcatcaaggccgcccacctgtacagccgcttcctgattgaccccttcttccccaacatgatccccaacatgaacctcttccaggccatcggctgcggcatcgtggagagcatcctgaactgggtgaagttcaaggcccaggtgcagctgaacaagaagtgcagcgctgtgaagcacaaccgcatcaagggcatccccaagctggatgatgccaatgatgctgggggcaggaacagcacagaatgtaccctcatcctgacagaaggagacagcgccaagaccctggccgtgtctggcctgggcgtggtgggccgggacaagtatggagtcttccccctgcggggcaagatcctgaatgtgcgggaggccagccacaagcagatcatggagaatgctgagatcaacaacatcatcaagatcgtgggcctgcagtacaagaagaactatgaagatgaggacagcctgaagaccctgcgctatggcaagatcatgatcatgacagaccaggaccaggacggcagccacatcaagggcctgctgatcaacttcatccaccacaactggcccagcctgctgcggcaccgcttcctggaggagttcatcacccccatcgtgaaggtgtccaagaacaagcaggagatggccttctacagcctgcctgagtttgaggagtggaagagcagcacccccaaccacaagaagtggaaggtgaagtactacaagggcctgggcaccagcaccagcaaggaggccaaggagtactttgctgacatgaagaggcaccgcatccagttcaagtacagcggcccagaagatgatgctgccatcagcctggccttcagcaagaagcagattgatgacaggaaggagtggctgaccaacttcatggaggaccggcggcagaggaagctgctgggcctgcctgaggactacctgtatggccagaccaccacctacctgacctacaatgacttcatcaacaaggagctgatcctcttcagcaacagcgacaatgaaagaagcatccccagcatggtggatggcctgaagccaggccagaggaaggtgctcttcacctgcttcaagagaaatgacaagcgggaggtgaaggtggcccagctggccggctctgtggccgagatgagcagctaccaccacggggagatgagcctgatgatgaccatcatcaacctggcccagaactttgtgggcagcaacaacctgaacctgctgcagcccatcggccagtttggcacccggctgcacggcggcaaggacagcgccagcccccgctacatcttcaccatgctgagcagcctggcccggctgctcttcccccccaaggatgaccacaccctgaagttcctgtatgatgacaaccagagggtggagcctgagtggtacatccccatcatccccatggtgctgatcaacggggctgagggcattggaacaggctggagctgcaagatccccaactttgatgtgcgggagatcgtgaacaacatccggcggctgatggatggagaggagcccctgcccatgctgcccagctacaagaacttcaagggcaccatcgaggagctggcccccaaccagtatgtgatctctggagaggtggccatcctgaacagcaccaccatcgagatcagcgagctgcctgtgaggacctggacccagacctacaaggagcaggtgctggagcccatgctgaatggaacagagaagaccccacccctcatcacagactaccgggagtaccacacagacaccaccgtgaagtttgtggtgaagatgacagaggagaagctggccgaggccgagcgggtgggcctgcacaaggtgttcaagctgcagaccagcctgacctgcaacagcatggtgctgtttgaccacgtgggctgcctgaagaagtatgacacagtgctggacatcctgcgggacttctttgagctgcggctgaagtactacggcctgaggaaggagtggctgctgggcatgctgggcgctgagagcgccaagctgaacaaccaggcccgcttcatcctggagaagattgatggcaagatcatcatcgagaacaagcccaagaaggagctgatcaaggtgctgatccagaggggctatgacagcgaccctgtgaaggcctggaaggaggcccagcagaaggtgcctgatgaggaggagaatgaggagagtgacaatgagaaggagacagagaagagtgacagcgtgacagacagcggccccaccttcaactacctgctggacatgcccctgtggtacctgaccaaggagaagaaggatgagctgtgccgcctgagaaatgagaaggagcaggagctggacaccctgaagaggaagagccccagcgacctgtggaaggaggacctggccaccttcatcgaggagctggaggccgtggaggccaaggagaagcaggatgagcaggtgggcctgcctggaaaaggaggcaaggccaagggcaagaagacccagatggccgaggtgctgcccagcccccggggccagagggtcatcccccgcatcaccatcgagatgaaggccgaggccgagaagaagaacaagaagaagatcaagaatgaaaatacagagggcagcccccaggaggatggagtggagctggagggcctgaagcagaggctggagaagaagcagaagcgggagcccggcaccaagaccaagaagcagaccaccctggccttcaagcccatcaagaagggcaagaagaggaacccctggagcgacagcgagagtgacaggagcagtgatgagagcaactttgatgtgcccccccgggagacagagcccaggagagctgccaccaagaccaagttcaccatggacctggacagtgatgaggacttcagtgactttgatgagaagacagatgatgaagattttgtgcccagtgatgccagcccccccaagaccaagaccagccccaagctgagcaacaaggagctgaagccccagaagtctgtggtgtctgacctggaggctgatgatgtgaagggctctgtgcccctgagcagcagccccccagccacccacttcccagatgaaacagagatcaccaaccctgtgcccaagaagaatgtgacagtgaagaagacagctgccaagagccagagcagcaccagcaccactggagccaagaagagagctgcccccaagggcaccaagagggaccctgccctgaacagcggcgtgtcccagaagccagaccctgccaagaccaagaacagaaggaagaggaagcccagcaccagtgatgacagcgacagcaactttgagaagatcgtgtccaaggctgtgaccagcaagaagagcaaaggagagagtgatgacttccacatggactttgattctgctgtggccccccgggccaagtctgtgcgggccaagaagcccatcaagtacctggaggagagtgatgaagatgacctcttctag

SEQ ID NO: 34455 - DNA, 4707 bp, Artificial Sequence
  derived and/or modified sequence
atggaggtgagccccctgcagcctgtgaatgaaaacatgcaggtgaacaagatcaagaagaatgaagatgccaagaagaggctgtctgtggagcgcatctaccagaagaagacccagctggagcacatcctgctgcggccagacacctacatcggctctgtggagctggtgacccagcagatgtgggtgtatgatgaagatgtgggcatcaactaccgggaggtgacctttgtgcccggcctgtacaagatctttgatgagatcctggtgaatgctgctgacaacaagcagagggaccccaagatgagctgcatccgggtgaccattgatcctgagaacaacctgatcagcatctggaacaacgggaagggcatccctgtggtggagcacaaggtggagaagatgtatgtgcctgccctgatcttcggccagctgctgaccagcagcaactatgatgatgatgagaagaaggtgactggaggaagaaatggctatggagccaagctgtgcaacatcttcagcaccaagttcaccgtggagacagccagccgggagtacaagaagatgttcaagcaggccatcacctggatggacaacatgggccgggccggggagatggagctgaagcccttcaacggggaggactacacctgcatcaccttccagcctgacctgagcaagttcaagatgcagagcctggacaaggacatcgtggccctgatggtgagaagagcctatgacattgctggcagcaccaaggatgtgaaggtgttcctgaatggaaacaagctgcctgtgaagggcttccgctcctatgtggacatgtacctgaaggacaagctggatgagaccggcaacagcctgaaggtgatccacgagcaggtgaaccaccgctgggaggtgtgcctgaccatgtctgagaagggcttccagcagatcagctttgtgaacagcatcgccaccagcaaggtgatcctcttcctgaactacatgatctacctgtacatctacgtgttcctgctcttcctgatctacaaggtggacctgaacatcggcctggcctacttcaccggcggcagacatgtggactatgtggccgaccagatcgtgaccaagctggtggatgtggtgaagaagaagaacaagggcggcgtggccgtgaaggcccaccaggtgaagaaccacatgtggatctttgtgaatgccctgattgagaaccccacctttgacagccagaccaaggagaacatgaccctgcagcccaagagctttggcagcacctgccagctgtctgagaagttcatcaaggccgccatcggctgcggcatcgtggagagcatcctgaactgggtgaagttcaaggcccaggtgcagctgaacaagaagtgcagcgctgtgaagcacaaccgcatcaagggcatccccaagctggatgatgccaatgatgctgggggcaggaacagcacagagtgcaccctcatcctgacagaaggagacagcgccaagaccctggccgtgtctggcctgggcgtggtgggccgggacaagtatggagtcttccccctgcggggcaagatcctgaatgtgcgggaggccagccacaagcagatcatggagaatgctgagatcaacaacatcatcaagatcgtgggcctgcagtacaagaagaactatgaagatgaggacagcctgaagaccctgcgctatggcaagatcatgatcatgacagaccaggaccaggacggcagccacatcaagggcctgctgatcaacttcatccaccacaactggcccagcctgctgcggcaccgcttcctggaggagttcatcacccccatcgtgaaggtgtccaagaacaagcaggagatggccttctacagcctgcctgagtttgaggagtggaagagcagcacccccaaccacaagaagtggaaggtgaagtactacaagggcctgggcaccagcaccagcaaggaggccaaggagtactttgctgacatgaagaggcaccgcatccagttcaagtacagcggcccagaagatgatgctgccatcagcctggccttcagcaagaagcagattgatgacaggaaggagtggctgaccaacttcatggaggaccggcggcagaggaagctgctgggcctgcctgaggactacctgtatggccagaccaccacctacctgacctacaatgacttcatcaacaaggagctgatcctcttcagcaacagcgacaatgaaagaagcatccccagcatggtggatggcctgaagccaggccagaggaaggtgctcttcacctgcttcaagagaaatgacaagcgggaggtgaaggtggcccagctggccggctctgtggccgagatgagcagctaccaccacggggagatgagcctgatgatgaccatcatcaacctggcccagaactttgtgggcagcaacaacctgaacctgctgcagcccatcggccagtttggcacccggctgcatggaggcaaggacagcgccagcccccgctacatcttcaccatgctgagcagcctggcccggctgctcttcccccccaaggatgaccacaccctgaagttcctgtatgatgacaaccagagggtggagcctgagtggtacatccccatcatccccatggtgctgatcaatggagctgagggcatcggcaccggctggagctgcaagatccccaactttgatgtgcgggagatcgtgaacaacatccggcggctgatggatggagaggagcccctgcccatgctgcccagctacaagaacttcaagggcaccatcgaggagctggcccccaaccagtatgtgatcagcggggaggtggccatcctgaacagcaccaccatcgagatcagcgagctgcctgtgaggacctggacccagacctacaaggagcaggtgctggagcccatgctgaatggaacagagaagaccccacccctcatcacagactaccgggagtaccacacagacaccaccgtgaagtttgtggtgaagatgacagaggagaagctggccgaggccgagcgggtgggcctgcacaaggtgttcaagctgcagaccagcctgacctgcaacagcatggtgctgtttgaccacgtgggctgcctgaagaagtatgacacagtgctggacatcctgcgggacttctttgagctgcggctgaagtactacggcctgaggaaggagtggctgctgggcatgctgggcgctgagagcgccaagctgaacaaccaggcccgcttcatcctggagaagattgatggcaagatcatcatcgagaacaagcccaagaaggagctgatcaaggtgctgatccagaggggctatgacagcgaccctgtgaaggcctggaaggaggcccagcagaaggtgcctgatgaggaggagaatgaggagagtgacaatgagaaggagacagagaagagtgacagcgtgacagattctggccccaccttcaactacctgctggacatgcccctgtggtacctgaccaaggagaagaaggatgagctgtgccgcctgagaaatgagaaggagcaggagctggacaccctgaagaggaagagccccagcgacctgtggaaggaggacctggccaccttcatcgaggagctggaggccgtggaggccaaggagaagcaggatgagcaggtgggcctgcccgggaagggcggcaaggccaagggcaagaagacccagatggccgaggtgctgcccagcccccggggccagagggtcatcccccgcatcaccatcgagatgaaggccgaggccgagaagaagaacaagaagaagatcaagaatgaaaatacagagggcagcccccaggaggatggagtggagctggagggcctgaagcagaggctggagaagaagcagaagcgggagcccggcaccaagaccaagaagcagaccaccctggccttcaagcccatcaagaagggcaagaagaggaacccctggagcgacagcgagagtgacaggagcagtgatgagagcaactttgatgtgcccccccgggagacagagccccggcgggccgccaccaagaccaagttcaccatggacctggacagtgatgaggacttcagtgactttgatgagaagacagatgatgaggactttgtgcccagtgatgccagcccccccaagaccaagaccagccccaagcagaactgcaacaaggagctgaagccccagaagtctgtggtgtctgacctggaggctgatgatgtgaagggctctgtgcccctgagcagcagccccccagccacccacttcccagatgaaacagagatcaccaaccctgtgcccaagaagaatgtgacagtgaagaagacagctgccaagagccagagcagcaccagcaccactggagccaagaagagagctgcccccaagggcaccaagagggaccctgccctgaacagcggcgtgtcccagaagccagaccctgccaagaccaagaacagaaggaagaggaagcccagcaccagtgatgacagcgacagcaactttgagaagatcgtgtccaaggctgtgaccagcaagaagagcaaaggagagagtgatgacttccacatggactttgattctgctgtggccccccgggccaagtctgtgcgggccaagaagcccatcaagtacctggaggagagtgatgaagatgacctcttctag

SEQ ID NO: 34456 - DNA, 4596 bp, Artificial Sequence
  derived and/or modified sequence
atggaggtgagccccctgcagcctgtgaatgaaaacatgcaggtgaacaagatcaagaagaatgaagatgccaagaagaggctgtctgtggagcgcatctaccagaagaagacccagctggagcacatcctgctgcggccagacacctacatcggctctgtggagctggtgacccagcagatgtgggtgtatgatgaagatgtgggcatcaactaccgggaggtgacctttgtgcccggcctgtacaagatctttgatgagatcctggtgaatgctgctgacaacaagcagagggaccccaagatgagctgcatccgggtgaccattgatcctgagaacaacctgatcagcatctggaacaacgggaagggcatccctgtggtggagcacaaggtggagaagatgtatgtgcctgccctgatcttcggccagctgctgaccagcagcaactatgatgatgatgagaagaaggtgactggaggaagaaatggctatggagccaagctgtgcaacatcttcagcaccaagttcaccgtggagacagccagccgggagtacaagaagatgttcaagcagacctggatggacaacatgggccgggccggggagatggagctgaagcccttcaacggggaggactacacctgcatcaccttccagcctgacctgagcaagttcaagatgcagagcctggacaaggacatcgtggccctgatggtgagaagagcctatgacattgctggcagcaccaaggatgtgaaggtgttcctgaatggaaacaagctgcctgtgaagggcttccgctcctatgtggacatgtacctgaaggacaagctggatgagaccggcaacagcctgaaggtgatccacgagcaggtgaaccaccgctgggaggtgtgcctgaccatgtctgagaagggcttccagcagatcagctttgtgaacagcatcgccaccagcaaaggaggaagacatgtggactatgtggccgaccagatcgtgaccaagctggtggatgtggtgaagaagaagaacaagggcggcgtggccgtgaaggcccaccaggtgaagaaccacatgtggatctttgtgaatgccctgattgagaaccccacctttgacagccagaccaaggagaacatgaccctgcagcccaagagctttggcagcacctgccagctgtctgagaagttcatcaaggccgccatcggctgcggcatcgtggagagcatcctgaactgggtgaagttcaaggcccaggtgcagctgaacaagaagtgcagcgctgtgaagcacaaccgcatcaagggcatccccaagctggatgatgccaatgatgctgggggcaggaacagcacagagtgcaccctcatcctgacagaaggagacagcgccaagaccctggccgtgtctggcctgggcgtggtgggccgggacaagtatggagtcttccccctgcggggcaagatcctgaatgtgcgggaggccagccacaagcagatcatggagaatgctgagatcaacaacatcatcaagatcgtgggcctgcagtacaagaagaactatgaagatgaggacagcctgaagaccctgcgctatggcaagatcatgatcatgacagaccaggaccaggacggcagccacatcaagggcctgctgatcaacttcatccaccacaactggcccagcctgctgcggcaccgcttcctggaggagttcatcacccccatcgtgaaggtgtccaagaacaagcaggagatggccttctacagcctgcctgagtttgaggagtggaagagcagcacccccaaccacaagaagtggaaggtgaagtactacaagggcctgggcaccagcaccagcaaggaggccaaggagtactttgctgacatgaagaggcaccgcatccagttcaagtacagcggcccagaagatgatgctgccatcagcctggccttcagcaagaagcagattgatgacaggaaggagtggctgaccaacttcatggaggaccggcggcagaggaagctgctgggcctgcctgaggactacctgtatggccagaccaccacctacctgacctacaatgacttcatcaacaaggagctgatcctcttcagcaacagcgacaatgaaagaagcatccccagcatggtggatggcctgaagccaggccagaggaaggtgctcttcacctgcttcaagagaaatgacaagcgggaggtgaaggtggcccagctggccggctctgtggccgagatgagcagctaccaccacggggagatgagcctgatgatgaccatcatcaacctggcccagaactttgtgggcagcaacaacctgaacctgctgcagcccatcggccagtttggcacccggctgcatggaggcaaggacagcgccagcccccgctacatcttcaccatgctgagcagcctggcccggctgctcttcccccccaaggatgaccacaccctgaagttcctgtatgatgacaaccagagggtggagcctgagtggtacatccccatcatccccatggtgctgatcaatggagctgagggcatcggcaccggctggagctgcaagatccccaactttgatgtgcgggagatcgtgaacaacatccggcggctgatggatggagaggagcccctgcccatgctgcccagctacaagaacttcaagggcaccatcgaggagctggcccccaaccagtatgtgatcagcggggaggtggccatcctgaacagcaccaccatcgagatcagcgagctgcctgtgaggacctggacccagacctacaaggagcaggtgctggagcccatgctgaatggaacagagaagaccccacccctcatcacagactaccgggagtaccacacagacaccaccgtgaagtttgtggtgaagatgacagaggagaagctggccgaggccgagcgggtgggcctgcacaaggtgttcaagctgcagaccagcctgacctgcaacagcatggtgctgtttgaccacgtgggctgcctgaagaagtatgacacagtgctggacatcctgcgggacttctttgagctgcggctgaagtactacggcctgaggaaggagtggctgctgggcatgctgggcgctgagagcgccaagctgaacaaccaggcccgcttcatcctggagaagattgatggcaagatcatcatcgagaacaagcccaagaaggagctgatcaaggtgctgatccagaggggctatgacagcgaccctgtgaaggcctggaaggaggcccagcagaaggtgcctgatgaggaggagaatgaggagagtgacaatgagaaggagacagagaagagtgacagcgtgacagattctggccccaccttcaactacctgctggacatgcccctgtggtacctgaccaaggagaagaaggatgagctgtgccgcctgagaaatgagaaggagcaggagctggacaccctgaagaggaagagccccagcgacctgtggaaggaggacctggccaccttcatcgaggagctggaggccgtggaggccaaggagaagcaggatgagcaggtgggcctgcccgggaagggcggcaaggccaagggcaagaagacccagatggccgaggtgctgcccagcccccggggccagagggtcatcccccgcatcaccatcgagatgaaggccgaggccgagaagaagaacaagaagaagatcaagaatgaaaatacagagggcagcccccaggaggatggagtggagctggagggcctgaagcagaggctggagaagaagcagaagcgggagcccggcaccaagaccaagaagcagaccaccctggccttcaagcccatcaagaagggcaagaagaggaacccctggagcgacagcgagagtgacaggagcagtgatgagagcaactttgatgtgcccccccgggagacagagccccggcgggccgccaccaagaccaagttcaccatggacctggacagtgatgaggacttcagtgactttgatgagaagacagatgatgaggactttgtgcccagtgatgccagcccccccaagaccaagaccagccccaagctgagcaacaaggagctgaagccccagaagtctgtggtgtctgacctggaggctgatgatgtgaagggctctgtgcccctgagcagcagccccccagccacccacttcccagatgaaacagagatcaccaaccctgtgcccaagaagaatgtgacagtgaagaagacagctgccaagagccagagcagcaccagcaccaccggggccaagaagagagctgcccccaagggcaccaagagggaccctgccctgaacagcggcgtgtcccagaagccagaccctgccaagaccaagaacagaaggaagaggaagcccagcaccagtgatgacagcgacagcaactttgagaagatcgtgtccaaggctgtgaccagcaagaagagcaagggggagagtgatgacttccacatggactttgacagcgctgtggccccccgggccaagtctgtgcgggccaagaagcccatcaagtacctggaggagagtgatgaagatgacctcttctag

SEQ ID NO: 34457 - DNA, 4665 bp, Artificial Sequence
  derived and/or modified sequence
caggtgagccccagccaccccgtgaacgagaacatgcaggtgaacaagatcaagaaaaatgaagacgccaagaagagactttctgtggaacgcatctaccagaagaaaacgcaactggagcacatcctgctgcgtccggatacctacataggcagtgtggaattagtgacacagcagatgtgggtgtacgacgaggacgtgggtataaattatcgcgaggttacatttgtccccggcctgtataaaatttttgacgaaatactggtgaacgccgcggataataagcagagggacccaaagatgtcatgcattagagtcacaattgaccctgaaaataacttaatcagcatctggaacaatggtaagggaattccagtggtcgagcataaggtggaaaagatgtatgttccagcccttattttcgggcaactgctgacctcctcaaactacgatgatgacgaaaagaaagtaacaggcggcaggaacggatatggcgccaaactgtgcaacatttttagcacaaaatttaccgtggagacagcgagtcgcgagtataagaagatgttcaagcagacatggatggacaatatgggccgggccggggaaatggagttgaaacccttcaacggcgaggattacacttgcattacttttcagcctgatttatccaaattcaaaatgcagagtctcgacaaagacatcgtagctcttatggttcggagggcttacgatattgcgggctccaccaaagacgtgaaggtcttcctgaacggcaacaaactgccggtgaaggggttccgctcctatgtcgacatgtacctgaaggacaagctcgacgaaaccggcaattcacttaaagtaatccacgaacaggtaaaccatcgctgggaagtgtgcctgactatgtctgaaaagggctttcagcaaatctccttcgttaacagcatcgccacatccaaagggggccgccacgtagattacgtggctgaccagatcgtcacaaagcttgtagatgttgtaaagaaaaaaaataaggggggcgtcgcggtgaaagcccaccaagtgaagaatcatatgtggatctttgttaacgccctgatcgagaaccccacattcgactctcagacaaaggagaatatgacactgcagcctaaatcttttgggagtacttgtcagctgtccgagaagttcataaaagcggcccatttatactccagattccttattgatcctttcttcccaaacatgatccccaatatgaacttattccaggctatcggatgcggaatagtagagagtatcctgaattgggtaaaattcaaggctcaggtgcagctgaataaaaaatgcagcgccgtgaagcacaaccgcattaagggaattcctaaactagacgacgcaaacgacgctggaggtaggaatagcacagagtgtacactgatcttaaccgagggagactctgctaaaacgttggctgtttctgggctgggagtcgtgggacgtgacaagtacggcgtgttcccattacgggggaaaatcctgaatgtgagggaagcttcccacaaacagattatggagaacgccgagattaataacatcattaaaatagtcggcctgcagtacaaaaagaattacgaagacgaggactcactcaaaaccctgcggtacgggaaaattatgattatgacagatcaggaccaggatggatctcatatcaagggactgctaatcaattttatccatcacaactggccttctctacttagacaccgatttctcgaggagttcatcaccccaatagtgaaggtctctaagaataaacaggagatggctttctacagccttcccgagttcgaagagtggaaaagctcgacccctaatcataagaaatggaaggtgaaatactataagggcctcggaacttccacaagtaaagaagccaaggaatacttcgctgacatgaagcgacatcgcattcagtttaaatactcagggcccgaggacgacgcggccatatcactggcattctccaaaaaacaaattgacgaccgcaaagaatggctcactaacttcatggaggatcgcaggcagagaaaactgctcggactccccgaagattacctctatgggcaaacaacaacttacctgacatataacgactttatcaataaagaactcatcctgtttagcaactccgacaatgagcgtagcataccctctatggtagatggactgaaacccggacaacggaaagttctattcacgtgttttaagagaaacgataaacgggaggtgaaggtcgcccaactggcgggctccgttgccgaaatgagctcgtatcaccatggcgaaatgtctctaatgatgacaattattaatcttgctcaaaattttgtcggttccaacaaccttaatctgctccagcctatcggccagtttgggacccgcctgcatggcggcaaggactccgcaagccccagatacattttcaccatgctttcttcattggctaggctgctcttcccacccaaagacgaccacactctgaaattcctgtacgatgataaccagagggtcgaacccgagtggtatattcctattatccccatggtgctcattaacggcgcagaaggcatcggaaccggatggtcttgtaagatcccaaatttcgatgtacgcgagatcgttaacaatattcgaaggctgatggacggggaagagccgttgcccatgctcccatcttacaagaattttaaagggactatcgaggagctcgctccgaatcagtacgttatttctggcgaggttgccatcctcaatagcaccaccatcgaaatctcagagctacctgttcgaacctggacacagacctacaaggaacaggtgttagaaccgatgctgaatggtactgagaaaactcctcccctaataactgactatcgggagtatcacactgacactacagtcaagtttgtggtcaaaatgacagaagagaaactcgccgaggctgagagagtggggctacataaggtcttcaaactgcagacttctcttacatgtaactcaatggttttattcgaccacgtggggtgtctaaaaaaatatgacactgtgctcgacatcttgagggatttctttgagctgcgccttaagtattatggtcttcggaaggagtggttgcttgggatgctcggcgcggagtctgcaaagcttaataaccaagcccgcttcattttggagaagattgatgggaaaatcatcatagaaaacaagcccaagaaggagctgataaaggtgcttatccagcgcggctatgactccgatcccgtcaaagcctggaaggaagcccagcagaaagtgcctgacgaggaggaaaacgaggagagcgataacgagaaggaaactgagaaaagcgactccgtcactgactctggtcccacatttaactatttgttggacatgcctctctggtatctgacgaaagagaagaaagacgagctgtgccggcttcgcaacgaaaaggagcaagagcttgatacgctgaagcgaaagagcccctccgacctgtggaaggaggatctggctacttttatcgaagagttggaagctgtcgaagcaaaggaaaagcaggatgagcaggtcgggctgcctggtaaagggggcaaagcgaaaggcaagaagacccaaatggccgaagtcttgccctcccccagaggacagagagtcatcccgagaattactatcgaaatgaaggccgaggctgaaaagaaaaacaagaaaaagattaaaaacgaaaacacagaaggcagcccacaggaggacggcgtggagttagaagggctcaagcaaaggcttgagaagaaacaaaaaagggaacccggcaccaagacaaagaagcagactaccttagcctttaagcccattaaaaaaggcaagaaacgcaatccatggagcgacagcgaatcggatcgttcaagtgatgaaagcaatttcgacgtgcctcctcgagagaccgagcctaggagagccgcaaccaaaaccaagttcacaatggaccttgatagtgacgaagacttttctgactttgacgagaagactgatgacgaagactttgtaccttccgacgcctccccccccaagacaaagacctccccgaaactgagtaacaaggagcttaaaccccagaaatccgtcgtgtcagacctcgaggccgacgacgtcaagggtagtgtgcccctgtcctcgagtccccccgccacacacttcccagacgaaaccgaaattacaaaccctgtacctaagaaaaacgtgacagtgaagaagacagccgcaaaatctcagagctccacgagcactaccggcgccaagaaacgcgccgctcctaagggaaccaagcgtgatcccgcactgaactccggcgtgagtcagaaaccagacccagccaaaaccaaaaatagacgaaagcgcaagccctctactagcgatgatagtgattccaattttgagaagatcgtctctaaagcggttacctccaaaaaaagcaagggagaatccgacgactttcacatggattttgacagtgccgtggccccgcgtgccaaatcagtgagggccaaaaagccaattaagtacctggaagaatccgatgaggacgacctcttctag

SEQ ID NO: 34458 - DNA, 4707 bp, Artificial Sequence
  derived and/or modified sequence
atggaggtgagccccctgcagcccgtgaacgagaacatgcaggtgaacaagataaagaagaatgaggatgccaaaaagaggctaagcgtggagagaatttaccagaagaaaacccagctggaacatattcttctacgcccggatacatatattgggagcgtagagcttgtaacccaacaaatgtgggtatacgacgaggatgtggggatcaactatcgtgaggttaccttcgtgcccggattgtataaaatctttgacgagatcctcgtgaacgccgcagataacaagcagcgggacccaaagatgtcatgtatccgcgtcaccatcgacccagagaacaacctaatttccatttggaacaatgggaaggggattccagttgtggagcacaaagtggagaagatgtacgtgcccgctttaattttcggccagctgctgaccagctcaaactacgacgatgacgagaagaaagtaacaggaggccgtaacggctatggggcgaaactgtgcaatatcttttcgaccaagttcaccgtagagaccgctagcagggagtataaaaaaatgtttaagcaggctatcacctggatggacaatatgggcagggctggagaaatggagctcaaaccattcaatggggaggattatacctgtataacctttcagcccgatctgtctaaatttaagatgcagtctctggacaaagacatcgtggctcttatggtaagaagggcttacgatatcgcgggatctacaaaagacgtaaaagtctttttgaatgggaacaagctcccagtgaaggggtttcgtagttatgtcgacatgtatttaaaagacaagctcgacgaaacaggtaactcactcaaggtcatccacgagcaggttaaccaccgatgggaggtctgtctgactatgagcgagaagggatttcaacaaatctcatttgttaattccatcgctacctctaaagtgatcctgtttttgaattacatgatctatttgtatatttacgtttttctgctgtttttgatctacaaagtggacctgaacatagggttggcctattttacgggcgggcgccacgttgactacgtggccgatcaaattgtgacgaagctagtggatgtcgttaaaaagaaaaataagggaggtgtcgctgtcaaagcccaccaggttaagaaccatatgtggatcttcgtcaatgcgttgattgagaatcctacttttgatagtcagaccaaggaaaacatgaccctacagcctaaatccttcggaagcacttgtcagctgagcgaaaaatttatcaaagcggccatcggatgcggcatcgtagaatccatcctgaactgggtgaaattcaaagctcaggttcagttgaacaagaagtgcagtgcagtcaaacacaacaggattaaaggcatccctaagctggatgacgccaatgacgctggaggacggaattccactgagtgcactctcatcctgacggagggggactccgcgaagacccttgccgtgtctggcttaggtgttgtagggagggataaatatggcgtgttcccccttcgaggcaaaatacttaatgttagagaggcatcgcacaagcagatcatggagaatgctgagatcaataacattatcaaaattgttggactgcagtataaaaagaactatgaggatgaggattccctgaagaccctccgttatggcaagattatgatcatgaccgaccaggaccaggatgggagccacataaagggcctgctgatcaactttattcatcacaactggccgtcactactccgtcatagattcttagaggagtttataacaccaatcgttaaagtgtcaaagaataagcaggagatggctttttattcactgccagaattcgaagaatggaagtctagcaccccaaaccacaagaaatggaaggtaaagtactacaaagggctcggaacttccacctccaaggaagcaaaagaatattttgcagatatgaagcgacaccgtatccagttcaaatattccggacccgaggacgatgccgccatttctctggctttttccaaaaagcagattgatgatcggaaggaatggttgacaaatttcatggaggaccgacgccagaggaaacttctgggactgcctgaagactacttatacggtcagacaacaacttacctgacctataatgactttattaacaaagagctgatactgttttccaatagcgacaatgagaggtcaattccgtctatggttgatggtctgaaacctggccagcgcaaagtactgttcacgtgtttcaaacgcaacgataagcgagaggtcaaggtggcacagctcgcaggcagcgtggcagagatgagcagttatcatcatggtgagatgtcattgatgatgactattatcaaccttgcccaaaatttcgtcggatcaaataacttgaaccttttgcagccgattggccaattcggtacccggttacacgggggcaaggatagtgccagtcctaggtacatcttcacgatgctgtcaagcttggcccggcttctgttcccccctaaggatgatcacaccttgaagtttttgtacgacgataaccagcgggtggaacccgaatggtatatcccgattattccgatggtgctaattaacggggcggagggcataggcaccggatggagttgtaagatccccaacttcgatgtgcgagagatcgtcaataatattcggagactcatggacggagaggaaccactgcccatgttgcctagttacaaaaatttcaagggaactatagaggaattggcgcctaaccagtatgttatatctggcgaggtggcaatactgaactctacaaccatcgaaatctccgagctgccggtgcgtacctggacacagacctacaaggagcaagtacttgaaccaatgttgaacggcactgagaaaacacccccccttataacagattaccgtgagtaccacactgacacaacggtcaagtttgtcgttaagatgaccgaagagaagttagctgaagccgaacgcgtgggactccacaaggtttttaagttgcagacatcactgacctgtaatagcatggttctctttgatcatgtcggatgcctgaaaaaatacgatacagtgctggacattctgcgggactttttcgagctgcggctaaaatactacggtctgcgtaaagaatggctcttgggtatgttaggtgctgagtccgccaagttaaataatcaggcccgtttcattctcgagaaaatcgatggcaaaattataattgagaataaaccaaaaaaagaacttattaaggtcctgatccagcgaggctacgattcagatccggtgaaggcctggaaagaggcacagcagaaggttccagacgaggaggagaatgaggaatccgacaacgaaaaagagactgagaagagcgattcggtgactgactcgggacccacattcaattatctcctggacatgccattatggtatctgaccaaagagaagaaggacgagctgtgcaggctgagaaacgaaaaagagcaggagctggacacactgaagaggaaatcgccatccgatctatggaaggaagacctagccactttcattgaggaactggaagctgtggaagccaaggaaaagcaagacgagcaggtgggcctcccaggtaagggtgggaaagcaaagggtaagaagacccagatggcagaggtcctcccctccccaagaggacagagggttattccccgaatcacaattgagatgaaagccgaagctgagaagaagaataagaagaaaatcaagaacgagaatacagagggatctccacaagaggatggagtagagctcgaaggactaaagcagcgcctagagaaaaagcaaaaaagggagcctgggacaaagactaagaagcagacaacactcgcttttaaacccatcaaaaaaggcaaaaaacggaacccctggtcagatagcgaaagtgacaggtcatccgatgagagcaattttgatgtgccacctcgagagaccgaaccccgccgagccgccactaaaaccaagtttactatggacctggactctgatgaggatttctcagacttcgatgagaagacagacgacgaggattttgttcctagcgacgcttccccccctaaaaccaaaacatccccaaagcagaactgtaataaggagttaaaacctcagaagtccgtcgtctctgacctcgaggctgacgacgtaaaggggtcagtcccccttagcagcagccctccggcaacacatttccccgacgagacagagatcactaatcccgtgcctaagaagaacgtcaccgttaaaaaaacggctgccaaaagccagagtagcacaagcaccaccggcgctaagaagcgcgccgcccctaagggaactaaaagagaccctgctctcaatagcggggtctctcagaaacctgacccagctaaaactaagaaccgaagaaaacgcaaaccatctacctcagacgactctgactccaattttgaaaaaattgtcagcaaggcagtgacctccaagaagagtaaaggggaatcagatgattttcatatggatttcgactctgcagtggcccccagagcaaaaagtgtgcgcgctaaaaaaccaatcaaatacctggaagaatcagatgaggacgatctcttctag

SEQ ID NO: 34459 - DNA, 4596 bp, Artificial Sequence
  derived and/or modified sequence
atggaggtgagccccctgcagcccgtgaacgagaacatgcaggtgaacaagatcaagaagaatgaagacgcaaagaaacggctgtcagtagaaaggatttaccaaaagaaaactcagctggagcacattttgctgaggcctgatacatacattgggtcagtagagctggttacccaacagatgtgggtttacgacgaggatgtgggaataaactatcgggaggtcacattcgtgccgggtctgtacaagatctttgatgagattctggttaatgccgcagataataaacagagagacccaaagatgtcatgtattcgggttactatcgacccagaaaacaacctcatttctatttggaacaatggtaaggggattccagtggtggagcataaggtggagaagatgtatgtgcccgccttgatatttggtcaattactgacatcctcaaactatgacgacgacgagaagaaggtgaccggcggccgcaatggatatggagccaaattgtgtaacatttttagcaccaagtttactgtggagaccgcctccagagagtacaagaagatgtttaagcaaacatggatggacaacatgggaagagcgggtgagatggaattgaagccattcaacggggaggattacacctgtattacttttcagccggatctgtcaaagtttaaaatgcagagtctcgacaaggacatcgtggctctcatggtacgcagggcctatgacatcgcagggtctactaaagatgtcaaagtgtttctcaatggcaataagcttcctgtgaagggttttaggtcttacgttgacatgtacctcaaagacaagcttgacgagactggaaattctctcaaggtgatccacgaacaagtcaaccaccgctgggaggtctgcctaactatgtcagaaaagggtttccagcagatctcttttgtgaatagtatcgcgacgagtaagggaggccggcacgtggactatgttgctgatcaaatcgttaccaagctggtggatgtagtcaaaaagaaaaacaaggggggcgtggccgttaaggcacaccaggtgaagaatcatatgtggatcttcgttaacgcattgattgagaatcccacgtttgactctcagacgaaagagaacatgacactccagcctaagtcttttggttcaacctgccaactcagcgagaaattcataaaggcggcaattgggtgcggtatcgttgagagtatacttaattgggtgaagttcaaggctcaggtacaacttaacaagaaatgtagtgccgtgaagcataataggatcaagggaattcccaaactggacgatgccaacgacgctggcggacgcaacagtacagagtgcaccttgatactcacggagggggacagtgctaagacactcgctgtgtcaggattaggagtggtcgggcgggacaagtatggtgtttttcctttacgtggcaagattttgaatgtcagggaagcctctcataagcagatcatggaaaatgcggaaatcaacaacattattaaaatcgtggggctccagtataagaagaactacgaagacgaggactctttgaaaaccttgcgctatggaaagattatgattatgacggatcaagatcaggacgggtcccacatcaaggggctgttgattaattttatccaccacaattggcccagtctgcttcggcacagattcctcgaggaattcattacacctatagtgaaggtgtcaaagaataagcaagaaatggcattttacagcctgccagagttcgaggagtggaaaagtagtacccccaatcataaaaagtggaaagtgaagtattataagggcctgggtaccagtacttccaaagaggccaaggaatactttgccgatatgaaacggcacaggatacagtttaaatacagtgggccagaagatgatgcagctataagcctagccttctcaaagaaacagatcgacgatcgtaaagaatggctgacaaatttcatggaggaccgtaggcagaggaaactactggggcttcctgaggattatctctacggccagaccacaacttatctgacatacaacgactttatcaacaaggaactaatcctgttcagtaattcagacaacgagaggtctatcccttcaatggttgatggtctcaaacctggacaacgcaaagtcttgttcacctgcttcaagagaaatgacaaacgcgaagtaaaggtggcccagctggccggcagcgttgccgagatgtcttcctaccaccatggagaaatgagtctgatgatgacaattatcaatctcgcgcagaatttcgtggggtccaacaacctcaatctgctgcagccaattggacagtttggcacccgtctccacggagggaaggactctgctagcccccgatatatcttcaccatgctgagttctctggccagactactcttccctccgaaagacgaccataccttgaaatttctgtatgatgataaccaacgagtggagccggaatggtacattccgattatcccaatggtgctgatcaatggagcagagggtataggcactggatggtcttgcaagattcccaacttcgatgtcagggagatcgttaataacattcgcagactcatggacggggaggaaccactccctatgcttcctagttataaaaacttcaagggcaccatagaggaactagcaccgaatcagtatgtcatctcaggagaggtcgcgattctgaacagcacaactatcgagattagcgaattacccgtacgcacttggactcagacctacaaggaacaggtgttggagccgatgctgaatgggaccgagaagacacccccattgatcaccgactatagagagtatcacaccgacactaccgtgaagttcgtggtgaaaatgaccgaggaaaagctggcagaagcagagagggttggactgcataaggtgttcaaactccaaacttcgctcacctgcaacagcatggtgctgtttgatcacgttggttgtcttaagaaatatgacaccgtgctcgatattctgcgcgacttctttgaactgcggctcaagtattatggtctcagaaaagagtggttgcttggtatgttaggcgccgaatctgctaaacttaacaaccaggcacgttttatcttggaaaagatcgacggcaagattattatcgaaaacaaaccgaagaaggagctaattaaggtccttatacagcggggatatgacagcgatccagtgaaggcctggaaagaggctcagcagaaggttccagatgaggaggaaaacgaggagtctgacaacgaaaaagaaactgaaaaaagtgacagcgtgactgacagtggacccaccttcaattacttgttagacatgccgctgtggtacctgacaaaggagaaaaaggacgaactatgtagacttcgaaacgagaaagagcaagagctggacaccctcaagcgcaaatccccttccgacttgtggaaggaagacttagctactttcattgaggagcttgaggccgttgaggccaaagaaaaacaggatgaacaagttggactgccgggaaagggtggcaaggctaaaggaaaaaagactcagatggccgaggtgctgccatccccgcgtgggcagcgggtcattcctagaatcacgatcgaaatgaaagcagaggcagaaaagaagaacaaaaaaaaaattaaaaacgagaacaccgaaggtagtccgcaggaagacggcgtggaactggagggtctcaaacagcgactagagaagaagcagaaaagagagcccgggaccaagaccaagaagcagaccacattggctttcaaaccgattaaaaaagggaagaagcgcaatccctggagcgacagcgagtccgacagatcttccgatgaaagcaactttgacgtgccaccccgggaaactgagccgcggcgggcggcaactaagacaaaattcactatggatttggactcggatgaggatttctccgatttcgatgagaagacagatgatgaggactttgtcccctctgatgctagtccgccaaaaactaaaaccagccccaaacttagcaataaggaactcaagccccagaaatcagttgtatccgacctcgaagccgatgacgtcaaggggagcgtgccactgagtagtagtccccccgccactcacttcccggatgaaacagagataaccaacccagtgcctaaaaaaaacgtcacagtgaaaaagaccgccgcaaaaagccagagttccacaagtactaccggagctaaaaagagagccgcccccaagggtaccaagagagaccctgctttgaacagcggcgtgtctcagaagccagatccggccaaaacaaagaacagacggaagaggaagccaagcacatctgatgattctgatagcaatttcgagaagatcgtatctaaggctgtaaccagcaagaaaagcaaaggtgaatccgacgattttcacatggattttgactctgctgtggcccccagggcgaagagtgttcgggccaagaaacccatcaaatatctggaagaaagcgacgaggacgacctcttctag

SEQ ID NO: 34460 - DNA, 4665 bp, Artificial Sequence
  derived and/or modified sequence
caagtctctcctagccatcccgtcaatgagaacatgcaagtcaacaagataaagaagaatgaggacgctaaaaaaaggctatctgtagaaaggatataccaaaagaaaacccaactggagcatatcctgctgcggccagatacctatataggtagcgttgaacttgtgacccagcagatgtgggtatatgacgaggacgtgggcatcaattacagagaggtgacttttgtgcctggactgtataagatctttgacgaaatcctggtgaacgctgccgacaataagcagagagaccccaaaatgtcctgcatccgggtcaccatcgatccagaaaacaatttaatctcgatctggaacaacggcaaaggaatcccggttgttgagcacaaagtggagaagatgtatgtaccagccctcatctttgggcagctgctgacgagtagtaattacgacgatgacgagaagaaggtgaccggtgggaggaacgggtatggggcaaagttgtgtaacatcttcagcacaaaattcacagtggagacagcttccagagaatacaaaaagatgtttaagcagacttggatggataatatgggaagggccggagaaatggaactcaaaccctttaacggagaggattacacatgcatcacttttcaacccgacctaagtaaattcaagatgcagtctctagataaggacatagtcgccctgatggtgcgccgagcctatgatattgctggtagcacaaaggacgtgaaagtcttcttaaatggtaataagttgcccgttaagggtttccgaagttatgtcgacatgtacctcaaggacaaactggacgaaacgggaaacagtctcaaggtgattcacgagcaagtcaaccatcgatgggaggtgtgcctgactatgtccgaaaaggggtttcagcagatcagctttgtcaactctatagccacctcaaaggggggaaggcatgtggactacgtggccgaccaaatagtaaccaaactggttgatgtcgtgaagaagaagaataagggaggcgtggcagtcaaagctcatcaggtcaagaatcacatgtggatcttcgtgaacgccctgattgagaaccctacattcgactcgcaaactaaagagaacatgaccctgcagccgaagtcctttggatccacttgccaactgtccgaaaaattcattaaggccgctcatctgtattccagattcctgattgatcccttcttccccaatatgatccctaatatgaatctcttccaggcgattggttgcggcatagtggaaagtatattgaattgggtaaaatttaaagcccaggtgcaactgaataagaaatgttctgcggttaagcacaaccgcatcaaaggaatccccaagctcgacgatgcgaacgacgctggaggccgtaacagcactgaatgtactttaatcctgacggaaggagacagtgcaaaaacactcgccgtgtcgggcttgggcgtcgtgggcagggataagtacggcgtcttcccattacggggtaaaattttaaatgtgcgtgaagcatcacacaagcagattatggaaaatgcagagatcaacaacatcattaaaatagtggggctccagtacaagaagaactacgaagacgaggactccctgaagacactgcggtacgggaaaattatgatcatgaccgatcaagatcaggacgggtctcacatcaagggccttttgatcaacttcattcatcacaactggccatcactgctgaggcataggtttctggaggaatttattacccccatcgtcaaggtaagcaagaacaaacaggagatggccttttactctcttcccgagtttgaagagtggaaatcttcaactccaaatcataagaaatggaaagtcaaatattacaaaggactcggtacatcaaccagcaaagaggcaaaggagtactttgctgatatgaagaggcatagaatccaatttaagtattctgggcctgaagatgatgcggcaatttccctcgctttctccaagaagcaaatcgatgatagaaaggagtggcttactaacttcatggaagataggaggcagaggaaattactgggactgcccgaggattatctctatggccaaaccaccacgtacttgacatacaacgatttcatcaataaggaactcatcttgtttagcaattctgacaacgaacgaagcatcccttctatggtcgacggtctcaaacctggccagagaaaggtgttattcacttgcttcaagcgcaatgacaagcgcgaggtgaaggtcgcccagctcgcaggcagcgttgcagagatgtcttcctaccaccacggggagatgtctctgatgatgactatcatcaatttggcccagaatttcgtgggaagcaataatctcaacttgctgcagcctatcggacaattcggcacccgtttacacggcggaaaagactccgcgtctcctaggtatatcttcacaatgctctctagtttggcaaggctcttgttcccaccaaaagacgaccacacgttaaaatttctgtacgacgacaatcagcgggttgagcctgagtggtacatcccgatcattccaatggtactgattaacggcgctgagggtattggcaccggctggagttgcaagatacctaatttcgacgtgagggaaattgttaataacatcagacgactgatggacggagaggagccacttcctatgctgccgtcctacaagaacttcaaaggcacaatcgaggaattagcgccaaatcagtacgtgatttcaggggaggtcgccattttgaattcgacaaccattgagatctcggagctgcctgtgagaacttggactcagacttacaaggaacaggtactggaaccaatgcttaatggcactgagaagacccctccattaataaccgattatagggagtaccacacagatacaaccgtcaagtttgtggtgaaaatgaccgaagagaagctggccgaagccgagcgggtgggactacacaaagtgttcaaattacagaccagtcttacatgtaatagtatggtgctgtttgaccacgtaggctgcctgaagaaatatgataccgtgttagacatcctgagggatttcttcgaactgcgactgaaatattatgggctgaggaaggaatggctattaggtatgcttggtgctgagtcagccaagctgaataaccaggcacgattcattctggagaagattgatggcaagatcatcatcgaaaataagcccaagaaggaactgattaaggtccttatccagcgagggtatgatagtgatccagtcaaagcttggaaagaggcccagcagaaagtgccggacgaagaggagaacgaagaaagcgacaatgagaaggaaactgagaaaagtgattctgtcacggactccggccctacttttaactaccttctcgacatgccactgtggtacctgacgaaggaaaagaaggacgagctgtgccgtttacgcaacgagaaagagcaagagctcgatactcttaaacgcaaaagtcctagtgatctgtggaaagaggaccttgcaacttttatcgaggagctagaggcagttgaggccaaggaaaaacaggacgagcaagtggggctccccggaaaaggaggaaaggcgaaggggaagaaaactcagatggccgaggtcctcccctcacctagggggcagcgggttattccacggataaccatcgagatgaaagctgaagctgagaagaaaaacaaaaaaaaaattaaaaatgaaaacactgaaggcagcccgcaggaggacggggtcgaactagaaggtctcaaacagaggctcgaaaagaagcagaaaagggagcccggtacgaaaacaaagaaacaaacaacccttgccttcaaacctattaaaaaggggaaaaaaagaaacccgtggtctgattcagaaagtgacaggtcatccgacgaatccaactttgatgtgccacctagggaaactgagccgagacgcgctgcaacaaaaactaaatttacaatggatttagactcagatgaggatttctctgactttgatgagaaaacggacgacgaggatttcgttccatcagatgcctccccccctaagacaaaaactagccccaagctttccaataaagagctgaagcctcaaaagtccgtggtatccgacttggaggctgacgacgttaaaggcagtgtgccgctgtcaagctcccctcccgcaactcattttcccgacgaaaccgaaatcaccaaccccgtacctaagaaaaatgtgacagtgaagaagaccgccgctaagtctcagagctcaacttcaaccaccggtgcaaaaaagagggcagccccaaaagggaccaaacgggaccccgctctaaatagcggcgtgtcacagaaaccagatccagccaaaaccaaaaaccgaagaaaaaggaagccctccactagcgatgactctgatagtaattttgaaaagatcgtatcaaaggccgtgacatccaagaagagtaaaggggaatccgatgactttcacatggattttgactctgccgtggctccacgcgcaaagtcagtgagggcaaaaaagccgattaagtacttagaagagtcggacgaagatgacttattttag

SEQ ID NO: 34461 - DNA, 4707 bp, Artificial Sequence
  derived and/or modified sequence
atggaagtcagtcctctgcagcctgtgaacgagaacatgcaagttaataaaattaagaagaatgaagatgccaagaaacgtctgagtgtggagcgtatttaccagaagaaaacacaactcgagcatattcttctgagacctgacacgtatataggttctgtcgagctcgtgacccagcaaatgtgggtgtacgatgaggatgtcggcattaattatcgggaggtgaccttcgtgcctggcctgtacaagatatttgatgagatcttggtaaacgccgcagacaacaagcaaagagaccccaagatgagctgtatccgagtgaccatcgaccctgaaaacaacctgatcagcatttggaataacggaaagggaatccctgtcgttgagcataaagtggagaaaatgtacgtgcctgctctaatctttggccagctgctcacgtcctctaactatgacgatgatgagaaaaaggtgacaggcggaaggaatggctacggagctaaactgtgcaacatttttagcacgaagttcactgtggagaccgccagtcgagaatataaaaagatgttcaaacaagctataacgtggatggacaacatgggccgagccggagagatggagctgaaacccttcaatggcgaggactatacctgcattactttccaacctgatctcagcaagtttaagatgcagagcctggataaagacatagtcgcgctcatggtgagaagggcctacgatatagccggatctaccaaggatgtgaaggttttcctgaacgggaacaagcttcccgtgaaaggcttccggtcatatgttgacatgtacctgaaagacaagcttgatgagacgggtaactcgcttaaggttatccacgaacaggtcaatcatagatgggaagtgtgtctaaccatgtctgaaaagggctttcaacaaattagctttgtgaattcaatagccactagcaaggtaattctttttctgaattatatgatttacctgtacatctatgtttttctcctgtttctgatctataaggtcgatctcaacatcggtctcgcatactttaccgggggaagacatgttgattatgtggccgatcagattgtgactaagttggtcgacgtggttaaaaagaagaacaaggggggagtcgccgtgaaggcacaccaggtgaagaatcatatgtggattttcgttaacgcccttatcgagaaccccactttcgactctcagaccaaggaaaatatgacattgcagccaaagagcttcggatccacctgccagctttctgaaaaattcatcaaggcagccataggatgcggtattgtcgaatctattctgaactgggtaaagttcaaggcccaggttcagctgaataagaagtgctctgctgtgaaacacaatcgcattaaggggataccgaaactagatgacgcgaatgacgcaggcggacgtaacagtacggagtgcaccctgatcctaacagaaggtgactcagccaaaacgcttgccgtctctggacttggggtcgtaggacgcgacaaatatggcgtcttcccactgaggggtaagatcttgaacgttagggaagcttcccacaaacagatcatggagaatgctgagatcaacaacattatcaaaatcgtcggactacagtacaaaaaaaactacgaagatgaggactcattaaagactttgcgatatggaaaaatcatgataatgacagatcaggatcaagacgggtcacacatcaaaggactgctgattaattttatccaccataactggccatctctgttgcggcatcgttttctcgaggaattcataacacctattgtcaaggtatcaaagaacaagcaggagatggcgttttacagcctccccgagtttgaagaatggaagtcctccacgccgaatcacaaaaaatggaaggtcaagtattataaaggattaggcacctccacctcgaaggaagccaaggagtactttgcagatatgaagcgccataggatacagtttaaatattcaggccctgaggacgatgccgctatttctcttgctttcagcaagaagcaaattgatgaccgtaaggaatggttgactaatttcatggaagaccgtcggcagcggaaactcctgggtttacctgaggattatctttacggtcagaccaccacctatctgacatataatgactttatcaacaaagagctgattctctttagtaattccgacaatgaaagatcaattcccagtatggttgacggacttaaaccgggacagcgaaaggtgctgttcacctgttttaaacggaacgataagcgtgaggttaaggttgctcaacttgccggttctgtggcagagatgagctcatatcaccacggagagatgtcactgatgatgacgattatcaatctagcacagaactttgtcggctcaaacaacctgaacttactgcagcctatcggacaattcggaaccaggctgcacggcggaaaggattccgcttcgcccaggtacatcttcacgatgctgtcatcactggctaggttgctctttcccccaaaagacgatcataccttgaaatttctttatgacgacaatcaaagggttgagcctgaatggtatatcccaatcattcccatggtcttgatcaacggagcagaagggatcggtacaggatggtcgtgtaaaataccaaacttcgacgttcgagaaattgtgaacaacattagacgacttatggacggtgaagagcccctgccaatgctccccagctataagaattttaaaggaactatcgaggagctcgcaccaaaccaatacgtgatatctggggaagttgccatcctcaatagtacaacaattgaaatcagcgaactaccagtgcggacgtggacccagacgtacaaggagcaggtcctcgagcctatgctcaatggaactgagaagactcctccccttatcacagactatcgcgagtaccacacagatactactgtgaaatttgtcgtaaagatgacagaggagaagttagcagaggctgaacgcgttggcctgcataaggttttcaagctccagacctcgctgacatgtaattctatggtcctgttcgatcacgttggctgcctaaagaaatacgacaccgtgttggatatcctccgcgatttctttgagttacgcctaaaatactatggtctaagaaaggagtggctgcttggaatgctcggggctgagtccgccaagttgaataaccaagcgaggttcattcttgagaaaattgatggaaagatcatcatagagaacaagcctaagaaggaactgattaaggttcttattcagcgcggatatgactcagaccccgtcaaggcctggaaggaggctcaacaaaaggtgccagatgaggaagaaaacgaggagagtgataacgagaaggaaactgaaaagagcgattcagttacggatagcggccctacttttaactacttgctggatatgcccctctggtatctaactaaagaaaaaaaggacgaactctgtcgcttgcgcaacgagaaagaacaggagctggataccctcaagcggaaatctccctctgacctttggaaagaggacttggccacattcatcgaagagttggaagccgttgaggcgaaggaaaagcaagatgagcaggtggggctgcctggcaaagggggtaaagccaagggaaagaagacccagatggcagaagtgctacccagccccagaggacagagagttatcccgagaatcactattgagatgaaagcagaggctgagaagaaaaataaaaagaaaatcaaaaatgaaaacaccgaaggatcccctcaggaggacggagtggagctcgagggactgaagcagagactggaaaagaagcagaagagggaacccggaacaaagacaaaaaagcagacaactctggcctttaaacctatcaagaaagggaaaaagcgtaacccgtggtccgatagcgaaagcgataggtcatccgacgagagtaattttgacgtcccacccagggaaaccgagccgagaagagcagcgacaaagactaagttcaccatggatcttgattccgacgaggatttctcagacttcgatgaaaaaaccgatgatgaagacttcgtgcccagcgacgccagcccccctaagactaagaccagtccaaagcaaaattgtaacaaagagctcaagcctcagaagtccgtggtgtccgatcttgaggccgatgatgtgaaaggatccgtgcccctgtcctcttcacccccagctacacattttcccgatgagactgagatcacaaaccccgtccccaagaagaacgtcaccgtgaagaaaactgcagctaaaagccaatcaagcacttcaactactggagccaagaagcgggctgcccctaagggaaccaaaagggatccggcactcaatagtggtgtgtcgcagaaaccggacccagctaaaacaaagaacagaaggaagcggaagccaagcacatcagacgattcagattctaattttgagaaaatcgtgtcaaaagcggtgacatctaagaagtctaaaggcgagagtgatgatttccacatggatttcgatagcgccgtcgctcccagggccaagtctgtgcgcgctaagaagcctatcaaatatctcgaagagagcgatgaggacgatctgttttag

SEQ ID NO: 34462 - DNA, 4596 bp, Artificial Sequence
  derived and/or modified sequence
atggaggtgtcacccctccagcctgttaacgagaatatgcaggttaacaagattaaaaaaaacgaggacgccaaaaagcgtctgagtgtagaacgcatctatcagaagaagactcagctggagcatattctgctccgacccgacacttatataggttcagtggagctggttacacaacagatgtgggtgtacgatgaggacgtcggcattaattaccgcgaggtgaccttcgtgcctggcctgtacaaaatattcgacgagattttggtgaatgccgcagacaataagcagagggatccaaaaatgtcatgtattagagtgaccatcgacccggagaacaatcttatatctatttggaacaatgggaaaggtataccagttgttgagcataaggttgagaagatgtatgtccctgccctcatcttcggccagctgctcacctcatctaactacgatgatgacgaaaagaaggtgacaggcggacggaatggttatggagcaaaactttgcaacatatttagtacaaagtttactgtcgaaaccgcttccagggaatataagaagatgtttaagcagacatggatggataatatgggcagggccggagaaatggagttgaaacctttcaacggcgaagactatacgtgcattactttccagcctgatctttccaagtttaaaatgcagagcctcgacaaggatatcgtggctctgatggtgaggagagcatatgatattgcaggttctacaaaagacgtgaaagtgttcctcaatgggaataagcttcctgttaagggatttcggagctatgtcgacatgtacctgaaggacaagctggacgaaacgggcaattccctgaaggtgatccatgagcaagtgaatcacagatgggaagtttgtttgactatgagcgagaaaggcttccagcaaattagctttgtaaattctatcgcgacaagtaaagggggacggcacgtcgattacgtggcagaccagattgtcaccaagttggtcgacgtggtcaagaagaagaacaagggaggcgtggcggtgaaggcccaccaggtcaagaaccacatgtggatcttcgttaacgccttgatcgagaaccccacattcgattcacagacaaaggaaaacatgaccctgcagcccaaatctttcggctccacatgccaactgtctgagaagttcataaaggctgctatcgggtgcggcattgtggagagcatcctgaattgggtgaaattcaaggcacaggtgcagctaaacaaaaagtgctctgctgtaaaacataatagaattaaaggcatacccaagctcgacgatgccaacgatgccggtggcagaaattccaccgaatgtacattgatcctgacagagggggatagcgctaaaactctcgcggtgtctggacttggtgtcgtcggcagggacaaatacggcgtgtttcccctgcggggtaagattcttaacgttagagaggcttcgcacaagcaaatcatggaaaacgcagagatcaataatatcataaagattgtcggactgcagtataagaaaaattatgaggatgaagacagtttaaaaactctgcgttacgggaaaattatgatcatgacggaccaagaccaagatgggtcacacataaaggggttactgatcaattttatccaccataactggccatcactcctgcgccatcgcttcctggaggagtttatcacccctatcgtgaaggtttctaagaacaagcaggaaatggcattctattcactgccagagtttgaagaatggaagtcttctacccccaaccataagaagtggaaagtgaagtactacaaagggctcggcacgtccacatctaaggaagccaaagagtacttcgcggacatgaagcgtcaccggattcagtttaaatactccggtccagaggacgatgcagccattagcttggcttttagcaaaaagcaaatcgacgaccgtaaggaatggctcaccaatttcatggaggatcgacgccagagaaagctactgggactgccggaggattacctgtacggccaaactaccacctatctgacatacaatgattttattaacaaggaactcattttgttctctaacagcgataacgagagaagtatcccctccatggtcgatggcctgaagcccggtcagagaaaggtcctcttcacatgcttcaaacggaacgacaagcgggaggtgaaagtcgcacagttagccggatccgtagcagagatgtcaagttaccatcatggcgagatgagcctgatgatgacgattatcaacctggcccagaattttgtgggcagcaataatctgaatctcctacagcccattgggcagttcggcacacggctccatggcggaaaggacagtgccagtcccagatacatctttaccatgttgtctagcctggcaagactgctgtttccccctaaggatgaccacacattaaagttcctgtatgatgacaatcagagagtggaacccgagtggtatataccgatcatccctatggttttgatcaacggcgctgaggggattggcactgggtggagttgtaagattcccaactttgatgtgagggagattgtgaacaatatcaggcgtctcatggacggggaggagccactgcctatgttgcccagttataaaaattttaaaggtacaatcgaggagctcgcgcctaaccaatacgtgatttcaggggaggtggccatacttaacagcaccacaattgagatttctgagctgcctgtccggacatggacccagacgtacaaggagcaggtgctagagccaatgcttaacggaactgaaaaaacccccccattgataacagactaccgggaataccatacagataccaccgtaaagttcgtggtgaaaatgacagaggagaaactagcggaggctgagagggtcgggctgcacaaggtgttcaagttgcaaacaagccttacttgtaactccatggtgctgttcgaccacgtggggtgtctgaagaagtacgatactgttctggacatcttgcgagacttctttgaactgcggttaaaatactatggtctgcggaaggaatggctccttgggatgttgggagctgaatcagccaaactgaataatcaagccagattcatcctggaaaagattgacggcaagatcatcatcgaaaataagccaaagaaagagcttattaaggttttaatccagagggggtatgactccgatccggtcaaagcttggaaagaggcacaacaaaaagtgcctgacgaggaagagaatgaagagagcgataacgagaaagagaccgagaagagcgatagcgtgaccgattcgggacccacattcaactacctgctcgatatgccactgtggtatctgaccaaggagaaaaaagatgaactgtgccgactgcgcaatgaaaaggagcaggaacttgacaccttaaaaaggaaatctcctagtgacctgtggaaagaggacctggccacatttattgaagagttggaggcagttgaagctaaagagaagcaggatgaacaagtcggacttcccggtaaagggggaaaggctaaaggaaagaagacccaaatggcggaggtcttaccaagtcctcgcggtcaaagggttattcccaggatcacaatcgaaatgaaagctgaggccgaaaagaaaaacaagaagaaaatcaaaaatgagaacactgaaggttccccacaggaggacggagttgaacttgaaggcctcaaacagcgcttagagaagaaacagaagcgcgagccgggaacaaagaccaaaaagcagacgacactggcattcaagcctataaagaagggcaagaagagaaacccttggtccgatagtgagtccgatcgtagtagtgatgaaagtaactttgatgttccaccacgcgagacagagccacgcagagcagctactaagacgaagtttaccatggatctggactccgatgaagatttcagcgattttgacgagaaaaccgacgatgaagatttcgtgcctagtgatgccagcccaccaaaaaccaagacatcaccaaaactgagtaataaagaactgaagccgcaaaaatccgttgtgagtgatctggaagcggatgatgtaaaaggctctgtccccctgagtagctcgcctccggcaactcatttccccgacgagacagagatcaccaacccagttcccaagaagaacgtgaccgtgaaaaagaccgccgcaaaatcacagagcagtacctcaaccacaggagctaagaaacgagcagcacccaagggcacaaaacgggatcctgccctgaattccggtgtgtcccagaagcccgatcctgccaaaacgaagaacaggcggaagcgaaaaccgtcgacttccgatgattcagactctaacttcgaaaagattgttagcaaagcagtcactagcaagaaaagcaagggagagagtgatgattttcatatggactttgacagcgccgtcgccccaagagctaaaagtgtgcgtgccaagaaaccaataaaatacctggaggagtccgatgaggacgatttgttctag

SEQ ID NO: 34463 - DNA, 5641 bp, Artificial Sequence
  derived and/or modified sequence
caagtgagcccttctcatcctgtaaatgaaaatatgcaagtcaacaaaataaagaaaaatgaagatgctaagaaaagactgtctgttgaaagaatctatcaaaagaaaacacaattggaacatattttgctccgcccagacacctacattggttctgtggaattagtgacccagcaaatgtgggtttacgatgaagatgttggcattaactatagggaagtcacttttgttcctggtttgtacaaaatctttgatgagattctagttaatgctgcggacaacaaacaaagggacccaaaaatgtcttgtattagagtcacaattgatccggaaaacaatttaattagtatatggaataatggaaaaggtattcctgttgttgaacacaaagttgaaaagatgtatgtcccagctctcatatttggacagctcctaacttctagtaactatgatgatgatgaaaagaaagtgacaggtggtcgaaatggctatggagccaaattgtgtaacatattcagtaccaaatttactgtggaaacagccagtagagaatacaagaaaatgttcaaacagacatggatggataatatgggaagagctggtgagatggaactcaagcccttcaatggagaagattatacatgtatcacctttcagcctgatttgtctaagtttaaaatgcaaagcctggacaaagatattgttgcactaatggtcagaagagcatatgatattgctggatccaccaaagatgtcaaagtctttcttaatggaaataaactgccagtaaaaggatttcgtagttatgtggacatgtatttgaaggacaagttggatgaaactggtaactccttgaaagtaatacatgaacaagtaaaccacaggtgggaagtgtgtttaactatgagtgaaaaaggctttcagcaaattagctttgtcaacagcattgctacatccaagggtggcagacatgttgattatgtagctgatcagattgtgactaaacttgttgatgttgtgaagaagaagaacaagggtggtgttgcagtaaaagcacatcaggtgaaaaatcacatgtggatttttgtaaatgccttaattgaaaacccaacctttgactctcagacaaaagaaaacatgactttacaacccaagagctttggatcaacatgccaattgagtgaaaaatttatcaaagctgctcatttgtattctagatttctgatagatcccttcttccctaatatgatccctaatatgaatctttttcaggccattggctgtggtattgtagaaagcatactaaactgggtgaagtttaaggcccaagtccagttaaacaagaagtgttcagctgtaaaacataatagaatcaagggaattcccaaactcgatgatgccaatgatgcagggggccgaaactccactgagtgtacgcttatcctgactgagggagattcagccaaaactttggctgtttcaggccttggtgtggttgggagagacaaatatggggttttccctcttagaggaaaaatactcaatgttcgagaagcttctcataagcagatcatggaaaatgctgagattaacaatatcatcaagattgtgggtcttcagtacaagaaaaactatgaagatgaagattcattgaagacgcttcgttatgggaagataatgattatgacagatcaggaccaagatggttcccacatcaaaggcttgctgattaattttatccatcacaactggccctctcttctgcgacatcgttttctggaggaatttatcactcccattgtaaaggtatctaaaaacaagcaagaaatggcattttacagccttcctgaatttgaagagtggaagagttctactccaaatcataaaaaatggaaagtcaaatattacaaaggtttgggcaccagcacatcaaaggaagctaaagaatactttgcagatatgaaaagacatcgtatccagttcaaatattctggtcctgaagatgatgctgctatcagcctggcctttagcaaaaaacagatagatgatcgaaaggaatggttaactaatttcatggaggatagaagacaacgaaagttacttgggcttcctgaggattacttgtatggacaaactaccacatatctgacatataatgacttcatcaacaaggaacttatcttgttctcaaattctgataacgagagatctatcccttctatggtggatggtttgaaaccaggtcagagaaaggttttgtttacttgcttcaaacggaatgacaagcgagaagtaaaggttgcccaattagctggatcagtggctgaaatgtcttcttatcatcatggtgagatgtcactaatgatgaccattatcaatttggctcagaattttgtgggtagcaataatctaaacctcttgcagcccattggtcagtttggtaccaggctacatggtggcaaggattctgctagtccacgatacatctttacaatgctcagctctttggctcgattgttatttccaccaaaagatgatcacacgttgaagtttttatatgatgacaaccagcgtgttgagcctgaatggtacattcctattattcccatggtgctgataaatggtgctgaaggaatcggtactgggtggtcctgcaaaatccccaactttgatgtgcgtgaaattgtaaataacatcaggcgtttgatggatggagaagaacctttgccaatgcttccaagttacaagaacttcaagggtactattgaagaactggctccaaatcaatatgtgattagtggtgaagtagctattcttaattctacaaccattgaaatctcagagcttcccgtcagaacatggacccagacatacaaagaacaagttctagaacccatgttgaatggcaccgagaagacacctcctctcataacagactatagggaataccatacagataccactgtgaaatttgttgtgaagatgactgaagaaaaactggcagaggcagagagagttggactacacaaagtcttcaaactccaaactagtctcacatgcaactctatggtgctttttgaccacgtaggctgtttaaagaaatatgacacggtgttggatattctaagagacttttttgaactcagacttaaatattatggattaagaaaagaatggctcctaggaatgcttggtgctgaatctgctaaactgaataatcaggctcgctttatcttagagaaaatagatggcaaaataatcattgaaaataagcctaagaaagaattaattaaagttctgattcagaggggatatgattcggatcctgtgaaggcctggaaagaagcccagcaaaaggttccagatgaagaagaaaatgaagagagtgacaacgaaaaggaaactgaaaagagtgactccgtaacagattctggaccaaccttcaactatcttcttgatatgcccctttggtatttaaccaaggaaaagaaagatgaactctgcaggctaagaaatgaaaaagaacaagagctggacacattaaaaagaaagagtccatcagatttgtggaaagaagacttggctacatttattgaagaattggaggctgttgaagccaaggaaaaacaagatgaacaagtcggacttcctgggaaaggggggaaggccaaggggaaaaaaacacaaatggctgaagttttgccttctccgcgtggtcaaagagtcattccacgaataaccatagaaatgaaagcagaggcagaaaagaaaaataaaaagaaaattaagaatgaaaatactgaaggaagccctcaagaagatggtgtggaactagaaggcctaaaacaaagattagaaaagaaacagaaaagagaaccaggtacaaagacaaagaaacaaactacattggcatttaagccaatcaaaaaaggaaagaagagaaatccctggtctgattcagaatcagataggagcagtgacgaaagtaattttgatgtccctccacgagaaacagagccacggagagcagcaacaaaaacaaaattcacaatggatttggattcagatgaagatttctcagattttgatgaaaaaactgatgatgaagattttgtcccatcagatgctagtccacctaagaccaaaacttccccaaaacttagtaacaaagaactgaaaccacagaaaagtgtcgtgtcagaccttgaagctgatgatgttaagggcagtgtaccactgtcttcaagccctcctgctacacatttcccagatgaaactgaaattacaaacccagttcctaaaaagaatgtgacagtgaagaagacagcagcaaaaagtcagtcttccacctccactaccggtgccaaaaaaagggctgccccaaaaggaactaaaagggatccagctttgaattctggtgtctctcaaaagcctgatcctgccaaaaccaagaatcgccgcaaaaggaagccatccacttctgatgattctgactctaattttgagaaaattgtttcgaaagcagtcacaagcaagaaatccaagggggagagtgatgacttccatatggactttgactcagctgtggctcctcgggcaaaatctgtacgggcaaagaaacctataaagtacctggaagagtcagatgaagatgatctgttttaaaatgtgaggcgattattttaagtaattatcttaccaagcccaagactggttttaaagttacctgaagctcttaacttcctcccctctgaatttagtttggggaaggtgtttttagtacaagacatcaaagtgaagtaaagcccaagtgttctttagctttttataatactgtctaaatagtgaccatctcatgggcattgttttcttctctgctttgtctgtgttttgagtctgctttcttttgtctttaaaacctgatttttaagttcttctgaactgtagaaatagctatctgatcacttcagcgtaaagcagtgtgtttattaaccatccactaagctaaaactagagcagtttgatttaaaagtgtcactcttcctccttttctactttcagtagatatgagatagagcataattatctgttttatcttagttttatacataatttaccatcagatagaactttatggttctagtacagatactctactacactcagcctcttatgtgccaagtttttctttaagcaatgagaaattgctcatgttcttcatcttctcaaatcatcagaggccgaagaaaaacactttggctgtgtctataacttgacacagtcaatagaatgaagaaaattagagtagttatgtgattatttcagctcttgacctgtcccctctggctgcctctgagtctgaatctcccaaagagagaaaccaatttctaagaggactggattgcagaagactcggggacaacatttgatccaagatcttaaatgttatattgataaccatgctcagcaatgagctattagattcattttgggaaatctccataatttcaatttgtaaactttgttaagacctgtctacattgttatatgtgtgtgacttgagtaatgttatcaacgtttttgtaaatatttactatgtttttctattagctaaattccaacaattttgtactttaataaa

SEQ ID NO: 34464 - DNA, 5809 bp, Artificial Sequence
  derived and/or modified sequence
aggttcaagtggagctctcctaaccgacgcgcgtctgtggagaagcggcttggtcgggggtggtctcgtggggtcctgcctgtttagtcgctttcagggttcttgagccccttcacgaccgtcaccatggaagtgtcaccattgcagcctgtaaatgaaaatatgcaagtcaacaaaataaagaaaaatgaagatgctaagaaaagactgtctgttgaaagaatctatcaaaagaaaacacaattggaacatattttgctccgcccagacacctacattggttctgtggaattagtgacccagcaaatgtgggtttacgatgaagatgttggcattaactatagggaagtcacttttgttcctggtttgtacaaaatctttgatgagattctagttaatgctgcggacaacaaacaaagggacccaaaaatgtcttgtattagagtcacaattgatccggaaaacaatttaattagtatatggaataatggaaaaggtattcctgttgttgaacacaaagttgaaaagatgtatgtcccagctctcatatttggacagctcctaacttctagtaactatgatgatgatgaaaagaaagtgacaggtggtcgaaatggctatggagccaaattgtgtaacatattcagtaccaaatttactgtggaaacagccagtagagaatacaagaaaatgttcaaacaggcaataacatggatggataatatgggaagagctggtgagatggaactcaagcccttcaatggagaagattatacatgtatcacctttcagcctgatttgtctaagtttaaaatgcaaagcctggacaaagatattgttgcactaatggtcagaagagcatatgatattgctggatccaccaaagatgtcaaagtctttcttaatggaaataaactgccagtaaaaggatttcgtagttatgtggacatgtatttgaaggacaagttggatgaaactggtaactccttgaaagtaatacatgaacaagtaaaccacaggtgggaagtgtgtttaactatgagtgaaaaaggctttcagcaaattagctttgtcaacagcattgctacatccaaggtaattttattcttaaattatatgatttatctttacatatatgtgttcttattgtttttaatatataaagtggacttgaatattgggctagcttattttacaggtggcagacatgttgattatgtagctgatcagattgtgactaaacttgttgatgttgtgaagaagaagaacaagggtggtgttgcagtaaaagcacatcaggtgaaaaatcacatgtggatttttgtaaatgccttaattgaaaacccaacctttgactctcagacaaaagaaaacatgactttacaacccaagagctttggatcaacatgccaattgagtgaaaaatttatcaaagctgccattggctgtggtattgtagaaagcatactaaactgggtgaagtttaaggcccaagtccagttaaacaagaagtgttcagctgtaaaacataatagaatcaagggaattcccaaactcgatgatgccaatgatgcagggggccgaaactccactgagtgtacgcttatcctgactgagggagattcagccaaaactttggctgtttcaggccttggtgtggttgggagagacaaatatggggttttccctcttagaggaaaaatactcaatgttcgagaagcttctcataagcagatcatggaaaatgctgagattaacaatatcatcaagattgtgggtcttcagtacaagaaaaactatgaagatgaagattcattgaagacgcttcgttatgggaagataatgattatgacagatcaggaccaagatggttcccacatcaaaggcttgctgattaattttatccatcacaactggccctctcttctgcgacatcgttttctggaggaatttatcactcccattgtaaaggtatctaaaaacaagcaagaaatggcattttacagccttcctgaatttgaagagtggaagagttctactccaaatcataaaaaatggaaagtcaaatattacaaaggtttgggcaccagcacatcaaaggaagctaaagaatactttgcagatatgaaaagacatcgtatccagttcaaatattctggtcctgaagatgatgctgctatcagcctggcctttagcaaaaaacagatagatgatcgaaaggaatggttaactaatttcatggaggatagaagacaacgaaagttacttgggcttcctgaggattacttgtatggacaaactaccacatatctgacatataatgacttcatcaacaaggaacttatcttgttctcaaattctgataacgagagatctatcccttctatggtggatggtttgaaaccaggtcagagaaaggttttgtttacttgcttcaaacggaatgacaagcgagaagtaaaggttgcccaattagctggatcagtggctgaaatgtcttcttatcatcatggtgagatgtcactaatgatgaccattatcaatttggctcagaattttgtgggtagcaataatctaaacctcttgcagcccattggtcagtttggtaccaggctacatggtggcaaggattctgctagtccacgatacatctttacaatgctcagctctttggctcgattgttatttccaccaaaagatgatcacacgttgaagtttttatatgatgacaaccagcgtgttgagcctgaatggtacattcctattattcccatggtgctgataaatggtgctgaaggaatcggtactgggtggtcctgcaaaatccccaactttgatgtgcgtgaaattgtaaataacatcaggcgtttgatggatggagaagaacctttgccaatgcttccaagttacaagaacttcaagggtactattgaagaactggctccaaatcaatatgtgattagtggtgaagtagctattcttaattctacaaccattgaaatctcagagcttcccgtcagaacatggacccagacatacaaagaacaagttctagaacccatgttgaatggcaccgagaagacacctcctctcataacagactatagggaataccatacagataccactgtgaaatttgttgtgaagatgactgaagaaaaactggcagaggcagagagagttggactacacaaagtcttcaaactccaaactagtctcacatgcaactctatggtgctttttgaccacgtaggctgtttaaagaaatatgacacggtgttggatattctaagagacttttttgaactcagacttaaatattatggattaagaaaagaatggctcctaggaatgcttggtgctgaatctgctaaactgaataatcaggctcgctttatcttagagaaaatagatggcaaaataatcattgaaaataagcctaagaaagaattaattaaagttctgattcagaggggatatgattcggatcctgtgaaggcctggaaagaagcccagcaaaaggttccagatgaagaagaaaatgaagagagtgacaacgaaaaggaaactgaaaagagtgactccgtaacagattctggaccaaccttcaactatcttcttgatatgcccctttggtatttaaccaaggaaaagaaagatgaactctgcaggctaagaaatgaaaaagaacaagagctggacacattaaaaagaaagagtccatcagatttgtggaaagaagacttggctacatttattgaagaattggaggctgttgaagccaaggaaaaacaagatgaacaagtcggacttcctgggaaaggggggaaggccaaggggaaaaaaacacaaatggctgaagttttgccttctccgcgtggtcaaagagtcattccacgaataaccatagaaatgaaagcagaggcagaaaagaaaaataaaaagaaaattaagaatgaaaatactgaaggaagccctcaagaagatggtgtggaactagaaggcctaaaacaaagattagaaaagaaacagaaaagagaaccaggtacaaagacaaagaaacaaactacattggcatttaagccaatcaaaaaaggaaagaagagaaatccctggtctgattcagaatcagataggagcagtgacgaaagtaattttgatgtccctccacgagaaacagagccacggagagcagcaacaaaaacaaaattcacaatggatttggattcagatgaagatttctcagattttgatgaaaaaactgatgatgaagattttgtcccatcagatgctagtccacctaagaccaaaacttccccaaagcaaaattgtaacaaagaactgaaaccacagaaaagtgtcgtgtcagaccttgaagctgatgatgttaagggcagtgtaccactgtcttcaagccctcctgctacacatttcccagatgaaactgaaattacaaacccagttcctaaaaagaatgtgacagtgaagaagacagcagcaaaaagtcagtcttccacctccactaccggtgccaaaaaaagggctgccccaaaaggaactaaaagggatccagctttgaattctggtgtctctcaaaagcctgatcctgccaaaaccaagaatcgccgcaaaaggaagccatccacttctgatgattctgactctaattttgagaaaattgtttcgaaagcagtcacaagcaagaaatccaagggggagagtgatgacttccatatggactttgactcagctgtggctcctcgggcaaaatctgtacgggcaaagaaacctataaagtacctggaagagtcagatgaagatgatctgttttaaaatgtgaggcgattattttaagtaattatcttaccaagcccaagactggttttaaagttacctgaagctcttaacttcctcccctctgaatttagtttggggaaggtgtttttagtacaagacatcaaagtgaagtaaagcccaagtgttctttagctttttataatactgtctaaatagtgaccatctcatgggcattgttttcttctctgctttgtctgtgttttgagtctgctttcttttgtctttaaaacctgatttttaagttcttctgaactgtagaaatagctatctgatcacttcagcgtaaagcagtgtgtttattaaccatccactaagctaaaactagagcagtttgatttaaaagtgtcactcttcctccttttctactttcagtagatatgagatagagcataattatctgttttatcttagttttatacataatttaccatcagatagaactttatggttctagtacagatactctactacactcagcctcttatgtgccaagtttttctttaagcaatgagaaattgctcatgttcttcatcttctcaaatcatcagaggccgaagaaaaacactttggctgtgtctataacttgacacagtcaatagaatgaagaaaattagagtagttatgtgattatttcagctcttgacctgtcccctctggctgcctctgagtctgaatctcccaaagagagaaaccaatttctaagaggactggattgcagaagactcggggacaacatttgatccaagatcttaaatgttatattgataaccatgctcagcaatgagctattagattcattttgggaaatctccataatttcaatttgtaaactttgttaagacctgtctacattgttatatgtgtgtgacttgagtaatgttatcaacgtttttgtaaatatttactatgtttttctattagctaaattccaacaattttgtactttaataaa

SEQ ID NO: 34465 - DNA, 5758 bp, Artificial Sequence
  derived and/or modified sequence
gattggctggtctgcttcgggcgggctaaaggaaggttcaagtggagctctcctaaccgacgcgcgtctgtggagaagcggcttggtcgggggtggtctcgtggggtcctgcctgtttagtcgctttcagggttcttgagccccttcacgaccgtcaccatggaagtgtcaccattgcagcctgtaaatgaaaatatgcaagtcaacaaaataaagaaaaatgaagatgctaagaaaagactgtctgttgaaagaatctatcaaaagaaaacacaattggaacatattttgctccgcccagacacctacattggttctgtggaattagtgacccagcaaatgtgggtttacgatgaagatgttggcattaactatagggaagtcacttttgttcctggtttgtacaaaatctttgatgagattctagttaatgctgcggacaacaaacaaagggacccaaaaatgtcttgtattagagtcacaattgatccggaaaacaatttaattagtatatggaataatggaaaaggtattcctgttgttgaacacaaagttgaaaagatgtatgtcccagctctcatatttggacagctcctaacttctagtaactatgatgatgatgaaaagaaagtgacaggtggtcgaaatggctatggagccaaattgtgtaacatattcagtaccaaatttactgtggaaacagccagtagagaatacaagaaaatgttcaaacagacatggatggataatatgggaagagctggtgagatggaactcaagcccttcaatggagaagattatacatgtatcacctttcagcctgatttgtctaagtttaaaatgcaaagcctggacaaagatattgttgcactaatggtcagaagagcatatgatattgctggatccaccaaagatgtcaaagtctttcttaatggaaataaactgccagtaaaaggatttcgtagttatgtggacatgtatttgaaggacaagttggatgaaactggtaactccttgaaagtaatacatgaacaagtaaaccacaggtgggaagtgtgtttaactatgagtgaaaaaggctttcagcaaattagctttgtcaacagcattgctacatccaagggtggcagacatgttgattatgtagctgatcagattgtgactaaacttgttgatgttgtgaagaagaagaacaagggtggtgttgcagtaaaagcacatcaggtgaaaaatcacatgtggatttttgtaaatgccttaattgaaaacccaacctttgactctcagacaaaagaaaacatgactttacaacccaagagctttggatcaacatgccaattgagtgaaaaatttatcaaagctgccattggctgtggtattgtagaaagcatactaaactgggtgaagtttaaggcccaagtccagttaaacaagaagtgttcagctgtaaaacataatagaatcaagggaattcccaaactcgatgatgccaatgatgcagggggccgaaactccactgagtgtacgcttatcctgactgagggagattcagccaaaactttggctgtttcaggccttggtgtggttgggagagacaaatatggggttttccctcttagaggaaaaatactcaatgttcgagaagcttctcataagcagatcatggaaaatgctgagattaacaatatcatcaagattgtgggtcttcagtacaagaaaaactatgaagatgaagattcattgaagacgcttcgttatgggaagataatgattatgacagatcaggaccaagatggttcccacatcaaaggcttgctgattaattttatccatcacaactggccctctcttctgcgacatcgttttctggaggaatttatcactcccattgtaaaggtatctaaaaacaagcaagaaatggcattttacagccttcctgaatttgaagagtggaagagttctactccaaatcataaaaaatggaaagtcaaatattacaaaggtttgggcaccagcacatcaaaggaagctaaagaatactttgcagatatgaaaagacatcgtatccagttcaaatattctggtcctgaagatgatgctgctatcagcctggcctttagcaaaaaacagatagatgatcgaaaggaatggttaactaatttcatggaggatagaagacaacgaaagttacttgggcttcctgaggattacttgtatggacaaactaccacatatctgacatataatgacttcatcaacaaggaacttatcttgttctcaaattctgataacgagagatctatcccttctatggtggatggtttgaaaccaggtcagagaaaggttttgtttacttgcttcaaacggaatgacaagcgagaagtaaaggttgcccaattagctggatcagtggctgaaatgtcttcttatcatcatggtgagatgtcactaatgatgaccattatcaatttggctcagaattttgtgggtagcaataatctaaacctcttgcagcccattggtcagtttggtaccaggctacatggtggcaaggattctgctagtccacgatacatctttacaatgctcagctctttggctcgattgttatttccaccaaaagatgatcacacgttgaagtttttatatgatgacaaccagcgtgttgagcctgaatggtacattcctattattcccatggtgctgataaatggtgctgaaggaatcggtactgggtggtcctgcaaaatccccaactttgatgtgcgtgaaattgtaaataacatcaggcgtttgatggatggagaagaacctttgccaatgcttccaagttacaagaacttcaagggtactattgaagaactggctccaaatcaatatgtgattagtggtgaagtagctattcttaattctacaaccattgaaatctcagagcttcccgtcagaacatggacccagacatacaaagaacaagttctagaacccatgttgaatggcaccgagaagacacctcctctcataacagactatagggaataccatacagataccactgtgaaatttgttgtgaagatgactgaagaaaaactggcagaggcagagagagttggactacacaaagtcttcaaactccaaactagtctcacatgcaactctatggtgctttttgaccacgtaggctgtttaaagaaatatgacacggtgttggatattctaagagacttttttgaactcagacttaaatattatggattaagaaaagaatggctcctaggaatgcttggtgctgaatctgctaaactgaataatcaggctcgctttatcttagagaaaatagatggcaaaataatcattgaaaataagcctaagaaagaattaattaaagttctgattcagaggggatatgattcggatcctgtgaaggcctggaaagaagcccagcaaaaggttccagatgaagaagaaaatgaagagagtgacaacgaaaaggaaactgaaaagagtgactccgtaacagattctggaccaaccttcaactatcttcttgatatgcccctttggtatttaaccaaggaaaagaaagatgaactctgcaggctaagaaatgaaaaagaacaagagctggacacattaaaaagaaagagtccatcagatttgtggaaagaagacttggctacatttattgaagaattggaggctgttgaagccaaggaaaaacaagatgaacaagtcggacttcctgggaaaggggggaaggccaaggggaaaaaaacacaaatggctgaagttttgccttctccgcgtggtcaaagagtcattccacgaataaccatagaaatgaaagcagaggcagaaaagaaaaataaaaagaaaattaagaatgaaaatactgaaggaagccctcaagaagatggtgtggaactagaaggcctaaaacaaagattagaaaagaaacagaaaagagaaccaggtacaaagacaaagaaacaaactacattggcatttaagccaatcaaaaaaggaaagaagagaaatccctggtctgattcagaatcagataggagcagtgacgaaagtaattttgatgtccctccacgagaaacagagccacggagagcagcaacaaaaacaaaattcacaatggatttggattcagatgaagatttctcagattttgatgaaaaaactgatgatgaagattttgtcccatcagatgctagtccacctaagaccaaaacttccccaaaacttagtaacaaagaactgaaaccacagaaaagtgtcgtgtcagaccttgaagctgatgatgttaagggcagtgtaccactgtcttcaagccctcctgctacacatttcccagatgaaactgaaattacaaacccagttcctaaaaagaatgtgacagtgaagaagacagcagcaaaaagtcagtcttccacctccactaccggtgccaaaaaaagggctgccccaaaaggaactaaaagggatccagctttgaattctggtgtctctcaaaagcctgatcctgccaaaaccaagaatcgccgcaaaaggaagccatccacttctgatgattctgactctaattttgagaaaattgtttcgaaagcagtcacaagcaagaaatccaagggggagagtgatgacttccatatggactttgactcagctgtggctcctcgggcaaaatctgtacgggcaaagaaacctataaagtacctggaagagtcagatgaagatgatctgttttaaaatgtgaggcgattattttaagtaattatcttaccaagcccaagactggttttaaagttacctgaagctcttaacttcctcccctctgaatttagtttggggaaggtgtttttagtacaagacatcaaagtgaagtaaagcccaagtgttctttagctttttataatactgtctaaatagtgaccatctcatgggcattgttttcttctctgctttgtctgtgttttgagtctgctttcttttgtctttaaaacctgatttttaagttcttctgaactgtagaaatagctatctgatcacttcagcgtaaagcagtgtgtttattaaccatccactaagctaaaactagagcagtttgatttaaaagtgtcactcttcctccttttctactttcagtagatatgagatagagcataattatctgttttatcttagttttatacataatttaccatcagatagaactttatggttctagtacagatactctactacactcagcctcttatgtgccaagtttttctttaagcaatgagaaattgctcatgttcttcatcttctcaaatcatcagaggccgaagaaaaacactttggctgtgtctataacttgacacagtcaatagaatgaagaaaattagagtagttatgtgattatttcagctcttgacctgtcccctctggctgcctctgagtctgaatctcccaaagagagaaaccaatttctaagaggactggattgcagaagactcggggacaacatttgatccaagatcttaaatgttatattgataaccatgctcagcaatgagctattagattcattttgggaaatctccataatttcaatttgtaaactttgttaagacctgtctacattgttatatgtgtgtgacttgagtaatgttatcaacgtttttgtaaatatttactatgtttttctattagctaaattccaacaattttgtactttaataaaatgttctaaacattgcaacccatagaa

SEQ ID NO: 34466 - protein, 1150 aa, Artificial Sequence
  derived and/or modified sequence
MAKSGGCGAGAGVGGGNGALTWVNNAAKKEESETANKNDSSKKLSVERVYQKKTQLEHILLRPDTYIGSVEPLTQFMWVYDEDVGMNCREVTFVPGLYKIFDEILVNAADNKQRDKNMTCIKVSIDPESNIISIWNNGKGIPVVEHKVEKVYVPALIFGQLLTSSNYDDDEKKVTGGRNGYGAKLCNIFSTKFTVETACKEYKHSFKQTWMNNMMKTSEAKIKHFDGEDYTCITFQPDLSKFKMEKLDKDIVALMTRRAYDLAGSCRGVKVMFNGKKLPVNGFRSYVDLYVKDKLDETGVALKVIHELANERWDVCLTLSEKGFQQISFVNSIATTKGGRHVDYVVDQVVGKLIEVVKKKNKAGVSVKPFQVKNHIWVFINCLIENPTFDSQTKENMTLQPKSFGSKCQLSEKFFKAASNCGIVESILNWVKFKAQTQLNKKCSSVKYSKIKGIPKLDDANDAGGKHSLECTLILTEGDSAKSLAVSGLGVIGRDRYGVFPLRGKILNVREASHKQIMENAEINNIIKIVGLQYKKSYDDAESLKTLRYGKIMIMTDQDQDGSHIKGLLINFIHHNWPSLLKHGFLEEFITPIVKASKNKQELSFYSIPEFDEWKKHIENQKAWKIKYYKGLGTSTAKEAKEYFADMERHRILFRYAGPEDDAAITLAFSKKKIDDRKEWLTNFMEDRRQRRLHGLPEQFLYGTATKHLTYNDFINKELILFSNSDNERSIPSLVDGFKPGQRKVLFTCFKRNDKREVKVAQLAGSVAEMSAYHHGEQALMMTIVNLAQNFVGSNNINLLQPIGQFGTRLHGGKDAASPRYIFTMLSTLARLLFPAVDDNLLKFLYDDNQRVEPEWYIPIIPMVLINGAEGIGTGWACKLPNYDAREIVNNVRRMLDGLDPHPMLPNYKNFKGTIQELGQNQYAVSGEIFVVDRNTVEITELPVRTWTQVYKEQVLEPMLNGTDKTPALISDYKEYHTDTTVKFVVKMTEEKLAQAEAAGLHKVFKLQTTLTCNSMVLFDHMGCLKKYETVQDILKEFFDLRLSYYGLRKEWLVGMLGAESTKLNNQARFILEKIQGKITIENRSKKDLIQMLVQRGYESDPVKAWKEAQEKAAEEDETQNQHDDSSSDSGTPSGPDFNYILNMSLWSLT

SEQ ID NO: 34467 - protein, 1621 aa, Artificial Sequence
  derived and/or modified sequence
MAKSGGCGAGAGVGGGNGALTWVNNAAKKEESETANKNDSSKKLSVERVYQKKTQLEHILLRPDTYIGSVEPLTQFMWVYDEDVGMNCREVTFVPGLYKIFDEILVNAADNKQRDKNMTCIKVSIDPESNIISIWNNGKGIPVVEHKVEKVYVPALIFGQLLTSSNYDDDEKKVTGGRNGYGAKLCNIFSTKFTVETACKEYKHSFKQTWMNNMMKTSEAKIKHFDGEDYTCITFQPDLSKFKMEKLDKDIVALMTRRAYDLAGSCRGVKVMFNGKKLPVNGFRSYVDLYVKDKLDETGVALKVIHELANERWDVCLTLSEKGFQQISFVNSIATTKGGRHVDYVVDQVVGKLIEVVKKKNKAGVSVKPFQVKNHIWVFINCLIENPTFDSQTKENMTLQPKSFGSKCQLSEKFFKAASNCGIVESILNWVKFKAQTQLNKKCSSVKYSKIKGIPKLDDANDAGGKHSLECTLILTEGDSAKSLAVSGLGVIGRDRYGVFPLRGKILNVREASHKQIMENAEINNIIKIVGLQYKKSYDDAESLKTLRYGKIMIMTDQDQDGSHIKGLLINFIHHNWPSLLKHGFLEEFITPIVKASKNKQELSFYSIPEFDEWKKHIENQKAWKIKYYKGLGTSTAKEAKEYFADMERHRILFRYAGPEDDAAITLAFSKKKIDDRKEWLTNFMEDRRQRRLHGLPEQFLYGTATKHLTYNDFINKELILFSNSDNERSIPSLVDGFKPGQRKVLFTCFKRNDKREVKVAQLAGSVAEMSAYHHGEQALMMTIVNLAQNFVGSNNINLLQPIGQFGTRLHGGKDAASPRYIFTMLSTLARLLFPAVDDNLLKFLYDDNQRVEPEWYIPIIPMVLINGAEGIGTGWACKLPNYDAREIVNNVRRMLDGLDPHPMLPNYKNFKGTIQELGQNQYAVSGEIFVVDRNTVEITELPVRTWTQVYKEQVLEPMLNGTDKTPALISDYKEYHTDTTVKFVVKMTEEKLAQAEAAGLHKVFKLQTTLTCNSMVLFDHMGCLKKYETVQDILKEFFDLRLSYYGLRKEWLVGMLGAESTKLNNQARFILEKIQGKITIENRSKKDLIQMLVQRGYESDPVKAWKEAQEKAAEEDETQNQHDDSSSDSGTPSGPDFNYILNMSLWSLTKEKVEELIKQRDAKGREVNDLKRKSPSDLWKEDLAAFVEELDKVESQEREDVLAGMSGKAIKGKVGKPKVKKLQLEETMPSPYGRRIIPEITAMKADASKKLLKKKKGDLDTAAVKVEFDEEFSGAPVEGAGEEALTPSVPINKGPKPKREKKEPGTRVRKTPTSSGKPSAKKVKKRNPWSDDESKSESDLEETEPVVIPRDSLLRRAAAERPKYTFDFSEEEDDDADDDDDDNNDLEELKVKASPITNDGEDEFVPSDGLDKDEYTFSPGKSKATPEKSLHDKKSQDFGNLFSFPSYSQKSEDDSAKFDSNEEDSASVFSPSFGLKQTDKVPSKTVAAKKGKPSSDTVPKPKRAPKQKKVVEAVNSDSDSEFGIPKKTTTPKGKGRGAKKRKASGSENEGDYNPGRKTSKTTSKKPKKTSFDQDSDVDIFPSDFPTEPPSLPRTGRARKEVKYFAESDEEEDDVDFAMFN

SEQ ID NO: 34468 - protein, 478 aa, Artificial Sequence
  derived and/or modified sequence
MSLWSLTKEKVEELIKQRDAKGREVNDLKRKSPSDLWKEDLAAFVEELDKVESQEREDVLAGMSGKAIKGKVGKPKVKKLQLEETMPSPYGRRIIPEITAMKADASKKLLKKKKGDLDTAAVKVEFDEEFSGAPVEGAGEEALTPSVPINKGPKPKREKKEPGTRVRKTPTSSGKPSAKKVKKRNPWSDDESKSESDLEETEPVVIPRDSLLRRAAAERPKYTFDFSEEEDDDADDDDDDNNDLEELKVKASPITNDGEDEFVPSDGLDKDEYTFSPGKSKATPEKSLHDKKSQDFGNLFSFPSYSQKSEDDSAKFDSNEEDSASVFSPSFGLKQTDKVPSKTVAAKKGKPSSDTVPKPKRAPKQKKVVEAVNSDSDSEFGIPKKTTTPKGKGRGAKKRKASGSENEGDYNPGRKTSKTTSKKPKKTSFDQDSDVDIFPSDFPTEPPSLPRTGRARKEVKYFAESDEEEDDVDFAMFN

SEQ ID NO: 34469 - DNA, 3453 bp, Artificial Sequence
  derived and/or modified sequence
atggccaagagcggcggctgcggcgccggcgccggcgtgggcggcggcaacggcgccctgacctgggtgaacaacgccgccaagaaggaggagagcgagaccgccaacaagaacgacagcagcaagaagctgagcgtggagagagtgtaccagaagaagacccagctggagcacatcctgctgagacccgacacctacatcggcagcgtggagcccctgacccagttcatgtgggtgtacgacgaggacgtgggcatgaactgcagagaggtgaccttcgtgcccggcctgtacaagatcttcgacgagatcctggtgaacgccgccgacaacaagcagagagacaagaacatgacctgcatcaaggtgagcatcgaccccgagagcaacatcatcagcatctggaacaacggcaagggcatccccgtggtggagcacaaggtggagaaggtgtacgtgcccgccctgatcttcggccagctgctgaccagcagcaactacgacgacgacgagaagaaggtgaccggcggcagaaacggctacggcgccaagctgtgcaacatcttcagcaccaagttcaccgtggagaccgcctgcaaggagtacaagcacagcttcaagcagacctggatgaacaacatgatgaagaccagcgaggccaagatcaagcacttcgacggcgaggactacacctgcatcaccttccagcccgacctgagcaagttcaagatggagaagctggacaaggacatcgtggccctgatgaccagaagagcctacgacctggccggcagctgcagaggcgtgaaggtgatgttcaacggcaagaagctgcccgtgaacggcttcagaagctacgtggacctgtacgtgaaggacaagctggacgagaccggcgtggccctgaaggtgatccacgagctggccaacgagagatgggacgtgtgcctgaccctgagcgagaagggcttccagcagatcagcttcgtgaacagcatcgccaccaccaagggcggcagacacgtggactacgtggtggaccaggtggtgggcaagctgatcgaggtggtgaagaagaagaacaaggccggcgtgagcgtgaagcccttccaggtgaagaaccacatctgggtgttcatcaactgcctgatcgagaaccccaccttcgacagccagaccaaggagaacatgaccctgcagcccaagagcttcggcagcaagtgccagctgagcgagaagttcttcaaggccgccagcaactgcggcatcgtggagagcatcctgaactgggtgaagttcaaggcccagacccagctgaacaagaagtgcagcagcgtgaagtacagcaagatcaagggcatccccaagctggacgacgccaacgacgccggcggcaagcacagcctggagtgcaccctgatcctgaccgagggcgacagcgccaagagcctggccgtgagcggcctgggcgtgatcggcagagacagatacggcgtgttccccctgagaggcaagatcctgaacgtgagagaggccagccacaagcagatcatggagaacgccgagatcaacaacatcatcaagatcgtgggcctgcagtacaagaagagctacgacgacgccgagagcctgaagaccctgagatacggcaagatcatgatcatgaccgaccaggaccaggacggcagccacatcaagggcctgctgatcaacttcatccaccacaactggcccagcctgctgaagcacggcttcctggaggagttcatcacccccatcgtgaaggccagcaagaacaagcaggagctgagcttctacagcatccccgagttcgacgagtggaagaagcacatcgagaaccagaaggcctggaagatcaagtactacaagggcctgggcaccagcaccgccaaggaggccaaggagtacttcgccgacatggagagacacagaatcctgttcagatacgccggccccgaggacgacgccgccatcaccctggccttcagcaagaagaagatcgacgacagaaaggagtggctgaccaacttcatggaggacagaagacagagaagactgcacggcctgcccgagcagttcctgtacggcaccgccaccaagcacctgacctacaacgacttcatcaacaaggagctgatcctgttcagcaacagcgacaacgagagaagcatccccagcctggtggacggcttcaagcccggccagagaaaggtgctgttcacctgcttcaagagaaacgacaagagagaggtgaaggtggcccagctggccggcagcgtggccgagatgagcgcctaccaccacggcgagcaggccctgatgatgaccatcgtgaacctggcccagaacttcgtgggcagcaacaacatcaacctgctgcagcccatcggccagttcggcaccagactgcacggcggcaaggacgccgccagccccagatacatcttcaccatgctgagcaccctggccagactgctgttccccgccgtggacgacaacctgctgaagttcctgtacgacgacaaccagagagtggagcccgagtggtacatccccatcatccccatggtgctgatcaacggcgccgagggcatcggcaccggctgggcctgcaagctgcccaactacgacgccagagagatcgtgaacaacgtgagaagaatgctggacggcctggacccccaccccatgctgcccaactacaagaacttcaagggcaccatccaggagctgggccagaaccagtacgccgtgagcggcgagatcttcgtggtggacagaaacaccgtggagatcaccgagctgcccgtgagaacctggacccaggtgtacaaggagcaggtgctggagcccatgctgaacggcaccgacaagacccccgccctgatcagcgactacaaggagtaccacaccgacaccaccgtgaagttcgtggtgaagatgaccgaggagaagctggcccaggccgaggccgccggcctgcacaaggtgttcaagctgcagaccaccctgacctgcaacagcatggtgctgttcgaccacatgggctgcctgaagaagtacgagaccgtgcaggacatcctgaaggagttcttcgacctgagactgagctactacggcctgagaaaggagtggctggtgggcatgctgggcgccgagagcaccaagctgaacaaccaggccagattcatcctggagaagatccagggcaagatcaccatcgagaacagaagcaagaaggacctgatccagatgctggtgcagagaggctacgagagcgaccccgtgaaggcctggaaggaggcccaggagaaggccgccgaggaggacgagacccagaaccagcacgacgacagcagcagcgacagcggcacccccagcggccccgacttcaactacatcctgaacatgagcctgtggagcctgacctag

SEQ ID NO: 34470 - DNA, 4866 bp, Artificial Sequence
  derived and/or modified sequence
atggccaagagcggcggctgcggcgccggcgccggcgtgggcggcggcaacggcgccctgacctgggtgaacaacgccgccaagaaggaggagagcgagaccgccaacaagaacgacagcagcaagaagctgagcgtggagagagtgtaccagaagaagacccagctggagcacatcctgctgagacccgacacctacatcggcagcgtggagcccctgacccagttcatgtgggtgtacgacgaggacgtgggcatgaactgcagagaggtgaccttcgtgcccggcctgtacaagatcttcgacgagatcctggtgaacgccgccgacaacaagcagagagacaagaacatgacctgcatcaaggtgagcatcgaccccgagagcaacatcatcagcatctggaacaacggcaagggcatccccgtggtggagcacaaggtggagaaggtgtacgtgcccgccctgatcttcggccagctgctgaccagcagcaactacgacgacgacgagaagaaggtgaccggcggcagaaacggctacggcgccaagctgtgcaacatcttcagcaccaagttcaccgtggagaccgcctgcaaggagtacaagcacagcttcaagcagacctggatgaacaacatgatgaagaccagcgaggccaagatcaagcacttcgacggcgaggactacacctgcatcaccttccagcccgacctgagcaagttcaagatggagaagctggacaaggacatcgtggccctgatgaccagaagagcctacgacctggccggcagctgcagaggcgtgaaggtgatgttcaacggcaagaagctgcccgtgaacggcttcagaagctacgtggacctgtacgtgaaggacaagctggacgagaccggcgtggccctgaaggtgatccacgagctggccaacgagagatgggacgtgtgcctgaccctgagcgagaagggcttccagcagatcagcttcgtgaacagcatcgccaccaccaagggcggcagacacgtggactacgtggtggaccaggtggtgggcaagctgatcgaggtggtgaagaagaagaacaaggccggcgtgagcgtgaagcccttccaggtgaagaaccacatctgggtgttcatcaactgcctgatcgagaaccccaccttcgacagccagaccaaggagaacatgaccctgcagcccaagagcttcggcagcaagtgccagctgagcgagaagttcttcaaggccgccagcaactgcggcatcgtggagagcatcctgaactgggtgaagttcaaggcccagacccagctgaacaagaagtgcagcagcgtgaagtacagcaagatcaagggcatccccaagctggacgacgccaacgacgccggcggcaagcacagcctggagtgcaccctgatcctgaccgagggcgacagcgccaagagcctggccgtgagcggcctgggcgtgatcggcagagacagatacggcgtgttccccctgagaggcaagatcctgaacgtgagagaggccagccacaagcagatcatggagaacgccgagatcaacaacatcatcaagatcgtgggcctgcagtacaagaagagctacgacgacgccgagagcctgaagaccctgagatacggcaagatcatgatcatgaccgaccaggaccaggacggcagccacatcaagggcctgctgatcaacttcatccaccacaactggcccagcctgctgaagcacggcttcctggaggagttcatcacccccatcgtgaaggccagcaagaacaagcaggagctgagcttctacagcatccccgagttcgacgagtggaagaagcacatcgagaaccagaaggcctggaagatcaagtactacaagggcctgggcaccagcaccgccaaggaggccaaggagtacttcgccgacatggagagacacagaatcctgttcagatacgccggccccgaggacgacgccgccatcaccctggccttcagcaagaagaagatcgacgacagaaaggagtggctgaccaacttcatggaggacagaagacagagaagactgcacggcctgcccgagcagttcctgtacggcaccgccaccaagcacctgacctacaacgacttcatcaacaaggagctgatcctgttcagcaacagcgacaacgagagaagcatccccagcctggtggacggcttcaagcccggccagagaaaggtgctgttcacctgcttcaagagaaacgacaagagagaggtgaaggtggcccagctggccggcagcgtggccgagatgagcgcctaccaccacggcgagcaggccctgatgatgaccatcgtgaacctggcccagaacttcgtgggcagcaacaacatcaacctgctgcagcccatcggccagttcggcaccagactgcacggcggcaaggacgccgccagccccagatacatcttcaccatgctgagcaccctggccagactgctgttccccgccgtggacgacaacctgctgaagttcctgtacgacgacaaccagagagtggagcccgagtggtacatccccatcatccccatggtgctgatcaacggcgccgagggcatcggcaccggctgggcctgcaagctgcccaactacgacgccagagagatcgtgaacaacgtgagaagaatgctggacggcctggacccccaccccatgctgcccaactacaagaacttcaagggcaccatccaggagctgggccagaaccagtacgccgtgagcggcgagatcttcgtggtggacagaaacaccgtggagatcaccgagctgcccgtgagaacctggacccaggtgtacaaggagcaggtgctggagcccatgctgaacggcaccgacaagacccccgccctgatcagcgactacaaggagtaccacaccgacaccaccgtgaagttcgtggtgaagatgaccgaggagaagctggcccaggccgaggccgccggcctgcacaaggtgttcaagctgcagaccaccctgacctgcaacagcatggtgctgttcgaccacatgggctgcctgaagaagtacgagaccgtgcaggacatcctgaaggagttcttcgacctgagactgagctactacggcctgagaaaggagtggctggtgggcatgctgggcgccgagagcaccaagctgaacaaccaggccagattcatcctggagaagatccagggcaagatcaccatcgagaacagaagcaagaaggacctgatccagatgctggtgcagagaggctacgagagcgaccccgtgaaggcctggaaggaggcccaggagaaggccgccgaggaggacgagacccagaaccagcacgacgacagcagcagcgacagcggcacccccagcggccccgacttcaactacatcctgaacatgagcctgtggagcctgaccaaggagaaggtggaggagctgatcaagcagagagacgccaagggcagagaggtgaacgacctgaagagaaagagccccagcgacctgtggaaggaggacctggccgccttcgtggaggagctggacaaggtggagagccaggagagagaggacgtgctggccggcatgagcggcaaggccatcaagggcaaggtgggcaagcccaaggtgaagaagctgcagctggaggagaccatgcccagcccctacggcagaagaatcatccccgagatcaccgccatgaaggccgacgccagcaagaagctgctgaagaagaagaagggcgacctggacaccgccgccgtgaaggtggagttcgacgaggagttcagcggcgcccccgtggagggcgccggcgaggaggccctgacccccagcgtgcccatcaacaagggccccaagcccaagagagagaagaaggagcccggcaccagagtgagaaagacccccaccagcagcggcaagcccagcgccaagaaggtgaagaagagaaacccctggagcgacgacgagagcaagagcgagagcgacctggaggagaccgagcccgtggtgatccccagagacagcctgctgagaagagccgccgccgagagacccaagtacaccttcgacttcagcgaggaggaggacgacgacgccgacgacgacgacgacgacaacaacgacctggaggagctgaaggtgaaggccagccccatcaccaacgacggcgaggacgagttcgtgcccagcgacggcctggacaaggacgagtacaccttcagccccggcaagagcaaggccacccccgagaagagcctgcacgacaagaagagccaggacttcggcaacctgttcagcttccccagctacagccagaagagcgaggacgacagcgccaagttcgacagcaacgaggaggacagcgccagcgtgttcagccccagcttcggcctgaagcagaccgacaaggtgcccagcaagaccgtggccgccaagaagggcaagcccagcagcgacaccgtgcccaagcccaagagagcccccaagcagaagaaggtggtggaggccgtgaacagcgacagcgacagcgagttcggcatccccaagaagaccaccacccccaagggcaagggcagaggcgccaagaagagaaaggccagcggcagcgagaacgagggcgactacaaccccggcagaaagaccagcaagaccaccagcaagaagcccaagaagaccagcttcgaccaggacagcgacgtggacatcttccccagcgacttccccaccgagccccccagcctgcccagaaccggcagagccagaaaggaggtgaagtacttcgccgagagcgacgaggaggaggacgacgtggacttcgccatgttcaactag

SEQ ID NO: 34471 - DNA, 1437 bp, Artificial Sequence
  derived and/or modified sequence
atgagcctgtggagcctgaccaaggagaaggtggaggagctgatcaagcagagagacgccaagggcagagaggtgaacgacctgaagagaaagagccccagcgacctgtggaaggaggacctggccgccttcgtggaggagctggacaaggtggagagccaggagagagaggacgtgctggccggcatgagcggcaaggccatcaagggcaaggtgggcaagcccaaggtgaagaagctgcagctggaggagaccatgcccagcccctacggcagaagaatcatccccgagatcaccgccatgaaggccgacgccagcaagaagctgctgaagaagaagaagggcgacctggacaccgccgccgtgaaggtggagttcgacgaggagttcagcggcgcccccgtggagggcgccggcgaggaggccctgacccccagcgtgcccatcaacaagggccccaagcccaagagagagaagaaggagcccggcaccagagtgagaaagacccccaccagcagcggcaagcccagcgccaagaaggtgaagaagagaaacccctggagcgacgacgagagcaagagcgagagcgacctggaggagaccgagcccgtggtgatccccagagacagcctgctgagaagagccgccgccgagagacccaagtacaccttcgacttcagcgaggaggaggacgacgacgccgacgacgacgacgacgacaacaacgacctggaggagctgaaggtgaaggccagccccatcaccaacgacggcgaggacgagttcgtgcccagcgacggcctggacaaggacgagtacaccttcagccccggcaagagcaaggccacccccgagaagagcctgcacgacaagaagagccaggacttcggcaacctgttcagcttccccagctacagccagaagagcgaggacgacagcgccaagttcgacagcaacgaggaggacagcgccagcgtgttcagccccagcttcggcctgaagcagaccgacaaggtgcccagcaagaccgtggccgccaagaagggcaagcccagcagcgacaccgtgcccaagcccaagagagcccccaagcagaagaaggtggtggaggccgtgaacagcgacagcgacagcgagttcggcatccccaagaagaccaccacccccaagggcaagggcagaggcgccaagaagagaaaggccagcggcagcgagaacgagggcgactacaaccccggcagaaagaccagcaagaccaccagcaagaagcccaagaagaccagcttcgaccaggacagcgacgtggacatcttccccagcgacttccccaccgagccccccagcctgcccagaaccggcagagccagaaaggaggtgaagtacttcgccgagagcgacgaggaggaggacgacgtggacttcgccatgttcaactag

SEQ ID NO: 34472 - DNA, 3453 bp, Artificial Sequence
  derived and/or modified sequence
atggcgaagtccggcggctgtggtgcaggggccggagtcggcggcggcaatggggccctgacgtgggtgaacaatgctgcaaagaaagaggagtctgagaccgccaacaagaacgattcttctaaaaaattgtccgtcgagagagtgtatcagaagaaaacccaactcgaacatatcctactgcgcccagacacgtacatcgggtctgttgagcccttgacccagtttatgtgggtgtatgatgaggacgtggggatgaactgtagagaagtaacattcgtgcccggtctgtataagatcttcgatgagattctggtaaatgcagccgataacaagcaacgggacaagaatatgacctgtatcaaagtctccatcgatcctgagtcaaacataatttctatttggaataatggtaagggcattcctgttgtggagcataaggtggagaaggtctacgttccggctctaatcttcggtcagctgctcacctctagcaactatgatgatgacgaaaagaaggtcacgggcggcagaaatggctatggtgccaagttgtgtaacattttctctaccaagtttaccgtggaaaccgcctgtaaagaatacaaacactcgtttaaacagacctggatgaataatatgatgaagacaagcgaggcgaaaatcaaacacttcgacggtgaagattatacttgcatcacatttcagcccgacctgtccaagtttaagatggagaagctagataaagatatcgtcgcactgatgacaaggcgtgcgtacgacctcgcagggtcctgcagaggcgtgaaagtgatgttcaacggaaaaaaactaccagtcaatgggtttcggtcttatgtggatctgtatgtgaaggataaactggatgagacgggagtggccctgaaggtgattcacgagctcgcgaacgagaggtgggacgtttgtctgactttaagcgaaaaaggttttcaacaaatcagtttcgtgaatagcatcgccaccacaaaaggtggaaggcacgtggattacgtggtggaccaggtggtcggtaaactgattgaggttgtgaaaaagaagaacaaagccggtgtctccgtcaaaccgtttcaggtgaaaaatcatatatgggtatttatcaattgtctgatcgaaaatccaacatttgacagtcagaccaaagagaacatgacgctccaacccaaaagcttcgggagtaagtgccagctgtcggagaagttctttaaagccgcaagcaattgcgggatagtggaatcaattctgaactgggttaagttcaaagcgcaaactcagctgaataagaaatgctcgagcgtcaagtactcaaagataaagggaatcccaaagctggatgacgctaatgatgctggaggaaagcacagcctagagtgcaccctgatcctgaccgagggggattccgccaaatccctggccgtgtctggcctgggcgtgatcgggagagatcggtacggcgtattccccctgcgaggtaagattctgaacgtcagagaggcgtctcacaagcagataatggagaacgctgagattaacaacatcataaaaattgtaggacttcaatacaagaaatcttacgacgacgcggagtcgctcaaaaccctgaggtatggcaaaattatgatcatgacggaccaagaccaagacggtagccatattaaagggctgctgatcaactttatccatcacaattggccttctttgctgaagcatggattccttgaggagtttatcacacctatcgttaaagcctctaaaaataagcaagagctgtctttctatagcatcccagagtttgatgaatggaaaaagcacatcgagaaccagaaagcatggaagatcaaatactacaagggtttaggcacctcaaccgctaaggaggctaaggagtactttgcggatatggagcgccataggatactgttccggtatgcaggtcccgaggacgatgccgctatcacgctggctttctctaaaaaaaagattgacgatcggaaggagtggctcactaatttcatggaggatcgtcgccagcgccggctgcacgggctccccgagcaattcctatatgggacagctactaagcacttgacttataatgattttattaacaaagaactgatcctgtttagcaactccgacaacgaacgtagcattcctagcctcgtggacggatttaagcccgggcagagaaaggttttattcacttgtttcaaacggaatgataagcgcgaggttaaagtcgcccaactcgccggaagcgtcgcggaaatgagcgcttatcatcacggcgagcaggccctgatgatgacaattgtgaatctcgcccagaacttcgtaggctctaataatatcaacctgctacagcccattggacagttcgggactcgtctgcatggaggcaaggatgccgcttcaccaagatacatcttcacaatgctgtccactttggcgcggttgctttttcccgcagtggacgacaatctgctcaagtttctctacgacgacaatcaacgggtggagccagaatggtacattccgattatccctatggtgctgatcaatggagcagaagggatcgggactggctgggcgtgcaagctgcctaattacgatgccagggaaattgtgaacaatgttagacggatgctggatgggctggacccacatccaatgctccccaattacaaaaatttcaaaggcacaattcaagagctgggccagaaccagtacgctgtgagcggggagatcttcgtcgtggataggaacaccgtggagatcaccgagctccctgtgcgaacttggacacaggtgtacaaagaacaggtgctcgagcccatgcttaacggtacggataagaccccggccctcatcagcgactacaaggaatatcacactgatacaacggtcaaattcgtagtcaaaatgacagaggaaaaattggcccaggcagaggctgccggactgcataaggtctttaaattacagactaccttgacctgcaattcaatggtgctgtttgatcatatgggctgcctaaaaaaatacgagactgtgcaggacatcctgaaggaattttttgacctccgtttatcttactacggcctgcggaaggaatggttggtggggatgctgggtgccgaaagcacgaagctcaataaccaggcaaggttcattctggagaaaatacagggcaagatcacaattgagaatcggtcaaaaaaagatcttatccagatgcttgtgcaaagaggttatgagagcgatcccgttaaggcctggaaagaggcccaggagaaggccgccgaagaggatgaaactcaaaatcagcatgatgacagtagtagcgactctggcacccccagcggcccagacttcaactacatcctgaacatgagcttgtggagtctgacctag

SEQ ID NO: 34473 - DNA, 4866 bp, Artificial Sequence
  derived and/or modified sequence
atggctaaaagtgggggatgtggcgccggggccggagttggtggtggtaacggagcccttacctgggtgaacaatgcagccaagaaagaagagagtgaaacggccaacaagaacgattcgtctaaaaagctgtcagtggagcgcgtataccagaaaaagactcaactggagcacatcctattgcggcctgacacttatatcgggagtgtggagccattgacccaatttatgtgggtgtacgatgaggacgtggggatgaattgtcgcgaggtgacctttgtgcccgggctgtacaagattttcgacgagattctggtgaacgccgcggacaacaagcaacgggacaaaaatatgacttgcatcaaggttagcatcgaccctgagagtaacattatttctatttggaataacgggaaaggaatcccagtggttgaacataaggttgaaaaagtctacgtgcccgcactcatatttggacagctgttgacatcctcaaattacgatgatgatgaaaaaaaagttacagggggaaggaatgggtacggggctaagctgtgtaacattttctcgactaaatttacagtggagaccgcttgcaaagaatacaaacacagcttcaagcagacatggatgaacaacatgatgaaaaccagtgaagctaagatcaagcactttgatggagaggactatacatgtattacatttcaacctgacttgtcaaagttcaaaatggaaaaattggacaaagatatcgttgcactcatgactcggcgcgcctatgacctggcgggatcctgccggggcgtcaaagtgatgtttaatggaaaaaagcttccggtgaacgggttccgctcttacgtggatctttacgtgaaagacaaattagacgaaacaggagtagctcttaaggtgatccacgagctggccaatgaacggtgggatgtttgcctgacgctgtctgagaaaggttttcagcaaatttcttttgtgaattcgatcgccactaccaagggcggacgtcacgtggattatgtggttgaccaggtagtgggtaagctgatagaggtcgttaagaaaaaaaacaaagccggtgtttctgtcaaaccctttcaggtcaaaaaccatatctgggtgtttatcaattgtttgattgaaaaccctacttttgactctcaaactaaagagaacatgacactgcagcctaagtctttcggaagcaagtgccaattgtctgagaagtttttcaaggccgccagcaattgtggaatcgtggaaagcatattgaactgggttaaatttaaagcgcaaactcagctcaataagaaatgttcgtctgtgaaatacagcaagattaaaggaatcccgaagctcgacgacgccaatgatgccggcggaaagcacagcttagagtgtaccctcatcctgaccgaaggtgactccgctaaatccctagccgtgagcggcttgggagtcatcggaagagataggtatggagttttcccactaaggggtaagattctgaatgttcgggaggcctcccacaaacaaatcatggagaacgccgagatcaacaatatcattaagatcgtcggtttacaatacaagaagtcttacgacgatgctgagtccctgaaaaccttgcggtatggaaagatcatgattatgacagatcaggaccaggatgggtctcatatcaagggcctcctgattaattttatccatcacaactggcctagtcttctgaaacatggatttctggaggaatttataactccaattgtcaaggctagcaagaacaaacaggagctctctttttacagcatcccagaatttgatgagtggaaaaagcatattgagaatcagaaggcctggaaaataaagtattacaaggggttgggcaccagcaccgctaaagaagctaaagaatacttcgcagatatggagaggcatagaatcctgttccgttacgcgggaccagaagatgatgctgctattactttggccttcagcaaaaaaaaaatcgatgatcgcaaagagtggctaacaaatttcatggaagatcgccggcagcggaggctccatgggttaccggaacagttcctatacggaacagctactaagcatttgacctacaatgactttattaacaaggagctgatcctcttctcaaacagtgataacgagagatccatcccgtctctggttgatgggttcaagccaggacagaggaaggtgctcttcacatgtttcaagaggaatgataagcgtgaggtgaaggtagcgcagctcgccggtagcgtggccgagatgagcgcctaccaccacggggagcaggcattgatgatgaccatcgtcaatctcgcccagaatttcgtggggtccaataacattaatctcttacagcctattggccagttcggtaccaggctgcacggaggtaaagatgctgcttctccaaggtacatttttacgatgttaagcactctggccagactgcttttcccagcggtggatgataacttgctcaagtttctgtatgacgacaatcagcgggtggagccggagtggtacattcctatcattcccatggtccttatcaacggggcagaagggataggaacaggctgggcctgcaagctacctaactatgacgcaagagaaatcgtcaataacgtacgccgcatgttggacggcctcgatcctcatcctatgctccctaattacaagaactttaagggcactatccaggagttaggacagaaccagtacgcagtgagcggcgagatctttgtagtggaccggaacacagtagagatcacagagttgccggtcagaacatggacacaggtgtacaaagaacaggtgctagagcctatgctgaacggtactgataagacgcccgcactaatttcggattacaaagagtatcatacggacactaccgtcaagtttgtcgttaaaatgactgaggagaagcttgctcaagcagaggccgcggggctccacaaagtatttaaactgcagaccacactgacatgtaattcaatggtgctgttcgatcatatgggctgtctcaagaagtacgaaaccgtgcaggacatactaaaagagtttttcgacttacgcctcagctactatggtctgcgtaaggagtggttggtggggatgctgggtgcagaatctactaagctaaataaccaggctcggtttattctagaaaagatccagggaaaaatcactatcgagaaccgaagcaaaaaagacctgatccaaatgttagtgcagcggggatacgagtccgaccctgtgaaggcatggaaagaggcacaggaaaaagctgccgaggaggacgagacccagaaccaacacgacgacagtagctccgatagtggcaccccgtcaggtccagatttcaactatatcttaaatatgtctttatggagtttgacaaaggaaaaagttgaggagctgatcaagcaaagggacgccaaggggagggaggttaatgaccttaaaagaaagagccctagcgatctctggaaggaagacctggcagccttcgtcgaagagcttgacaaggtggaatcccaggaaagggaagatgtgctggctggtatgagcggcaaggcaattaagggaaaggtcggcaagcctaaagtgaagaagctccagcttgaagagacgatgccatctccctacggaagacgaatcattcccgagatcacagcgatgaaagcagacgcttccaaaaaactgctgaagaaaaagaaaggggatttagatacagctgccgtcaaggtggagtttgatgaagagtttagcggcgcaccagtggagggggccggggaagaagccctgactcccagtgttcccatcaacaagggcccaaagcctaagagagaaaaaaaggagccgggcaccagagtgaggaaaacaccgactagttctggcaagccatcagccaaaaaggtgaaaaaacgtaacccctggtctgacgatgaatctaaatcagagtctgatttggaagagaccgagccggtggtgatcccacgggacagtttgctgcggcgggccgccgctgagcgacccaagtataccttcgacttcagcgaggaggaagacgatgatgctgacgatgacgatgatgacaataatgacctcgaggagctcaaggtgaaagcgagcccaattaccaatgatggggaagacgagttcgttcctagcgacggcctggacaaagatgagtatactttttctccggggaagagcaaagcgacccccgagaagagcttgcatgataaaaagtcacaggacttcgggaacttgttcagctttccgtcctattcccagaagtcagaggacgacagcgccaagttcgatagcaatgaggaagattctgccagtgtattcagcccatcgttcgggctcaaacagacggacaaagtgccctcaaagaccgttgctgcaaaaaaggggaagccgagctccgataccgttccaaagccaaaacgtgcacctaaacagaaaaaagtcgtggaggccgtcaacagcgactcagatagtgaatttgggattcctaaaaaaacaactacacccaaaggaaagggtcgaggagcaaagaaacgaaaggcgagcggaagtgagaatgagggcgactataaccctggcagaaaaacatctaagaccacgtccaagaagcctaaaaagacgtccttcgaccaagattctgatgtggacattttcccgagcgactttcctactgagccaccttccctaccacgtaccggcagggctagaaaggaggtgaagtacttcgctgagtctgatgaggaagaagatgatgtggacttcgcaatgttcaattag

SEQ ID NO: 34474 - DNA, 1437 bp, Artificial Sequence
  derived and/or modified sequence
atgtcgctctggagccttaccaaagaaaaggtggaggagctgattaagcagagagacgcaaagggaagggaagttaatgatctgaaacgtaagagtccaagcgacctctggaaggaagacctcgccgctttcgtcgaagaactagacaaggtggagagtcaagaaagagaggatgtcttagccggcatgtctgggaaggcaatcaaaggtaaagtcggcaagccaaaagtgaagaagctgcagctggaagagaccatgccctccccgtacgggaggagaattatcccagagatcaccgctatgaaggccgatgctagtaaaaagctgctcaaaaaaaaaaaaggcgatctcgatacagcggccgtgaaagtggagtttgatgaagagttttctggggcccccgtcgaaggcgctggagaggaggcccttacccccagtgtccctatcaataaaggccccaagccaaagcgggagaagaaggagcccggcactcgcgtcagaaaaacacctacatcatctggaaaacctagcgccaagaaggtgaaaaaacgcaacccgtggagcgacgacgaatccaaatccgaatctgacctcgaagagactgagcccgtggttatcccaagagattcgctgcttcgtagagccgcagccgagaggcccaaatatacgttcgacttctcagaggaagaggacgacgatgccgatgatgacgatgatgataacaacgacctggaagaactgaaagttaaggcgtcacctattaccaacgatggcgaggacgaattcgtcccgtccgatgggctggataaagatgagtatacttttagccccggcaaatccaaagccacacctgaaaagtctctgcatgacaagaaaagtcaagacttcggcaaccttttttcttttcctagttatagccagaagtccgaggacgacagcgctaaattcgactccaacgaagaagatagtgcatctgtcttctctccatcatttggccttaagcagacagataaagtaccttctaagacagtggcggctaagaaaggtaaaccatcctcggacacagtgcctaaaccgaagagggcacctaaacaaaaaaaggtcgtggaggctgtaaattcggacagtgactcagagtttggaataccaaagaaaaccactacaccaaaagggaagggacgtggcgccaagaaaaggaaggcttcagggagcgaaaacgaaggcgactacaacccaggacgtaaaacaagcaaaaccacctctaagaagccaaagaagacctccttcgatcaggattccgacgtcgatattttccctagcgacttcccgacagagcctcctagcttacccagaacagggagagctcgcaaagaagtgaaatatttcgcagagtctgatgaggaagaggatgacgtcgacttcgcaatgttcaattag

SEQ ID NO: 34475 - DNA, 1437 bp, Artificial Sequence
  derived and/or modified sequence
atgagcctgtggagtctgacgaaagaaaaggttgaagagctcattaaacagagagacgcaaaaggtcgcgaagtaaatgacttgaagcggaagagtccttcagatttatggaaggaagatctcgccgctttcgtggaagagctggacaaagtggaatcacaggagcgtgaggatgtgttggctggaatgtctgggaaggccattaaaggaaaagtaggcaaacccaaagttaaaaaactacagctcgaggagacaatgccgtccccatacgggaggcggatcatccccgagattacagctatgaaagccgatgcctccaagaagttgctgaaaaagaagaagggtgaccttgataccgctgcggtcaaggttgaattcgacgaggagttcagtggagcccctgtcgagggagcaggcgaggaagccctcaccccatcagtgcccattaataagggcccaaagcctaagcgagagaaaaaagaacctggtacacgcgttaggaaaacgccaacaagttctggaaaaccttcagccaagaaggtcaagaagagaaacccctggagtgacgacgagtccaagtctgagagcgacttagaagagacggagccagttgttatcccacgggacagtctgctccgaagagccgctgccgagcggcccaagtatacattcgacttttccgaggaggaagacgatgacgctgacgatgacgacgacgacaataacgatctcgaagagcttaaagtaaaagcatcgcctatcacaaacgatggggaagatgagttcgtgccctctgatggactcgataaagatgagtacacctttagtcctggaaagagcaaggccacacccgaaaagtcattacacgacaagaaatcacaggattttgggaacttgttttctttcccaagttactctcagaaaagtgaggacgacagtgccaaattcgattcaaatgaggaggacagtgccagcgtttttagtccaagctttggtttaaaacagactgataaagtgccatctaaaacggtggcagccaagaaggggaaacctagctccgataccgtgcccaagcctaagagagccccaaagcagaagaaggtggttgaggcagtaaactccgattcggatagcgaattcggtatccctaaaaaaacaaccacacccaaaggcaaaggtagaggggccaagaagcggaaagcaagcgggtccgagaatgagggcgattataacccgggcaggaagacaagcaagactacttcaaagaaacccaagaagacgtcatttgaccaagatagcgatgtggatatattcccatcagacttcccaactgagccacctagtctgccaaggactggccgcgcgcggaaggaggttaaatatttcgcagagtccgacgaagaggaagacgatgtagatttcgcgatgtttaattag

SEQ ID NO: 34476 - DNA, 3453 bp, Artificial Sequence
  derived and/or modified sequence
atggccaagagcggcggctgtggggccggggccggcgtgggcggcggcaatggagccctgacctgggtgaacaatgctgccaagaaggaggagagcgagacagccaacaagaatgacagcagcaagaagctgtctgtggagcgggtgtaccagaagaagacccagctggagcacatcctgctgcggccagacacctacatcggctctgtggagcccctgacccagttcatgtgggtgtatgatgaagatgtgggcatgaactgccgggaggtgacctttgtgcccggcctgtacaagatctttgatgagatcctggtgaatgctgctgacaacaagcagagggacaagaacatgacctgcatcaaggtgtccattgatcctgagagcaacatcatcagcatctggaacaacgggaagggcatccctgtggtggagcacaaggtggagaaggtgtatgtgcctgccctgatcttcggccagctgctgaccagcagcaactatgatgatgatgagaagaaggtgactggaggaagaaatggctatggagccaagctgtgcaacatcttcagcaccaagttcaccgtggagacagcctgcaaggagtacaagcacagcttcaagcagacctggatgaacaacatgatgaagaccagcgaggccaagatcaagcactttgatggagaggactacacctgcatcaccttccagcctgacctgagcaagttcaagatggagaagctggacaaggacatcgtggccctgatgacccggcgggcctatgacctggccggcagctgccggggcgtgaaggtgatgttcaacgggaagaagctgcctgtgaatggcttccgctcctatgtggacctgtatgtgaaggacaagctggatgagaccggggtggccctgaaggtgatccacgagctggccaatgaacgctgggatgtgtgcctgaccctgtctgagaagggcttccagcagatcagctttgtgaacagcatcgccaccaccaagggcggcagacatgtggactatgtggtggaccaggtggtgggcaagctgattgaggtggtgaagaagaagaacaaggccggcgtgtctgtgaagcccttccaggtgaagaaccacatctgggtgttcatcaactgcctgattgagaaccccacctttgacagccagaccaaggagaacatgaccctgcagcccaagagctttggcagcaagtgccagctgtctgagaagttcttcaaggccgccagcaactgtggcatcgtggagagcatcctgaactgggtgaagttcaaggcccagacccagctgaacaagaagtgcagctctgtgaagtacagcaagatcaagggcatccccaagctggatgatgccaatgatgctgggggcaagcacagcctggagtgcaccctcatcctgacagaaggagacagcgccaagagcctggccgtgtctggcctgggcgtcatcggccgggacagatatggagtcttccccctgcggggcaagatcctgaatgtgcgggaggccagccacaagcagatcatggagaatgctgagatcaacaacatcatcaagatcgtgggcctgcagtacaagaagagctatgatgatgctgagagcctgaagaccctgcgctatggcaagatcatgatcatgacagaccaggaccaggacggcagccacatcaagggcctgctgatcaacttcatccaccacaactggcccagcctgctgaagcacggcttcctggaggagttcatcacccccatcgtgaaggccagcaagaacaagcaggagctgtccttctacagcatccctgagtttgatgagtggaagaagcacatcgagaaccagaaggcctggaagatcaagtactacaagggcctgggcaccagcacagccaaggaggccaaggagtactttgctgacatggagcggcaccgcatcctcttccgctatgccggcccagaagatgatgctgccatcaccctggccttcagcaagaagaagattgatgacaggaaggagtggctgaccaacttcatggaggaccggcggcagaggcggctgcacggcctgcctgagcagttcctgtatggaacagccaccaagcacctgacctacaatgacttcatcaacaaggagctgatcctcttcagcaacagcgacaatgaaagaagcatccccagcctggtggatggcttcaagccaggccagaggaaggtgctcttcacctgcttcaagagaaatgacaagcgggaggtgaaggtggcccagctggccggctctgtggccgagatgtctgcctaccaccacggggagcaggccctgatgatgaccatcgtgaacctggcccagaactttgtgggcagcaacaacatcaacctgctgcagcccatcggccagtttggcacccggctgcatggaggcaaggatgctgccagcccccgctacatcttcaccatgctgagcaccctggcccggctgctcttccctgctgtggatgacaacctgctgaagttcctgtatgatgacaaccagagggtggagcctgagtggtacatccccatcatccccatggtgctgatcaatggagctgagggcatcggcaccggctgggcctgcaagctgcccaactatgatgcccgggagatcgtgaacaacgtgcggaggatgctggatggcctggacccccaccccatgctgcccaactacaagaacttcaagggcaccatccaggagctgggccagaaccagtatgctgtgtctggagagatctttgtggtggacaggaacacagtggagatcacagagctgcctgtgaggacctggacccaggtgtacaaggagcaggtgctggagcccatgctgaatggaacagacaagaccccagccctgatcagtgactacaaggagtaccacacagacaccaccgtgaagtttgtggtgaagatgacagaggagaagctggcccaggccgaggccgccggcctgcacaaggtgttcaagctgcagaccaccctgacctgcaacagcatggtgctgtttgaccacatgggctgcctgaagaagtatgagaccgtgcaggacatcctgaaggagttctttgacctgcggctgagctactacggcctgaggaaggagtggctggtgggcatgctgggcgctgagagcaccaagctgaacaaccaggcccgcttcatcctggagaagatccagggcaagatcaccatcgagaacagaagcaagaaggacctgatccagatgctggtgcagaggggctatgaaagtgaccctgtgaaggcctggaaggaggcccaggagaaggctgctgaggaggatgagacccagaaccagcatgatgacagcagcagtgacagcggcacccccagcggccctgacttcaactacatcctgaacatgagcctgtggagcctgacctag

SEQ ID NO: 34477 - DNA, 4866 bp, Artificial Sequence
  derived and/or modified sequence
atggccaagagcggcggctgtggggccggggccggcgtgggcggcggcaatggagccctgacctgggtgaacaatgctgccaagaaggaggagagcgagacagccaacaagaatgacagcagcaagaagctgtctgtggagcgggtgtaccagaagaagacccagctggagcacatcctgctgcggccagacacctacatcggctctgtggagcccctgacccagttcatgtgggtgtatgatgaagatgtgggcatgaactgccgggaggtgacctttgtgcccggcctgtacaagatctttgatgagatcctggtgaatgctgctgacaacaagcagagggacaagaacatgacctgcatcaaggtgtccattgatcctgagagcaacatcatcagcatctggaacaacgggaagggcatccctgtggtggagcacaaggtggagaaggtgtatgtgcctgccctgatcttcggccagctgctgaccagcagcaactatgatgatgatgagaagaaggtgactggaggaagaaatggctatggagccaagctgtgcaacatcttcagcaccaagttcaccgtggagacagcctgcaaggagtacaagcacagcttcaagcagacctggatgaacaacatgatgaagaccagcgaggccaagatcaagcactttgatggagaggactacacctgcatcaccttccagcctgacctgagcaagttcaagatggagaagctggacaaggacatcgtggccctgatgacccggcgggcctatgacctggccggcagctgccggggcgtgaaggtgatgttcaacgggaagaagctgcctgtgaatggcttccgctcctatgtggacctgtatgtgaaggacaagctggatgagaccggggtggccctgaaggtgatccacgagctggccaatgaacgctgggatgtgtgcctgaccctgtctgagaagggcttccagcagatcagctttgtgaacagcatcgccaccaccaagggcggcagacatgtggactatgtggtggaccaggtggtgggcaagctgattgaggtggtgaagaagaagaacaaggccggcgtgtctgtgaagcccttccaggtgaagaaccacatctgggtgttcatcaactgcctgattgagaaccccacctttgacagccagaccaaggagaacatgaccctgcagcccaagagctttggcagcaagtgccagctgtctgagaagttcttcaaggccgccagcaactgtggcatcgtggagagcatcctgaactgggtgaagttcaaggcccagacccagctgaacaagaagtgcagctctgtgaagtacagcaagatcaagggcatccccaagctggatgatgccaatgatgctgggggcaagcacagcctggagtgcaccctcatcctgacagaaggagacagcgccaagagcctggccgtgtctggcctgggcgtcatcggccgggacagatatggagtcttccccctgcggggcaagatcctgaatgtgcgggaggccagccacaagcagatcatggagaatgctgagatcaacaacatcatcaagatcgtgggcctgcagtacaagaagagctatgatgatgctgagagcctgaagaccctgcgctatggcaagatcatgatcatgacagaccaggaccaggacggcagccacatcaagggcctgctgatcaacttcatccaccacaactggcccagcctgctgaagcacggcttcctggaggagttcatcacccccatcgtgaaggccagcaagaacaagcaggagctgtccttctacagcatccctgagtttgatgagtggaagaagcacatcgagaaccagaaggcctggaagatcaagtactacaagggcctgggcaccagcacagccaaggaggccaaggagtactttgctgacatggagcggcaccgcatcctcttccgctatgccggcccagaagatgatgctgccatcaccctggccttcagcaagaagaagattgatgacaggaaggagtggctgaccaacttcatggaggaccggcggcagaggcggctgcacggcctgcctgagcagttcctgtatggaacagccaccaagcacctgacctacaatgacttcatcaacaaggagctgatcctcttcagcaacagcgacaatgaaagaagcatccccagcctggtggatggcttcaagccaggccagaggaaggtgctcttcacctgcttcaagagaaatgacaagcgggaggtgaaggtggcccagctggccggctctgtggccgagatgtctgcctaccaccacggggagcaggccctgatgatgaccatcgtgaacctggcccagaactttgtgggcagcaacaacatcaacctgctgcagcccatcggccagtttggcacccggctgcatggaggcaaggatgctgccagcccccgctacatcttcaccatgctgagcaccctggcccggctgctcttccctgctgtggatgacaacctgctgaagttcctgtatgatgacaaccagagggtggagcctgagtggtacatccccatcatccccatggtgctgatcaatggagctgagggcatcggcaccggctgggcctgcaagctgcccaactatgatgcccgggagatcgtgaacaacgtgcggaggatgctggatggcctggacccccaccccatgctgcccaactacaagaacttcaagggcaccatccaggagctgggccagaaccagtatgctgtgtctggagagatctttgtggtggacaggaacacagtggagatcacagagctgcctgtgaggacctggacccaggtgtacaaggagcaggtgctggagcccatgctgaatggaacagacaagaccccagccctgatcagtgactacaaggagtaccacacagacaccaccgtgaagtttgtggtgaagatgacagaggagaagctggcccaggccgaggccgccggcctgcacaaggtgttcaagctgcagaccaccctgacctgcaacagcatggtgctgtttgaccacatgggctgcctgaagaagtatgagaccgtgcaggacatcctgaaggagttctttgacctgcggctgagctactacggcctgaggaaggagtggctggtgggcatgctgggcgctgagagcaccaagctgaacaaccaggcccgcttcatcctggagaagatccagggcaagatcaccatcgagaacagaagcaagaaggacctgatccagatgctggtgcagaggggctatgaaagtgaccctgtgaaggcctggaaggaggcccaggagaaggctgctgaggaggatgagacccagaaccagcatgatgacagcagcagtgacagcggcacccccagcggccctgacttcaactacatcctgaacatgagcctgtggagcctgaccaaggagaaggtggaggagctgatcaagcagagagatgccaagggccgggaggtgaatgacctgaagaggaagagccccagcgacctgtggaaggaggacctggccgcctttgtggaggagctggacaaggtggagagccaggagcgggaggatgtgctggccggcatgtctgggaaggccatcaagggcaaggtgggcaagcccaaggtgaagaagctgcagctggaggagaccatgcccagcccctatggaagacgcatcatccctgagatcacagccatgaaggcagatgccagcaagaagctgctgaagaagaagaagggggacctggacacagctgctgtgaaggtggagtttgatgaggagttcagcggggcccctgtggagggcgctggggaggaggccctgaccccatctgtgcccatcaacaagggccccaagcccaagcgggagaagaaggagcccggcaccagggtgaggaagacccccaccagcagcggcaagcccagcgccaagaaggtgaagaagaggaacccctggagcgatgatgagagcaagtctgagagtgacctggaggagacagagcctgtggtgatcccccgggacagcctgctgcggcgggctgctgctgagcggcccaagtacacctttgacttcagcgaggaggaggatgatgatgctgatgatgatgatgatgacaacaatgacctggaggagctgaaggtgaaggccagccccatcaccaatgatggagaagatgaatttgtgcccagtgatggcctggacaaggatgagtacaccttcagccctgggaagagcaaggccaccccagagaagagcctgcatgacaagaagagccaggactttggaaacctcttctccttccccagctacagccagaagtcagaagatgacagcgccaagtttgacagcaatgaggaggacagcgccagcgtcttcagccccagctttggcctgaagcagacagacaaggtgcccagcaagacagtggccgccaagaagggcaagcccagcagtgacacagtgcccaagcccaagagggcccccaagcagaagaaggtggtggaggccgtgaacagcgacagcgacagcgagtttggcatccccaagaagaccaccacccccaagggcaagggccgcggggccaagaagaggaaggccagcggctctgaaaatgaaggagactacaaccctggcaggaagaccagcaagaccaccagcaagaagcccaagaagaccagctttgaccaggacagtgatgtggacatcttccccagcgacttccccacagagccccccagcctgcccaggacaggccgggccaggaaggaggtgaagtactttgctgagagtgatgaggaggaggatgatgtggactttgccatgttcaactag

SEQ ID NO: 34478 - DNA, 1437 bp, Artificial Sequence
  derived and/or modified sequence
atgagcctgtggagcctgaccaaggagaaggtggaggagctgatcaagcagagagatgccaagggccgggaggtgaatgacctgaagaggaagagccccagcgacctgtggaaggaggacctggccgcctttgtggaggagctggacaaggtggagagccaggagagagaagatgtgctggccggcatgtctgggaaggccatcaagggcaaggtgggcaagcccaaggtgaagaagctgcagctggaggagaccatgcccagcccctacggccgccgcatcatccctgagatcacagccatgaaggcagatgccagcaagaagctgctgaagaagaagaagggggacctggacacagctgctgtgaaggtggagtttgatgaggagttcagcggggcccctgtggagggcgctggggaggaggccctgacccccagcgtgcccatcaacaagggccccaagcccaagcgggagaagaaggagcccggcaccagggtgaggaagacccccaccagcagcggcaagcccagcgccaagaaggtgaagaagaggaacccctggagcgatgatgagagcaagtctgagagtgacctggaggagacagagcctgtggtgatcccccgggacagcctgctgcggcgggctgctgctgagcggcccaagtacacctttgacttcagcgaggaggaggatgatgatgctgatgatgatgatgatgacaacaatgacctggaggagctgaaggtgaaggccagccccatcaccaatgatggagaagatgaatttgtgcccagtgatggcctggacaaggatgagtacaccttcagccctgggaagagcaaggccaccccagagaagagcctgcatgacaagaagagccaggactttggaaacctcttctccttccccagctacagccagaagtcagaagatgattctgccaagtttgacagcaatgaagaagattctgcctctgtgttcagccccagctttggcctgaagcagacagacaaggtgcccagcaagacagtggccgccaagaagggcaagcccagcagtgacacagtgcccaagcccaagagggcccccaagcagaagaaggtggtggaggccgtgaacagcgacagcgacagcgagtttggcatccccaagaagaccaccacccccaagggcaagggccgcggggccaagaagaggaaggccagcggctctgaaaatgaaggagactacaaccctggcaggaagaccagcaagaccaccagcaagaagcccaagaagaccagctttgaccaggacagtgatgtggacatcttccccagcgacttccccacagagccccccagcctgcccaggacaggccgggccaggaaggaggtgaagtactttgctgagagtgatgaggaggaggatgatgtggactttgccatgttcaactag

SEQ ID NO: 34479 - DNA, 3453 bp, Artificial Sequence
  derived and/or modified sequence
atggccaagagcggcggctgcggcgccggcgccggcgtgggcggcggtaacggcgctctgacctgggtgaacaatgcggcgaagaaagaggaaagtgaaactgctaacaaaaacgacagtagtaagaagctgagtgtggaaagagtatatcagaagaagacacaactagaacatatcttacttcggcctgatacatatattggttctgtggagcctcttactcagtttatgtgggtttatgacgaggatgtggggatgaattgtagggaagtgacctttgtgcctggcctatacaagattttcgacgaaatcctcgtgaacgctgccgacaacaaacagagagacaaaaacatgacttgtataaaagtgtcaatcgatccagagtcgaatatcatttccatctggaataatggaaaagggatccctgtggtggaacataaagtggagaaagtttacgtcccggccctgatattcggccagctccttacaagcagtaattacgatgacgatgaaaagaaagtgactggcggcagaaacggatatggggctaagttgtgtaacatattcagcaccaagttcacagtggagacagcctgcaaggagtacaaacattcatttaaacagacatggatgaacaacatgatgaagacttccgaagccaaaattaagcactttgatggcgaagattacacatgtataacctttcagcccgacctatccaaatttaagatggaaaaactggataaagacattgtggcattgatgacacggagagcatatgacctcgccggcagctgccgtggtgtgaaggtgatgtttaacgggaagaaactccctgtaaacggcttcaggtcgtatgtcgatctctatgttaaagataagctagacgaaacaggcgtggccttgaaagtgatacacgagttagccaacgaacgatgggacgtctgcttaaccctcagcgaaaagggattccagcagatctcatttgtgaacagcatcgccactactaaaggcggcagacacgtcgattacgtggtggaccaggtggtgggaaagctgatcgaggtcgtcaaaaagaagaataaagctggagtctctgtgaagccattccaggtgaagaatcacatctgggttttcataaattgtctgatagagaatccaacgttcgactctcagacaaaagaaaacatgacgttacaacccaaaagctttggctccaaatgccagctgtcggaaaaatttttcaaggctgcctctaactgtggaatcgtggaaagtatattaaattgggtgaaattcaaagcacaaacgcagttgaacaaaaagtgttccagtgtgaagtattccaagatcaaaggaatccctaagctagatgatgccaatgatgctggcggcaaacacagcctggagtgtaccctgattttgactgaaggggatagcgccaagtccctcgctgtgtctgggctgggagtgatcggtcgcgaccggtatggcgtctttccactaaggggaaagatactcaatgtgcgggaggccagccataagcagattatggaaaacgcagaaatcaacaatatcatcaaaatcgtgggccttcagtataagaaatcttatgatgacgcagagtccctcaaaacactgcggtacggcaagattatgatcatgactgatcaggatcaggatgggtctcacatcaaggggcttctcattaattttattcaccataattggccatccctcctcaagcatggcttcctagaagagtttatcacacctattgtgaaggcaagcaagaataaacaagagctctccttttattcaatcccagagtttgatgagtggaaaaaacacattgagaatcagaaagcatggaagatcaagtactataaggggctcggcacgagtacagcaaaggaggctaaggaatacttcgctgacatggaaagacacaggatcctgttcagatacgctggccccgaagacgatgctgcaataactttggcttttagcaagaagaagattgacgatcgaaaggaatggctgacaaatttcatggaagataggcgccagcggcgtttacacggactgcctgaacagtttctatatggcacagccactaaacacctcacatacaacgacttcatcaataaggaactaattctctttagcaattcagataatgaacgtagcatccccagcctggttgatgggtttaaacctggccaaagaaaggtcctgtttacctgtttcaaaaggaacgacaaaagagaagtcaaagttgcccaattggcggggagtgttgctgagatgtccgcctaccaccatggggagcaagccttgatgatgacaatagtgaacctagcccagaactttgttggctctaataatatcaatttgctgcaaccaattggacagtttggcacccgactccatgggggaaaagacgccgccagccctcggtacatctttacaatgctgagcacactggcaagattgttgttccctgccgtcgacgacaacctgctcaagttcctttatgacgataatcaaagggtggagcccgaatggtacatccccataataccaatggtgctgattaacggtgctgaagggatagggaccggatgggcttgtaagcttccgaactacgatgcccgcgagattgtgaacaacgtgcgccgcatgttagatggtttggatccccaccctatgcttccaaattataagaattttaaggggaccatccaggaactcggacagaaccagtatgctgtgtcaggcgaaatcttcgttgtggatcggaatacagtggaaataaccgagcttcccgttagaacatggacccaggtttacaaagaacaggtgcttgagcctatgctgaacggaaccgacaagactcccgctcttatctccgactataaagagtatcacaccgatactaccgtgaagtttgttgtgaagatgactgaggaaaagctcgctcaagccgaggcggctggccttcataaggtgttcaaactgcagactaccctgacttgtaatagcatggtgctcttcgaccacatgggttgtctgaagaaatacgaaactgtgcaggacattttaaaagaattttttgatctgagactgtcatactacggtctgcgtaaggaatggctagtgggcatgctcggggccgaaagtactaagctgaataatcaggcaagatttattctggaaaaaattcagggaaagataaccatagaaaaccgtagcaagaaggacctgatccaaatgttggtgcagcgaggctacgaatcagacccggtcaaagcatggaaagaagctcaggagaaggctgccgaggaggatgagactcagaaccagcacgacgattcatcttcagactcgggaacaccatcgggtccggacttcaactatatcctgaatatgagtctgtggtccttaacgtag

SEQ ID NO: 34480 - DNA, 4866 bp, Artificial Sequence
  derived and/or modified sequence
atggccaagagcggcggctgcggcgccggcgccggcgtgggcggcggaaatggggcactaacctgggtgaataatgccgccaagaaagaggaaagcgagactgcaaataaaaatgactctagcaagaagttgagtgtggagagagtgtatcagaagaagacgcagcttgagcacatactgctgcgacccgatacctatataggctcagtggaaccacttacgcaatttatgtgggtgtatgacgaggacgtcggcatgaactgcagggaggtgacctttgttccaggactgtataaaatctttgatgaaatcttggtgaacgcagcagacaataagcaacgggacaagaatatgacctgcatcaaagtttcgatcgatcctgaatccaacatcattagcatttggaataacggtaagggtatacctgtggttgagcacaaagtcgagaaagtgtacgtacccgctctcatttttggtcagcttctaacctcttctaactatgacgatgatgagaaaaaagtcacggggggtcgcaatgggtatggagctaaactgtgtaacatctttagcactaaattcacggtggaaactgcctgcaaggagtacaagcactcctttaagcagacttggatgaacaatatgatgaaaacttcagaggccaagatcaaacattttgatggggaggattacacatgcataacttttcagccagatttatctaagtttaagatggaaaagctagataaagatattgtggctctaatgacccggcgcgcctatgatctggccggttcgtgccgcggggtgaaggtgatgtttaatgggaaaaagctgcccgtcaacgggtttagatcttatgtggatctgtacgtgaaggacaagctcgacgaaactggcgtggccctgaaggtcattcatgagctcgcaaatgagaggtgggacgtatgcctgaccctttccgagaagggatttcagcaaatcagctttgttaacagtatcgccaccacaaaaggcggtagacatgtggactacgtggtggaccaggttgtgggtaagctgatagaggtggtgaagaagaagaacaaagctggggtgagcgtgaagccatttcaggtgaaaaatcacatctgggtttttattaattgtctgatcgaaaaccccacattcgatagccagaccaaagaaaacatgactctacagcccaaatcctttggctccaaatgccagctctccgaaaaattctttaaggccgctagcaactgtgggattgttgaaagcatactgaattgggtgaaattcaaggcacagactcagctgaacaaaaaatgcagctccgtcaagtactccaaaatcaaaggcatcccaaagctggacgacgccaatgatgctgggggaaaacactctctcgaatgcaccttgatcctgactgagggcgacagtgcaaagtcattagcagtgagcggcctgggagtgattggtcgagatcgttacggtgtgttccctcttcgcggcaagattctcaatgtccgagaagcttcccataaacagatcatggagaatgccgagataaataacatcataaagatcgtcgggctacagtataaaaaaagttacgacgatgctgaaagtctgaagacgcttagatacggcaaaatcatgattatgacagaccaagaccaggacggctcccacatcaagggactgctgataaatttcattcaccacaactggccttccctgctgaaacacgggttcctcgaagaatttatcacccctatcgtcaaagcttcaaagaacaaacaggagctctcattctattccatccccgagtttgatgaatggaaaaaacacatcgaaaaccagaaggcctggaaaatcaagtactataaaggcctgggtactagcacagccaaggaggcgaaggagtactttgccgacatggaaagacatcgtatcctgttccggtatgcaggtcccgaggacgatgctgcaataacactggccttttccaagaagaagatcgatgaccgcaaggagtggctcaccaacttcatggaggatcgccgtcagagacggttacatgggcttccagagcaatttctctacggtaccgcgaccaagcaccttacctataatgacttcatcaataaggagctgatcctcttcagtaacagcgacaatgaacgctccattcctagcctggtggacggcttcaaacccggacagcgtaaagtcctcttcacatgctttaaacggaacgacaaacgcgaagttaaagtggcacaacttgcaggctctgtcgctgagatgtccgcataccaccatggcgaacaggccctgatgatgaccattgtcaacctagcacagaattttgtcggatcgaataacatcaatctgctgcagcctattgggcaattcggaaccagacttcacggaggcaaggatgccgcttctccaagatacatctttactatgctgagcaccctggctcgcctgctattcccagcagtggacgacaacctcctcaaattcctttacgacgataaccagcgcgtagaacctgaatggtatattcctatcattccaatggtcctgatcaatggggcagagggcataggaaccggatgggcctgtaagcttcccaactacgacgcgcgagagatcgtgaacaacgtgcgacgtatgttggacggactggaccctcaccctatgctgcctaactataaaaacttcaagggcacaatacaagaactcggtcagaaccagtacgcggtctcaggagaaatctttgtggttgatcgcaataccgtggagattaccgagttgcctgtgaggacctggacacaggtgtacaaggaacaggtgttggagccaatgttaaacggaacagataaaacacccgccttgattagcgattataaggagtatcacactgacaccaccgtgaaattcgtggtgaagatgacggaagaaaagcttgcacaagccgaggctgccggcctccacaaggtgttcaaactgcaaaccactctgacctgtaattcaatggttctgtttgaccacatgggctgcctgaaaaaatacgaaaccgttcaagacattctgaaggaattcttcgacttacgacttagttactatggactgaggaaagaatggttggttggaatgcttggagccgagtcaactaaactcaataaccaggcccgcttcattctcgagaagattcaggggaaaatcaccatcgaaaacagaagtaaaaaggaccttatacagatgctggtgcagagagggtacgaatccgacccggtgaaagcctggaaagaggctcaagagaaggccgctgaggaggacgagacgcaaaaccagcacgacgactcctcttctgactctggcaccccttcggggccggatttcaattacatcctcaacatgagcctgtggtccctcaccaaggaaaaagtggaggagctcatcaaacagcgggatgcaaaaggaagagaggtaaatgacttaaaaaggaaatctcctagcgacttgtggaaggaggatctcgcagcctttgtggaagagctggataaggtggaaagtcaagaaagggaggacgtcttggctggcatgtccggcaaggccatcaaaggcaaggttggtaaaccaaaggttaagaagctgcagctggaggagactatgccatcaccgtacggtcgtcgcatcatcccagaaattaccgcaatgaaggcggacgcaagtaagaagctgcttaaaaagaaaaaaggagatctcgacactgccgcagtcaaggtagagtttgacgaagagttttcaggtgcacccgtggagggcgccggagaggaggctctgaccccttctgtcccaattaacaaaggacccaagccaaagagggaaaagaaagaaccaggcacccgggtccgcaaaacccccacctcctctgggaaacccagtgcgaagaaggtaaaaaagaggaatccatggagcgacgatgaatcaaaaagcgagagcgatcttgaggagaccgagccagtagtaatacccagagactcacttctgcgtcgggccgccgcagaacgtcctaaatacacctttgacttcagcgaagaagaggatgacgacgcggatgatgatgatgatgacaacaacgacttggaggagttgaaggtgaaagcttcccccattacaaacgatggagaagatgagtttgtaccttccgatgggctggataaggatgagtatactttttctcccggtaaatcaaaagccacacccgagaaaagtctgcatgacaagaaatcccaggatttcggtaacctgttctctttcccaagctactcccagaagagcgaggatgatagcgccaagtttgactctaacgaggaggattcggccagcgtctttagccctagtttcgggctgaagcagaccgataaggtgccaagcaaaaccgtggccgcgaaaaagggaaagccaagcagcgacacagtgccaaagccaaaacgggcacccaaacagaaaaaggtcgtagaggcagtcaactcggactctgacagcgagtttgggatacccaagaagactactactcctaaagggaaaggacggggggctaaaaaaagaaaggccagcggctccgaaaacgagggagactacaatccagggcggaagacgtctaaaaccacctctaagaagcccaagaagacatctttcgatcaagattccgacgtcgacatcttccctagcgacttccccaccgagcccccctccctgcctcgcactgggagagcaaggaaagaggttaagtacttcgctgagagtgatgaagaagaggatgacgtcgattttgccatgtttaattag

SEQ ID NO: 34481 - DNA, 1437 bp, Artificial Sequence
  derived and/or modified sequence
atgagcctgtggagcctgaccaaggagaaggtggaggagctgatcaaacagcgtgatgccaaaggccgggaggtgaacgatctcaaacgcaaatcaccttcagacttgtggaaagaagacctagcggccttcgtcgaggagctggataaggtggaatctcaagaacgcgaagatgtgcttgctgggatgtcagggaaggcgattaagggcaaagtcgggaaacccaaagtcaaaaaactccagctggaagagacaatgccgagcccctatggacggcggataattcctgagataaccgccatgaaagcggacgcttcaaaaaaactgctcaaaaaaaaaaagggagatcttgacactgctgccgtcaaggttgaattcgacgaggagtttagtggggctcccgtagagggcgctggagaagaggccttgaccccaagcgtccccattaacaaaggccctaagccaaagcgggagaagaaagagcctggcacccgcgtcagaaagacccctacatcatctggcaaaccatcagctaagaaagtaaagaaaagaaacccctggagtgatgacgagagcaaaagcgagtcggacctggaggagacagaacctgtcgtgatccccagggactcattattgaggagggccgccgcagaacgccccaaatatacttttgatttttcagaggaggaggacgacgatgctgatgacgatgacgacgataacaatgacctggaagaactgaaagtgaaggcctcccccattacaaatgacggcgaggatgagtttgtcccatctgacggcttggacaaagatgagtacactttctcacccggtaagagtaaagccacaccagaaaaatcgcttcacgacaaaaagtctcaagactttggcaatctcttctcctttccaagctacagccagaagagcgaggacgacagcgccaaatttgacagtaatgaggaagactccgctagcgtctttagcccctcttttggcctgaaacagaccgataaagtgcccagcaagacagtggcggccaagaaaggcaagcccagctccgatacggtgcctaagcctaaacgcgctcctaaacagaaaaaggtcgtggaggctgtcaactcggattccgattctgagtttgggatccccaagaaaaccacaacccctaagggcaaaggaagaggcgccaagaagaggaaggccagtggttccgagaacgaaggggattataaccccggcaggaagaccagcaaaaccacgagcaagaaacctaagaagacctcattcgaccaggatagcgacgtcgatatttttccctccgactttcccacagagcctccatctctccctagaaccggccgggcaagaaaagaagtcaagtactttgccgaaagcgatgaagaggaggatgacgtggatttcgctatgttcaattag

SEQ ID NO: 34482 - DNA, 1437 bp, Artificial Sequence
  derived and/or modified sequence
atgagcctgtggagcctgaccaaggagaaggtggaggagctgatcaagcagcgggacgccaaaggccgcgaggtcaatgatcttaagcggaaatccccatcagacttgtggaaagaagacctcgccgcctttgtggaagagttagacaaggtagagtctcaagagagagaagatgtacttgcaggaatgtcaggaaaggccattaaaggcaaggtgggtaaacctaaggtcaagaaactgcagctggaagaaaccatgcccagcccttatggcagacggataatccccgaaatcaccgccatgaaagctgacgcgagtaagaaattactcaagaagaaaaaaggcgatctggataccgcggcagttaaggttgaatttgacgaggagttttcaggtgcacccgtggaaggggccggcgaggaagccttgacaccttctgttccgatcaacaaaggtcctaagccaaagagagaaaaaaaggagcccggaacaagagtgcgtaagacccctaccagcagtggcaaaccgtccgccaagaaagtgaaaaaacgcaacccttggagcgacgacgaaagtaaatcagagtctgaccttgaggagacggagcctgtggtgatcccacgggatagccttctccgtagggccgccgcggagaggcccaagtatacgttcgatttctccgaggaggaggacgatgatgccgacgatgatgacgatgataataatgatttagaagagcttaaagtcaaggcatctcctatcactaatgacggagaggacgaatttgtaccaagtgacgggctggacaaggacgaatatacatttagccctggcaagtcaaaggcaacccctgaaaagtctctccacgacaaaaaaagccaggatttcggcaaccttttttcttttccatcgtatagccaaaagtcagaggacgactctgctaaattcgatagcaacgaggaggacagcgcctcagtgttcagcccttcctttggcctcaagcagacggataaggtcccgtcgaagaccgtggccgccaagaaaggtaaacctagttccgacacagtgccaaaacccaaacgggccccaaagcaaaagaaggtcgtcgaggccgtgaattccgacagcgatagcgagttcggcatcccaaaaaaaaccacaactccaaagggaaaaggccgaggcgcgaagaagaggaaggcctcaggaagcgagaatgagggtgattataacccgggacggaagacttccaaaacgaccagtaaaaaacccaagaaaacctctttcgaccaggactccgatgtagacatttttccgagcgattttccaactgagccaccaagtttgccccgtactgggcgcgccagaaaagaagtcaagtatttcgccgaatcagacgaggaagaggacgatgtggattttgccatgtttaactag

SEQ ID NO: 34483 - DNA, 3453 bp, Artificial Sequence
  derived and/or modified sequence
atggcgaaaagcggcggttgcggggcaggcgcaggagtggggggagggaatggagcactcacctgggtcaataacgccgctaaaaaagaggaatccgaaactgctaacaagaatgacagtagtaaaaagctgagcgtagagagggtgtaccagaaaaaaacccagctggagcacattttactgagaccagacacatacatcggaagtgtggaaccactgacacagttcatgtgggtgtacgatgaagatgtgggtatgaactgtcgggaagtgaccttcgtgcccggactctacaagatttttgatgagattctcgtaaacgcggcagacaataagcagcgcgataagaatatgacgtgtataaaggttagcatcgatcccgaatctaacatcatcagtatctggaataatggcaaaggtattccagtagttgaacacaaagttgaaaaagtctacgtgccagctctgatctttggtcagctgctgacatctagcaactatgatgacgatgagaagaaggtgacggggggaagaaacggctacggggctaagctctgcaatatttttagtaccaaatttacagtagagaccgcttgtaaggaatacaagcacagcttcaaacagacttggatgaacaacatgatgaaaacatcagaagcaaagatcaaacattttgacggcgaggactatacttgcataaccttccagccagatttgtctaagtttaagatggagaaactggacaaagacatcgttgccttgatgacaagaagagcatacgacctggcgggatcttgcagaggcgtgaaagttatgtttaacggcaaaaagttacccgtgaatgggttccggagctatgtcgatctctacgtgaaggacaagctcgatgaaactggtgtggccctcaaggtcatccacgagcttgcgaatgagcgttgggatgtctgtctgacactgagcgaaaagggcttccaacaaatctccttcgttaattcgattgctacgactaaggggggtagacatgtcgactacgtcgttgaccaggtggtggggaaacttatcgaggtggtcaaaaaaaagaacaaagcgggagtaagcgtcaagcctttccaggtcaagaatcacatttgggtcttcataaattgcctgatcgagaacccaacatttgattcacagactaaagaaaacatgacactgcagccaaaatctttcggctccaagtgtcaattatccgagaagttcttcaaggcagcaagtaattgcgggatagtggaatctatactaaactgggtgaaatttaaggcacagacacagctgaataaaaaatgttccagcgttaagtacagcaagatcaaaggcattccaaagttggatgacgccaatgatgctggaggcaaacactccctcgaatgtactctcatcctgaccgaaggggatagtgccaaatcgctggccgtgtccggccttggcgtgatcggcagagatagatatggcgtctttcctctccgtgggaaaattttgaatgtccgtgaagcatctcacaaacagattatggaaaatgccgagatcaacaacattataaagatagtaggacttcagtacaaaaaatcatacgatgatgccgaaagcctcaagactttacggtacggcaagatcatgatcatgaccgaccaagaccaggatgggtctcatatcaaaggattgcttataaacttcatacatcacaactggccttctctgctgaaacacggtttcctggaggagtttatcacccccatagtgaaagcgtcgaaaaacaaacaggagttgtctttctactccatccctgagtttgacgagtggaagaaacatatcgaaaaccagaaagcttggaagatcaaatactataaggggttaggtacatctactgcaaaagaggcaaaggaatattttgcagacatggagcgccaccgcattctctttcggtatgcgggtccagaggatgacgccgctatcacgcttgctttttccaagaagaagattgacgatcgaaaagaatggctgactaactttatggaggataggcgccagagaaggctacatggacttccggagcagtttctgtatggcacagctaccaagcacctgacatacaacgatttcatcaataaagagcttatactgttctccaatagcgacaacgagcgtagtatcccctccctggtcgacggttttaaacccggtcagaggaaagtcctgtttacatgtttcaagcgtaatgataagcgggaggttaaggtggcccagctggcaggatctgtggcagagatgtctgcgtatcaccatggggaacaagccctgatgatgacaatcgttaacctggcccagaattttgtgggctctaataatatcaatcttctccagcctattggacagttcgggacgagacttcatgggggaaaggatgccgcaagcccgagatacatctttaccatgctctctaccctagctcggctgctttttcccgctgtagacgacaacctgctgaagttcctgtatgacgataatcagagagtcgagccggagtggtacattccaatcatcccaatggtgctgattaacggagctgagggtatcgggacaggatgggcgtgcaaactgcctaactacgatgctcgcgaaatcgtgaacaatgtgagacggatgctcgatgggctggatcctcaccccatgttgcccaattataaaaacttcaaggggacaatccaagaactgggacaaaaccagtatgctgtaagtggagagatctttgtggtggaccggaacactgtcgaaatcacagagcttcctgtgaggacttggacacaggtgtataaggaacaggtgctggaacccatgctgaacgggactgacaaaacaccggctctgatttccgattataaggaataccacaccgacaccacagtgaaatttgttgtcaaaatgaccgaagagaagctagctcaggccgaggccgctgggcttcataaggtcttcaagctgcagacgaccttaacctgtaactctatggttcttttcgatcacatgggatgtctcaagaagtacgagaccgtacaagacatccttaaggagtttttcgatttgcgtctgagctactacggactgcgcaaagaatggctggtggggatgctgggagcagagagtaccaaactgaacaaccaagcacggttcatcctagagaaaattcaaggcaagatcactatcgagaataggtcaaaaaaggatctgatacaaatgctggtgcagcgcggttatgagtccgatcccgttaaggcttggaaagaagctcaggaaaaggcggcagaggaggatgagacacagaaccaacacgatgactcttccagcgactccggcaccccgtctggccctgattttaactacattctcaacatgtctttgtggtccctaacctag

SEQ ID NO: 34484 - DNA, 4866 bp, Artificial Sequence
  derived and/or modified sequence
atggctaagagcgggggatgtggagccggtgctggcgtgggtggcggaaacggagccttgacctgggtcaataatgctgcaaaaaaggaagagtcagaaaccgcaaacaaaaacgactcttcaaagaagctgtccgtggaacgagtgtatcagaagaaaacacagctggagcacatcctgctgagacccgatacctatattggctctgttgaaccattgactcaatttatgtgggtctacgatgaagacgtggggatgaattgtcgtgaggtgaccttcgtgccaggtttgtacaagatttttgatgagatccttgtgaacgctgctgataataaacagagagataagaacatgacttgtattaaggtgtctatagacccagaatcaaatataatcagcatctggaataatggcaagggcattccggttgttgagcataaagtcgagaaagtttacgtgccggctctcatttttggccagctgcttacttcctctaactatgatgatgatgaaaagaaggttactggaggtaggaacggttatggagccaaactctgtaatatcttcagcactaagttcaccgtggaaactgcttgcaaggaatataaacatagtttcaagcagacttggatgaacaatatgatgaaaaccagcgaggccaagatcaagcacttcgacggcgaggactatacctgcattacctttcaacccgacttgagtaaatttaagatggaaaaactggacaaagacatcgtggcccttatgactagacgagcatacgacttggctgggagttgtcggggtgtgaaagtcatgtttaatggcaaaaagcttccagtgaatggctttcggtcctatgtggacctgtacgtaaaggacaagctggacgagactggggtggcgctgaaggtaattcatgaactggcaaacgaacgttgggacgtgtgcctaacactcagtgaaaagggcttccagcaaatttcatttgttaattcaatcgccaccaccaagggagggagacacgtggactatgtcgtggatcaggtcgtgggaaaactaatcgaggttgttaagaaaaaaaataaggccggagtttccgtgaagccattccaggtcaagaatcacatttgggtgttcatcaactgtctaattgaaaatcccacttttgacagtcaaactaaggaaaacatgactcttcagccaaagtcattcggctctaaatgccaactgtccgaaaagttctttaaggcagctagtaattgcggtatagtggagtctatcctcaactgggtcaaatttaaagctcaaacgcagctaaataagaaatgtagcagcgtcaagtattcgaagattaaggggattcccaaactcgacgatgcaaacgatgccggagggaaacattctctcgagtgtacgttaattctaactgaaggtgacagtgcgaagtctctcgctgtcagcggtttgggggttatcggccgagaccggtatggagtgtttccactgaggggaaaaatccttaacgtgcgtgaggcttctcacaaacagattatggaaaatgctgaaatcaataatatcatcaagattgtgggtctacagtataagaaaagctacgacgacgctgaatctctgaagacgctgagatacggaaagataatgatcatgactgatcaggatcaggacggaagtcatattaagggtcttctaattaacttcatccaccacaactggccatccctcttgaaacatgggttcctggaagagtttataacacctatcgttaaggccagcaaaaacaagcaggaactcagcttttatagcattcctgagttcgacgagtggaagaagcacatcgagaaccaaaaggcttggaaaatcaaatactacaaggggctgggaacgagcaccgccaaagaagcgaaggagtatttcgcagatatggaaagacaccggatcttgttccgttatgccggtccggaagatgacgccgctataaccctcgcttttagcaaaaagaagatcgatgaccgaaaggagtggctgacaaattttatggaagatcgtcgacagaggaggctgcacggattgccagagcagttcctgtacggcacggccacgaaacatttgacctacaacgacttcatcaacaaagagctgattctgttttctaactccgacaacgagagatccattccgagcctcgtggatgggttcaagcccggtcagcggaaagtccttttcacgtgtttcaagagaaatgataagcgcgaggtgaaagtggcgcagctggccggttcagtggccgaaatgtcagcttaccaccacggagagcaagccttaatgatgaccatcgtgaacctcgcccaaaacttcgtgggttctaacaatatcaatctcttgcagccaatcggacaattcgggacgagactgcacggcggaaaagatgctgcgagtccacggtatattttcaccatgctgtccactctggccaggctactcttccctgctgtcgatgacaatctgcttaagttcctctatgacgacaaccaacgtgtcgagccagagtggtatatccctattatacccatggtgttgattaatggtgcagagggcatcggcaccggctgggcctgcaagctacccaattatgacgcgagggagatcgtgaacaacgtgaggaggatgctcgacggactcgatcctcacccaatgttaccaaactacaaaaacttcaagggtacaatccaggagctaggccaaaatcagtacgccgtgagcggcgaaatttttgtagtcgataggaacaccgtggagatcaccgagttgccagtaagaacttggacgcaggtctataaggagcaggtgctagagccaatgctgaatggcacggataaaacccctgccttgatttcggattataaagagtatcacaccgataccacagtgaagttcgtggtgaaaatgacggaggagaagctagcgcaggctgaagcagccggattgcataaagtgttcaagctccagactaccctgacatgtaacagtatggtcctgttcgatcatatgggttgcttgaaaaagtatgagacggtgcaggacattctgaaggagttctttgatcttcggctgtcctattacggtctgaggaaggagtggttagtggggatgctgggggctgagtcgacaaagctaaataatcaggctaggtttatcctggagaaaattcaaggtaaaatcaccattgaaaacaggtctaaaaaggacctgattcagatgcttgtgcagagaggttatgagtcagatccagtaaaagcatggaaggaggcacaagagaaagccgctgaggaagatgagacacaaaaccagcacgacgatagctcatccgactctggtacccccagcgggcctgactttaattacatactcaatatgtccctgtggtccctgaccaaagaaaaagtcgaggaactcatcaaacagagagacgcaaaaggtcgagaagtcaacgacctaaaacgcaaatccccatccgatttatggaaggaggacttagcagccttcgtggaagagctggataaggtggaatcgcaggagagggaagacgttttagccggtatgtccggtaaggcgatcaaaggtaaagttgggaaacccaaagtaaagaaacttcagcttgaggaaaccatgccgtctccatacgggagacgcatcatcccagaaattacagcaatgaaagcggatgcctcgaaaaagctcctcaagaaaaaaaagggcgatctcgataccgccgcagtcaaagttgaatttgatgaagagttttccggcgcacctgtggagggcgctggggaagaagctctgacaccaagcgtgcccatcaataaaggtcctaaacctaaacgcgaaaagaaggaacctgggactagagtgagaaaaacacctacttcctccgggaagccaagcgcgaagaaggtgaagaaaagaaatccttggtcagatgacgagtccaagagcgagagtgacctcgaggagaccgagccggtggttattcctcgggatagtttactcagaagagccgctgcggagcggccaaagtacacgttcgacttcagcgaggaagaggacgacgatgctgatgacgacgatgacgacaacaacgacctggaagaattgaaagtgaaagcctcgcccattacaaatgacggggaagacgagttcgtcccttcagacggtttggataaggatgagtacaccttctcccctggcaaatcaaaggctacccccgagaaatccctccatgacaaaaaaagccaggacttcggtaacctcttcagttttccatcatacagtcagaagtctgaagatgattcagctaaatttgattctaatgaagaggattcagccagcgtgttttctcctagcttcggtctgaaacaaacagataaagttcctagcaaaacagtcgcagctaagaagggtaaaccctccagtgacacagtgcccaaacccaagcgcgctcctaagcagaagaaggtcgtcgaggctgttaactcggactcagattcagaattcgggatccccaagaagactactacccctaaaggcaaagggagaggtgctaagaagcgaaaggcatccggctccgagaacgagggggattacaatccaggtagaaaaacatcaaagacaacctccaagaaacctaaaaaaacatcattcgatcaggactcggacgtggacattttcccatccgacttcccaacagagcctccatctctccctaggacgggtcgtgcccgtaaggaggtgaagtattttgcagagtcagacgaggaggaggacgacgtggacttcgccatgtttaactag

SEQ ID NO: 34485 - DNA, 1437 bp, Artificial Sequence
  derived and/or modified sequence
atgtccctttggtcgctaactaaagagaaggtcgaggagctcatcaaacagagagacgcgaaggggagggaggtaaatgacctgaagcggaaatctcctagcgatttgtggaaggaggatctagctgcttttgtggaggagttagataaggtggagagtcaggagcgggaagatgtacttgccggtatgtccggaaaggctataaagggcaaggtgggcaaacccaaggtgaagaaattacaactagaggagacaatgccgagcccatacggtaggagaatcataccagagattacagcaatgaaggctgatgcctcaaagaaactgttgaaaaagaaaaagggagatctcgacacggccgcagtgaaagtcgaatttgacgaggagttctctggggctccagtcgaaggtgcaggtgaagaagccctcacgcctagcgtccccattaacaagggcccaaaaccaaagagggaaaagaaggagccaggcacacgagtgcgcaaaacacccacctcaagtggtaaacccagtgccaaaaaagtgaagaaacggaatccatggagcgatgatgaatcgaagtccgagtcagacctcgaggagactgaaccagtggttatccccagggattcccttttacgtcgcgctgctgcagaaagaccgaaatatacctttgacttcagtgaggaggaggatgatgatgccgatgatgacgatgacgacaataacgacctcgaagagcttaaggtgaaagccagtcctattaccaacgatggcgaagacgaattcgtgccttccgatgggcttgacaaggacgagtatactttctcgccgggaaaatctaaggcaactcctgagaagtcccttcatgacaaaaagagccaggacttcgggaatctgttcagctttcccagctactcgcaaaagagcgaggatgactccgccaagttcgactccaatgaggaagatagcgcctccgtcttcagcccttcttttggattaaagcagactgataaggtcccatctaagaccgtcgctgccaagaagggcaagcccagctctgacaccgtgcccaagcccaagagagcccctaagcagaaaaaagtggtggaagcagtgaattcagattccgactccgagtttgggatcccaaaaaagaccactacaccaaaaggaaaaggacggggagcgaaaaagagaaaggcgtctggaagcgagaatgagggggactataaccctgggaggaaaacaagcaagacaacttccaagaagccaaaaaaaacctcctttgatcaagattcagacgttgacatcttcccttctgattttcctacagagccgcctagcctgccacggacagggcgagcgcgaaaagaggtcaagtactttgcggaaagcgacgaggaagaggacgatgtggactttgccatgttcaactag

SEQ ID NO: 34486 - DNA, 1437 bp, Artificial Sequence
  derived and/or modified sequence
atgagtctatggagcctgaccaaggagaaggtggaggaactgatcaaacagagagatgctaaaggtagggaagtcaatgatctaaaacggaaatcaccctccgacctctggaaagaagatctggcagccttcgtggaggaactcgataaggtggagagtcaggagcgggaagatgtgctcgctggaatgtctggaaaagcaataaaagggaaagtgggcaagccgaaagtgaagaaattgcagctcgaagaaaccatgccgtctccatatggtcggcgaattatacctgagatcacggctatgaaagctgacgcttcaaagaagctcctaaagaagaaaaaaggagatctggacacagcagcagtcaaggttgagtttgacgaggaatttagtggtgcacccgtggaaggcgctggagaagaggcgctcacacccagcgtgcccatcaataaaggaccaaagcccaagagagaaaagaaagagcctggcactcgggttcgtaagactccgactagctccggaaagccatcggcaaagaaagtgaaaaagcgaaacccttggagcgatgacgaatctaaaagtgaatctgatttggaggaaacggagcccgtggtgatacctcgcgactcccttctgaggagagccgctgcagaaaggcccaagtacacttttgactttagcgaagaagaagatgacgatgccgacgacgatgatgatgataataatgatctcgaggagctgaaggtaaaagctagtcccatcacaaatgatggggaagatgaattcgtccctagtgatggactcgacaaggatgagtacaccttctccccagggaaatcaaaggcgacccctgaaaaatcattgcacgacaagaaaagtcaggatttcggtaatctgttcagttttccctcctattcccaaaagtcagaagatgattcagccaaattcgatagcaacgaggaggatagcgcttctgtgttctccccgtcttttggtctgaagcagacagacaaagtcccgtcaaagacagttgctgcaaaaaagggcaaacctagcagtgataccgtcccaaaaccaaagcgggctccaaaacagaagaaggtagtggaagcagttaactccgatagcgattccgagtttggcatacccaagaagaccaccactcccaaagggaaggggcgtggagccaagaagcggaaggcttccggtagcgaaaacgagggggattataaccccggacgtaaaacctccaaaaccacctcaaagaagccaaaaaagacttcatttgaccaggattcagacgtggacattttccctagcgactttccaactgagccaccgagcctacctaggactgggagggcaaggaaggaagtgaagtatttcgcggagagtgacgaggaagaggacgacgtcgactttgccatgttcaactag

SEQ ID NO: 34487 - DNA, 3525 bp, Artificial Sequence
  derived and/or modified sequence
gtgtgtgcggtgttatgccggacaagagggagcggcggctgcggcctcagggcctgtgagctggaggcactcgccatggccaagtcgggtggctgcggcgcgggagccggcgtgggcggcggcaacggggcactgacctgggtgaacaatgctgcaaaaaaagaagagtcagaaactgccaacaaaaatgattcttcaaagaagttgtctgttgagagagtgtatcagaagaagacacaacttgaacacattcttcttcgtcctgatacatatattgggtcagtggagccattgacgcagttcatgtgggtgtatgatgaagatgtaggaatgaattgcagggaggttacctttgtgccaggtttatacaagatctttgatgaaattttggttaatgctgctgacaataaacagagggataagaacatgacttgtattaaagtttctattgatcctgaatctaacattataagcatttggaataatgggaaaggcattccagtagtagaacacaaggtagagaaagtttatgttcctgctttaatttttggacagcttttaacatccagtaactatgatgatgatgagaaaaaagttacaggtggtcgtaatggttatggtgcaaaactttgtaatattttcagtacaaagtttacagtagaaacagcttgcaaagaatacaaacacagttttaagcagacatggatgaataatatgatgaagacttctgaagccaaaattaaacattttgatggtgaagattacacatgcataacattccaaccagatctgtccaaatttaagatggaaaaacttgacaaggatattgtggccctcatgactagaagggcatatgatttggctggttcgtgtagaggggtcaaggtcatgtttaatggaaagaaattgcctgtaaatggatttcgcagttatgtagatctttatgtgaaagacaaattggatgaaactggggtggccctgaaagttattcatgagcttgcaaatgaaagatgggatgtttgtctcacattgagtgaaaaaggattccagcaaatcagctttgtaaatagtattgcaactacaaaaggtggacggcacgtggattatgtggtagatcaagttgttggtaaactgattgaagtagttaagaaaaagaacaaagctggtgtatcagtgaaaccatttcaagtaaaaaaccatatatgggtttttattaattgccttattgaaaatccaacttttgattctcagactaaggaaaacatgactctgcagcccaaaagttttgggtctaaatgccagctgtcagaaaaattttttaaagcagcctctaattgtggcattgtagaaagtatcctgaactgggtgaaatttaaggctcagactcagctgaataagaagtgttcatcagtaaaatacagtaaaatcaaaggtattcccaaactggatgatgctaatgatgctggtggtaaacattccctggagtgtacactgatattaacagagggagactctgccaaatcactggctgtgtctggattaggtgtgattggacgagacagatacggagtttttccactcaggggcaaaattcttaatgtacgggaagcttctcataaacagatcatggaaaatgctgaaataaataatattattaaaatagttggtctacaatataagaaaagttacgatgatgcagaatctctgaaaaccttacgctatggaaagattatgattatgaccgatcaggatcaagatggttctcacataaaaggcctgcttattaatttcatccatcacaattggccatcacttttgaagcatggttttcttgaagagttcattactcctattgtaaaggcaagcaaaaataagcaggaactttccttctacagtattcctgaatttgacgaatggaaaaaacatatagaaaaccagaaagcctggaaaataaagtactataaaggattgggtactagtacagctaaagaagcaaaggaatattttgctgatatggaaaggcatcgcatcttgtttagatatgctggtcctgaagatgatgctgccattaccttggcatttagtaagaagaagattgatgacagaaaagaatggttaacaaattttatggaagaccggagacagcgtaggctacatggcttaccagagcaatttttatatggtactgcaacaaagcatttgacttataatgatttcatcaacaaggaattgattctcttctcaaactcagacaatgaaagatctataccatctcttgttgatggctttaaacctggccagcggaaagttttatttacctgtttcaagaggaatgataaacgtgaagtaaaagttgcccagttggctggctctgttgctgagatgtcggcttatcatcatggagaacaagcattgatgatgactattgtgaatttggctcagaactttgtgggaagtaacaacattaacttgcttcagcctattggtcagtttggaactcggcttcatggtggcaaagatgctgcaagccctcgttatattttcacaatgttaagcactttagcaaggctactttttcctgctgtggatgacaacctccttaagttcctttatgatgataatcaacgtgtagagcctgagtggtatattcctataattcccatggttttaataaatggtgctgagggcattggtactggatgggcttgtaaactacccaactatgatgctagggaaattgtgaacaatgtcagacgaatgctagatggcctggatcctcatcccatgcttccaaactacaaaaactttaaaggcacgattcaagaacttggtcaaaaccagtatgcagtcagtggtgaaatatttgtagtggacagaaacacagtagaaattacagagcttccagttagaacttggacacaggtatataaagaacaggttttagaacctatgctaaatggaacagataaaacaccagcattaatttctgattataaagaatatcatactgacacaactgtgaaatttgtggtgaaaatgactgaagagaaactagcacaagcagaagctgctggactgcataaagtttttaaacttcaaactactcttacttgtaattccatggtactttttgatcatatgggatgtctgaagaaatatgaaactgtgcaagacattctgaaagaattctttgatttacgattaagttattacggtttacgtaaggagtggcttgtgggaatgttgggagcagaatctacaaagcttaacaatcaagcccgtttcattttagagaagatacaagggaaaattactatagagaataggtcaaagaaagatttgattcaaatgttagtccagagaggttatgaatctgacccagtgaaagcctggaaagaagcacaagaaaaggcagcagaagaggatgaaacacaaaaccagcatgatgatagttcctccgattcaggaactccttcaggcccagattttaattatattttaaatatgtctctgtggtctcttact

SEQ ID NO: 34488 - DNA, 5389 bp, Artificial Sequence
  derived and/or modified sequence
tttgagggcagccggcggcgcggcctcctcagcgggctcggctggacgtccgctccggatcttcgcgatggggcgcgggggtcggcgcggctaggagtgcggcgagtggagcggtgggtgcggagcggcggggcccagcggcccgcagggaggcgggagcggcggctgcggcctcagggcctgtgagctggaggcactcgccatggccaagtcgggtggctgcggcgcgggagccggcgtgggcggcggcaacggggcactgacctgggtgaacaatgctgcaaaaaaagaagagtcagaaactgccaacaaaaatgattcttcaaagaagttgtctgttgagagagtgtatcagaagaagacacaacttgaacacattcttcttcgtcctgatacatatattgggtcagtggagccattgacgcagttcatgtgggtgtatgatgaagatgtaggaatgaattgcagggaggttacctttgtgccaggtttatacaagatctttgatgaaattttggttaatgctgctgacaataaacagagggataagaacatgacttgtattaaagtttctattgatcctgaatctaacattataagcatttggaataatgggaaaggcattccagtagtagaacacaaggtagagaaagtttatgttcctgctttaatttttggacagcttttaacatccagtaactatgatgatgatgagaaaaaagttacaggtggtcgtaatggttatggtgcaaaactttgtaatattttcagtacaaagtttacagtagaaacagcttgcaaagaatacaaacacagttttaagcagacatggatgaataatatgatgaagacttctgaagccaaaattaaacattttgatggtgaagattacacatgcataacattccaaccagatctgtccaaatttaagatggaaaaacttgacaaggatattgtggccctcatgactagaagggcatatgatttggctggttcgtgtagaggggtcaaggtcatgtttaatggaaagaaattgcctgtaaatggatttcgcagttatgtagatctttatgtgaaagacaaattggatgaaactggggtggccctgaaagttattcatgagcttgcaaatgaaagatgggatgtttgtctcacattgagtgaaaaaggattccagcaaatcagctttgtaaatagtattgcaactacaaaaggtggacggcacgtggattatgtggtagatcaagttgttggtaaactgattgaagtagttaagaaaaagaacaaagctggtgtatcagtgaaaccatttcaagtaaaaaaccatatatgggtttttattaattgccttattgaaaatccaacttttgattctcagactaaggaaaacatgactctgcagcccaaaagttttgggtctaaatgccagctgtcagaaaaattttttaaagcagcctctaattgtggcattgtagaaagtatcctgaactgggtgaaatttaaggctcagactcagctgaataagaagtgttcatcagtaaaatacagtaaaatcaaaggtattcccaaactggatgatgctaatgatgctggtggtaaacattccctggagtgtacactgatattaacagagggagactctgccaaatcactggctgtgtctggattaggtgtgattggacgagacagatacggagtttttccactcaggggcaaaattcttaatgtacgggaagcttctcataaacagatcatggaaaatgctgaaataaataatattattaaaatagttggtctacaatataagaaaagttacgatgatgcagaatctctgaaaaccttacgctatggaaagattatgattatgaccgatcaggatcaagatggttctcacataaaaggcctgcttattaatttcatccatcacaattggccatcacttttgaagcatggttttcttgaagagttcattactcctattgtaaaggcaagcaaaaataagcaggaactttccttctacagtattcctgaatttgacgaatggaaaaaacatatagaaaaccagaaagcctggaaaataaagtactataaaggattgggtactagtacagctaaagaagcaaaggaatattttgctgatatggaaaggcatcgcatcttgtttagatatgctggtcctgaagatgatgctgccattaccttggcatttagtaagaagaagattgatgacagaaaagaatggttaacaaattttatggaagaccggagacagcgtaggctacatggcttaccagagcaatttttatatggtactgcaacaaagcatttgacttataatgatttcatcaacaaggaattgattctcttctcaaactcagacaatgaaagatctataccatctcttgttgatggctttaaacctggccagcggaaagttttatttacctgtttcaagaggaatgataaacgtgaagtaaaagttgcccagttggctggctctgttgctgagatgtcggcttatcatcatggagaacaagcattgatgatgactattgtgaatttggctcagaactttgtgggaagtaacaacattaacttgcttcagcctattggtcagtttggaactcggcttcatggtggcaaagatgctgcaagccctcgttatattttcacaatgttaagcactttagcaaggctactttttcctgctgtggatgacaacctccttaagttcctttatgatgataatcaacgtgtagagcctgagtggtatattcctataattcccatggttttaataaatggtgctgagggcattggtactggatgggcttgtaaactacccaactatgatgctagggaaattgtgaacaatgtcagacgaatgctagatggcctggatcctcatcccatgcttccaaactacaaaaactttaaaggcacgattcaagaacttggtcaaaaccagtatgcagtcagtggtgaaatatttgtagtggacagaaacacagtagaaattacagagcttccagttagaacttggacacaggtatataaagaacaggttttagaacctatgctaaatggaacagataaaacaccagcattaatttctgattataaagaatatcatactgacacaactgtgaaatttgtggtgaaaatgactgaagagaaactagcacaagcagaagctgctggactgcataaagtttttaaacttcaaactactcttacttgtaattccatggtactttttgatcatatgggatgtctgaagaaatatgaaactgtgcaagacattctgaaagaattctttgatttacgattaagttattacggtttacgtaaggagtggcttgtgggaatgttgggagcagaatctacaaagcttaacaatcaagcccgtttcattttagagaagatacaagggaaaattactatagagaataggtcaaagaaagatttgattcaaatgttagtccagagaggttatgaatctgacccagtgaaagcctggaaagaagcacaagaaaaggcagcagaagaggatgaaacacaaaaccagcatgatgatagttcctccgattcaggaactccttcaggcccagattttaattatattttaaatatgtctctgtggtctcttactaaagaaaaagttgaagaactgattaaacagagagatgcaaaagggcgagaggtcaatgatcttaaaagaaaatctccttcagatctttggaaagaggatttagcggcatttgttgaagaactggataaagtggaatctcaagaacgagaagatgttctggctggaatgtctggaaaagcaattaaaggtaaagttggcaaacctaaggtgaagaaactccagttggaagagacaatgccctcaccttatggcagaagaataattcctgaaattacagctatgaaggcagatgccagcaaaaagttgctgaagaagaagaagggtgatcttgatactgcagcagtaaaagtggaatttgatgaagaattcagtggagcaccagtagaaggtgcaggagaagaggcattgactccatcagttcctataaataaaggtcccaaacctaagagggagaagaaggagcctggtaccagagtgagaaaaacacctacatcatctggtaaacctagtgcaaagaaagtgaagaaacggaatccttggtcagatgatgaatccaagtcagaaagtgatttggaagaaacagaacctgtggttattccaagagattctttgcttaggagagcagcagccgaaagacctaaatacacatttgatttctcagaagaagaggatgatgatgctgatgatgatgatgatgacaataatgatttagaggaattgaaagttaaagcatctcccataacaaatgatggggaagatgaatttgttccttcagatgggttagataaagatgaatatacattttcaccaggcaaatcaaaagccactccagaaaaatctttgcatgacaaaaaaagtcaggattttggaaatctcttctcatttccttcatattctcagaagtcagaagatgattcagctaaatttgacagtaatgaagaagattctgcttctgttttttcaccatcatttggtctgaaacagacagataaagttccaagtaaaacggtagctgctaaaaagggaaaaccgtcttcagatacagtccctaagcccaagagagccccaaaacagaagaaagtagtagaggctgtaaactctgactcggattcagaatttggcattccaaagaagactacaacaccaaaaggtaaaggccgaggggcaaagaaaaggaaagcatctggctctgaaaatgaaggcgattataaccctggcaggaaaacatccaaaacaacaagcaagaaaccgaagaagacatcttttgatcaggattcagatgtggacatcttcccctcagacttccctactgagccaccttctctgccacgaaccggtcgggctaggaaagaagtaaaatattttgcagagtctgatgaagaagaagatgatgttgattttgcaatgtttaattaagtgcccaaagagcacaaacatttttcaacaaatatcttgtgttgtccttttgtcttctctgtctcagacttttgtacatctggcttattttaatgtgatgatgtaattgacggttttttattattgtggtaggccttttaacattttgttcttacacatacagttttatgctcttttttactcattgaaatgtcacgtactgtctgattggcttgtagaattgttatagactgccgtgcattagcacagattttaattgtcatggttacaaactacagacctgctttttgaaatgaaatttaaacattaaaaatggaactg

SEQ ID NO: 34489 - DNA, 1897 bp, Artificial Sequence
  derived and/or modified sequence
tctgacaagatgcagtgataaaacattaattctactctcttaactttaaaatgtggtatcctctcattttgttactgagtacctgaggaaatcagttaatttttcatcagattcctggataaatagggatagtgtataccattccttctgaagatcttattgcagcagaagaggatgaaacacaaaaccagcatgatgatagttcctccgattcaggaactccttcaggcccagattttaattatattttaaatatgtctctgtggtctcttactaaagaaaaagttgaagaactgattaaacagagagatgcaaaagggcgagaggtcaatgatcttaaaagaaaatctccttcagatctttggaaagaggatttagcggcatttgttgaagaactggataaagtggaatctcaagaacgagaagatgttctggctggaatgtctggaaaagcaattaaaggtaaagttggcaaacctaaggtgaagaaactccagttggaagagacaatgccctcaccttatggcagaagaataattcctgaaattacagctatgaaggcagatgccagcaaaaagttgctgaagaagaagaagggtgatcttgatactgcagcagtaaaagtggaatttgatgaagaattcagtggagcaccagtagaaggtgcaggagaagaggcattgactccatcagttcctataaataaaggtcccaaacctaagagggagaagaaggagcctggtaccagagtgagaaaaacacctacatcatctggtaaacctagtgcaaagaaagtgaagaaacggaatccttggtcagatgatgaatccaagtcagaaagtgatttggaagaaacagaacctgtggttattccaagagattctttgcttaggagagcagcagccgaaagacctaaatacacatttgatttctcagaagaagaggatgatgatgctgatgatgatgatgatgacaataatgatttagaggaattgaaagttaaagcatctcccataacaaatgatggggaagatgaatttgttccttcagatgggttagataaagatgaatatacattttcaccaggcaaatcaaaagccactccagaaaaatctttgcatgacaaaaaaagtcaggattttggaaatctcttctcatttccttcatattctcagaagtcagaagatgattcagctaaatttgacagtaatgaagaagattctgcttctgttttttcaccatcatttggtctgaaacagacagataaagttccaagtaaaacggtagctgctaaaaagggaaaaccgtcttcagatacagtccctaagcccaagagagccccaaaacagaagaaagtagtagaggctgtaaactctgactcggattcagaatttggcattccaaagaagactacaacaccaaaaggtaaaggccgaggggcaaagaaaaggaaagcatctggctctgaaaatgaaggcgattataaccctggcaggaaaacatccaaaacaacaagcaagaaaccgaagaagacatcttttgatcaggattcagatgtggacatcttcccctcagacttccctactgagccaccttctctgccacgaaccggtcgggctaggaaagaagtaaaatattttgcagagtctgatgaagaagaagatgatgttgattttgcaatgtttaattaagtgcccaaagagcacaaacatttttcaacaaatatcttgtgttgtccttttgtcttctctgtctcagacttttgtacatctggcttattttaatgtgatgatgtaattgacggttttttattattgtggtaggccttttaacattttgttcttacacatacagttttatgctcttttttactcattgaaatgtcacgtactgtctg

SEQ ID NO: 34490 - protein, 445 aa, Artificial Sequence
  derived and/or modified sequence
MREIVHIQAGQCGNQIGAKFWEVISDEHGIDPTGSYHGDSDLQLERINVYYNEAAGNKYVPRAILVDLEPGTMDSVRSGPFGQIFRPDNFVFGQSGAGNNWAKGHYTEGAELVDSVLDVVRKESESCDCLQGFQLTHSLGGGTGSGMGTLLISKIREEYPDRIMNTFSVMPSPKVSDTVVEPYNATLSVHQLVENTDETYSIDNEALYDICFRTLKLTTPTYGDLNHLVSATMSGVTTCLRFPGQLNADLRKLAVNMVPFPRLHFFMPGFAPLTSRGSQQYRALTVPELTQQMFDSKNMMAACDPRHGRYLTVAAIFRGRMSMKEVDEQMLNVQNKNSSYFVEWIPNNVKTAVCDIPPRGLKMSATFIGNSTAIQELFKRISEQFTAMFRRKAFLHWYTGEGMDEMEFTEAESNMNDLVSEYQQYQDATADEQGEFEEEEGEDEA

SEQ ID NO: 34491 - DNA, 1338 bp, Artificial Sequence
  derived and/or modified sequence
atgagagagatcgtgcacatccaggccggccagtgcggcaaccagatcggcgccaagttctgggaggtgatcagcgacgagcacggcatcgaccccaccggcagctaccacggcgacagcgacctgcagctggagagaatcaacgtgtactacaacgaggccgccggcaacaagtacgtgcccagagccatcctggtggacctggagcccggcaccatggacagcgtgagaagcggccccttcggccagatcttcagacccgacaacttcgtgttcggccagagcggcgccggcaacaactgggccaagggccactacaccgagggcgccgagctggtggacagcgtgctggacgtggtgagaaaggagagcgagagctgcgactgcctgcagggcttccagctgacccacagcctgggcggcggcaccggcagcggcatgggcaccctgctgatcagcaagatcagagaggagtaccccgacagaatcatgaacaccttcagcgtgatgcccagccccaaggtgagcgacaccgtggtggagccctacaacgccaccctgagcgtgcaccagctggtggagaacaccgacgagacctacagcatcgacaacgaggccctgtacgacatctgcttcagaaccctgaagctgaccacccccacctacggcgacctgaaccacctggtgagcgccaccatgagcggcgtgaccacctgcctgagattccccggccagctgaacgccgacctgagaaagctggccgtgaacatggtgcccttccccagactgcacttcttcatgcccggcttcgcccccctgaccagcagaggcagccagcagtacagagccctgaccgtgcccgagctgacccagcagatgttcgacagcaagaacatgatggccgcctgcgaccccagacacggcagatacctgaccgtggccgccatcttcagaggcagaatgagcatgaaggaggtggacgagcagatgctgaacgtgcagaacaagaacagcagctacttcgtggagtggatccccaacaacgtgaagaccgccgtgtgcgacatcccccccagaggcctgaagatgagcgccaccttcatcggcaacagcaccgccatccaggagctgttcaagagaatcagcgagcagttcaccgccatgttcagaagaaaggccttcctgcactggtacaccggcgagggcatggacgagatggagttcaccgaggccgagagcaacatgaacgacctggtgagcgagtaccagcagtaccaggacgccaccgccgacgagcagggcgagttcgaggaggaggagggcgaggacgaggcctag

SEQ ID NO: 34492 - DNA, 1595 bp, Artificial Sequence
  derived and/or modified sequence
gcccgccggtccacgccgcgcaccgctccgagggccagcgccacccgctccgcagccggcaccatgcgcgagatcgtgcacatccaggcgggccagtgcggcaaccagatcggcgccaagttttgggaggtcatcagcgatgagcatgggatcgaccccacaggcagttaccatggagacagtgacttgcagctggagagaatcaacgtgtactacaatgaggctgctggtaacaaatatgtacctcgggccatcctggtggatctggagcctggcaccatggactctgtcaggtctggacccttcggccagatcttcagaccagacaacttcgtgttcggccagagtggagccgggaataactgggccaagggccactacacagagggagccgagctggtcgactcggtcctggatgtggtgaggaaggagtcagagagctgtgactgtctccagggcttccagctgacccactctctggggggcggcacggggtccgggatgggcaccctgctcatcagcaagatccgggaagagtacccagaccgcatcatgaacaccttcagcgtcatgccctcacccaaggtgtcagacacggtggtggagccctacaacgccaccctctctgtccaccagctggtggaaaacacagatgaaacctactccattgataacgaggccctgtatgacatctgcttccgcaccctgaagctgaccacccccacctacggggacctcaaccacctggtgtcggccaccatgagcggggtcaccacctgcctgcgcttcccgggccagctgaacgcagacctgcgcaagctggcggtgaacatggtgcccttccctcgcctgcacttcttcatgcccggcttcgcgcccctgaccagccggggcagccagcagtaccgggcgctcacggtgcccgagctcacccagcagatgttcgactccaagaacatgatggccgcctgcgacccgcgccacggccgctacctgacggtggctgccatcttccggggccgcatgtccatgaaggaggtggacgagcagatgctcaacgtgcagaacaagaacagcagctacttcgtggagtggatccccaacaacgtgaagacggccgtgtgcgacatcccgccccgcggcctgaagatgtcggccaccttcatcggcaacagcacggccatccaggagctgttcaagcgcatctccgagcagttcacggccatgttccggcgcaaggccttcctgcactggtacacgggcgagggcatggacgagatggagttcaccgaggccgagagcaacatgaacgacctggtgtccgagtaccagcagtaccaggacgccacggccgacgaacaaggggagttcgaggaggaggagggcgaggacgaggcttaaaaacttctcagatcaatcgtgcatccttagtgaacttctgttgtcctcaagcatggtctttctacttgtaaactatggtgctcagttttgcctctgttagaaattcacactgttgatgtaatgatgtggaactcctctaaaaattacagtattgtctgtgaaggtatctatactaataaaaaagcatgtgtaga

SEQ ID NO: 34493 - DNA, 1338 bp, Artificial Sequence
  derived and/or modified sequence
atgagggaaatcgtacatattcaggccggacaatgcggaaatcagatcggcgctaaattttgggaagttatctccgatgagcacggcatcgatcccaccggctcttatcatggcgattctgaccttcagctcgaacggattaacgtatattataatgaggcagctggcaataagtatgtgccaagggcaattctggtggatttggaaccgggcacaatggatagtgttagatccggcccatttgggcagatcttcaggcccgataatttcgtcttcggccaatccggcgcaggcaacaactgggcaaaaggccattacacagagggggctgaacttgtagattctgttctcgatgtggtgcgtaaggaatcagagagctgcgattgtctgcaaggatttcagctgacccactctctggggggcggaacaggatccggtatggggacactgcttatctccaagatcagagaggaatatcctgatcggatcatgaacacttttagcgtgatgccgtcacccaaggtttccgacacggtggtcgagccctataacgcaacattatcggttcatcagctcgtggaaaacaccgacgaaacctacagcatcgataacgaagcgctgtacgatatttgtttccggacactgaaattgacaactcctacgtatggagatctgaaccatctggtgtcagctacaatgtcaggcgtgaccacatgtctgcggttccccggacagctcaatgcggacctgcggaagttggccgtcaatatggtgcccttcccccgtcttcactttttcatgccaggctttgctcctctgaccagccgcggcagccagcagtatcgcgccctcaccgttcctgagctgactcagcagatgttcgattcaaagaacatgatggccgcgtgtgacccgagacacggcaggtatctgacagtggcagctattttcaggggccggatgtccatgaaagaagtggacgaacagatgcttaatgtacaaaacaaaaatagctcctatttcgtggaatggattcccaataacgtgaaaactgctgtgtgcgatattcccccacgtgggttgaagatgagcgctactttcattggcaacagcactgccattcaggagctattcaaacgcatctcagagcagttcactgcaatgttccggaggaaagcattccttcactggtataccggagagggaatggacgagatggagtttactgaagctgaatctaacatgaatgatctggtttccgagtaccaacagtatcaggatgccaccgcagacgagcagggagagttcgaagaagaggagggtgaggatgaagcctag

SEQ ID NO: 34494 - DNA, 1338 bp, Artificial Sequence
  derived and/or modified sequence
atgagggagatcgtgcacatccaggccggccagtgtggcaaccagatcggggccaagttctgggaggtgatcagtgatgagcacggcatcgaccccaccggcagctaccatggagacagcgacctgcagctggagcgcatcaacgtgtactacaatgaggccgccggcaacaagtatgtgccccgggccatcctggtggacctggagcccggcaccatggattctgtgcgcagcggccccttcggccagatcttccggccagacaactttgtgtttggccagagcggggccggcaacaactgggccaagggccactacacagaaggagctgagctggtggacagcgtgctggatgtggtgaggaaggagagcgagagctgtgactgcctgcagggcttccagctgacccacagcctgggcggcggcactggaagtggcatgggcaccctgctgatcagcaagatccgggaggagtacccagaccgcatcatgaacaccttctctgtgatgcccagccccaaggtgtctgacacagtggtggagccctacaatgccaccctgtctgtgcaccagctggtggagaacacagatgagacctacagcattgacaatgaggccctgtatgacatctgcttccgcaccctgaagctgaccacccccacctacggggacctgaaccacctggtgtctgccaccatgtctggagtgaccacctgcctgcgcttccctggccagctgaatgctgacctgaggaagctggccgtgaacatggtgcccttcccccggctgcacttcttcatgcctggctttgcccccctgaccagccggggcagccagcagtaccgggccctgactgtgcctgagctgacccagcagatgtttgacagcaagaacatgatggccgcctgtgaccccaggcatggccgctacctgactgtggccgccatcttccggggccgcatgtccatgaaggaggtggatgagcagatgctgaatgtgcagaacaagaacagcagctactttgtggagtggatccccaacaacgtgaagacagctgtgtgtgacatccccccccggggcctgaagatgtctgccaccttcatcggcaacagcacagccatccaggagctgttcaagaggatcagcgagcagttcaccgccatgttccggaggaaggccttcctgcactggtacacaggagagggcatggatgagatggagttcacagaagctgagagcaacatgaatgacctggtgtctgagtaccagcagtaccaggatgccacagcagatgagcagggcgagtttgaggaggaggagggggaggatgaggcctag

SEQ ID NO: 34495 - DNA, 1338 bp, Artificial Sequence
  derived and/or modified sequence
atgcgggagatcgtgcacatccaggccggccagtgcggcaaccagatcggagccaaattttgggaagtcataagcgacgagcacggaatcgacccaacaggatcttatcacggtgattccgacctccaactcgagagaattaatgtgtattacaatgaagccgctggcaacaagtatgtgcctagagctatcctggtcgacttggaacccggtacaatggactcagtgcggtctggcccattcggacagattttcagacctgacaactttgtgttcggccagagtggcgctggtaacaactgggccaaaggacactacacagagggtgccgaactcgtcgatagcgttctggatgtcgttagaaaggagtctgagagctgcgactgcctacaaggctttcagctcactcactctctggggggcggcactgggagtggcatggggaccctgctgatcagtaaaatacgggaagagtaccccgaccgcatcatgaatacattctctgtaatgccttcacccaaggtctcagatactgtggtcgagccttataacgccactctttctgtgcatcagttggtagagaataccgacgagacctatagcattgacaatgaggccctttatgacatatgttttcgaactttgaagctgacaacccccacctacggagacctaaaccacctcgtttctgcgactatgagcggcgtcaccacttgtctgcgtttccccggccagttgaatgccgatctgcggaagttagccgtaaatatggtgcctttcccaaggcttcattttttcatgcctggatttgcccctctaaccagtaggggcagccagcagtacagagccctgactgtacccgaacttacacagcagatgttcgattctaagaatatgatggctgcctgcgaccctcgccacgggagatatctgacggtggcggccatcttccggggccgcatgtcgatgaaggaggtggatgaacaaatgctgaacgtgcagaataagaatagttcctatttcgtggagtggattccaaacaacgtgaaaaccgctgtttgtgatataccacctcgcgggctgaaaatgtcagctacgttcatcggaaattccacagcgatccaggaactgttcaaacggatttccgagcagttcaccgccatgttccgcagaaaagcttttctgcactggtatacgggggagggtatggatgagatggagttcacagaagccgagtctaacatgaacgatttagtctccgaatatcagcaatatcaggacgccacggctgacgagcagggcgagttcgaggaggaggagggtgaagacgaggcctag

SEQ ID NO: 34496 - DNA, 1338 bp, Artificial Sequence
  derived and/or modified sequence
atgcgggaaattgtgcatattcaggccggacagtgcggcaaccaaataggcgctaaattctgggaagtgattagcgacgagcacggcatagaccctacgggttcttaccatggtgattcagacctccagctggaaaggattaatgtctactacaacgaggcagctggcaataagtacgttccgagggcaatccttgtcgatctggaacccggaactatggactctgtgaggtcaggaccctttggacaaatatttcggccagataattttgtcttcggacaatccggagctgggaacaattgggccaaagggcactacaccgagggggcagagctcgtggactccgtccttgacgtcgtgcggaaagaaagtgaaagctgtgactgcctgcagggatttcagctgacccactcccttggcggaggaacggggagcggtatggggacactgctgattagcaaaatcagggaagaatatccagaccggatcatgaataccttctccgtgatgccttcccccaaagtgagcgataccgttgtggaaccttacaacgcaacactgagtgtccaccaactcgtggagaacactgatgagacctacagtatagataacgaggcactttacgatatctgttttaggaccttaaaactgacaacacccacgtatggcgacttgaatcatttggtttcagctacgatgagcggggtgacgacctgtttacgttttccagggcagttgaacgccgatctgagaaagctggctgtgaatatggtgcctttcccaaggctgcatttcttcatgccaggctttgctccactgacttccagagggtcacagcagtatagggcccttacagtacccgagctgactcagcagatgttcgactccaagaacatgatggctgcttgtgatcccagacatgggagatacctgactgtggccgcaatcttcagggggcgtatgagcatgaaggaagttgacgaacaaatgctgaatgtgcagaataagaactcctcctattttgtggaatggatacctaacaatgtgaagacggccgtctgtgatattccgccacggggactgaaaatgagcgcaacgtttattggcaactccaccgcaatccaggagctgttcaagaggatcagcgagcagttcactgctatgttcagaagaaaagccttcctgcattggtatactggcgaaggaatggatgaaatggaatttaccgaagcagaatcaaatatgaatgacctggtgtcggaatatcagcagtatcaggatgccacagccgatgaacaaggtgagtttgaggaagaagagggcgaggacgaagcatag

SEQ ID NO: 34497 - protein, 451 aa, Artificial Sequence
  derived and/or modified sequence
MPREIITLQLGQCGNQIGFEFWKQLCAEHGISPEGIVEEFATEGTDRKDVFFYQADDEHYIPRAVLLDLEPRVIHSILNSPYAKLYNPENIYLSEHGGGAGNNWASGFSQGEKIHEDIFDIIDREADGSDSLEGFVLCHSIAGGTGSGLGSYLLERLNDRYPKKLVQTYSVFPNQDEMSDVVVQPYNSLLTLKRLTQNADCVVVLDNTALNRIATDRLHIQNPSFSQINQLVSTIMSASTTTLRYPGYMNNDLIGLIASLIPTPRLHFLMTGYTPLTTDQSVASVRKTTVLDVMRRLLQPKNVMVSTGRDRQTNHCYIAILNIIQGEVDPTQVHKSLQRIRERKLANFIPWGPASIQVALSRKSPYLPSAHRVSGLMMANHTSISSLFERTCRQYDKLRKREAFLEQFRKEDMFKDNFDEMDTSREIVQQLIDEYHAATRPDYISWGTQEQ

SEQ ID NO: 34498 - DNA, 1356 bp, Artificial Sequence
  derived and/or modified sequence
atgcccagagagatcatcaccctgcagctgggccagtgcggcaaccagatcggcttcgagttctggaagcagctgtgcgccgagcacggcatcagccccgagggcatcgtggaggagttcgccaccgagggcaccgacagaaaggacgtgttcttctaccaggccgacgacgagcactacatccccagagccgtgctgctggacctggagcccagagtgatccacagcatcctgaacagcccctacgccaagctgtacaaccccgagaacatctacctgagcgagcacggcggcggcgccggcaacaactgggccagcggcttcagccagggcgagaagatccacgaggacatcttcgacatcatcgacagagaggccgacggcagcgacagcctggagggcttcgtgctgtgccacagcatcgccggcggcaccggcagcggcctgggcagctacctgctggagagactgaacgacagataccccaagaagctggtgcagacctacagcgtgttccccaaccaggacgagatgagcgacgtggtggtgcagccctacaacagcctgctgaccctgaagagactgacccagaacgccgactgcgtggtggtgctggacaacaccgccctgaacagaatcgccaccgacagactgcacatccagaaccccagcttcagccagatcaaccagctggtgagcaccatcatgagcgccagcaccaccaccctgagataccccggctacatgaacaacgacctgatcggcctgatcgccagcctgatccccacccccagactgcacttcctgatgaccggctacacccccctgaccaccgaccagagcgtggccagcgtgagaaagaccaccgtgctggacgtgatgagaagactgctgcagcccaagaacgtgatggtgagcaccggcagagacagacagaccaaccactgctacatcgccatcctgaacatcatccagggcgaggtggaccccacccaggtgcacaagagcctgcagagaatcagagagagaaagctggccaacttcatcccctggggccccgccagcatccaggtggccctgagcagaaagagcccctacctgcccagcgcccacagagtgagcggcctgatgatggccaaccacaccagcatcagcagcctgttcgagagaacctgcagacagtacgacaagctgagaaagagagaggccttcctggagcagttcagaaaggaggacatgttcaaggacaacttcgacgagatggacaccagcagagagatcgtgcagcagctgatcgacgagtaccacgccgccaccagacccgactacatcagctggggcacccaggagcagtag

SEQ ID NO: 34499 - DNA, 1356 bp, Artificial Sequence
  derived and/or modified sequence
atgccacgcgagatcataaccctccagctcggccagtgcggtaaccagatcggcttcgaattttggaagcagctctgtgccgagcatgggatttctcccgaggggattgtggaagagtttgcaaccgaaggaaccgaccggaaggacgttttcttctatcaggctgacgacgagcattacattccgagagcagtgctcctggacctggaacctagagtgatccacagcatcctaaatagcccctacgcaaaactttacaaccccgaaaacatctacctctctgagcacggcggcggcgccggaaataactgggcctcaggcttttcacagggtgagaagatccacgaagacatctttgacataatcgatcgggaagctgacggaagcgatagtctggaggggtttgtcctctgtcacagcatcgctggagggaccggttccgggttaggttcctatctgttggaaaggctcaatgatagatacccaaaaaagctggtccagacttatagtgtgttccccaaccaggacgaaatgtcagatgttgtggtgcaaccatacaatagcctgctcacgctgaaaagactgacacagaacgcggattgcgtggtggtgctggacaacacagcactgaaccgaatcgctacggaccggctgcacattcagaacccctcattttcacagattaaccagctggtcagtaccataatgtctgcgagtaccacaacacttcgctaccctgggtatatgaacaatgatctgattggcctcattgcgtccctcatccccaccccccgactgcacttcctcatgacaggatatactcctctgacgactgatcaatctgttgcttccgtacggaagacgactgtcttggacgtgatgcggcgcttactgcagcccaagaatgtgatggtcagtacagggagagacaggcagactaatcactgttacatcgcaatcttgaacattatccagggggaggttgaccccacgcaggtgcacaagtcacttcagcgaattagggagcggaaactggccaacttcataccctggggccctgcctcaatccaggtggccctctctcgaaagagcccctacctcccctcggctcaccgcgtatccggcctgatgatggcaaaccatacatccatctcttcactattcgagcggacttgcagacaatacgacaaattaagaaagcgtgaggcctttctcgaacagttcagaaaagaagacatgtttaaggacaactttgatgagatggacacttccagggagatcgtgcagcagctgattgatgaatatcacgcagccacccgcccagattacatatcctggggtacccaagagcagtag

SEQ ID NO: 34500 - DNA, 1356 bp, Artificial Sequence
  derived and/or modified sequence
atgccccgggagatcatcaccctgcagctgggccagtgtggcaaccagattggatttgagttctggaagcagctgtgtgccgagcacggcatcagccctgagggcatcgtggaggagtttgccacagagggcacagacaggaaggatgtgttcttctaccaggctgatgatgagcactacatccccagggctgtgctgctggacctggagcccagggtcatccacagcatcctgaacagcccctatgccaagctgtacaaccctgagaacatctacctgtctgagcacggcggcggggccggcaacaactgggccagcggcttcagccagggcgagaagatccacgaggacatctttgacatcatcgaccgggaggctgatggcagtgacagcctggagggctttgtgctgtgccacagcattgctgggggcactggaagtggcctgggcagctacctgctggagcggctgaatgaccgctaccccaagaagctggtgcagacctacagcgtcttccccaaccaggatgagatgtctgatgtggtggtgcagccctacaacagcctgctgaccctgaagaggctgacccagaatgctgactgtgtggtggtgctggacaacacagccctgaacagaattgccacagaccggctgcacatccagaaccccagcttcagccagatcaaccagctggtgtccaccatcatgtctgccagcaccaccaccctgcgctacccaggctacatgaacaatgacctgattggcctgattgccagcctcatccccaccccccggctgcacttcctgatgacaggctacacccccctgaccacagaccagagcgtggcctctgtgaggaagaccaccgtgctggatgtgatgaggcggctgctgcagcccaagaatgtgatggtgtccacaggccgggaccggcagaccaaccactgctacatcgccatcctgaacatcatccagggcgaggtggaccccacccaggtgcacaagagcctgcagaggatccgggagaggaagctggccaacttcatcccctggggccctgccagcatccaggtggccctgagcaggaagagcccctacctgcccagcgcccaccgggtgtctggcctgatgatggccaaccacaccagcatcagcagcctgtttgagaggacctgccggcagtatgacaagctgaggaagcgggaggccttcctggagcagttcagaaaagaagacatgttcaaggacaactttgatgagatggacaccagccgggagatcgtgcagcagctgattgatgagtaccacgccgccaccaggccagactacatctcctggggcacccaggagcagtag

SEQ ID NO: 34501 - DNA, 1356 bp, Artificial Sequence
  derived and/or modified sequence
atgccccgggagatcatcaccctgcagctgggccagtgcggcaaccagattggctttgagttctggaagcagttgtgcgcagagcacggcatttctcctgaaggaatcgtcgaagaattcgccaccgagggaactgataggaaagacgtgttcttctaccaagccgacgacgaacactacatccctcgtgctgtgctcctggacctcgagcccagggtcatccactcaatcctgaatagcccctatgcgaaactctataatccagaaaacatttacctctcagagcacggtggaggggcggggaataactgggcctccggcttcagccaaggtgaaaaaatccatgaggatattttcgacatcatcgacagagaagctgacggttccgattccctggaaggcttcgtgctgtgtcattctattgcgggcggaacagggtcagggctcgggtcctacctgctggagcgtttgaacgaccggtatccgaaaaagttggtgcagacttacagcgtgttccccaaccaggacgagatgtcagatgtggtggtccagccttacaactctctcctgaccctgaaacggttgacccagaatgctgattgcgttgtggttcttgataatactgcccttaaccgaatcgctactgacaggttgcacatccagaaccctagctttagccagattaatcagctcgtctccactattatgtcagcctcaactacaacgcttcgttatcccggctacatgaataatgatcttatcggcctgatcgcctccctaatacccactccaagactgcatttccttatgacgggctacacgccactgacaaccgaccagagtgtcgcctcggtgagaaaaaccacagtcctcgacgtgatgagacggctcttacagccaaagaatgtcatggtttctactgggagagatcgacaaaccaatcattgctatattgccatcttgaatattatccagggggaggtggatcctacccaggtgcacaaaagccttcaaagaatacgcgagaggaagctggccaatttcatcccatggggcccggcatccattcaggtggccttgtctcgcaaatctccatatctgccctcagctcatagagtctccggcctcatgatggctaatcatacatcaattagctccctgttcgagcgcacttgtcgacagtatgataagcttagaaagcgcgaggcatttctcgagcagtttagaaaggaggacatgtttaaggataattttgacgaaatggacaccagcagggaaatcgtacagcaactgatcgatgagtaccacgccgccacgagacctgattacatatcctggggcactcaagagcaatag

SEQ ID NO: 34502 - DNA, 1356 bp, Artificial Sequence
  derived and/or modified sequence
atgccaagagaaataataacgctgcaactcgggcaatgtggcaaccagataggattcgagttctggaagcaactctgcgctgagcacggtatatctcccgaagggatagtggaggagttcgctaccgagggcaccgatagaaaagatgttttcttctatcaggccgacgatgaacactacatccctagggcggtgctgctggatctcgaacccagagtgattcacagcattctaaacagcccttacgcaaaactgtacaatccagagaatatttacctctccgaacacggtggaggggctggaaataactgggcctcaggcttttcgcagggtgagaaaattcacgaggatatattcgatatcatcgaccgcgaggctgacggaagtgactccctggaaggcttcgtgctgtgtcactccatcgccggtggaacgggtagtggtctcggcagctaccttttggagagattgaacgatcgctatccaaagaagcttgtccaaacgtacagtgtgtttcctaatcaggacgagatgagtgatgtggtcgtgcaaccatacaatagccttctgaccctgaagcggcttactcagaatgctgattgcgttgttgtgctggataataccgctctaaaccggattgctactgacaggttgcatatccaaaacccttcttttagccaaattaatcagcttgtgtcaaccattatgtcagcttcaaccacaactctgcggtatccagggtatatgaataacgacttgatcgggttgattgcctctttgatcccaaccccacggctgcacttcttaatgacaggctacacccctctgacaactgaccaatcggttgcttccgtgcgcaaaaccaccgttctggatgtcatgcgaagactgctgcagcccaagaacgtcatggtgagcactgggagggatcggcagactaatcattgctacattgccattctaaatattatacagggggaagttgaccccacacaagtccacaaatcccttcagaggattcgtgagcgcaagctagccaattttattccttggggacccgctagtatacaggtggccttaagcagaaaaagcccttacttgccatccgcccacagggtgtctggcttgatgatggccaaccatacaagcatctcaagcctttttgaaaggacttgccgtcaatacgacaagctgcgcaaacgtgaggcttttcttgagcagtttagaaaagaagacatgtttaaggacaacttcgacgagatggacacttcccgcgagattgtgcaacagctcattgacgagtaccatgccgctacaaggcctgattatatttcctggggaactcaggagcaatag

SEQ ID NO: 34503 - DNA, 1949 bp, Artificial Sequence
  derived and/or modified sequence
acaacatccggggccgtggcccgacaagtcacaataacagcaactgcgcagatgcgcgattcggcgggggaggtggcttcgcaccacagcgcgcttgcgcgcaggcccaagcaggcgcccacccagaggggagggaggacgccgtaccccgccctcactgaggcgcggagccggatccggaggcgccgagccgcatccggagccgcgcacgcgcaatctgcatgaacgaaggccagtgcttaaagacgtgccattcattgccagaactcgattctcattggagcggaggaagttcgtgggtggagctggttgtttggcgcctgcgtcttgcggcgagcgggctggcgtgcggcgccgttgcgggcgggagcggctgcaacgccggtgcctgaggagcgatgccgagggaaatcatcaccctacagttgggccagtgcggcaatcagattgggttcgagttctggaaacagctgtgcgccgagcatggtatcagccccgagggcatcgtggaggagttcgccaccgagggcactgaccgcaaggacgtctttttctaccaggcagacgatgagcactacatcccccgggccgtgctgctggacttggaaccccgggtgatccactccatcctcaactccccctatgccaagctctacaacccagagaacatctacctgtcggaacatggaggaggagctggcaacaactgggccagcggattctcccagggagaaaagatccatgaggacatttttgacatcatagaccgggaggcagatggtagtgacagtctagagggctttgtgctgtgtcactccattgctggggggacaggctctggactgggttcctacctcttagaacggctgaatgacaggtatcctaagaagctggtgcagacatactcagtgtttcccaaccaggacgagatgagcgatgtggtggtccagccttacaattcactcctcacactcaagaggctgacgcagaatgcagactgtgtggtggtgctggacaacacagccctgaaccggattgccacagaccgcctgcacatccagaacccatccttctcccagatcaaccagctggtgtctaccatcatgtcagccagcaccaccaccctgcgctaccctggctacatgaacaatgacctcatcggcctcatcgcctcgctcattcccaccccacggctccacttcctcatgaccggctacacccctctcactacggaccagtcagtggccagcgtgaggaagaccacggtcctggatgtcatgaggcggctgctgcagcccaagaacgtgatggtgtccacaggccgagaccgccagaccaaccactgctacatcgccatcctcaacatcatccagggagaggtggaccccacccaggtccacaagagcttgcagaggatccgggaacgcaagttggccaacttcatcccgtggggccccgccagcatccaggtggccctgtcgaggaagtctccctacctgccctcggcccaccgggtcagcgggctcatgatggccaaccacaccagcatctcctcgctcttcgagagaacctgtcgccagtatgacaagctgcgtaagcgggaggccttcctggagcagttccgcaaggaggacatgttcaaggacaactttgatgagatggacacatccagggagattgtgcagcagctcatcgatgagtaccatgcggccacacggccagactacatctcctggggcacccaggagcagtgagtcccccaggacagggaccctcatctgccttactggttggcccaagccctgcctgactgaccaccccctcagagcacagatcagggacctcacgcatctctttctcatatacatggactctctgttggcctgcaaacacatttacttctcctcttatgagactatttatctttaataaagcactggatataaatc

SEQ ID NO: 34504 - protein, 279 aa, Artificial Sequence
  derived and/or modified sequence
MPVAGSELPRRPLPPAAQERDAEPRPPHGELQYLGQIQHILRCGVRKDDRTGTGTLSVFGMQARYSLRDEFPLLTTKRVFWKGVLEELLWFIKGSTNAKELSSKGVKIWDANGSRDFLDSLGFSTREEGDLGPVYGFQWRHFGAEYRDMESDLPLMALPPCHALCQFYVVNSELSCQLYQRSGDMGLGVPFNIASYALLTYMIAHITGLKPGDFIHTLGDAHIYLNHIEPLKIQLQREPRPFPKLRILRKVEKIDDFKAEDFQIEGYNPHPTIKMEMAV

SEQ ID NO: 34505 - protein, 230 aa, Artificial Sequence
  derived and/or modified sequence
MPVAGSELPRRPLPPAAQERDAEPRPPHGELQYLGQIQHILRCGVRKDDRTGTGTLSVFGMQARYSLRDYSGQGVDQLQRVIDTIKTNPDDRRIIMCAWNPRDLPLMALPPCHALCQFYVVNSELSCQLYQRSGDMGLGVPFNIASYALLTYMIAHITGLKPGDFIHTLGDAHIYLNHIEPLKIQLQREPRPFPKLRILRKVEKIDDFKAEDFQIEGYNPHPTIKMEMAV

SEQ ID NO: 34506 - protein, 313 aa, Artificial Sequence
  derived and/or modified sequence
MPVAGSELPRRPLPPAAQERDAEPRPPHGELQYLGQIQHILRCGVRKDDRTGTGTLSVFGMQARYSLRDEFPLLTTKRVFWKGVLEELLWFIKGSTNAKELSSKGVKIWDANGSRDFLDSLGFSTREEGDLGPVYGFQWRHFGAEYRDMESDYSGQGVDQLQRVIDTIKTNPDDRRIIMCAWNPRDLPLMALPPCHALCQFYVVNSELSCQLYQRSGDMGLGVPFNIASYALLTYMIAHITGLKPGDFIHTLGDAHIYLNHIEPLKIQLQREPRPFPKLRILRKVEKIDDFKAEDFQIEGYNPHPTIKMEMAV

SEQ ID NO: 34507 - DNA, 840 bp, Artificial Sequence
  derived and/or modified sequence
atgcccgtggccggcagcgagctgcccagaagacccctgccccccgccgcccaggagagagacgccgagcccagacccccccacggcgagctgcagtacctgggccagatccagcacatcctgagatgcggcgtgagaaaggacgacagaaccggcaccggcaccctgagcgtgttcggcatgcaggccagatacagcctgagagacgagttccccctgctgaccaccaagagagtgttctggaagggcgtgctggaggagctgctgtggttcatcaagggcagcaccaacgccaaggagctgagcagcaagggcgtgaagatctgggacgccaacggcagcagagacttcctggacagcctgggcttcagcaccagagaggagggcgacctgggccccgtgtacggcttccagtggagacacttcggcgccgagtacagagacatggagagcgacctgcccctgatggccctgcccccctgccacgccctgtgccagttctacgtggtgaacagcgagctgagctgccagctgtaccagagaagcggcgacatgggcctgggcgtgcccttcaacatcgccagctacgccctgctgacctacatgatcgcccacatcaccggcctgaagcccggcgacttcatccacaccctgggcgacgcccacatctacctgaaccacatcgagcccctgaagatccagctgcagagagagcccagacccttccccaagctgagaatcctgagaaaggtggagaagatcgacgacttcaaggccgaggacttccagatcgagggctacaacccccaccccaccatcaagatggagatggccgtgtag

SEQ ID NO: 34508 - DNA, 693 bp, Artificial Sequence
  derived and/or modified sequence
atgcccgtggccggcagcgagctgcccagaagacccctgccccccgccgcccaggagagagacgccgagcccagacccccccacggcgagctgcagtacctgggccagatccagcacatcctgagatgcggcgtgagaaaggacgacagaaccggcaccggcaccctgagcgtgttcggcatgcaggccagatacagcctgagagactacagcggccagggcgtggaccagctgcagagagtgatcgacaccatcaagaccaaccccgacgacagaagaatcatcatgtgcgcctggaaccccagagacctgcccctgatggccctgcccccctgccacgccctgtgccagttctacgtggtgaacagcgagctgagctgccagctgtaccagagaagcggcgacatgggcctgggcgtgcccttcaacatcgccagctacgccctgctgacctacatgatcgcccacatcaccggcctgaagcccggcgacttcatccacaccctgggcgacgcccacatctacctgaaccacatcgagcccctgaagatccagctgcagagagagcccagacccttccccaagctgagaatcctgagaaaggtggagaagatcgacgacttcaaggccgaggacttccagatcgagggctacaacccccaccccaccatcaagatggagatggccgtgtag

SEQ ID NO: 34509 - DNA, 942 bp, Artificial Sequence
  derived and/or modified sequence
atgcccgtggccggcagcgagctgcccagaagacccctgccccccgccgcccaggagagagacgccgagcccagacccccccacggcgagctgcagtacctgggccagatccagcacatcctgagatgcggcgtgagaaaggacgacagaaccggcaccggcaccctgagcgtgttcggcatgcaggccagatacagcctgagagacgagttccccctgctgaccaccaagagagtgttctggaagggcgtgctggaggagctgctgtggttcatcaagggcagcaccaacgccaaggagctgagcagcaagggcgtgaagatctgggacgccaacggcagcagagacttcctggacagcctgggcttcagcaccagagaggagggcgacctgggccccgtgtacggcttccagtggagacacttcggcgccgagtacagagacatggagagcgactacagcggccagggcgtggaccagctgcagagagtgatcgacaccatcaagaccaaccccgacgacagaagaatcatcatgtgcgcctggaaccccagagacctgcccctgatggccctgcccccctgccacgccctgtgccagttctacgtggtgaacagcgagctgagctgccagctgtaccagagaagcggcgacatgggcctgggcgtgcccttcaacatcgccagctacgccctgctgacctacatgatcgcccacatcaccggcctgaagcccggcgacttcatccacaccctgggcgacgcccacatctacctgaaccacatcgagcccctgaagatccagctgcagagagagcccagacccttccccaagctgagaatcctgagaaaggtggagaagatcgacgacttcaaggccgaggacttccagatcgagggctacaacccccaccccaccatcaagatggagatggccgtgtag

SEQ ID NO: 34510 - DNA, 840 bp, Artificial Sequence
  derived and/or modified sequence
atgcccgttgcgggatcagaactccctcgacgccccctacctcccgctgctcaggagcgcgacgccgagccgagaccaccccacggcgagctgcagtatctgggacaaatacagcacatccttaggtgcggcgtgcgaaaagacgatcggacagggacgggtaccctgagcgtattcggtatgcaggcccgttattccctccgggacgaatttcctctcttgaccacaaagagagtattttggaaaggggtgctcgaggagctgttatggttcatcaagggttccactaatgcaaaagaactgtcttctaagggcgtgaaaatatgggacgccaacgggtcaagggattttttagacagccttggcttcagcacgagagaagaaggagacctggggcccgtgtatggattccagtggcggcattttggagctgagtacagggatatggaatctgatcttcctctcatggccctgccaccctgccacgccctgtgtcagttttacgttgttaactccgaactgagctgccagctgtatcagagaagcggcgatatggggttaggcgtgccattcaacatcgcaagctacgcccttttgacatatatgatcgcgcacatcacaggcctgaagcccggggactttatccataccttgggcgatgcgcatatctacctgaatcacatagagccactcaagatccagctccagcgcgagccgcggccttttccaaagttgcgaatcctgcgaaaggttgaaaaaattgatgactttaaggcagaagatttccagatagagggctacaacccgcatcccacaatcaaaatggagatggcagtctag

SEQ ID NO: 34511 - DNA, 693 bp, Artificial Sequence
  derived and/or modified sequence
atgccagtggccggctcggaactgccaaggcggccgctgccccctgctgctcaggagcgggatgccgaaccaaggcctccgcacggggagctccaataccttggacagattcagcatattctacgctgtggcgtgcgaaaggatgatcgcaccggcacgggtaccctctctgtgtttggaatgcaggcaagatactccctccgcgattacagtggacaaggcgtagaccagctgcagagggtgatcgataccatcaagacaaaccccgatgatcgcaggattatcatgtgcgcatggaacccaagagacctaccactaatggcacttccaccttgtcacgccctctgccagttttacgtggtgaacagtgaactcagttgccagctttatcagcgctcaggagatatgggtttgggagtgccattcaatatagcaagttatgcacttctcacctatatgatcgcccacataactggcctcaagcctggagacttcatacacacgttgggagatgcccacatatatctgaaccacatagagccactgaagatccagctgcagcgggagccacggccctttcctaagctcaggattctacggaaagtggaaaagatcgacgattttaaagccgaagatttccagattgaagggtacaatccccatccaaccattaagatggagatggccgtgtag

SEQ ID NO: 34512 - DNA, 942 bp, Artificial Sequence
  derived and/or modified sequence
atgcctgtggctggatccgaacttcccagacggccacttccccccgctgctcaggaacgcgacgctgagccgcgcccaccgcatggagaactccagtaccttggtcaaatccagcatattctaagatgcggagtgagaaaggatgaccgcaccggcacaggtacgctgtcagtgttcgggatgcaggctagatattccctgagggatgagtttcctctcctcactaccaaaagagtattctggaagggagtgctggaggagctgctatggtttatcaagggatctaccaatgccaaagaacttagttcaaagggggtgaagatctgggacgccaacgggtccagagacttcttagactccttgggcttctctactcgggaggaaggtgatctcggtcccgtttacggtttccagtggcggcacttcggcgctgaataccgggacatggagtcggactactccggccagggtgtagaccagctgcaacgcgtaatcgacaccatcaagacgaaccccgacgacaggcgcataattatgtgcgcgtggaatcccagggatctgccactgatggctctgcctccctgtcacgctttatgccaattttacgtggtgaattctgagctgagctgccagctttaccaacgttctggtgatatggggctgggagttccatttaacatcgccagttatgcactgctgacatatatgatagcccatatcactggactcaagcccggagacttcatacatacactcggcgatgcgcatatttatttaaaccatattgagcccctgaagatccagctgcaacgggaaccacgcccattcccaaaactgcggatcctgcggaaggtggaaaaaatcgatgatttcaaagctgaagactttcaaatagaaggatacaatcctcatcccacaatcaaaatggagatggccgtgtag

SEQ ID NO: 34513 - DNA, 840 bp, Artificial Sequence
  derived and/or modified sequence
atgcctgtggccggcagcgagctgccccggcggcccctgcccccagctgcccaggagagagatgctgagccccggcccccccacggggagctgcagtacctgggccagatccagcacatcctgcgctgtggggtgaggaaggatgacagaactggaacaggcaccctgtctgtgtttggcatgcaggcccgctacagcctgagagatgagttccccctgctgaccaccaagagggtcttctggaagggcgtgctggaggagctgctgtggttcatcaagggcagcaccaatgccaaggagctgagcagcaagggcgtgaagatctgggatgccaacggcagccgggacttcctggacagcctgggcttcagcacccgggaggagggggacctgggccctgtgtatggcttccagtggaggcactttggagctgagtacagagacatggagagtgacctgcccctgatggccctgcccccctgccacgccctgtgccagttctacgtggtgaacagcgagctgagctgccagctgtaccagaggtctggggacatgggcctgggcgtgcccttcaacatcgccagctatgccctgctgacctacatgattgcccacatcaccggcctgaagccaggggacttcatccacaccctgggagatgcccacatctacctgaaccacatcgagcccctgaagatccagctgcagcgggagccccggcccttccccaagctgcgcatcctgaggaaggtggagaagattgatgacttcaaggccgaggacttccagatcgagggctacaacccccaccccaccatcaagatggagatggctgtgtag

SEQ ID NO: 34514 - DNA, 693 bp, Artificial Sequence
  derived and/or modified sequence
atgcctgtggccggcagcgagctgccccggcggcccctgcccccagctgcccaggagagagatgctgagccccggcccccccacggggagctgcagtacctgggccagatccagcacatcctgcgctgtggggtgaggaaggatgacagaactggaacaggcaccctgtctgtgtttggcatgcaggcccgctacagcctgcgggactacagcggccagggcgtggaccagctgcagagggtcatcgacaccatcaagaccaacccagatgaccggcgcatcatcatgtgtgcctggaacccccgggacctgcccctgatggccctgcccccctgccacgccctgtgccagttctacgtggtgaacagcgagctgagctgccagctgtaccagaggtctggggacatgggcctgggcgtgcccttcaacatcgccagctatgccctgctgacctacatgattgcccacatcaccggcctgaagccaggggacttcatccacaccctgggagatgcccacatctacctgaaccacatcgagcccctgaagatccagctgcagcgggagccccggcccttccccaagctgcgcatcctgaggaaggtggagaagattgatgacttcaaggccgaggacttccagatcgagggctacaacccccaccccaccatcaagatggagatggctgtgtag

SEQ ID NO: 34515 - DNA, 942 bp, Artificial Sequence
  derived and/or modified sequence
atgcctgtggccggcagcgagctgccccggcggcccctgcccccagctgcccaggagagagatgctgagccccggcccccccacggggagctgcagtacctgggccagatccagcacatcctgcgctgtggggtgaggaaggatgacagaactggaacaggcaccctgtctgtgtttggcatgcaggcccgctacagcctgagagatgagttccccctgctgaccaccaagagggtcttctggaagggcgtgctggaggagctgctgtggttcatcaagggcagcaccaatgccaaggagctgagcagcaagggcgtgaagatctgggatgccaacggcagccgggacttcctggacagcctgggcttcagcacccgggaggagggggacctgggccctgtgtatggcttccagtggaggcactttggagctgagtacagagacatggagagtgactacagcggccagggcgtggaccagctgcagagggtgattgacaccatcaagaccaacccagatgaccggcgcatcatcatgtgtgcctggaacccccgggacctgcccctgatggccctgcccccctgccacgccctgtgccagttctacgtggtgaacagcgagctgagctgccagctgtaccagaggtctggggacatgggcctgggcgtgcccttcaacatcgccagctatgccctgctgacctacatgattgcccacatcaccggcctgaagccaggggacttcatccacaccctgggagatgcccacatctacctgaaccacatcgagcccctgaagatccagctgcagcgggagccccggcccttccccaagctgcgcatcctgaggaaggtggagaagattgatgacttcaaggccgaggacttccagatcgagggctacaacccccaccccaccatcaagatggagatggctgtgtag

SEQ ID NO: 34516 - DNA, 840 bp, Artificial Sequence
  derived and/or modified sequence
atgcccgtggccggcagcgagctgccccggcggcccctgccccccgcagcacaggaaagagatgccgagcctcgtccgccacacggtgagctgcaatatctgggtcaaatccagcacatcctgcgctgtggagtccgcaaagacgaccgcacaggcaccggaactctgagtgttttcgggatgcaagctaggtactctctgcgagatgaattccctcttctgacaacaaaaagagtattttggaaaggtgttcttgaggagctgctgtggttcattaaaggaagcacaaacgctaaggaattgagctcaaaaggtgtaaagatttgggacgctaacggatccagagatttcctagactccctcggcttctcaacgcgtgaggagggcgatcttggtcctgtgtacggcttccagtggcgacacttcggcgctgagtatcgcgacatggagagtgacctgcccttgatggccctcccgccctgtcacgccctgtgtcagttctatgtggtcaacagcgagttgtcctgccagctatatcagaggagcggagacatgggactgggggtgccgtttaacattgctagctatgcccttctgacgtatatgattgcgcacattactggtctgaaaccgggcgactttatccacactctgggtgatgcgcatatctaccttaatcacatagagccattaaaaattcaattgcaacgtgaaccaagaccatttcctaaactccgcattttgcgcaaggtcgagaagattgacgacttcaaggcagaagactttcagattgaggggtacaacccgcatcctacaataaaaatggagatggccgtgtag

SEQ ID NO: 34517 - DNA, 693 bp, Artificial Sequence
  derived and/or modified sequence
atgcccgtggccggcagcgagctgccccggcggcccctgccccccgcagcccaggagcgggatgcagaacctcgccctccgcatggtgaactgcaatatctcggccagattcagcatattctgcggtgtggagtgaggaaagatgaccgaacaggcactggtactcttagcgtgttcgggatgcaggcaagatattctctgagggactactctggacagggcgtggaccagctccaacgcgtaatcgacactatcaagaccaatcctgatgacaggcgtataatcatgtgcgcatggaacccgcgggatctccccctgatggccctccccccttgccatgctttgtgccagttctacgtggttaacagcgagctcagttgccagctgtaccagaggagcggtgacatggggctaggagtgcccttcaatatcgcctcgtacgctctgctaacgtatatgattgctcatattaccggactcaaaccgggcgattttatccatacactaggggacgcccatatctatctaaaccacattgagcctctgaagatccagcttcagcgggagccccggccattccctaagctgcgtatcttgaggaaagttgagaaaattgatgacttcaaggctgaagatttccaaatagaaggttacaacccccaccccacaattaagatggaaatggcagtctag

SEQ ID NO: 34518 - DNA, 942 bp, Artificial Sequence
  derived and/or modified sequence
atgcccgtggccggcagcgagctgccccggcggcccctgccccccgccgcccaggagagggacgccgagcccaggcctccacacggggagctgcagtacctcgggcaaatccagcacatcctaaggtgtggagtgagaaaggatgacagaaccggaaccggcaccctctctgtctttggtatgcaggcccgctacagtttgagagacgagtttccactgctcacaaccaaaagggtgttctggaagggcgttctggaggagctgctctggtttataaaaggaagcacaaacgcaaaggagttgtccagtaagggagtgaagatttgggatgctaacgggagccgagactttttggattctctaggattctcaacccgcgaggagggtgacctcggccccgtgtatggttttcagtggcgacatttcggcgcggaataccgggatatggagagcgattactcaggacagggggtggaccagctgcaacgggtgatagatactattaaaacgaatcctgacgacaggcgtattattatgtgcgcttggaatccacgcgacctcccgctgatggccctccctccgtgtcacgccttgtgccagttttatgtcgtcaactcagagttgtcttgccaactctaccagcgttctggggacatgggccttggagttcccttcaacatcgcgagttatgcattgctgacctacatgatcgcccacattactggcctgaaacctggagatttcatccatacccttggcgacgctcacatttacctgaatcacatcgagccccttaagatccaactgcagagagagccaagaccttttccaaagttgcgaatcttgcgtaaagtggagaaaatagatgatttcaaggctgaggactttcaaattgaaggttacaatccccaccccactatcaagatggagatggcagtgtag

SEQ ID NO: 34519 - DNA, 840 bp, Artificial Sequence
  derived and/or modified sequence
atgcccgtagcaggttccgagctgcctcggaggccactgccccctgctgcccaggagagggacgccgagccgagaccacctcacggtgaactgcaatacctgggccagatacagcacatcctgcgctgtggggtgcgcaaggacgatagaacgggtaccgggactctgtcggtctttggaatgcaggccagatattccctgcgtgatgagtttccgttattgaccacgaagcgtgtcttctggaagggggtccttgaagaactactatggttcatcaaaggctcaaccaacgccaaagaactttcgagcaagggagtgaaaatctgggatgcaaacggctcccgggactttttggattctctgggcttttctacccgggaggagggagatttaggccctgtgtatgggttccagtggcgacactttggggcagagtaccgagacatggagtctgacctccccctcatggcactacccccttgccacgcgctgtgccagttctatgtggtcaatagcgagctgagttgccagctgtatcagcgcagtggagacatgggactcggagtgcctttcaatatcgcaagttacgccctgctgacatacatgatcgctcatattaccggcttgaaacctggggacttcatacacactctgggtgatgcccacatatacctcaatcacatcgagccgctcaagatccagttacagcgcgagcctaggccattccctaagctgcgaatcttacggaaagtcgaaaaaatcgacgacttcaaggctgaagacttccaaatcgaggggtacaacccgcatcccacgattaaaatggagatggccgtgtag

SEQ ID NO: 34520 - DNA, 693 bp, Artificial Sequence
  derived and/or modified sequence
atgcccgtcgcgggttccgaactgcccaggcgcccactgcccccagccgctcaggagcgggatgcggaacctcgccctccgcatggcgaactgcaatacctcggccaaattcagcatattctccgatgcggcgtgcgaaaggacgataggaccggcactggaacacttagcgtgttcggtatgcaagcacgctattctctcagagactattccggccagggcgtcgaccagctccagcgggtgatcgatacaatcaaaacgaacccagatgaccgccgaattatcatgtgtgcctggaacccccgtgacctgcctctgatggctctgcctccctgtcatgcactgtgtcagttttacgtggtcaatagcgagctgagttgccagttatatcagaggtcgggtgatatggggctcggcgtcccattcaatattgccagttacgcgcttctgacctacatgatcgcccatattactgggctgaagcccggagattttatccacacactgggtgacgcacacatttacctcaatcatattgaaccactcaaaattcagcttcagcgggaacctagaccctttcccaagctgcgcattctgaggaaggtggaaaaaattgatgacttcaaagcagaagatttccagattgaaggttacaacccccacccaaccataaaaatggagatggccgtatag

SEQ ID NO: 34521 - DNA, 942 bp, Artificial Sequence
  derived and/or modified sequence
atgcctgtggcaggttccgagctccctcggaggcctttgccgcctgctgcccaagagcgcgacgcagagcctcgccctccacacggggaattgcagtacctgggccaaatccagcacatattgagatgcggggttagaaaggacgacagaactggcaccgggaccctgtctgtctttggaatgcaggctcggtattcgctacgagacgagtttcctttgctgaccactaagcgagtgttttggaagggcgtcttggaggagttgctctggttcatcaaaggcagcactaacgctaaagaactgagtagtaaaggtgtcaaaatctgggacgcaaacgggtcacgagactttctagactcactgggtttttccacccgcgaagagggagatctgggaccggtatacgggtttcagtggaggcatttcggagctgagtatcgggacatggaatctgactactcagggcagggcgttgatcagttacagcgggtgatcgacactattaagacgaatccagacgataggaggatcatcatgtgcgcgtggaatcctagggatttgccattgatggcattaccaccttgtcatgccctgtgtcagttttacgtggtgaacagtgagctctcgtgtcaattgtatcaacggtctggcgatatgggcctgggggtgcctttcaacatagcctcctatgcgctgctaacatacatgatcgcgcacatcacaggtctgaaacccggagattttatccatacattgggcgatgctcacatttatctgaatcatattgaacccttaaagattcagctccagcgagaacctcgacccttccccaagttgagaatcctacgcaaggtggaaaagattgacgattttaaagctgaggatttccagattgagggatataacccccatccaactattaagatggaaatggccgtgtag

SEQ ID NO: 34522 - DNA, 840 bp, Artificial Sequence
  derived and/or modified sequence
atgcctgtggccggctcggagctgccgcgccggcccttgccccccgccgcacaggagcgggacgccgagccgcgtccgccgcacggggagctgcagtacctggggcagatccaacacatcctccgctgcggcgtcaggaaggacgaccgcacgggcaccggcaccctgtcggtattcggcatgcaggcgcgctacagcctgagagatgaattccctctgctgacaaccaaacgtgtgttctggaagggtgttttggaggagttgctgtggtttatcaagggatccacaaatgctaaagagctgtcttccaagggagtgaaaatctgggatgccaatggatcccgagactttttggacagcctgggattctccaccagagaagaaggggacttgggcccagtttatggcttccagtggaggcattttggggcagaatacagagatatggaatcagatcttcctctgatggcgctgcctccatgccatgccctctgccagttctatgtggtgaacagtgagctgtcctgccagctgtaccagagatcgggagacatgggcctcggtgtgcctttcaacatcgccagctacgccctgctcacgtacatgattgcgcacatcacgggcctgaagccaggtgactttatacacactttgggagatgcacatatttacctgaatcacatcgagccactgaaaattcagcttcagcgagaacccagacctttcccaaagctcaggattcttcgaaaagttgagaaaattgatgacttcaaagctgaagactttcagattgaagggtacaatccgcatccaactattaaaatggaaatggctgtttag

SEQ ID NO: 34523 - DNA, 693 bp, Artificial Sequence
  derived and/or modified sequence
atgcctgtggccggctcggagctgccgcgccggcccttgccccccgccgcacaggagcgggacgccgagccgcgtccgccgcacggggagctgcagtacctggggcagatccaacacatcctccgctgcggcgtcaggaaggacgaccgcacgggcaccggcaccctgtcggtattcggcatgcaggcgcgctacagcctgagagattattcaggacagggagttgaccaactgcaaagagtgattgacaccatcaaaaccaaccctgacgacagaagaatcatcatgtgcgcttggaatccaagagatcttcctctgatggcgctgcctccatgccatgccctctgccagttctatgtggtgaacagtgagctgtcctgccagctgtaccagagatcgggagacatgggcctcggtgtgcctttcaacatcgccagctacgccctgctcacgtacatgattgcgcacatcacgggcctgaagccaggtgactttatacacactttgggagatgcacatatttacctgaatcacatcgagccactgaaaattcagcttcagcgagaacccagacctttcccaaagctcaggattcttcgaaaagttgagaaaattgatgacttcaaagctgaagactttcagattgaagggtacaatccgcatccaactattaaaatggaaatggctgtttag

SEQ ID NO: 34524 - DNA, 1662 bp, Artificial Sequence
  derived and/or modified sequence
cgggacggccgcgggaaaaggcgcgcggaaggggtcctgccaccgcgccacttggcctgcctccgtcccgccgcgccacttggcctgcctccgtcccgccgcgccacttcgcctgcctccgtcccccgcccgccgcgccatgcctgtggccggctcggagctgccgcgccggcccttgccccccgccgcacaggagcgggacgccgagccgcgtccgccgcacggggagctgcagtacctggggcagatccaacacatcctccgctgcggcgtcaggaaggacgaccgcacgggcaccggcaccctgtcggtattcggcatgcaggcgcgctacagcctgagagatgaattccctctgctgacaaccaaacgtgtgttctggaagggtgttttggaggagttgctgtggtttatcaagggatccacaaatgctaaagagctgtcttccaagggagtgaaaatctgggatgccaatggatcccgagactttttggacagcctgggattctccaccagagaagaaggggacttgggcccagtttatggcttccagtggaggcattttggggcagaatacagagatatggaatcagattattcaggacagggagttgaccaactgcaaagagtgattgacaccatcaaaaccaaccctgacgacagaagaatcatcatgtgcgcttggaatccaagagatcttcctctgatggcgctgcctccatgccatgccctctgccagttctatgtggtgaacagtgagctgtcctgccagctgtaccagagatcgggagacatgggcctcggtgtgcctttcaacatcgccagctacgccctgctcacgtacatgattgcgcacatcacgggcctgaagccaggtgactttatacacactttgggagatgcacatatttacctgaatcacatcgagccactgaaaattcagcttcagcgagaacccagacctttcccaaagctcaggattcttcgaaaagttgagaaaattgatgacttcaaagctgaagactttcagattgaagggtacaatccgcatccaactattaaaatggaaatggctgtttagggtgctttcaaaggagctcgaaggatattgtcagtctttaggggttgggctggatgccgaggtaaaagttctttttgctctaaaagaaaaaggaactaggtcaaaaatctgtccgtgacctatcagttattaatttttaaggatgttgccactggcaaatgtaactgtgccagttctttccataataaaaggctttgagttaactcactgagggtatctgacaatgctgaggttatgaacaaagtgaggagaatgaaatgtatgtgctcttagcaaaaacatgtatgtgcatttcaatcccacgtacttataaagaaggttggtgaatttcacaagctatttttggaatatttttagaatattttaagaatttcacaagctattccctcaaatctgagggagctgagtaacaccatcgatcatgatgtagagtgtggttatgaactttaaagttatagttgttttatatgttgctataataaagaagtgttctgcattcgtccacgctttgttcattctgtactgccacttatctgctcagttccttcctaaaatagattaaagaactctccttaagtaaa

SEQ ID NO: 34525 - protein, 18 aa, Artificial Sequence
  derived and/or modified sequence
AMAIADALGKIPQTVLWR

SEQ ID NO: 34526 - protein, 14 aa, Artificial Sequence
  derived and/or modified sequence
WLPQNDLLGHPMTR

SEQ ID NO: 34527 - protein, 265 aa, Artificial Sequence
  derived and/or modified sequence
MPNMVFIGGINCKKRKDLSQEFEAYINASGEHGIVVFSLGSMVSEIPEKKAMAIADALGKIPQTVLWRYTGTRPSNLANNTILVKWLPQNDLLGHPMTRAFITHAGSHGVYESICNGVPMVMMPLFGDQMDNAKRMETKGAGVTLNVLEMTSEDLENALKAVINDKSYKENIMRLSSLHKDRPVEPLDLAVFWVEFVMRHKGAPHLRPAAHDLTWYQYHSLDVIGFLLAVVLTVAFITFKCCAYGYRKCLGKKGRVKKAHKSKTH

SEQ ID NO: 34528 - protein, 532 aa, Artificial Sequence
  derived and/or modified sequence
MACLLRSFQRISAGVFFLALWGMVVGDKLLVVPQDGSHWLSMKDIVEVLSDRGHEIVVVVPEVNLLLKESKYYTRKIYPVPYDQEELKNRYQSFGNNHFAERSFLTAPQTEYRNNMIVIGLYFINCQSLLQDRDTLNFFKESKFDALFTDPALPCGVILAEYLGLPSVYLFRGFPCSLEHTFSRSPDPVSYIPRCYTKFSDHMTFSQRVANFLVNLLEPYLFYCLFSKYEELASAVLKRDVDIITLYQKVSVWLLRYDFVLEYPRPVMPNMVFIGGINCKKRKDLSQEFEAYINASGEHGIVVFSLGSMVSEIPEKKAMAIADALGKIPQTVLWRYTGTRPSNLANNTILVKWLPQNDLLGHPMTRAFITHAGSHGVYESICNGVPMVMMPLFGDQMDNAKRMETKGAGVTLNVLEMTSEDLENALKAVINDKSYKENIMRLSSLHKDRPVEPLDLAVFWVEFVMRHKGAPHLRPAAHDLTWYQYHSLDVIGFLLAVVLTVAFITFKCCAYGYRKCLGKKGRVKKAHKSKTH

SEQ ID NO: 34529 - protein, 189 aa, Artificial Sequence
  derived and/or modified sequence
MACLLRSFQRISAGVFFLALWGMVVGDKLLVVPQDGSHWLSMKDIVEVLSDRGHEIVVVVPEVNLLLKESKYYTRKIYPVPYDQEELKNRYQSFGNNHFAERSFLTAPQTEYRNNMIVIGLYFINCQSLLQDRDTLNFFKESKFDALFTDPALPCGVILAEYLGLPSVYLFRGFPCSLEHTFSRSPDPV

SEQ ID NO: 34530 - DNA, 1599 bp, Artificial Sequence
  derived and/or modified sequence
atggcctgcctgctgagaagcttccagagaatcagcgccggcgtgttcttcctggccctgtggggcatggtggtgggcgacaagctgctggtggtgccccaggacggcagccactggctgagcatgaaggacatcgtggaggtgctgagcgacagaggccacgagatcgtggtggtggtgcccgaggtgaacctgctgctgaaggagagcaagtactacaccagaaagatctaccccgtgccctacgaccaggaggagctgaagaacagataccagagcttcggcaacaaccacttcgccgagagaagcttcctgaccgccccccagaccgagtacagaaacaacatgatcgtgatcggcctgtacttcatcaactgccagagcctgctgcaggacagagacaccctgaacttcttcaaggagagcaagttcgacgccctgttcaccgaccccgccctgccctgcggcgtgatcctggccgagtacctgggcctgcccagcgtgtacctgttcagaggcttcccctgcagcctggagcacaccttcagcagaagccccgaccccgtgagctacatccccagatgctacaccaagttcagcgaccacatgaccttcagccagagagtggccaacttcctggtgaacctgctggagccctacctgttctactgcctgttcagcaagtacgaggagctggccagcgccgtgctgaagagagacgtggacatcatcaccctgtaccagaaggtgagcgtgtggctgctgagatacgacttcgtgctggagtaccccagacccgtgatgcccaacatggtgttcatcggcggcatcaactgcaagaagagaaaggacctgagccaggagttcgaggcctacatcaacgccagcggcgagcacggcatcgtggtgttcagcctgggcagcatggtgagcgagatccccgagaagaaggccatggccatcgccgacgccctgggcaagatcccccagaccgtgctgtggagatacaccggcaccagacccagcaacctggccaacaacaccatcctggtgaagtggctgccccagaacgacctgctgggccaccccatgaccagagccttcatcacccacgccggcagccacggcgtgtacgagagcatctgcaacggcgtgcccatggtgatgatgcccctgttcggcgaccagatggacaacgccaagagaatggagaccaagggcgccggcgtgaccctgaacgtgctggagatgaccagcgaggacctggagaacgccctgaaggccgtgatcaacgacaagagctacaaggagaacatcatgagactgagcagcctgcacaaggacagacccgtggagcccctggacctggccgtgttctgggtggagttcgtgatgagacacaagggcgccccccacctgagacccgccgcccacgacctgacctggtaccagtaccacagcctggacgtgatcggcttcctgctggccgtggtgctgaccgtggccttcatcaccttcaagtgctgcgcctacggctacagaaagtgcctgggcaagaagggcagagtgaagaaggcccacaagagcaagacccactag

SEQ ID NO: 34531 - DNA, 570 bp, Artificial Sequence
  derived and/or modified sequence
atggcctgcctgctgagaagcttccagagaatcagcgccggcgtgttcttcctggccctgtggggcatggtggtgggcgacaagctgctggtggtgccccaggacggcagccactggctgagcatgaaggacatcgtggaggtgctgagcgacagaggccacgagatcgtggtggtggtgcccgaggtgaacctgctgctgaaggagagcaagtactacaccagaaagatctaccccgtgccctacgaccaggaggagctgaagaacagataccagagcttcggcaacaaccacttcgccgagagaagcttcctgaccgccccccagaccgagtacagaaacaacatgatcgtgatcggcctgtacttcatcaactgccagagcctgctgcaggacagagacaccctgaacttcttcaaggagagcaagttcgacgccctgttcaccgaccccgccctgccctgcggcgtgatcctggccgagtacctgggcctgcccagcgtgtacctgttcagaggcttcccctgcagcctggagcacaccttcagcagaagccccgaccccgtgtag

SEQ ID NO: 34532 - DNA, 1599 bp, Artificial Sequence
  derived and/or modified sequence
atggcctgtctgttaaggtctttccagcgcatcagcgcgggggtcttctttttagctctctgggggatggtcgtcggggataagctactggtggtgccccaggacggcagtcactggctcagcatgaaagacatagtggaagtgctctcagacaggggacacgagattgttgtggtcgtgcctgaggtgaatctgctgctcaaggagtccaagtactacacacgaaaaatctaccctgtgccttacgaccaggaggaattgaaaaatcggtaccagagtttcggcaataaccatttcgcggagcggtcatttctgaccgccccacagacagaatatcgcaacaacatgatcgtaatcggcctttatttcataaattgtcagagcctgctccaagatagagacactctcaacttcttcaaggaaagcaagtttgacgccttattcactgacccggccctcccttgcggtgtaatattggccgaatacctgggactacccagcgtttatctttttcgggggtttccctgctcactggaacacacattctcccgctcgccagaccccgtctcctatatcccacgatgttacacaaagttcagtgatcacatgaccttctctcagcgagtcgctaacttcctcgtcaacttacttgaaccttacctgttttattgcctcttttccaagtatgaggaactcgcttctgccgtgctcaagcgcgacgtggatatcataacgttgtaccagaaggtgtcagtatggcttttgcggtacgattttgtcctggagtaccctcgtcccgttatgcccaacatggtctttattggtgggattaactgtaagaaaaggaaagatctaagtcaggaattcgaagcatatatcaacgctagcggcgagcacgggatcgttgtcttcagcctcggcagcatggtgtctgaaatccctgagaagaaagctatggcaattgccgacgccctgggtaagatcccacagaccgtgctatggcgctataccgggacgcgccccagcaacctggcaaataatacaatcttggtgaaatggcttcctcagaacgatctcctggggcaccctatgaccagagcgtttattacgcatgccgggagtcacggtgtctacgagtctatttgtaacggggtcccaatggttatgatgccgctgttcggagatcaaatggacaatgcaaaaaggatggagaccaagggcgccggcgtcacactcaatgtgcttgaaatgacaagcgaagatctcgagaacgcactgaaggccgtgatcaacgataagagctacaaggagaacatcatgcgccttagttccctgcataaagatagacccgttgagccactcgacttggccgtattttgggttgagttcgtaatgcggcataagggggctcctcaccttaggccagctgcccacgatttaacctggtaccaatatcactcacttgatgtcattgggttcctgctagccgttgtcctgaccgtagcatttatcactttcaagtgttgtgcttacggttacagaaagtgtctcggcaagaaaggcagagttaaaaaggcgcacaagtcaaaaacacattag

SEQ ID NO: 34533 - DNA, 570 bp, Artificial Sequence
  derived and/or modified sequence
atggcgtgcctgctgaggagttttcaaaggataagcgccggggtgttctttctggctctgtggggtatggtcgttggcgacaagctgctggtggtgccccaggacgggtcacattggctatctatgaaagacattgttgaggtcctctcggaccgtggccacgagatagtcgttgttgtgcctgaagtgaatctgttgctcaaggagagcaagtattacacaagaaaaatctacccagtcccatatgaccaggaggaactgaagaatcgctatcagagttttggcaataatcatttcgccgagcggagcttcctcacagctccacaaaccgagtaccggaacaatatgattgtgattggcttgtattttattaactgccagtccctcctgcaagacagggatacactcaatttcttcaaggagtccaaattcgatgcacttttcaccgaccccgcgctcccgtgcggtgtgatcttggcggagtaccttggcctgccctctgtgtacctgttccgcggcttcccctgtagcctggagcacaccttctcccggtcacctgaccctgtttag

SEQ ID NO: 34534 - DNA, 1599 bp, Artificial Sequence
  derived and/or modified sequence
atggcctgcctgctgcgctccttccagaggatctctgctggggtcttcttcctggccctgtggggcatggtggtgggggacaagctgctggtggtgccccaggacggcagccactggctgtccatgaaggacatcgtggaggtgctgagtgaccggggccacgagatcgtggtggtggtgcctgaggtgaacctgctgctgaaggagagcaagtactacaccaggaagatctaccctgtgccctatgaccaggaggagctgaagaaccgctaccagagctttggaaacaaccactttgctgagaggagcttcctgacagccccccagacagagtacagaaacaacatgattgtgattggcctgtacttcatcaactgccagagcctgctgcaggaccgggacaccctgaacttcttcaaggagagcaagtttgatgccctcttcacagatcctgccctgccctgtggggtcatcctggccgagtacctgggcctgcccagcgtgtacctgttccggggcttcccctgcagcctggagcacaccttcagccgcagcccagaccctgtgtcctacatcccccgctgctacaccaagttcagtgaccacatgaccttcagccagagggtggccaacttcctggtgaacctgctggagccctacctgttctactgcctcttcagcaaatatgaggagctggccagcgctgtgctgaagagagatgtggacatcatcaccctgtaccagaaggtgtctgtgtggctgctgcgctatgactttgtgctggagtaccccaggcctgtgatgcccaacatggtgttcatcggcggcatcaactgcaagaagaggaaggacctgagccaggagtttgaggcctacatcaatgccagcggggagcacggcatcgtggtgttcagcctgggctccatggtgtctgagatccctgagaagaaggccatggccatcgcagatgccctgggcaagatcccccagacagtgctgtggagatacacaggcacccggcccagcaacctggccaacaacaccatcctggtgaagtggctgccccagaatgacctgctgggccaccccatgacccgggccttcatcacccacgccggcagccatggagtgtatgagagcatctgcaatggagtgcccatggtgatgatgcccctgtttggagaccagatggacaatgccaagaggatggagaccaagggggccggcgtgaccctgaatgtgctggagatgaccagcgaggacctggagaatgccctgaaggccgtcatcaatgacaagagctacaaggagaacatcatgaggctgagcagcctgcacaaggacaggcctgtggagcccctggacctggccgtgttctgggtggagtttgtgatgaggcacaagggggccccccacctgcggcctgctgcccatgacctgacctggtaccagtaccacagcctggatgtgattggcttcctgctggccgtggtgctgactgtggccttcatcaccttcaagtgctgtgcctacggctacaggaagtgcctgggcaagaagggccgggtgaagaaggcccacaagagcaagacccactag

SEQ ID NO: 34535 - DNA, 570 bp, Artificial Sequence
  derived and/or modified sequence
atggcctgcctgctgcgctccttccagaggatctctgctggggtcttcttcctggccctgtggggcatggtggtgggggacaagctgctggtggtgccccaggacggcagccactggctgtccatgaaggacatcgtggaggtgctgagtgaccggggccacgagatcgtggtggtggtgcctgaggtgaacctgctgctgaaggagagcaagtactacaccaggaagatctaccctgtgccctatgaccaggaggagctgaagaaccgctaccagagctttggaaacaaccactttgctgagaggagcttcctgacagccccccagacagagtacagaaacaacatgattgtgattggcctgtacttcatcaactgccagagcctgctgcaggaccgggacaccctgaacttcttcaaggagagcaagtttgatgccctcttcacagatcctgccctgccctgtggggtcatcctggccgagtacctgggcctgcccagcgtgtacctgttccggggcttcccctgcagcctggagcacaccttcagccgcagcccagaccctgtgtag

SEQ ID NO: 34536 - DNA, 1599 bp, Artificial Sequence
  derived and/or modified sequence
atggcctgcctgctgcggagcttccagcggatcagcgccggcgtgttcttcctcgccctttgggggatggtcgtaggcgataaactgctggttgtgccccaggacggctcccactggttatcaatgaaagacatcgtagaagtcttatctgaccgtggccacgagattgtagtggtcgtccccgaagttaaccttctactgaaggagtcaaagtactacaccaggaaaatctaccccgtgccgtatgatcaggaggagctgaagaaccggtaccagagtttcggaaataatcacttcgcggaacggtcctttctgacagctccccaaaccgagtaccgtaataacatgatcgtcataggcctctacttcattaattgccagtctttgctacaggaccgggataccttaaatttcttcaaggaatccaaatttgatgctctcttcacagatccagcactgccctgtggagttattcttgccgaatatttgggcctgccaagtgtatacctgttccggggcttcccgtgttcccttgaacataccttctcccgctcccccgatcccgtgagctacataccaagatgttatactaaattctctgatcatatgacctttagccagcgagtagctaacttcctcgtcaacctgttggaaccatacctgttttactgtctgtttagcaagtacgaggagctcgcatccgccgtgctaaagcgagacgtagatatcattacgctgtaccagaaagttagcgtttggctgcttcggtatgacttcgtgctggaatatccacggccggtcatgcccaacatggtatttatcggagggattaactgcaagaaaagaaaggacctgtctcaggaatttgaggcgtatataaacgcctctggagagcatggaatcgttgttttctccctgggatctatggtttctgagattcctgaaaaaaaagccatggccattgctgatgccctgggtaagattcctcaaacagtactgtggcggtatactggcacccggccctcaaacctagccaacaatacaattctcgtcaagtggctcccccagaacgaccttctggggcacccaatgaccagagctttcatcacacatgccggaagccacggtgtgtacgaatctatatgtaatggcgtccccatggtgatgatgcccctcttcggggaccagatggacaacgccaaacgcatggagaccaaaggcgccggtgtgaccctgaacgtgctggaaatgacttccgaggacctggagaatgcactgaaggcggtcatcaacgacaagagctacaaggaaaacatcatgcggctttccagcctgcacaaggataggcctgtggagcctctagacctcgctgtattttgggtggaattcgtaatgcggcacaagggagccccacacctccggccagctgcccatgacctgacctggtaccagtaccacagcctcgacgtcatcggtttcctccttgccgtggtcctgaccgttgcctttattaccttcaaatgttgcgcgtatggttaccgaaagtgcttgggcaagaaggggagagtgaaaaaggctcataaatccaagacccattag

SEQ ID NO: 34537 - DNA, 570 bp, Artificial Sequence
  derived and/or modified sequence
atggcctgcctgctgcggagcttccagcggatcagcgccggcgtgttcttcctcgctctttggggtatggtcgtgggcgataaactgctcgttgtgcctcaggacggtagccactggctcagcatgaaagacatagtggaggtgctctcagacagaggacacgagatagtggtggttgtgccggaagtgaatctgctcctgaaggagagtaaatactacacacgcaagatctaccctgtcccctacgatcaggaggagctgaagaatcgctaccagagctttggcaataatcacttcgcggagcgctcttttcttacagcccctcagactgagtataggaacaatatgatagtaatagggttgtactttatcaattgccagagtctccttcaggacagagacactctcaatttcttcaaagagtccaaattcgatgccctatttaccgatccagccctcccctgtggggtgattctagctgaatatctgggtctgcccagcgtgtatttattcagggggttcccatgctcactcgaacacacctttagcagatccccggacccagtctag

SEQ ID NO: 34538 - DNA, 1599 bp, Artificial Sequence
  derived and/or modified sequence
atggcttgtctgcttcgtagcttccagcggatttctgccggagtgttcttcctggcactctggggcatggttgtcggcgataaacttctcgtggttccccaggatggttcccattggctgagcatgaaggatatagtagaggttctgagcgataggggacatgagattgtggtggtggttcctgaagtgaatctacttctaaaagagtccaagtactatactcgcaaaatttaccctgtgccttatgatcaggaagaactgaagaaccgctaccagagttttggaaacaatcattttgctgaaaggagctttctcacagctcctcagacggaataccgcaacaacatgatagtgatcggtctgtacttcatcaattgtcagtcattactgcaggatcgggacacactgaacttcttcaaagagagcaaatttgacgctctcttcacggatcccgctttgccatgcggggtgattctggcagaatatcttgggctcccatcagtatacttattccgaggttttccttgctcgctcgagcacacattctcccggagcccagaccccgtgagttatatacctcgatgctataccaagtttagcgaccacatgactttcagccagagggtggctaactttcttgtcaatctgctcgagccgtacctgttctactgcctgtttagtaagtacgaggagctagcttccgcagtccttaaacgggatgtcgatataatcaccctctaccagaaggtcagcgtgtggctgttgcggtacgacttcgttttggaataccctcgccctgttatgccgaatatggtgtttattggcggaataaattgcaaaaagcggaaggatctctcacaggaattcgaggcgtacatcaacgcctcaggggaacatggaatcgtcgtcttctctctaggctctatggtctcagagatcccggagaaaaaggcaatggcgatagctgatgccctcggcaagattcctcagactgtgttgtggcgttacaccggtacacgcccttctaatcttgcgaacaacaccatcctcgtaaagtggctgccccagaatgatttgcttggccatccgatgacccgcgctttcatcacacatgccggatcccacggcgtgtatgagtccatatgtaacggcgtcccgatggttatgatgcctcttttcggcgaccagatggacaatgccaaacgcatggagacgaaaggcgcaggggtcacgcttaacgtgctggaaatgacgagcgaggaccttgaaaatgcccttaaggcagttattaatgataaatcctacaaggagaatatcatgagactatcaagcttgcacaaagaccgcccagtggagccactggatctggccgtattttgggtcgaattcgtgatgcggcataagggcgcaccccacttacgacctgcagcgcacgatctgacttggtaccagtaccactctttagacgttatcgggttcctgctggccgtggtcttgactgtggcgtttataaccttcaaatgttgtgcctacggctatcgaaaatgcctggggaagaagggcagagtgaagaaagctcacaaaagtaagacccattag

SEQ ID NO: 34539 - DNA, 570 bp, Artificial Sequence
  derived and/or modified sequence
atggcttgcttgcttcgctcattccagcggatctccgctggcgtattttttctagccttgtggggcatggtagtaggggataaattactggttgtcccacaggatggatctcactggctgtccatgaaggacatcgtggaggtgctatccgataggggacacgaaattgttgtcgtggtgccggaagttaatttgctgctcaaggagagtaaatactacaccagaaagatctaccccgtaccgtacgaccaagaagaattgaaaaatcgttatcagtccttcgggaacaaccactttgcggagcgctcattcctgacagctcctcagaccgagtatcgcaacaatatgattgtcatcggcctgtatttcattaactgtcagagcctgttgcaagatcgcgacactcttaatttttttaaagaatctaaattcgacgccctgtttaccgacccggcactgccctgcggagtgatcttagccgagtacctagggcttccgtcggtgtacctcttcagaggattcccatgtagcctcgaacataccttcagcaggagccccgatcccgtgtag

SEQ ID NO: 34540 - DNA, 2479 bp, Artificial Sequence
  derived and/or modified sequence
aaagggtaaaattcagagcaagggagaggtagacaggacctgtgaaaagcagtggttagtttagggaaaatacctaggagccctgtgatttggagagtgaaaactctttattaccgttgttactttaactctttccaggatggcctgcctccttcgctcatttcagagaatttctgcaggggttttcttcttagcactttggggcatggttgtaggtgacaagctgctggtggtccctcaggacggaagccactggcttagtatgaaggatatagttgaggttctcagtgaccggggtcatgagattgtagtggtggtgcctgaagttaatttgcttttgaaagaatccaaatactacacaagaaaaatctatccagtgccgtatgaccaagaagagctgaagaaccgttaccaatcatttggaaacaatcactttgctgagcgatcattcctaactgctcctcagacagagtacaggaataacatgattgttattggcctgtacttcatcaactgccagagcctcctgcaggacagggacaccctgaacttctttaaggagagcaagtttgatgctcttttcacagacccagccttaccctgtggggtgatcctggctgagtatttgggcctaccatctgtgtacctcttcaggggttttccgtgttccctggagcatacattcagcagaagcccagaccctgtgtcctacattcccaggtgctacacaaagttttcagaccacatgactttttcccaacgagtggccaacttccttgttaatttgttggagccctatctattttattgtctgttttcaaagtatgaagaactcgcatcagctgtcctcaagagagatgtggatataatcaccttatatcagaaggtctctgtttggctgttaagatatgactttgtgcttgaatatcctaggccggtcatgcccaacatggtcttcattggaggtatcaactgtaagaagaggaaagacttgtctcaggaatttgaagcctacattaatgcttctggagaacatggaattgtggttttctctttgggatcaatggtctcagaaattccagagaagaaagctatggcaattgctgatgctttgggcaaaatccctcagacagtcctgtggcggtacactggaacccgaccatcgaatcttgcgaacaacacgatacttgttaagtggctaccccaaaacgatctgcttggtcacccgatgacccgtgcctttatcacccatgctggttcccatggtgtttatgaaagcatatgcaatggcgttcccatggtgatgatgcccttgtttggtgatcagatggacaatgcaaagcgcatggagactaagggagctggagtgaccctgaatgttctggaaatgacttctgaagatttagaaaatgctctaaaagcagtcatcaatgacaaaagttacaaggagaacatcatgcgcctctccagccttcacaaggaccgcccggtggagccgctggacctggccgtgttctgggtggagtttgtgatgaggcacaagggcgcgccacacctgcgccccgcagcccacgacctcacctggtaccagtaccattccttggacgtgattggtttcctcttggccgtcgtgctgacagtggccttcatcacctttaaatgttgtgcttatggctaccggaaatgcttggggaaaaaagggcgagttaagaaagcccacaaatccaagacccattgagaagtgggtgggaaataaggtaaaattttgaaccattccctagtcatttccaaacttgaaaacagaatcagtgttaaattcattttattcttattaaggaaatactttgcataaattaatcagccccagagtgctttaaaaaattctcttaaataaaaataatagactcgctagtcagtaaagatatttgaatatgtatcgtgccccctctggtgtctttgatcaggatgacatgtgccatttttcagaggacgtgcagacaggctggcattctagattacttttcttactctgaaacatggcctgtttgggagtgcgggattcaaaggtggtcccacggctgcccctactgcaaatggcagttttaatcttatcttttggcttctgcagatggttgcaattgatccttaaccaataatggtcagtcctcatctctgtcgtgcttcataggtgccaccttgtgtgtttaaagaagggaagctttgtacctttagagtgtaggtgaaatgaatgaatggcttggagtgcactgagaacagcatatgatttcttgctttggggaaaaagaatgatgctatgaaattggtgggtggtgtatttgagaagataatcattgcttatgtcaaatggagctgaatttgataaaaacccaaaatacagctatgaagtgctgggcaagtttactttttttctgatgtttcctacaactaaaaataaattaataaatttatataaattcta

SEQ ID NO: 34541 - DNA, 745 bp, Artificial Sequence
  derived and/or modified sequence
agtgtgaccctccctttctgggcctcagttgagaaacctgaagctcaggagaggagtcactcccctggcagatgggtggctgggccagaagcagataccaggctttctgactcctgctctaggattctcaccacgtactggctagacttatacttctcaaatcttaatttcctaaaggatggcctgcctccttcgctcatttcagagaatttctgcaggggttttcttcttagcactttggggcatggttgtaggtgacaagctgctggtggtccctcaggacggaagccactggcttagtatgaaggatatagttgaggttctcagtgaccggggtcatgagattgtagtggtggtgcctgaagttaatttgcttttgaaagaatccaaatactacacaagaaaaatctatccagtgccgtatgaccaagaagagctgaagaaccgttaccaatcatttggaaacaatcactttgctgagcgatcattcctaactgctcctcagacagagtacaggaataacatgattgttattggcctgtacttcatcaactgccagagcctcctgcaggacagggacaccctgaacttctttaaggagagcaagtttgatgctcttttcacagacccagccttaccctgtggggtgatcctggctgagtatttgggcctaccatctgtgtacctcttcaggggttttccgtgttccctggagcatacattcagcagaagcccagaccctgtg

SEQ ID NO: 34542 - protein, 529 aa, Artificial Sequence
  derived and/or modified sequence
MTLKWTSVLLLIHLSCYFSSGSCGKVLVWAAEYSHWMNMKTILKELVQRGHEVTVLASSASILFDPNDASTLKFEVYPTSLTKTEFENIIMQQVKRWSDIRKDSFWLYFSQEQEILWELYDIFRNFCKDVVSNKKVMKKLQESRFDIVFADAVFPCGELLAALLNIRFVYSLRFTPGYTIERHSGGLIFPPSYIPIVMSKLSDQMTFMERVKNMIYVLYFDFWFQMSDMKKWDQFYSEVLGRPTTLFETMGKADIWLMRNSWSFQFPHPFLPNVDFVGGFHCKPAKPLPKEMEEFVQSSGENGVVVFSLGSVISNMTAERANVIATALAKIPQKVLWRFDGNKPDALGLNTRLYKWIPQNDLLGHPKTRAFITHGGANGIYEAIYHGIPMVGIPLFFDQPDNIAHMKAKGAAVRLDFNTMSSTDLLNALKTVINDPLYKENIMKLSRIQHDQPVKPLDRAVFWIEFVMPHKGAKHLRVAAHDLTWFQYHSLDVIGFLLACVATVIFIITKFCLFCFWKFARKGKKGKRD

SEQ ID NO: 34543 - DNA, 1590 bp, Artificial Sequence
  derived and/or modified sequence
atgaccctgaagtggaccagcgtgctgctgctgatccacctgagctgctacttcagcagcggcagctgcggcaaggtgctggtgtgggccgccgagtacagccactggatgaacatgaagaccatcctgaaggagctggtgcagagaggccacgaggtgaccgtgctggccagcagcgccagcatcctgttcgaccccaacgacgccagcaccctgaagttcgaggtgtaccccaccagcctgaccaagaccgagttcgagaacatcatcatgcagcaggtgaagagatggagcgacatcagaaaggacagcttctggctgtacttcagccaggagcaggagatcctgtgggagctgtacgacatcttcagaaacttctgcaaggacgtggtgagcaacaagaaggtgatgaagaagctgcaggagagcagattcgacatcgtgttcgccgacgccgtgttcccctgcggcgagctgctggccgccctgctgaacatcagattcgtgtacagcctgagattcacccccggctacaccatcgagagacacagcggcggcctgatcttcccccccagctacatccccatcgtgatgagcaagctgagcgaccagatgaccttcatggagagagtgaagaacatgatctacgtgctgtacttcgacttctggttccagatgagcgacatgaagaagtgggaccagttctacagcgaggtgctgggcagacccaccaccctgttcgagaccatgggcaaggccgacatctggctgatgagaaacagctggagcttccagttcccccaccccttcctgcccaacgtggacttcgtgggcggcttccactgcaagcccgccaagcccctgcccaaggagatggaggagttcgtgcagagcagcggcgagaacggcgtggtggtgttcagcctgggcagcgtgatcagcaacatgaccgccgagagagccaacgtgatcgccaccgccctggccaagatcccccagaaggtgctgtggagattcgacggcaacaagcccgacgccctgggcctgaacaccagactgtacaagtggatcccccagaacgacctgctgggccaccccaagaccagagccttcatcacccacggcggcgccaacggcatctacgaggccatctaccacggcatccccatggtgggcatccccctgttcttcgaccagcccgacaacatcgcccacatgaaggccaagggcgccgccgtgagactggacttcaacaccatgagcagcaccgacctgctgaacgccctgaagaccgtgatcaacgaccccctgtacaaggagaacatcatgaagctgagcagaatccagcacgaccagcccgtgaagcccctggacagagccgtgttctggatcgagttcgtgatgccccacaagggcgccaagcacctgagagtggccgcccacgacctgacctggttccagtaccacagcctggacgtgatcggcttcctgctggcctgcgtggccaccgtgatcttcatcatcaccaagttctgcctgttctgcttctggaagttcgccagaaagggcaagaagggcaagagagactag

SEQ ID NO: 34544 - DNA, 1590 bp, Artificial Sequence
  derived and/or modified sequence
atgactcttaagtggaccagcgtattgctcctgatccacctgagttgttatttctcatcggggagctgcggaaaagtcctcgtttgggcagccgaatatagccactggatgaacatgaagacaattctcaaggaattagttcagaggggtcacgaagttacggtgctggcctcttccgctagtatcctgttcgaccccaacgatgcgtcaacgctcaagtttgaagtctacccaactagtctcactaagaccgagttcgagaatatcatcatgcagcaggtcaaacgctggagcgatatccgtaaggattctttttggctctacttctcacaggagcaagagatcctttgggagttgtacgacattttcagaaacttctgcaaagacgtggtctccaacaaaaaggtgatgaagaagctccaggagagtcgtttcgatatagtgttcgccgacgccgtgtttccctgcggggagctgctcgctgccctcctgaatattcggtttgtgtattcactacgtttcacacccggctacaccatagagcggcactcaggcgggctgatttttccgccctcatacattcctattgtgatgagtaagttatctgatcagatgacattcatggagcgggtgaagaacatgatctatgtcctctactttgatttctggttccagatgtccgatatgaagaagtgggaccagttctattcggaagttttaggacgacccacaactctttttgaaaccatgggtaaagccgacatctggctgatgcggaacagctggagtttccagttcccgcacccctttctccctaatgtagatttcgttggcggtttccattgtaagcctgctaagcctctgcctaaagaaatggaggaatttgtgcaaagctcaggagagaacggggttgtcgtgttctcactgggatcagtgatttctaacatgactgcagaaagagccaacgtcatcgcaaccgccctggctaaaatccctcagaaagttctttggcggttcgacgggaataaacccgatgcactgggcctaaatacccgcctttataagtggattcctcagaacgatctgctgggccacccaaagacccgcgcctttattacccacgggggcgctaatgggatatacgaggctatctatcatgggattccgatggttggaatacccctgttcttcgaccagccagataacatcgcccatatgaaggcaaagggagccgccgtgcggttagacttcaatacaatgtcatccacagacctgctgaacgcacttaagaccgtgatcaatgatccgctgtacaaggaaaacattatgaaactgtcaaggattcagcatgaccaacccgtaaagccactggaccgggccgtcttttggattgagtttgtgatgccccacaagggggccaaacacttgcgtgtcgcagcccacgacttaacctggttccagtaccattcgctggacgtgatcgggtttctgttagcgtgcgtcgctacagtgatatttataatcactaagttctgccttttttgcttttggaaatttgctcgtaaaggaaaaaagggcaagcgggactag

SEQ ID NO: 34545 - DNA, 1590 bp, Artificial Sequence
  derived and/or modified sequence
atgaccctgaagtggacctctgtgctgctgctgatccacctgagctgctacttcagcagcggcagctgtgggaaggtgctggtgtgggccgctgagtacagccactggatgaacatgaagaccatcctgaaggagctggtgcagaggggccacgaggtgacagtgctggccagcagcgccagcatcctgtttgaccccaatgatgccagcaccctgaagtttgaggtgtaccccaccagcctgaccaagacagaatttgagaacatcatcatgcagcaggtgaagcgctggagcgacatcaggaaggacagcttctggctgtacttcagccaggagcaggagatcctgtgggagctgtatgacatcttcaggaacttctgcaaggatgtggtgagcaacaagaaggtgatgaagaagctgcaggagagcagatttgatattgtgtttgctgatgctgtgttcccctgtggggagctgctggccgccctgctgaacatccgctttgtgtacagcctgcgcttcaccccaggctacaccatcgagcggcacagcggcggcctcatcttcccccccagctacatccccatcgtgatgagcaagctgagtgaccagatgaccttcatggagcgggtgaagaacatgatctacgtgctgtactttgacttctggttccagatgtctgacatgaagaagtgggaccagttctacagcgaggtgctgggccggcccaccaccctgtttgagaccatgggcaaggctgacatctggctgatgagaaattcctggagcttccagttcccccaccccttcctgcccaacgtggactttgtgggcggcttccactgcaagccagccaagcccctgcccaaggagatggaggagtttgtgcagagcagtggagaaaatggagtggtggtgttcagcctgggcagcgtcatcagcaacatgacagctgagcgggccaacgtcatcgccacagccctggccaagatcccccagaaggtgctgtggaggtttgatggcaacaagccagatgccctgggcctgaacacccggctgtacaagtggatcccccagaatgacctgctgggccaccccaagacccgggccttcatcacccacggcggggccaacggcatctatgaggccatctaccacggcatccccatggtgggcatccccctcttctttgaccagcctgacaacatcgcccacatgaaggccaagggagctgctgtgcggctggacttcaacaccatgagcagcacagacctgctgaatgccctgaagacagtcatcaatgaccccctgtacaaggagaacatcatgaagctgagccgcatccagcacgaccagcctgtgaagcccctggacagagctgtgttctggattgaatttgtgatgccccacaagggggccaagcacctgcgggtggccgcccatgacctgacctggttccagtaccacagcctggatgtgattggcttcctgctggcctgtgtggccaccgtcatcttcatcatcaccaagttctgcctcttctgcttctggaagtttgccaggaagggcaagaagggcaagagggactag

SEQ ID NO: 34546 - DNA, 1590 bp, Artificial Sequence
  derived and/or modified sequence
atgaccctgaagtggaccagcgtgctgctgctgatccacctgagctgctatttctcatctggatcttgcggaaaagtcctggtctgggccgccgagtactcccactggatgaacatgaaaaccatccttaaagagcttgtgcagagaggccatgaggttaccgttctggctagctccgcaagcatacttttcgaccccaacgacgcctctacccttaaattcgaagtgtatccgacatcactcacaaagacagagtttgaaaatatcatcatgcagcaggtgaagagatggagcgatattagaaaggattctttctggctgtacttctcccaagagcaggaaatactgtgggaactgtacgatatttttcgaaacttttgtaaggacgtcgtctcaaataaaaaagtgatgaagaagttacaggaaagccgcttcgatattgtatttgcggacgcggtcttcccttgtggagagctgcttgcagctctccttaacattagattcgtgtactctcttagattcaccccagggtacaccattgaaaggcacagtggcggtctcattttccctccaagctacatccctattgtgatgagtaaactgtctgaccagatgaccttcatggagcgggtgaagaatatgatatacgtactctacttcgatttttggttccaaatgtctgacatgaagaaatgggaccagttttactcagaagtactaggccgccctactacactgttcgaaaccatgggaaaggctgacatctggttgatgagaaatagctggtctttccagtttccacacccttttctccccaatgttgatttcgtagggggcttccattgtaagcctgctaaaccattgcctaaggagatggaggagttcgtgcagtcctctggggagaatggagtggtggtgttctctctgggctcggttataagcaatatgacagccgagagggcgaacgtgatcgctaccgcacttgccaaaatacctcaaaaggtgctctggaggttcgacgggaataagcctgatgctctgggcttaaatacgaggctgtataagtggataccccagaacgatctcctggggcaccccaaaaccagagccttcataacccatggcggggccaatggaatttacgaggcgatctatcacggcatacctatggtagggatccccctctttttcgaccagccagataacatcgcacatatgaaggcaaaaggagcagccgttcgcttggacttcaataccatgtccagcactgacttactcaacgccctcaagaccgtcatcaatgaccccttgtataaggagaatattatgaagctgtcaaggattcagcatgatcagcccgtgaagccacttgacagggctgtgttttggatcgagttcgtaatgccccacaagggggccaagcacttgcgcgtggccgctcatgatctcacttggttccaataccactccctggacgtaattggatttctcctggcctgcgtggcaactgtgatctttataattacaaagttctgcctgttttgcttttggaagttcgccaggaagggaaaaaaaggtaagcgagactag

SEQ ID NO: 34547 - DNA, 1590 bp, Artificial Sequence
  derived and/or modified sequence
atgacactgaagtggactagtgtgcttttgttgatccatctatcatgttatttcagctccggatcatgcggaaaagttttagtctgggccgctgaatatagccattggatgaatatgaagacaatattgaaagaactcgtgcagagaggtcacgaggtgactgtgctggcatcctcggcgtcaattctattcgatccaaatgatgcctctaccctcaagtttgaagtctatcccactagcctaaccaaaaccgaatttgaaaacattatcatgcaacaagtcaaaaggtggtccgacattcgtaaggattccttttggctgtacttctctcaagagcaggaaatattatgggagctctatgacatctttcgcaatttttgtaaggacgttgtcagcaataagaaggtcatgaaaaaactccaggagtctcgatttgacattgtgttcgctgacgctgtctttccatgcggcgaacttctggctgcccttcttaacatccggtttgtgtacagtctgaggttcacccctggttacacaatcgagagacatagcggcggactgattttcccgccatcttatatcccaatcgtgatgagcaagctgtctgatcaaatgaccttcatggagcgtgtcaaaaatatgatatatgttctctacttcgacttttggtttcagatgtccgacatgaaaaaatgggatcagttttactcagaagtgttgggccgaccaactacgctcttcgagactatggggaaagctgacatctggctgatgcgcaattcttggtccttccagtttccccaccccttcctgcctaacgtggattttgtcggcggttttcattgcaaaccagccaaaccgctccccaaggagatggaagaattcgtgcagagtagtggcgagaatggcgtggtggtcttctcattgggatccgttattagtaacatgacagcagaaagagcaaacgtcatcgccaccgcccttgccaaaatcccccaaaaagtcctttggcgcttcgacggaaacaaacctgatgcgttgggcctgaataccaggctctataaatggatccctcagaatgacctactaggacaccccaaaacccgggctttcatcacccatggtggtgcaaacggaatttacgaggcaatttaccatggcatacctatggttgggataccattgttttttgaccagccagataacattgcccacatgaaggccaaaggcgctgccgtgagactggactttaacacaatgtcctcaacagacttgctgaatgccctcaagacagtgattaatgaccccctctacaaagaaaacatcatgaagttaagccgcattcagcatgaccagcccgtcaagcctctggacagggcagttttctggattgaattcgttatgccacataaaggtgcaaagcacctgagggtcgccgcacatgacctgacctggtttcagtaccatagtctcgatgtgataggatttctgctggcctgtgtcgccacggtgatcttcataataaccaaattttgcctgttctgcttttggaaattcgctcggaaaggaaagaaaggcaaaagagactag

SEQ ID NO: 34548 - DNA, 2088 bp, Artificial Sequence
  derived and/or modified sequence
tgcaccaggatgactctgaaatggacttcagttcttctgctgatacatctcagttgttactttagctctgggagttgtggaaaagtgctggtgtgggccgcagaatacagccattggatgaatatgaagacaatcctgaaagagcttgttcagagaggtcatgaggtgactgtactggcatcttcagcttccattctttttgatcccaatgatgcatccactcttaaatttgaagtttatcctacatctttaactaaaactgaatttgagaatatcatcatgcaacaggttaagagatggtcagacattcgaaaagatagcttttggttatatttttcacaagaacaagaaatcctgtgggaattatatgacatatttagaaacttctgtaaagatgtagtttcaaataagaaagttatgaaaaaactacaagagtcaagatttgacatcgtttttgcagatgctgtttttccctgtggtgagctgctggctgcgctacttaacatacggtttgtgtacagtctccgctttactcctggctacacaattgaaaggcacagtggaggactgattttccctccttcctacatacctattgttatgtcaaaattaagtgatcaaatgactttcatggagagggtaaaaaatatgatctatgtgctttattttgacttttggttccaaatgtctgatatgaagaagtgggatcagttttacagtgaagttttaggaagacccactaccttatttgagacaatgggaaaagctgacatatggcttatgcgaaactcctggagttttcaatttcctcatccattcttaccaaacgttgattttgttggaggattccactgcaaacctgccaaacccctacctaaggaaatggaggagtttgtacagagctctggagaaaatggtgttgtggtgttttctctggggtcagtgataagtaacatgacagcagaaagggccaatgtaattgcaacagcccttgccaagatcccacaaaaggttctgtggagatttgacgggaataaaccagatgccttaggtctcaatactcggctgtacaagtggataccccagaatgaccttctaggtcatccaaaaaccagagcttttataactcatggtggagccaatggcatctatgaggcaatctaccatgggatccctatggtgggcattccattgttttttgatcaacctgataacattgctcacatgaaggccaagggagcagctgttagattggacttcaacacaatgtcgagtacagacctgctgaatgcactgaagacagtaattaatgatcctttatataaagagaatattatgaaattatcaagaattcaacatgatcaaccagtaaagcccctggatcgagcagtcttctggattgaatttgtcatgccccacaaaggagccaaacaccttcgagttgcagcccatgacctcacctggttccagtaccactctttggatgtgattgggtttctgctggcctgtgtggcaactgtgatatttatcatcacaaagttttgtctgttttgtttctggaagtttgctagaaaagggaagaagggaaaaagagattagttatgtctgacatttgaagctggaaaaccagatagataggacaacttcagtttattccagcaagaaagaaaagattgttatgcaagatttctttcttcctgtgacaaaaaaaaaaaaaaaaaaaaaattttcaaatctaccttgtcaagtaaaaatttgtttttcagagatttaccacccaggtaatggttagaaatattttgtggcaatgaagaaaatactaggaaaattaaaaaataatataaagccatttgagctcatattgaaatttgttgcacttatattgagatttgttgtttgaattcacaagttacatgaaaaaatttactcagcttaactatatttcacacattttacataaacacaagaacattaagaagtctactgacagtatcagtagtcacatcctcagaataatttggcttcattttgaacaggattctgttgttttaactgttgctaaagaaactattacatagttaaattgta

SEQ ID NO: 34549 - protein, 528 aa, Artificial Sequence
  derived and/or modified sequence
MALKWTTVLLIQLSFYFSSGSCGKVLVWAAEYSLWMNMKTILKELVQRGHEVTVLASSASILFDPNDSSTLKLEVYPTSLTKTEFENIIMQLVKRLSEIQKDTFWLPFSQEQEILWAINDIIRNFCKDVVSNKKLMKKLQESRFDIVFADAYLPCGELLAELFNIPFVYSHSFSPGYSFERHSGGFIFPPSYVPVVMSKLSDQMTFMERVKNMLYVLYFDFWFQIFNMKKWDQFYSEVLGRPTTLSETMRKADIWLMRNSWNFKFPHPFLPNVDFVGGLHCKPAKPLPKEMEEFVQSSGENGVVVFSLGSMVSNMTEERANVIATALAKIPQKVLWRFDGNKPDALGLNTRLYKWIPQNDLLGHPKTRAFITHGGANGIYEAIYHGIPMVGIPLFFDQPDNIAHMKAKGAAVRVDFNTMSSTDLLNALKTVINDPSYKENIMKLSRIQHDQPVKPLDRAVFWIEFVMRHKGAKHLRVAAHNLTWFQYHSLDVIGFLLACVATVLFIITKCCLFCFWKFARKGKKGKRD

SEQ ID NO: 34550 - DNA, 1587 bp, Artificial Sequence
  derived and/or modified sequence
atggccctgaagtggaccaccgtgctgctgatccagctgagcttctacttcagcagcggcagctgcggcaaggtgctggtgtgggccgccgagtacagcctgtggatgaacatgaagaccatcctgaaggagctggtgcagagaggccacgaggtgaccgtgctggccagcagcgccagcatcctgttcgaccccaacgacagcagcaccctgaagctggaggtgtaccccaccagcctgaccaagaccgagttcgagaacatcatcatgcagctggtgaagagactgagcgagatccagaaggacaccttctggctgcccttcagccaggagcaggagatcctgtgggccatcaacgacatcatcagaaacttctgcaaggacgtggtgagcaacaagaagctgatgaagaagctgcaggagagcagattcgacatcgtgttcgccgacgcctacctgccctgcggcgagctgctggccgagctgttcaacatccccttcgtgtacagccacagcttcagccccggctacagcttcgagagacacagcggcggcttcatcttcccccccagctacgtgcccgtggtgatgagcaagctgagcgaccagatgaccttcatggagagagtgaagaacatgctgtacgtgctgtacttcgacttctggttccagatcttcaacatgaagaagtgggaccagttctacagcgaggtgctgggcagacccaccaccctgagcgagaccatgagaaaggccgacatctggctgatgagaaacagctggaacttcaagttcccccaccccttcctgcccaacgtggacttcgtgggcggcctgcactgcaagcccgccaagcccctgcccaaggagatggaggagttcgtgcagagcagcggcgagaacggcgtggtggtgttcagcctgggcagcatggtgagcaacatgaccgaggagagagccaacgtgatcgccaccgccctggccaagatcccccagaaggtgctgtggagattcgacggcaacaagcccgacgccctgggcctgaacaccagactgtacaagtggatcccccagaacgacctgctgggccaccccaagaccagagccttcatcacccacggcggcgccaacggcatctacgaggccatctaccacggcatccccatggtgggcatccccctgttcttcgaccagcccgacaacatcgcccacatgaaggccaagggcgccgccgtgagagtggacttcaacaccatgagcagcaccgacctgctgaacgccctgaagaccgtgatcaacgaccccagctacaaggagaacatcatgaagctgagcagaatccagcacgaccagcccgtgaagcccctggacagagccgtgttctggatcgagttcgtgatgagacacaagggcgccaagcacctgagagtggccgcccacaacctgacctggttccagtaccacagcctggacgtgatcggcttcctgctggcctgcgtggccaccgtgctgttcatcatcaccaagtgctgcctgttctgcttctggaagttcgccagaaagggcaagaagggcaagagagactag

SEQ ID NO: 34551 - DNA, 1587 bp, Artificial Sequence
  derived and/or modified sequence
atggcccttaaatggactacagtactcctgattcagttgtcattctatttttcctccggttcttgcggcaaagtcctggtatgggcagccgagtatagcttgtggatgaatatgaagactatccttaaggagctggtgcagcgcggtcatgaagtaaccgtgctcgctagttctgcctccattttgttcgatcctaacgactcctctactctgaagttggaggtgtatcccacctctttgaccaaaaccgagttcgaaaatatcattatgcaactggtgaagcgtttgtctgaaatccagaaggatactttctggcttccattcagtcaggaacaagaaattctgtgggccatcaatgatattatacgcaacttctgcaaagatgtcgtgagcaacaagaaactgatgaagaaactccaggagtcgcgatttgatatcgtattcgcagacgcatacttgccttgcggcgagctactggctgaactgttcaacattcccttcgtatattctcatagtttcagcccgggctactcatttgaaaggcatagcggtggatttattttcccaccgtcatacgtgcctgtggtgatgagcaagttgagtgatcagatgacttttatggagcgcgtgaagaatatgctgtatgtgctgtattttgacttctggttccagattttcaacatgaaaaaatgggaccagttctatagtgaggtgcttggtcggccaaccacactcagcgaaaccatgaggaaggcagacatttggctcatgaggaactcctggaacttcaaattcccacacccctttctgcctaacgtggacttcgtgggtggtctccactgtaagcctgcaaaacccctcccaaaggaaatggaggagtttgtacagtccagtggcgagaatggcgtcgtggtgttcagtttgggatcaatggtgagcaacatgactgaggaaagggcgaatgtcatcgccaccgcactggcaaaaattcctcagaaggtgctgtggcgattcgacggcaacaaaccggatgccctgggcctcaacacaagattgtacaaatggatacctcaaaacgatctgcttgggcatccaaaaacacgggcgtttatcacgcacgggggcgcaaacggaatttacgaagctatttaccatggcatcccaatggtgggaatcccgttatttttcgatcagccagataatattgcacacatgaaggccaaaggggccgctgtgagggtggatttcaatacaatgtcctcaacagacctgctaaacgccctgaaaactgtcatcaatgatccaagctacaaggagaatattatgaagctatcgcggatccagcacgatcagccagtcaagccacttgaccgggccgtgttctggatcgaattcgtgatgcgacacaagggagctaaacacctgcgggtcgctgcacataatctgacttggttccagtatcattctttggacgttattgggttcctgctggcttgtgtggctacagttttattcattatcaccaagtgctgccttttttgcttctggaaatttgctcggaaggggaagaaaggaaagcgcgactag

SEQ ID NO: 34552 - DNA, 1587 bp, Artificial Sequence
  derived and/or modified sequence
atggcccttaagtggactacagtgcttctgatacaactgagtttttatttttccagcggctcttgtgggaaagtcctggtatgggctgcagaatattccctgtggatgaatatgaaaacgatattgaaggaactggtccaaaggggccacgaggtgacagtgctggcctcctccgcctcaatcctgtttgaccctaacgactccagcactctgaaactcgaggtgtaccccacgtcactgacaaagacagaatttgaaaacatcataatgcagttagtgaagcggctatcagagatccagaaggatacattttggctccccttttctcaggagcaggagatcctctgggccattaacgatatcattcgcaatttctgcaaagacgtggtttccaataaaaaactaatgaagaagctccaagagtcccgttttgacattgttttcgcggacgcctacctgccctgtggcgagctcctggctgaactctttaacataccgttcgtgtattcacactcctttagcccaggctacagtttcgaacgacactcagggggtttcatcttcccccccagttacgttccagtcgttatgagcaagttgtctgaccagatgaccttcatggagagggttaaaaacatgctctacgtgctgtattttgacttctggttccaaattttcaatatgaaaaaatgggatcaattttactccgaggtactgggcaggcccacaacgctgagcgagaccatgagaaaagctgatatctggctgatgcgaaacagctggaattttaaatttccacaccccttcctgccaaacgtcgatttcgtcgggggccttcattgtaagcccgccaaacccctgcctaaggaaatggaggaatttgtgcagagtagcggcgagaacggagtcgtggttttcagtctcgggtccatggtaagcaatatgactgaggaaagggccaatgtgatcgccaccgccttagctaaaattccacagaaggtgttgtggaggttcgacggtaacaagccagatgcgctggggttgaatacgagactgtacaagtggatcccacagaatgatctactaggacatcccaagacccgggcttttatcacccacggaggggctaacggcatctacgaagcaatttaccacgggatccccatggtagggatcccactgtttttcgatcagcccgacaacatcgcccatatgaaagcgaagggcgctgctgtaagagtggacttcaacaccatgtcttccactgacttactgaatgccctgaagacagtgatcaatgacccgagctacaaggaaaacatcatgaagctgtccagaatccaacatgaccagcccgtcaagcctttggatagggcggtcttctggattgagttcgtcatgaggcataaaggagccaagcacctgagggtggccgcccacaacctcacctggttccagtatcatagcctggatgtcatcggctttctcctcgcatgcgtggcaacagtgctgtttatcattacaaagtgttgtctgttttgtttttggaaatttgccagaaaaggaaaaaagggaaagcgggattag

SEQ ID NO: 34553 - DNA, 1587 bp, Artificial Sequence
  derived and/or modified sequence
atggccctgaagtggaccaccgtgctgctgatccagctgtccttctacttcagcagcggcagctgtgggaaggtgctggtgtgggccgctgagtacagcctgtggatgaacatgaagaccatcctgaaggagctggtgcagaggggccacgaggtgacagtgctggccagcagcgccagcatcctgtttgaccccaatgacagcagcaccctgaagctggaggtgtaccccaccagcctgaccaagacagaatttgagaacatcatcatgcagctggtgaagaggctgtctgagatccagaaggacaccttctggctgcccttcagccaggagcaggagatcctgtgggccatcaatgacatcatccggaacttctgcaaggatgtggtgagcaacaagaagctgatgaagaagctgcaggagagcagatttgacatcgtgtttgctgatgcctacctgccctgtggggagctgctggccgagctgttcaacatcccctttgtgtacagccacagcttcagccctggctacagctttgagcggcacagcggcggcttcatcttccccccatcctatgtgcctgtggtgatgagcaagctgagtgaccagatgaccttcatggagcgggtgaagaacatgctgtatgtgctgtactttgacttctggttccagatcttcaacatgaagaagtgggaccagttctacagcgaggtgctgggccggcccaccaccctgtctgagaccatgaggaaggctgacatctggctgatgaggaacagctggaacttcaagttcccccaccccttcctgcccaacgtggactttgtgggcggcctgcactgcaagccagccaagcccctgcccaaggagatggaggagtttgtgcagagcagcggggagaatggagtggtggtgttcagcctgggctccatggtgagcaacatgacagaggagcgggccaacgtgattgccacagccctggccaagatcccccagaaggtgctgtggaggtttgatggcaacaagccagatgccctgggcctgaacacccggctgtacaagtggatcccccagaatgacctgctgggccaccccaagacccgggccttcatcacccatggaggagccaacggcatctatgaggccatctaccacggcatccccatggtgggcatccccctcttctttgaccagcctgacaacatcgcccacatgaaggccaagggagctgctgtgcgggtggacttcaacaccatgagcagcacagacctgctgaatgccctgaagacagtcatcaatgaccccagctacaaggagaacatcatgaagctgagccgcatccagcacgaccagcctgtgaagcccctggacagagctgtgttctggattgaatttgtgatgaggcacaagggggccaagcacctgcgggtggccgcccacaacctgacctggttccagtaccacagcctggatgtgattggcttcctgctggcctgtgtggccaccgtgctcttcatcatcaccaagtgctgcctcttctgcttctggaagtttgccaggaagggcaagaagggcaagagggactag

SEQ ID NO: 34554 - DNA, 1587 bp, Artificial Sequence
  derived and/or modified sequence
atggccctgaagtggaccaccgtgctgctgatccagctgagcttctacttcagcagcggaagctgcgggaaagtattagtatgggccgccgagtacagcctgtggatgaacatgaaaaccattctaaaggagttggttcagcggggacacgaggttacggtgctggcctccagcgcctctatactgttcgacccaaacgactccagcactctgaagctcgaggtgtatcccaccagtctcactaagaccgaattcgagaatatcatcatgcagctggttaaaaggctttccgagattcagaaggacaccttttggctgccattttctcaggaacaggagatcttatgggcgatcaacgatattatccgcaatttttgcaaggatgtcgtatctaacaaaaagttaatgaaaaagctgcaggaaagcagatttgacatcgtgtttgctgacgcatatctgccatgcggagaactgttggctgagttatttaacatcccattcgtttattcacacagtttctctccagggtatagtttcgaacggcactccggtgggttcatattccctccatcctatgtgccagtcgtgatgtccaagctctccgatcagatgactttcatggagcgcgtcaaaaatatgctgtatgttctgtacttcgacttttggttccagattttcaatatgaagaagtgggaccagttttattctgaggtacttggaagacccactacactgagtgaaacaatgagaaaagccgatatctggctgatgcgcaatagctggaacttcaaatttccgcatccatttctgccaaatgtggattttgtgggggggctgcactgtaaaccagcaaaaccgctgccaaaggagatggaagagtttgtgcagagctctggtgagaatggtgtggtcgtgttctctctcggtagcatggtgagtaacatgacggaagaaagagctaacgtcatcgccacagctctggctaaaatcccccagaaagtgttgtggcggttcgacggaaacaagcctgatgcactcggtttgaacaccagattatataagtggataccacagaacgatttgctaggacacccaaagactcgagccttcattacgcatgggggggccaacgggatctatgaggccatctatcacggcattcccatggttggcatcccactgttctttgaccaaccagacaacattgcccacatgaaagctaagggggctgccgtcagggtggattttaacacaatgtcttctaccgatctcctgaatgccctgaaaacagtgattaatgacccgtcatataaggaaaacattatgaaactgagccgaattcagcatgatcagcccgtgaagcccctggatagagccgtcttctggattgagttcgtgatgaggcataagggggccaagcatcttcgcgtagctgctcataacctgacctggttccagtatcattccctagacgttataggatttctgctggcctgtgtagcaacagtgctcttcatcattaccaagtgttgcctgttctgtttttggaaatttgctaggaaaggaaagaaggggaaacgagactag

SEQ ID NO: 34555 - DNA, 1587 bp, Artificial Sequence
  derived and/or modified sequence
atggccctgaagtggaccaccgtgctgctgatccagctgagcttctactttagcagtggttcttgcggcaaagttctcgtgtgggctgccgagtactctctgtggatgaacatgaagaccatactcaaagaactggtacagcgcggtcacgaagtaactgtgctcgctagctccgcctcaatcctgttcgaccccaacgattcttcaacactcaagctcgaggtttaccctacaagtctgacaaagaccgagttcgagaatataatcatgcaactggttaaaaggcttagcgagatccagaaggacacattttggctaccatttagccaagagcaggagatcttgtgggctatcaatgatatcattcggaatttttgtaaagatgttgttagtaacaagaagcttatgaagaagctgcaggaaagccgcttcgatattgtcttcgctgacgcatacctgccgtgcggcgaacttctcgctgaactctttaatattccgtttgtgtatagccactccttcagcccagggtatagcttcgagcgtcattccggtggattcatcttccctcccagctatgtaccagttgtcatgagcaaactgagcgaccagatgaccttcatggaaagagtcaagaatatgctgtacgtattatacttcgatttctggtttcaaatttttaacatgaagaagtgggaccagttctactcagaggtccttggaaggcccaccactcttagcgaaaccatgagaaaggccgacatctggcttatgcgtaattcctggaactttaaatttccccatccattcttaccgaatgtggactttgtcggagggcttcattgtaagcccgcgaagcctttacccaaggaaatggaggaatttgtgcagagcagtggagaaaacggggtggtcgttttcagtctcggctcaatggtgtcaaacatgacagaggaacgcgccaacgtgatagcaactgctctggctaaaatccctcaaaaagttctgtggcgttttgacggaaacaaaccggacgctttaggcttaaacacccgcctatacaaatggattccgcaaaacgatcttctgggtcaccccaaaactcgcgcctttatcacacacggaggggcaaatgggatttacgaagcgatctatcatggtattcctatggtgggcatccccctgttcttcgaccagcctgacaacattgcgcatatgaaagcaaagggcgcagccgtccgagtagattttaatacgatgtccagtacagacctgcttaacgctttaaaaacagtaattaatgacccaagctataaggagaatattatgaaactgtctaggatccagcacgatcagcctgtgaaaccgcttgatagagctgtcttctggattgagttcgttatgcggcataaaggtgccaagcacttaagggtggctgcacacaatctgacttggtttcagtaccactcgctggatgtgattggcttccttctggcttgcgtcgccacagttctctttatcattaccaaatgctgcctgttttgtttctggaaattcgcccggaagggcaaaaagggcaaaagggattag

SEQ ID NO: 34556 - DNA, 1587 bp, Artificial Sequence
  derived and/or modified sequence
atggcactcaaatggacgacagttctcctcattcaactgtctttttatttctctagtggcagctgtggtaaggttttggtatgggctgcggagtactccctgtggatgaacatgaagaccatcctgaaggagctggtgcagcgcggacacgaggttacagttctcgcgagctcagcatcaatcttatttgatcctaacgacagcagcacactgaaactggaagtctatcccacctctttaaccaaaaccgaatttgaaaacattataatgcagctcgtgaagcgtctgagtgagatccaaaaggacacgttctggcttcctttttcgcaggagcaggaaatcctatgggctatcaacgatattataagaaatttttgcaaggatgtcgttagtaataaaaaactaatgaagaagttacaggaaagccgcttcgatatcgtctttgccgacgcctatctgccttgcggagagctcctggcagagctatttaatattcctttcgtgtactctcattctttcagtcccggttattccttcgagaggcattcaggcggtttcattttcccaccaagctatgtgcccgttgtcatgtctaagctttccgaccaaatgacgtttatggaacgagtgaaaaacatgctctatgtgctgtattttgacttttggtttcagatatttaacatgaagaaatgggatcaattttattcggaagtactgggtagacctacaaccctcagcgaaacaatgcggaaagcggatatatggctcatgcgtaatagttggaacttcaaattcccccacccgtttctcccgaacgtcgactttgtgggtgggctgcactgcaagcccgctaaacctctcccaaaagagatggaggagttcgtccaatcatccggagaaaatggggtggtagtcttctcactgggatccatggtcagcaacatgaccgaggaacgcgcaaacgtaatcgcgaccgcattggccaaaatcccacagaaagtgctgtggcgctttgatggtaacaaacctgacgcattgggcctgaatacaagactgtacaaatggataccacagaacgacctccttgggcaccccaagaccagagctttcattacccacggtggcgctaatggcatctacgaggccatctatcatggtatccccatggtcggaataccccttttttttgaccagccagataacatcgctcacatgaaagctaagggagcggcagtgcgggtggattttaacacaatgagctcaaccgacctactgaacgctctgaaaactgttatcaacgatccttcctacaaagagaatatcatgaaattgtcccgcatccagcacgatcagcccgtgaagcctctcgaccgcgcagtgttctggattgagtttgtgatgcggcataagggtgccaagcacctgagggttgctgcccataacctgacatggtttcagtaccacagcctggacgtgatcggcttcttactggcctgtgttgctacggtcctctttatcatcacaaaatgctgtctgttctgcttctggaagttcgcccgaaagggaaaaaaagggaagcgcgactag

SEQ ID NO: 34557 - DNA, 1587 bp, Artificial Sequence
  derived and/or modified sequence
atggctctgaaatggacgactgtgctcttgatccaactgagtttctacttctcaagtggctcatgcggtaaggtgctggtgtgggccgctgagtactcactctggatgaacatgaaaacgatcttgaaagaattagtgcagaggggccatgaggtgacagtgctggccagcagcgcctccattctctttgaccctaacgattcctccacactgaaactggaagtgtacccaacgagcctgacaaaaaccgagttcgagaacattatcatgcagctggttaagcgactatcagaaattcagaaagacaccttttggttgccattctctcaagagcaggaaatcctgtgggccatcaacgatatcatccgcaacttttgcaaagacgtggtgagcaataagaagctgatgaagaagctgcaggaatctcgatttgatatcgtatttgcagatgcatacctgccatgtggcgaattgctggccgagttgtttaacatacccttcgtgtattctcactccttctcgcccggatacagctttgaacgccactcgggagggttcattttcccaccaagctacgttccagtagtgatgtctaaactcagcgatcaaatgacattcatggagcgagtgaagaacatgttatatgtgctgtacttcgatttttggttccagatcttcaatatgaaaaaatgggatcagttctattcagaggtgctcggcaggccaacaaccttgtccgaaacaatgcggaaggcagatatctggctcatgcggaacagttggaacttcaagttcccccacccttttctgcccaacgtcgatttcgtgggcggacttcactgtaaaccagcaaagccactgcccaaggaaatggaagaattcgttcagagcagtggcgagaatggggttgtcgtgttttctctcggaagtatggtgtccaatatgaccgaggaacgcgctaatgtaatcgccaccgccctggctaagattccacaaaaggtgctctggcggtttgatggaaacaaacccgatgcactcggcctgaacacaaggctgtataagtggattccgcagaacgatctgctcggtcatcctaaaactcgggcattcattacccatggaggcgcaaatgggatttacgaggctatttatcacggcatccccatggtaggaattccactgttcttcgatcaacccgataatatcgcgcatatgaaagcaaagggggctgccgtccgcgtcgacttcaatactatgagttctactgacctcctcaatgcccttaagacagtcatcaacgatcctagctataaggagaatattatgaagcttagcagaatccagcatgatcaaccagtgaagccgcttgatcgggctgtgttttggatcgaatttgtgatgcgccacaagggtgcaaaacaccttcgagtcgccgcacataatctgacttggtttcagtatcacagcctggacgtgattggatttctgctggcatgtgtggccaccgtcttgttcattatcaccaaatgctgcctcttctgcttttggaagttcgctagaaaaggcaaaaagggtaaacgtgactag

SEQ ID NO: 34558 - DNA, 1931 bp, Artificial Sequence
  derived and/or modified sequence
ggaaaagaattatcacattgcacaaggatggctctgaaatggactacagttctgctgatacaactcagtttttactttagctctgggagttgtggaaaggtgctggtatgggccgcagaatacagcctttggatgaatatgaagacaatcctgaaagaacttgttcagagaggtcatgaggtgactgtactggcatcttcagcttccattctttttgatcccaacgactcatccactcttaaacttgaagtttatcctacatctttaactaaaactgaatttgagaatatcatcatgcaattggttaagagattgtcagaaattcaaaaagatacattttggttacctttttcacaagaacaagaaatcctgtgggcaattaatgacataattagaaacttctgtaaagatgtagtttcaaataagaaacttatgaaaaaactacaagagtcaagatttgacatcgtttttgcagatgcttatttaccctgtggtgagctgctggctgagctatttaacataccctttgtgtacagtcacagcttcagtcctggctactcatttgaaaggcacagtggaggatttattttccctccttcctacgtacctgttgttatgtcaaaattaagtgatcaaatgactttcatggagagggtaaaaaatatgctctatgtgctttattttgacttttggttccaaatatttaatatgaagaagtgggatcagttttacagtgaagttttaggaagacccactacattatctgagacaatgaggaaagctgacatatggcttatgcgaaactcctggaattttaaatttcctcatccattcttaccaaatgttgattttgttggaggactccactgcaaacctgccaaacccctacctaaggaaatggaggagtttgtacagagctctggagaaaatggtgttgtggtgttttctctggggtcaatggtcagtaacatgacagaagaaagggccaacgtaattgcaacagcccttgccaagatcccacaaaaggttctttggagatttgatgggaataaaccagatgccttaggtctcaatactcgactgtacaagtggataccccagaatgaccttctaggtcatccaaaaaccagagcttttataactcatggtggagccaatggcatctatgaggcaatctaccatgggatccctatggtgggcattccattgttttttgatcaacctgataatattgctcacatgaaggccaagggagcagctgttagagtggacttcaacacaatgtcgagtacagacctgctgaatgcactgaagacagtaattaatgatccttcatataaagagaatattatgaaattatcaagaattcaacatgatcaaccagtgaagcccctggatcgagcagtcttctggattgaatttgtcatgcgccacaaaggagccaaacatcttcgagttgcagcccacaacctcacctggttccagtaccactctttggatgtgattgggttcctgctggcttgtgtggcaaccgtgctatttatcatcacaaagtgttgtctgttttgtttctggaagtttgctagaaaaggaaagaagggaaaaagggattagttatatctgagatttgaagctggaaaacctgatagataggaatacttcagttgattccagcaataaatattgtgatgcaagatttctttcttcctgtgacaaaaaaaaatcctttcgaagtctaccttgtcaagtaaaaatttgtttttcagagatttaccacccagttaatggttagaaatattctgtggcaatgaagaaaacactaggggaaataaaaaataatataaagccatatgagcttgtattgaaatttgttgcacttatattgaaatgtgatcatggctcacttcagcctcaacttactaagctcaaga

SEQ ID NO: 34559 - DNA, 2756 bp, Artificial Sequence
  derived and/or modified sequence
aaaagaattatcacattgcacaaggatggctctgaaatggactacagttctgctgatacaactcagtttttactttagctctgggagttgtggaaaggtgctggtatgggccgcagaatacagcctttggatgaatatgaagacaatcctgaaagaacttgttcagagaggtcatgaggtgactgtactggcatcttcagcttccattctttttgatcccaacgactcatccactcttaaacttgaagtttatcctacatctttaactaaaactgaatttgagaatatcatcatgcaattggttaagagattgtcagaaattcaaaaagatacattttggttacctttttcacaagaacaagaaatcctgtgggcaattaatgacataattagaaacttctgtaaagatgtagtttcaaataagaaacttatgaaaaaactacaagagtcaagatttgacatcgtttttgcagatgcttatttaccctgtggtgagctgctggctgagctatttaacataccctttgtgtacagtcacagcttcagtcctggctactcatttgaaaggcacagtggaggatttattttccctccttcctacgtacctgttgttatgtcaaaattaagtgatcaaatgactttcatggagagggtaaaaaatatgctctatgtgctttattttgacttttggttccaaatatttaatatgaagaagtgggatcagttttacagtgaagttttaggaagacccactacattatctgagacaatgaggaaagctgacatatggcttatgcgaaactcctggaattttaaatttcctcatccattcttaccaaatgttgattttgttggaggactccactgcaaacctgccaaacccctacctaaggaaatggaggagtttgtacagagctctggagaaaatggtgttgtggtgttttctctggggtcaatggtcagtaacatgacagaagaaagggccaacgtaattgcaacagcccttgccaagatcccacaaaaggttctttggagatttgatgggaataaaccagatgccttaggtctcaatactcgactgtacaagtggataccccagaatgaccttctaggtcatccaaaaaccagagcttttataactcatggtggagccaatggcatctatgaggcaatctaccatgggatccctatggtgggcattccattgttttttgatcaacctgataatattgctcacatgaaggccaagggagcagctgttagagtggacttcaacacaatgtcgagtacagacctgctgaatgcactgaagacagtaattaatgatccttcatataaagagaatattatgaaattatcaagaattcaacatgatcaaccagtgaagcccctggatcgagcagtcttctggattgaatttgtcatgcgccacaaaggagccaaacatcttcgagttgcagcccacaacctcacctggttccagtaccactctttggatgtgattgggttcctgctggcttgtgtggcaaccgtgctatttatcatcacaaagtgttgtctgttttgtttctggaagtttgctagaaaaggaaagaagggaaaaagggattagttatatctgagatttgaagctggaaaacctgatagataggaatacttcagttgattccagcaataaatattgtgatgcaagatttctttcttcctgtgacaaaaaaaaatcctttcgaagtctaccttgtcaagtaaaaatttgtttttcagagatttaccacccagttaatggttagaaatattctgtggcaatgaagaaaacactaggggaaataaaaaataatataaagccatatgagcttgtattgaaatttgttgcacttatattgaaatgtgatcatggctcacttcagcctcaacttactaagctcaagaggttctctcacctcagccccccaagtagctgggaccataggtgcatgtcaccatgtccaactaattttttattttttgtagtgatgagatctcattgtgttctccatgctgatttcaaactcctgggctcaaacaatcctcccattttagcatcccaaagggatgagattacaggtatgtaccaccataactttacaaaatgagatttttatataagaatgattcaaatgttcagggatgaaagagtcactaacataaaagaagaatgggatgaggtgagaaggatgaatacaaaaataattagatattcttgaaatcagaaatgtgctccctaattatatgaaatgttgtttgattacataaaataaagtggaaatgaatgattgactgaacagcccacaagaagaatcacttaatgctctgaaaattaccagtaaactgattaaaatctaaaattgctttctgttaaagctttactgattagtttttcttccaaagctctcttgtttctagttgttttcttggtcttaactacccattatatgctttgttaaagtgtttatgccctgattcaatgtgattatctcaatttttatttcattctgtcctaactcttgcaacctgcatgtcctctttattattgatcaatccaactgcaaagttcaccttacctgactaaggattattcattaagttttacttgtttatctgacatttattattttgtctctttgctagtcactctgagccatggtcatgatgacttaggattctggatctcttatgaataacaaatttatccttaataaagtctctatactaaagaa

SEQ ID NO: 34560 - protein, 530 aa, Artificial Sequence
  derived and/or modified sequence
MSLKWTSVFLLIQLSCYFSSGSCGKVLVWPTEYSHWINMKTILEELVQRGHEVTVLTSSASTLVNASKSSAIKLEVYPTSLTKNDLEDSLLKILDRWIYGVSKNTFWSYFSQLQELCWEYYDYSNKLCKDAVLNKKLMMKLQESKFDVILADALNPCGELLAELFNIPFLYSLRFSVGYTFEKNGGGFLFPPSYVPVVMSELSDQMIFMERIKNMIHMLYFDFWFQIYDLKKWDQFYSEVLGRPTTLFETMGKAEMWLIRTYWDFEFPRPFLPNVDFVGGLHCKPAKPLPKEMEEFVQSSGENGIVVFSLGSMISNMSEESANMIASALAQIPQKVLWRFDGKKPNTLGSNTRLYKWLPQNDLLGHPKTKAFITHGGTNGIYEAIYHGIPMVGIPLFADQHDNIAHMKAKGAALSVDIRTMSSRDLLNALKSVINDPVYKENVMKLSRIHHDQPMKPLDRAVFWIEFVMRHKGAKHLRVAAHNLTWIQYHSLDVIAFLLACVATVIFIITKFCLFCFRKLAKKGKKKKRD

SEQ ID NO: 34561 - protein, 530 aa, Artificial Sequence
  derived and/or modified sequence
MSLKWTSVFLLIQLSCYFSSGSCGKVLVWPTEYSHWINMKTILEELVQRGHEVTVLTSSASTLVNASKSSAIKLEVYPTSLTKNYLEDSLLKILDRWIYGVSKNTFWSYFSQLQELCWEYYDYSNKLCKDAVLNKKLMMKLQESKFDVILADALNPCGELLAELFNIPFLYSLRFSVGYTFEKNGGGFLFPPSYVPVVMSELSDQMIFMERIKNMIHMLYFDFWFQIYDLKKWDQFYSEVLGRPTTLFETMGKAEMWLIRTYWDFEFPRPFLPNVDFVGGLHCKPAKPLPKEMEEFVQSSGENGIVVFSLGSMISNMSEESANMIASALAQIPQKVLWRFDGKKPNTLGSNTRLYKWLPQNDLLGHPKTKAFITHGGTNGIYEAIYHGIPMVGIPLFADQHDNIAHMKAKGAALSVDIRTMSSRDLLNALKSVINDPVYKENVMKLSRIHHDQPMKPLDRAVFWIEFVMRHKGAKHLRVAAHNLTWIQYHSLDVIAFLLACVATVIFIITKFCLFCFRKLAKKGKKKKRD

SEQ ID NO: 34562 - DNA, 1593 bp, Artificial Sequence
  derived and/or modified sequence
atgagcctgaagtggaccagcgtgttcctgctgatccagctgagctgctacttcagcagcggcagctgcggcaaggtgctggtgtggcccaccgagtacagccactggatcaacatgaagaccatcctggaggagctggtgcagagaggccacgaggtgaccgtgctgaccagcagcgccagcaccctggtgaacgccagcaagagcagcgccatcaagctggaggtgtaccccaccagcctgaccaagaacgacctggaggacagcctgctgaagatcctggacagatggatctacggcgtgagcaagaacaccttctggagctacttcagccagctgcaggagctgtgctgggagtactacgactacagcaacaagctgtgcaaggacgccgtgctgaacaagaagctgatgatgaagctgcaggagagcaagttcgacgtgatcctggccgacgccctgaacccctgcggcgagctgctggccgagctgttcaacatccccttcctgtacagcctgagattcagcgtgggctacaccttcgagaagaacggcggcggcttcctgttcccccccagctacgtgcccgtggtgatgagcgagctgagcgaccagatgatcttcatggagagaatcaagaacatgatccacatgctgtacttcgacttctggttccagatctacgacctgaagaagtgggaccagttctacagcgaggtgctgggcagacccaccaccctgttcgagaccatgggcaaggccgagatgtggctgatcagaacctactgggacttcgagttccccagacccttcctgcccaacgtggacttcgtgggcggcctgcactgcaagcccgccaagcccctgcccaaggagatggaggagttcgtgcagagcagcggcgagaacggcatcgtggtgttcagcctgggcagcatgatcagcaacatgagcgaggagagcgccaacatgatcgccagcgccctggcccagatcccccagaaggtgctgtggagattcgacggcaagaagcccaacaccctgggcagcaacaccagactgtacaagtggctgccccagaacgacctgctgggccaccccaagaccaaggccttcatcacccacggcggcaccaacggcatctacgaggccatctaccacggcatccccatggtgggcatccccctgttcgccgaccagcacgacaacatcgcccacatgaaggccaagggcgccgccctgagcgtggacatcagaaccatgagcagcagagacctgctgaacgccctgaagagcgtgatcaacgaccccgtgtacaaggagaacgtgatgaagctgagcagaatccaccacgaccagcccatgaagcccctggacagagccgtgttctggatcgagttcgtgatgagacacaagggcgccaagcacctgagagtggccgcccacaacctgacctggatccagtaccacagcctggacgtgatcgccttcctgctggcctgcgtggccaccgtgatcttcatcatcaccaagttctgcctgttctgcttcagaaagctggccaagaagggcaagaagaagaagagagactag

SEQ ID NO: 34563 - DNA, 1593 bp, Artificial Sequence
  derived and/or modified sequence
atgagtcttaagtggaccagcgtgtttctgttaatccaactgtcttgttacttctcctcaggcagttgtggcaaggtcctggtttggcctaccgagtactcacactggattaacatgaagaccatcctggaagagttggttcaaagaggtcacgaggtcaccgtgctgacgtcctccgcatccacgctggtgaacgcaagcaaatcaagtgctattaagcttgaggtctaccccacgtccctcaccaagaacgatctggaagactccctcctgaaaatccttgaccgatggatttacggggtctcaaagaataccttttggtcatacttttcccagctgcaggaactctgctgggagtactacgattatagcaataaactgtgtaaggacgccgtgctgaacaaaaagctcatgatgaaactacaggaatctaagtttgacgttattctggcagacgctctcaatccttgtggggagctgttggctgagttgttcaatatccccttcctatattcactgaggttctcagttggctatacgttcgagaaaaatggagggggatttctcttcccacctagttatgtccccgtggtgatgtcagaactgagcgatcaaatgatattcatggaacggattaagaacatgattcacatgctgtatttcgatttttggttccagatttacgatctcaagaaatgggaccaattttacagcgaggtgctaggtcgccccacgactctgtttgaaactatgggaaaggcagagatgtggctgatcaggacatactgggacttcgagtttccccgcccttttctgccgaatgttgactttgtgggaggtctgcattgtaagcctgctaaaccccttcccaaagagatggaggaattcgtacagtcctccggcgaaaatggaatcgtggtcttctcacttggaagtatgatctccaatatgtcggaggagagcgctaacatgatcgccagtgcactggcacagattccacagaaagtgttgtggcgctttgacgggaagaagcccaataccctaggctctaacacaagattgtacaaatggttgccccaaaatgatctgttggggcaccccaagactaaggcctttatcacacatggcgggacaaatgggatctatgaggccatctaccatggaattccaatggtcgggattccgctttttgccgaccagcatgacaacattgcacacatgaaggccaagggcgcggcactaagcgttgacattaggacaatgagtagccgcgatctgctgaacgcgctgaaatccgtcattaacgaccccgtttacaaagaaaatgtgatgaaactcagccgcatacatcatgatcaaccaatgaaaccattagaccgtgccgtgttctggattgaatttgtgatgagacacaaaggagccaaacatttaagggtagccgcccacaacctcacctggatccagtaccacagtttagatgtaatagcgtttcttttagcatgtgtcgctactgtcatttttatcatcaccaagttttgcttgttctgtttccggaaacttgccaaaaagggcaagaaaaaaaagcgcgactag

SEQ ID NO: 34564 - DNA, 1593 bp, Artificial Sequence
  derived and/or modified sequence
atgagcctgaagtggacctctgtgttcctgctgatccagctgagctgctacttcagcagcggcagctgtgggaaggtgctggtgtggcccacagagtacagccactggatcaacatgaagaccatcctggaggagctggtgcagaggggccacgaggtgacagtgctgaccagcagcgccagcaccctggtgaatgccagcaagagcagcgccatcaagctggaggtgtaccccaccagcctgaccaagaatgacctggaggacagcctgctgaagatcctggaccgctggatctatggagtgtccaagaacaccttctggagctacttcagccagctgcaggagctgtgctgggagtactatgactacagcaacaagctgtgcaaggatgctgtgctgaacaagaagctgatgatgaagctgcaggagagcaagtttgatgtgatcctggctgatgccctgaacccctgtggggagctgctggccgagctgttcaacatccccttcctgtacagcctgcgcttctctgtgggctacacctttgagaagaatggaggcggcttcctgtttcctccttcctatgtgcctgtggtgatgtctgagctgagtgaccagatgatcttcatggagcgcatcaagaacatgatccacatgctgtactttgacttctggttccagatctatgacctgaagaagtgggaccagttctacagcgaggtgctgggccggcccaccaccctgtttgagaccatgggcaaggccgagatgtggctgatccgcacctactgggactttgagttcccccggcccttcctgcccaacgtggactttgtgggcggcctgcactgcaagccagccaagcccctgcccaaggagatggaggagtttgtgcagagcagcggggagaatggaattgtggtgttcagcctgggctccatgatcagcaacatgtctgaggagagcgccaacatgattgccagcgccctggcccagatcccccagaaggtgctgtggaggtttgatggcaagaagcccaacaccctgggcagcaacacccggctgtacaagtggctgccccagaatgacctgctgggccaccccaagaccaaggccttcatcacccatggaggcaccaacggcatctatgaggccatctaccacggcatccccatggtgggcatccccctgtttgctgaccagcacgacaacatcgcccacatgaaggccaagggggccgccctgtctgtggacatccgcaccatgagcagccgggacctgctgaatgccctgaagagcgtcatcaatgaccctgtgtacaaggaaaatgtgatgaagctgagccgcatccaccacgaccagcccatgaagcccctggacagagctgtgttctggattgaatttgtgatgaggcacaagggggccaagcacctgcgggtggccgcccacaacctgacctggatccagtaccacagcctggatgtgattgccttcctgctggcctgtgtggccaccgtcatcttcatcatcaccaagttctgcctcttctgcttcaggaagctggccaagaagggcaagaagaagaagagggactag

SEQ ID NO: 34565 - DNA, 1593 bp, Artificial Sequence
  derived and/or modified sequence
atgagcctgaagtggaccagcgtgttcctgctgatccagctgagctgttatttttctagtggtagctgcgggaaggttttggtgtggccaacggagtatagtcactggatcaatatgaaaaccatactggaagaactggtgcagcgaggccacgaggtaaccgtgctcactagctctgcttctaccctcgtgaacgccagtaaatcctctgccattaaactagaggtgtaccctacctccctcacaaaaaacgaccttgaggacagtctgctgaagatcctagatcggtggatctacggcgtgagcaaaaatactttctggagctacttttcccagctccaggaactctgttgggagtactacgattatagcaacaagttgtgcaaagacgcagtgcttaataaaaaactcatgatgaagctgcaagaatctaagttcgacgtgatactcgccgacgccttgaacccttgtggcgagcttctggctgagctgtttaacattcccttcctctactccttgcggtttagtgtaggttataccttcgagaaaaacggcggcggcttccttttccccccctcttacgtgcccgttgtgatgtcggaattgagtgaccaaatgatattcatggagagaatcaagaatatgattcatatgctgtattttgacttttggtttcaaatttacgacctcaagaaatgggaccagttctactcggaggttttaggcagacccacaactttatttgagaccatgggaaaggctgagatgtggctaatcaggacctactgggactttgagttcccgcgcccctttctgccaaacgttgatttcgtagggggcctgcactgcaagcccgccaagcccctgcccaaggagatggaagaatttgtgcagtcttccggagagaatggcatcgttgtttttagtcttgggagtatgattagtaatatgtctgaggaatccgccaacatgatcgcctcagctttagcacagatcccacagaaggtcctgtggaggtttgacggaaagaagccaaacacattgggatccaacacccgattatacaaatggctgccccagaatgacctgttaggccaccccaagactaaagcctttattacacacgggggcacaaacgggatttacgaggcaatttaccacggtatccctatggtggggatcccgctttttgcggatcagcacgacaacatagcacatatgaaagccaaaggtgctgcattatctgttgacattagaaccatgtcctcaagagatcttctaaatgccctcaaaagcgttattaatgatcctgtatataaagagaacgtcatgaagctaagtcggatccaccatgaccagccaatgaaacccctcgatcgggctgtattttggatcgaattcgtgatgaggcacaaaggagcaaagcacctgcgcgttgccgcccacaatctgacctggattcaatatcactcgctcgacgtgattgcgtttctgctggcatgcgtggccaccgtcatctttatcataaccaaattttgtctcttctgtttccggaaactagccaagaaaggaaagaagaagaagagggactag

SEQ ID NO: 34566 - DNA, 1593 bp, Artificial Sequence
  derived and/or modified sequence
atgtcgctgaagtggacctcagtgtttctcctcattcaactgagctgctacttcagctctgggtcatgcgggaaggtcttagtatggcctaccgaatactctcactggattaatatgaaaacaatcttggaggaactcgtgcagagaggccatgaggtcaccgtcctcacctcaagcgcatcaaccttagtgaatgcctctaagagtagtgccataaagctggaagtgtatcccacctctctcacaaagaacgacctcgaggatagcctgctgaagattctggatcgctggatctacggcgtatctaagaatacgttttggtcctacttttcacagctgcaagagctgtgttgggaatattacgattattcaaataagctgtgcaaagacgccgttttgaacaagaagttaatgatgaagctgcaggagtccaagtttgacgtaatattggccgatgcgcttaatccatgtggtgaacttcttgctgaactctttaatattccatttctgtactcactaagatttagcgtcggctatacatttgaaaagaacggcggaggctttctgtttcctccttcatacgttcccgtagtgatgtccgaattaagcgaccagatgattttcatggagcgcattaagaatatgatccacatgctctatttcgacttttggtttcagatctacgacctcaaaaagtgggaccagttctactccgaggtgcttggacgccctaccacactcttcgagacaatggggaaggcagaaatgtggttgattaggacctactgggactttgaatttcctagaccctttctccctaatgtggactttgtagggggattgcactgcaaacccgctaagcctcttcctaaggagatggaagagtttgtgcaaagcagtggagagaacggcatcgtagtgtttagtttagggtccatgatctcaaacatgtcggaggagtccgcaaacatgatcgcctccgcccttgcccagatcccacagaaagttctttggaggttcgacggaaagaaacccaacacgttaggtagcaacacccggttatataagtggctgccccagaacgacctgcttggccacccaaagacgaaggcattcatcacacacggtgggaccaacggaatttatgaggctatttatcacggcatacctatggtcggcataccacttttcgcggaccagcatgacaatatcgcccatatgaaagcaaaaggagctgccctgagcgtagatatccggacaatgagttcccgggacctgctcaacgcgctgaagagtgtaatcaatgatcccgtctacaaagagaatgtcatgaagttatccaggattcaccacgaccagcccatgaaacctttggacagggcggtcttctggatcgaatttgttatgcgtcacaagggagccaaacacctgagggtggccgctcacaacctcacctggattcagtatcattccttagatgtgattgccttcctgctggcctgtgtagctactgtgatatttattattaccaagttctgtcttttctgcttcaggaagcttgcgaagaaggggaaaaaaaagaaaagggactag

SEQ ID NO: 34567 - DNA, 2139 bp, Artificial Sequence
  derived and/or modified sequence
aaacaacaactggaaaagaagcattgcataagaccaggatgtctctgaaatggacgtcagtctttctgctgatacagctcagttgttactttagctctggaagctgtggaaaggtgctagtgtggcccacagaatacagccattggataaatatgaagacaatcctggaagagcttgttcagaggggtcatgaggtgactgtgttgacatcttcggcttctactcttgtcaatgccagtaaatcatctgctattaaattagaagtttatcctacatctttaactaaaaatgatttggaagattctcttctgaaaattctcgatagatggatatatggtgtttcaaaaaatacattttggtcatatttttcacaattacaagaattgtgttgggaatattatgactacagtaacaagctctgtaaagatgcagttttgaataagaaacttatgatgaaactacaagagtcaaagtttgatgtcattctggcagatgcccttaatccctgtggtgagctactggctgaactatttaacataccctttctgtacagtcttcgattctctgttggctacacatttgagaagaatggtggaggatttctgttccctccttcctatgtacctgttgttatgtcagaattaagtgatcaaatgattttcatggagaggataaaaaatatgatacatatgctttattttgacttttggtttcaaatttatgatctgaagaagtgggaccagttttatagtgaagttctaggaagacccactacattatttgagacaatggggaaagctgaaatgtggctcattcgaacctattgggattttgaatttcctcgcccattcttaccaaatgttgattttgttggaggacttcactgtaaaccagccaaacccctgcctaaggaaatggaagagtttgtgcagagctctggagaaaatggtattgtggtgttttctctggggtcgatgatcagtaacatgtcagaagaaagtgccaacatgattgcatcagcccttgcccagatcccacaaaaggttctatggagatttgatggcaagaagccaaatactttaggttccaatactcgactgtacaagtggttaccccagaatgaccttcttggtcatcccaaaaccaaagcttttataactcatggtggaaccaatggcatctatgaggcgatctaccatgggatccctatggtgggcattcccttgtttgcggatcaacatgataacattgctcacatgaaagccaagggagcagccctcagtgtggacatcaggaccatgtcaagtagagatttgctcaatgcattgaagtcagtcattaatgaccctgtctataaagagaatgtcatgaaattatcaagaattcatcatgaccaaccaatgaagcccctggatcgagcagtcttctggattgagtttgtcatgcgccacaaaggagccaagcaccttcgagtcgcagctcacaacctcacctggatccagtaccactctttggatgtgatagcattcctgctggcctgcgtggcaactgtgatatttatcatcacaaaattttgcctgttttgtttccgaaagcttgccaaaaaaggaaagaagaagaaaagagattagttatatcaaaagcctgaagtggaatgactgaaagatgggactcctcctttatttcagcatggagggttttaaatggaggatttcctttttcctgtgacaaaacatcttttcacaacttaccttgttaagacaaaatttattttccagggatttaatacgtactttagctggaattattctatgtcaatgatttttaagctatgaaaaatacaatggggggaaggatagcatttggagatatacctaatgttaaatgacgagttactggatgcagcacgccaacatggcacatgtatacatatgtagctaacctgcacgttgtgcacatgtaccctaaaacttaaagtataatttaaaaaaagcaaaaaaaaaaaaatacaactcttttttttaaaccaggaaggaaaatgtgaacatggaaacaacttctagtattggatctgaaaataaagtgtcatccaagccataaaaaaaaaagaaaagaaaaataaaaataatataaaacctt

SEQ ID NO: 34568 - DNA, 1593 bp, Artificial Sequence
  derived and/or modified sequence
atgagcctgaagtggaccagcgtgttcctgctgatccagctgagctgctacttcagcagcggcagctgcggcaaggtgctggtgtggcccaccgagtacagccactggatcaacatgaagaccatcctggaggagctggtgcagagaggccacgaggtgaccgtgctgaccagcagcgccagcaccctggtgaacgccagcaagagcagcgccatcaagctggaggtgtaccccaccagcctgaccaagaactacctggaggacagcctgctgaagatcctggacagatggatctacggcgtgagcaagaacaccttctggagctacttcagccagctgcaggagctgtgctgggagtactacgactacagcaacaagctgtgcaaggacgccgtgctgaacaagaagctgatgatgaagctgcaggagagcaagttcgacgtgatcctggccgacgccctgaacccctgcggcgagctgctggccgagctgttcaacatccccttcctgtacagcctgagattcagcgtgggctacaccttcgagaagaacggcggcggcttcctgttcccccccagctacgtgcccgtggtgatgagcgagctgagcgaccagatgatcttcatggagagaatcaagaacatgatccacatgctgtacttcgacttctggttccagatctacgacctgaagaagtgggaccagttctacagcgaggtgctgggcagacccaccaccctgttcgagaccatgggcaaggccgagatgtggctgatcagaacctactgggacttcgagttccccagacccttcctgcccaacgtggacttcgtgggcggcctgcactgcaagcccgccaagcccctgcccaaggagatggaggagttcgtgcagagcagcggcgagaacggcatcgtggtgttcagcctgggcagcatgatcagcaacatgagcgaggagagcgccaacatgatcgccagcgccctggcccagatcccccagaaggtgctgtggagattcgacggcaagaagcccaacaccctgggcagcaacaccagactgtacaagtggctgccccagaacgacctgctgggccaccccaagaccaaggccttcatcacccacggcggcaccaacggcatctacgaggccatctaccacggcatccccatggtgggcatccccctgttcgccgaccagcacgacaacatcgcccacatgaaggccaagggcgccgccctgagcgtggacatcagaaccatgagcagcagagacctgctgaacgccctgaagagcgtgatcaacgaccccgtgtacaaggagaacgtgatgaagctgagcagaatccaccacgaccagcccatgaagcccctggacagagccgtgttctggatcgagttcgtgatgagacacaagggcgccaagcacctgagagtggccgcccacaacctgacctggatccagtaccacagcctggacgtgatcgccttcctgctggcctgcgtggccaccgtgatcttcatcatcaccaagttctgcctgttctgcttcagaaagctggccaagaagggcaagaagaagaagagagactag

SEQ ID NO: 34569 - DNA, 1593 bp, Artificial Sequence
  derived and/or modified sequence
atgtcactgaagtggaccagtgtgtttctgcttatccagctttcctgctatttctcgtctggatcttgtggcaaagtgttggtgtggccaaccgagtactcgcactggatcaatatgaaaaccattttggaggagctggttcagcgtgggcatgaagtcacagttttaacaagctccgcctcaactttggtgaatgcctctaaatcatccgccatcaaactcgaagtgtatcctacctccctcacaaagaattacctggaggattcactgctcaagatcctcgatcggtggatctacggtgttagtaaaaataccttttggagttacttctctcagctgcaggagctgtgctgggagtattatgattacagcaacaaactgtgtaaggatgcagtgctcaacaaaaagctgatgatgaagctgcaagagtcgaagtttgacgtgatactggcagacgcccttaatccttgtggggaactgttggccgagctgtttaacatcccctttctgtattcgctccgcttttcagtgggctacacgtttgagaaaaatggtggaggattcctgttccctccgtcttacgtgcccgttgttatgagcgaactgtccgatcaaatgattttcatggagaggattaaaaatatgatacatatgctctactttgatttttggttccagatctatgacctcaaaaaatgggatcaattctatagtgaggtgctgggccgcccaacgaccctattcgagacaatgggaaaggcagaaatgtggctgatcagaacctattgggatttcgagtttccaagacctttcctccccaatgtcgactttgtcggcggcttgcattgcaagccggcaaagcccttgcctaaagagatggaagaattcgtgcagtcgtcaggggagaatggaatcgtggtattttctctgggctcgatgatttcgaacatgtccgaggagtctgcaaatatgatagcctcagcactcgcccaaataccccagaaggtgttatggcgattcgatggcaaaaagccgaacaccctcggctccaatactagactctacaaatggctgccacaaaatgacttactgggccatcccaagacaaaggccttcatcacccacggaggcaccaacggaatctatgaagccatctatcatggcattcccatggtggggatccctctctttgccgaccagcacgacaatatcgcccacatgaaagcaaaaggggctgcactcagcgtggacatccgaacaatgtcatcacgggatcttctgaacgcactgaagagtgttattaatgacccagtttataaagagaacgtgatgaaactgtcccgtatccaccatgatcagcctatgaagccacttgatagggctgtgttctggatagagtttgttatgcgccacaagggggcgaagcacttgagagtggccgcacacaacctgacctggatccagtatcactcactggatgtcatagcctttctgctcgcttgtgtggcgacagtgattttcataattactaagttctgccttttctgcttccgaaaactcgccaaaaagggcaaaaagaagaagcgagactag

SEQ ID NO: 34570 - DNA, 1593 bp, Artificial Sequence
  derived and/or modified sequence
atgagcctgaagtggacctctgtgttcctgctgatccagctgagctgctacttcagcagcggcagctgtgggaaggtgctggtgtggcccacagagtacagccactggatcaacatgaagaccatcctggaggagctggtgcagaggggccacgaggtgacagtgctgaccagcagcgccagcaccctggtgaatgccagcaagagcagcgccatcaagctggaggtgtaccccaccagcctgaccaagaactacctggaggacagcctgctgaagatcctggaccgctggatctatggagtgtccaagaacaccttctggagctacttcagccagctgcaggagctgtgctgggagtactatgactacagcaacaagctgtgcaaggatgctgtgctgaacaagaagctgatgatgaagctgcaggagagcaagtttgatgtgatcctggctgatgccctgaacccctgtggggagctgctggccgagctgttcaacatccccttcctgtacagcctgcgcttctctgtgggctacacctttgagaagaatggaggcggcttcctgtttcctccttcctatgtgcctgtggtgatgtctgagctgagtgaccagatgatcttcatggagcgcatcaagaacatgatccacatgctgtactttgacttctggttccagatctatgacctgaagaagtgggaccagttctacagcgaggtgctgggccggcccaccaccctgtttgagaccatgggcaaggccgagatgtggctgatccgcacctactgggactttgagttcccccggcccttcctgcccaacgtggactttgtgggcggcctgcactgcaagccagccaagcccctgcccaaggagatggaggagtttgtgcagagcagcggggagaatggaattgtggtgttcagcctgggctccatgatcagcaacatgtctgaggagagcgccaacatgattgccagcgccctggcccagatcccccagaaggtgctgtggaggtttgatggcaagaagcccaacaccctgggcagcaacacccggctgtacaagtggctgccccagaatgacctgctgggccaccccaagaccaaggccttcatcacccatggaggcaccaacggcatctatgaggccatctaccacggcatccccatggtgggcatccccctgtttgctgaccagcacgacaacatcgcccacatgaaggccaagggggccgccctgtctgtggacatccgcaccatgagcagccgggacctgctgaatgccctgaagagcgtcatcaatgaccctgtgtacaaggaaaatgtgatgaagctgagccgcatccaccacgaccagcccatgaagcccctggacagagctgtgttctggattgaatttgtgatgaggcacaagggggccaagcacctgcgggtggccgcccacaacctgacctggatccagtaccacagcctggatgtgattgccttcctgctggcctgtgtggccaccgtcatcttcatcatcaccaagttctgcctcttctgcttcaggaagctggccaagaagggcaagaagaagaagagggactag

SEQ ID NO: 34571 - DNA, 1593 bp, Artificial Sequence
  derived and/or modified sequence
atgagcctgaagtggaccagcgtgttcctgctgatccagctgagctgttacttctcctctggatcctgcggaaaggtactggtgtggcctaccgaatacagccattggattaatatgaaaaccattttagaagaactggtccagagagggcacgaggtgaccgttttgacctcttctgccagcacactggttaatgcctccaagagctcggctatcaagcttgaggtgtaccccacctcactcaccaagaattacttggaagattctttgctgaagatattagacagatggatctacggcgttagcaagaatacattttggagctatttcagtcagctacaggaactttgctgggagtattatgactactctaataagttgtgtaaggatgccgtgctgaataagaaactaatgatgaagctgcaggagagtaaattcgatgtgattctcgccgatgccctaaacccttgtggcgaactcctggcagaactgtttaacatcccttttttatacagtttaagattcagcgtcgggtacactttcgagaaaaacgggggaggcttcttgtttcccccgtcttacgtaccagtggtgatgagcgagttgagtgaccagatgatttttatggaaaggatcaaaaatatgatacacatgctctatttcgatttttggttccaaatttacgacctcaaaaagtgggaccagttctactccgaagtcctcggtagacctaccacactgttcgagaccatgggaaaagccgaaatgtggctgataaggacatactgggactttgagtttccccgcccgttcttgcccaatgtcgacttcgtggggggactgcactgtaagccggccaaacccctgcccaaagagatggaggagttcgttcagagcagtggggaaaatggtatcgtggtattcagcttaggttccatgattagcaacatgagcgaggagagcgcaaacatgatcgcctcagctcttgcccaaatcccgcagaaagttttgtggagatttgacggcaagaagcccaacaccttgggtagtaacacgagactctacaagtggttgcctcagaatgacctgctgggccaccctaaaactaaggctttcatcactcacggtggtacgaacggtatatacgaggcaatttaccacggaatcccaatggtgggcatccctttgttcgccgatcaacatgacaacattgcacacatgaaagcaaagggggccgctctctctgtcgacataaggaccatgtcatcccgggacctgcttaatgctctgaagtcagtgattaatgacccagtgtacaaggaaaacgttatgaaattgtcaaggatacaccacgatcagccaatgaagccactggatcgggctgtattctggatcgagtttgttatgaggcacaaaggggcaaagcatctcagggtggcagctcacaacctaacatggatccagtaccattctctcgacgtcatagcctttctactggcttgtgttgccaccgtgatatttattatcactaagttttgcctgttttgttttaggaaactggcgaagaaggggaagaaaaagaaaagagattag

SEQ ID NO: 34572 - DNA, 1593 bp, Artificial Sequence
  derived and/or modified sequence
atgtccctaaaatggacatcagtatttttactgattcagctatcttgctacttcagctcgggttcctgcggcaaggtgttggtttggccaaccgagtactcccattggattaatatgaaaactatactcgaagagctcgtgcagagaggtcacgaagtgaccgtattgacttcatccgcttcgacgctggtcaacgcttctaagagttctgcaatcaaattggaggtgtatcccacctctctcactaagaactacttggaagactcgctcctcaaaatattggacagatggatttacggagtgagcaagaacacattctggagctacttctcacagttgcaggagctgtgttgggaatactacgattactccaacaagctgtgtaaagacgccgtgctgaacaaaaaactaatgatgaaactgcaggagtctaagttcgacgtaatcttggcggatgcactcaatccatgtggggagttacttgcggagctgttcaatatcccttttctgtacagcctgcggttttcagtaggttacacgttcgaaaaaaatggcggaggcttcctattccctcccagttatgtgcccgtcgtcatgtctgagctatcggaccagatgattttcatggaaaggatcaaaaatatgattcatatgctgtatttcgatttctggtttcagatctacgaccttaagaagtgggaccagttctactcagaggtgctggggaggcccacaactctgttcgagactatgggcaaggcagagatgtggttaatccggacttactgggattttgagtttcctcggcctttcctgccgaatgtagactttgtagggggattacattgtaagcctgccaagcccctcccaaaagaaatggaggaatttgtccagtcatcaggcgagaatgggatcgtggtttttagccttggctctatgatcagcaacatgtccgaggagagcgcaaatatgatagcctctgccctggctcaaattcctcagaaagtgctgtggaggtttgatgggaaaaaacccaacactctggggagcaacacgcgactctacaaatggctccctcagaatgatttactcgggcatcctaaaactaaagcatttatcacacacggtggtacaaatggtatctacgaagcaatctaccacggcatccctatggtgggcattcctttgtttgcggatcagcacgacaacatcgcccacatgaaggccaagggagccgcactgtcagtggacatcagaaccatgtcaagccgggatcttttaaacgccctgaagtcagtgatcaacgaccccgtatacaaggagaacgtcatgaaattgtcgcgcatccaccacgatcagcccatgaagccactcgaccgagcagtgttctggatcgaattcgtgatgcgacataagggtgctaaacatctgagggttgccgcacataatctaacatggatccagtaccattccttggacgtgatcgcgttcctcctggcttgtgtagcaaccgtgatattcataattacaaagttctgcctgttttgcttccggaagctggcgaaaaagggtaaaaaaaaaaagcgagactag

SEQ ID NO: 34573 - DNA, 2077 bp, Artificial Sequence
  derived and/or modified sequence
taagaccaggatgtctctgaaatggacgtcagtctttctgctgatacagctcagttgttactttagctctggaagctgtggaaaggtgctagtgtggcccacagaatacagccattggataaatatgaagacaatcctggaagagcttgttcagaggggtcatgaggtgactgtgttgacatcttcggcttctactcttgtcaatgccagtaaatcatctgctattaaattagaagtttatcctacatctttaactaaaaattatttggaagattctcttctgaaaattctcgatagatggatatatggtgtttcaaaaaatacattttggtcatatttttcacaattacaagaattgtgttgggaatattatgactacagtaacaagctctgtaaagatgcagttttgaataagaaacttatgatgaaactacaagagtcaaagtttgatgtcattctggcagatgcccttaatccctgtggtgagctactggctgaactatttaacataccctttctgtacagtcttcgattctctgttggctacacatttgagaagaatggtggaggatttctgttccctccttcctatgtacctgttgttatgtcagaattaagtgatcaaatgattttcatggagaggataaaaaatatgatacatatgctttattttgacttttggtttcaaatttatgatctgaagaagtgggaccagttttatagtgaagttctaggaagacccactacattatttgagacaatggggaaagctgaaatgtggctcattcgaacctattgggattttgaatttcctcgcccattcttaccaaatgttgattttgttggaggacttcactgtaaaccagccaaacccctgcctaaggaaatggaagagtttgtgcagagctctggagaaaatggtattgtggtgttttctctggggtcgatgatcagtaacatgtcagaagaaagtgccaacatgattgcatcagcccttgcccagatcccacaaaaggttctatggagatttgatggcaagaagccaaatactttaggttccaatactcgactgtacaagtggttaccccagaatgaccttcttggtcatcccaaaaccaaagcttttataactcatggtggaaccaatggcatctatgaggcgatctaccatgggatccctatggtgggcattcccttgtttgcggatcaacatgataacattgctcacatgaaagccaagggagcagccctcagtgtggacatcaggaccatgtcaagtagagatttgctcaatgcattgaagtcagtcattaatgaccctgtctataaagagaatgtcatgaaattatcaagaattcatcatgaccaaccaatgaagcccctggatcgagcagtcttctggattgagtttgtcatgcgccacaaaggagccaagcaccttcgagtcgcagctcacaacctcacctggatccagtaccactctttggatgtgatagcattcctgctggcctgcgtggcaactgtgatatttatcatcacaaaattttgcctgttttgtttccgaaagcttgccaaaaaaggaaagaagaagaaaagagattagttatatcaaaagcctgaagtggaatgactgaaagatgggactcctcctttatttcagcatggagggttttaaatggaggatttcctttttcctgtgacaaaacatcttttcacaacttaccttgttaagacaaaatttattttccagggatttaatacgtactttagctgaattattctatgtcaatgatttttaagctatgaaaaatacaatggggggaaggatagcatttggagatatacctaatgttaaatgacgagttactggatgcagcacgccaacatggcacatgtatacatatgtagctaacctgcacgttgtgcacatgtaccctaaaacttaaagtataatttaaaaaaagcaaaaaaaaaaaatacaactcttttttttaaaccaggaaggaaaatgtgaacatggaaacaacttctagtattggatctgaaaataaagtgtcatccaagccataaaaaaaaa

SEQ ID NO: 34574 - protein, 385 aa, Artificial Sequence
  derived and/or modified sequence
MAARPLSRMLRRLLRSSARSCSSGAPVTQPCPGESARAASEEVSRRRQFLREHAAPFSAFLTDSFGRQHSYLRISLTEKCNLRCQYCMPEEGVPLTPKANLLTTEEILTLARLFVKEGIDKIRLTGGEPLIRPDVVDIVAQLQRLEGLRTIGVTTNGINLARLLPQLQKAGLSAINISLDTLVPAKFEFIVRRKGFHKVMEGIHKAIELGYNPVKVNCVVMRGLNEDELLDFAALTEGLPLDVRFIEYMPFDGNKWNFKKMVSYKEMLDTVRQQWPELEKVPEEESSTAKAFKIPGFQGQISFITSMSEHFCGTCNRLRITADGNLKVCLFGNSEVSLRDHLRAGASEQELLRIIGAAVGRKKRQHAGMFSISQMKNRPMILIGG

SEQ ID NO: 34575 - DNA, 1158 bp, Artificial Sequence
  derived and/or modified sequence
atggcggcccgccccctctcccgaatgctgcggagacttctccgcagttcagcccgctcttgttccagcggcgcgcctgtgacacagccatgtcctggcgagagcgccagagccgcgagtgaagaagtatctcggcggcgacagtttctgcgcgaacatgctgcacccttttcagcattcctaacagactcgttcggaagacagcattcttacttgaggatatccttaacagaaaagtgcaacctgcggtgtcagtattgtatgcccgaagagggcgtaccactgacacctaaggcaaacttgctgactaccgaagagatcctcacactggctagactctttgtgaaggaggggatcgacaagatccgcctgacgggaggggaacctctgattaggcctgatgtggtggatattgttgcccagctgcaaagactcgaaggtctaaggacgatcggcgtaaccacaaatggcattaacctggctcgtttgcttccccagctccaaaaggctggcttgtccgccatcaacatttccctagatacgctggtacccgcaaaattcgagttcatcgtgcgaaggaaaggcttccataaggtcatggaggggatccataaagccatagaactcggctacaatcccgtgaaagttaattgcgtagttatgcgtgggttgaacgaagacgagctgctagattttgccgctctgaccgagggcctgccgctggacgtgcggttcattgagtacatgccctttgatggcaataagtggaacttcaagaaaatggtcagttacaaggagatgctggacacagtaaggcaacagtggccagaactcgagaaggtgcccgaggaagagagcagcactgccaaagctttcaagattccaggctttcagggtcagatttccttcatcacttccatgagcgagcatttctgcggcacctgcaataggctccgcattacagccgatggtaatctgaaagtgtgtctctttggaaacagcgaggtgagcctccgggatcatttacgcgcaggagcatcagaacaagaattgttgagaatcatcggcgcagccgtgggtcgcaaaaagaggcagcacgcagggatgttctcaattagccagatgaagaataggcccatgatattgatcggtggatag

SEQ ID NO: 34576 - DNA, 1158 bp, Artificial Sequence
  derived and/or modified sequence
atggccgcccggcccctgagcaggatgctgcggcggctgctgcggagcagcgcccggagctgcagcagcggggcccctgtgacccagccctgccctggagagagcgcccgggccgccagcgaggaggtgtccagaagacggcagttcctgcgggagcacgccgcccccttcagcgccttcctgacagacagctttggccggcagcacagctacctgcgcatcagcctgacagagaagtgcaacctgcgctgccagtactgcatgcctgaggagggcgtgcccctgacccccaaggccaacctgctgaccacagaggagatcctgaccctggcccggctgtttgtgaaggagggcatcgacaagatccggctgactggaggagagcccctcatccggccagatgtggtggacatcgtggcccagctgcagaggctggagggcctgcggaccatcggcgtgaccaccaacggcatcaacctggcccggctgctgccccagctgcagaaggccggcctgagcgccatcaacatcagcctggacaccctggtgcctgccaagtttgagttcatcgtgcggaggaagggcttccacaaggtgatggagggcatccacaaggccatcgagctgggctacaaccctgtgaaggtgaactgtgtggtgatgaggggcctgaatgaagatgagctgctggactttgctgccctgacagagggcctgcccctggatgtgcgcttcatcgagtacatgccctttgatggcaacaagtggaacttcaagaagatggtgtcctacaaggagatgctggacacagtgcggcagcagtggccagagctggagaaggtgcctgaggaggagagcagcacagccaaggccttcaagatccctggcttccagggccagatctccttcatcacctccatgtctgagcacttctgtggcacctgcaaccggctgcgcatcacagcagatggcaacctgaaggtgtgcctgtttggaaacagcgaggtgtccctgcgggaccacctgcgggccggggccagcgagcaggagctgctgcgcatcattggagctgctgtgggcaggaagaagaggcagcacgccggcatgttcagcatcagccagatgaagaaccggcccatgatcctgattggaggatag

SEQ ID NO: 34577 - DNA, 1158 bp, Artificial Sequence
  derived and/or modified sequence
atggccgcccggcccctgagccggatgctgcggcggctgctgcggtctagtgccaggtcctgtagctccggcgcccctgtcacccagccgtgcccgggcgagtctgccagggccgctagtgaggaggtgtcacgacgccgacaatttctgagggagcacgcagcccctttttcagcattcttaacagatagctttgggagacagcacagttatctgagaatttcactgaccgagaaatgcaatttacgttgtcaatactgcatgcctgaagagggagtcccgctgacccccaaagctaatctcctgaccaccgaagagatcctaactctggccaggctcttcgtcaaagagggaatcgataagatcaggctgaccgggggggaacccctaatcagacctgacgttgtcgatattgttgctcagctgcagcgcctcgagggactgcggaccattggagttacaaccaacggaattaacctcgcccgtctactcccacagctgcagaaggctggcctatccgcaatcaacatttcccttgatacccttgtgcccgccaaattcgaattcatcgtccgcagaaagggttttcataaagtgatggagggcatacacaaagccatcgagctgggttacaacccagtgaaagtcaactgtgtggttatgaggggtttaaatgaggatgagctgctggacttcgccgcgctgactgaagggttacctttggacgtcaggttcattgagtacatgccgttcgacgggaacaaatggaatttcaagaagatggtctcgtacaaggaaatgttagacactgtgcgtcagcagtggccagagctcgagaaagtgcccgaggaggagagctccactgccaaagccttcaagattcctggtttccagggacagatcagctttatcacgtctatgtcagaacatttctgcggcacctgtaatcgcctgcggatcacggcagacggcaacctcaaagtctgtctcttcggcaattccgaggtgagcctgcgagaccatctaagagctggtgcaagtgaacaggagttgctgcgcatcatcggtgctgccgtgggtcgtaagaaaaggcagcacgcaggcatgttctccatctcgcaaatgaaaaacaggccaatgatcctgatcggcggctag

SEQ ID NO: 34578 - DNA, 1158 bp, Artificial Sequence
  derived and/or modified sequence
atggcagcacgccctctctccagaatgctccggagactcctgaggagcagtgcccgatcctgctcttcaggggcaccagttactcagccttgtccgggagagtccgccagggccgcaagcgaagaagtcagccgtaggcgacagttccttagggaacatgcagcacccttttcagctttcctcaccgacagcttcggcaggcaacacagttacctgcgcatctccttgaccgagaagtgtaatttacggtgccagtactgcatgccggaggagggcgtgccacttacacccaaagcaaatttgcttactaccgaagagatcctgaccctcgccaggctgtttgtgaaggaaggaatagacaagattagactcaccggaggggagccgctaataaggcctgatgtcgtcgatatcgtggcccagctgcaaagactcgaaggcctgcgaactattggagttaccactaatggcatcaatctggcccgactgttgccccaactgcaaaaggccggattgagcgccatcaacatcagcttagacacactggttccggctaaatttgaattcatcgttcgacggaaaggatttcataaagttatggaaggcatacacaaagcgatcgaactggggtataacccagtaaaagtgaactgtgtggtgatgagaggcttaaacgaggatgaattacttgactttgccgctctcaccgaggggttacccctggacgtacgctttatcgagtacatgccgtttgatgggaacaagtggaattttaagaagatggttagctataaggagatgttagacacagttcgccaacagtggccagagcttgagaaggtgccggaagaggaaagtagcaccgcaaaagcctttaaaattcctggattccaggggcagatctcattcattacctcgatgtccgagcacttctgcggcacctgtaaccgtctcaggataactgctgacggcaatctgaaagtctgtctgttcggaaattcggaggtctctctaagagatcacctcagagcgggagcgtcagagcaggaactgctccgtataataggcgcagctgtggggcgtaagaagcggcagcatgccggtatgttctctattagccagatgaaaaataggcctatgatactgataggaggctag

SEQ ID NO: 34579 - DNA, 1158 bp, Artificial Sequence
  derived and/or modified sequence
atggccgccagacccctgagcagaatgctgagaagactgctgagaagcagcgccagaagctgcagcagcggcgcccccgtgacccagccctgccccggcgagagcgccagagccgccagcgaggaggtgagcagaagaagacagttcctgagagagcacgccgcccccttcagcgccttcctgaccgacagcttcggcagacagcacagctacctgagaatcagcctgaccgagaagtgcaacctgagatgccagtactgcatgcccgaggagggcgtgcccctgacccccaaggccaacctgctgaccaccgaggagatcctgaccctggccagactgttcgtgaaggagggcatcgacaagatcagactgaccggcggcgagcccctgatcagacccgacgtggtggacatcgtggcccagctgcagagactggagggcctgagaaccatcggcgtgaccaccaacggcatcaacctggccagactgctgccccagctgcagaaggccggcctgagcgccatcaacatcagcctggacaccctggtgcccgccaagttcgagttcatcgtgagaagaaagggcttccacaaggtgatggagggcatccacaaggccatcgagctgggctacaaccccgtgaaggtgaactgcgtggtgatgagaggcctgaacgaggacgagctgctggacttcgccgccctgaccgagggcctgcccctggacgtgagattcatcgagtacatgcccttcgacggcaacaagtggaacttcaagaagatggtgagctacaaggagatgctggacaccgtgagacagcagtggcccgagctggagaaggtgcccgaggaggagagcagcaccgccaaggccttcaagatccccggcttccagggccagatcagcttcatcaccagcatgagcgagcacttctgcggcacctgcaacagactgagaatcaccgccgacggcaacctgaaggtgtgcctgttcggcaacagcgaggtgagcctgagagaccacctgagagccggcgccagcgagcaggagctgctgagaatcatcggcgccgccgtgggcagaaagaagagacagcacgccggcatgttcagcatcagccagatgaagaacagacccatgatcctgatcggcggctag

SEQ ID NO: 34580 - protein, 714 aa, Artificial Sequence
  derived and/or modified sequence
MGLPEERVRSGSGSRGQEEAGAGGRARSWSPPPEVSRSAHVPSLQRYRELHRRSVEEPREFWGDIAKEFYWKTPCPGPFLRYNFDVTKGKIFIEWMKGATTNICYNVLDRNVHEKKLGDKVAFYWEGNEPGETTQITYHQLLVQVCQFSNVLRKQGIQKGDRVAIYMPMIPELVVAMLACARIGALHSIVFAGFSSESLCERILDSSCSLLITTDAFYRGEKLVNLKELADEALQKCQEKGFPVRCCIVVKHLGRAELGMGDSTSQSPPIKRSCPDVQGKLKEKSKRVQPQISWNQGIDLWWHELMQEAGDECEPEWCDAEDPLFILYTSGSTGKPKGVVHTVGGYMLYVATTFKYVFDFHAEDVFWCTADIGWITGHSYVTYGPLANGATSVLFEGIPTYPDVNRLWSIVDKYKVTKFYTAPTAIRLLMKFGDEPVTKHSRASLQVLGTVGEPINPEAWLWYHRVVGAQRCPIVDTFWQTETGGHMLTPLPGATPMKPGSATFPFFGVAPAILNESGEELEGEAEGYLVFKQPWPGIMRTVYGNHERFETTYFKKFPGYYVTGDGCQRDQDGYYWITGRIDDMLNVSGHLLSTAEVESALVEHEAVAEAAVVGHPHPVKGECLYCFVTLCDGHTFSPKLTEELKKQIREKIGPIATPDYIQNAPGLPKTRSGKIMRRVLRKIAQNDHDLGDMSTVADPSVISHLFSHRCLTIQ

SEQ ID NO: 34581 - DNA, 2145 bp, Artificial Sequence
  derived and/or modified sequence
atgggcttgcccgaggaaagagtacgcagtgggagtggaagtagaggacaggaagaggcgggcgctggtgggcgagcacgtagctggtcacccccaccagaagtgagtaggtccgctcacgtgccctctctgcagcggtatagagagttacacagaagaagcgtggaggaacccagggaattttggggggacattgcaaaagaattttattggaagaccccatgtcctggcccctttctgaggtataacttcgacgtgacaaaggggaagatcttcattgagtggatgaaaggagcaacaacaaatatatgctacaatgttctggatagaaatgttcacgagaaaaaactcggagacaaggtggccttttactgggagggcaatgaacctggcgagacgacacaaataacttaccaccaactgttagtccaggtatgccagttttcaaacgtgctcaggaagcaaggtattcagaaaggcgacagagtcgctatctacatgcccatgattcccgagttggttgttgctatgctggcatgcgcgcggatcggtgccctgcactccattgtgttcgctgggttctcaagtgagagtctgtgcgaacgcatcctggactccagctgtagtctgctgatcaccaccgatgccttctacaggggcgagaaactcgtgaacctcaaagagttagcagacgaagcactccagaagtgtcaagagaagggcttcccagtgaggtgctgcattgtcgttaagcacctcggccgcgccgagctgggaatgggtgatagtacaagccagtcaccccctatcaaacggtcctgccccgacgtacagggcaagctcaaggaaaaaagtaagcgggtgcagccccagatctcatggaatcagggtatagacctgtggtggcacgaacttatgcaggaagcaggagatgagtgcgaacctgagtggtgtgatgctgaggaccctctgtttattctgtatacttccggttcaactggaaagccgaagggcgtagtacataccgttggaggatacatgctgtacgtcgccacgacctttaagtacgtgttcgacttccacgcagaggacgtgttttggtgcacagccgacattggctggattactggtcacagctacgtgacttacggcccactcgccaacggcgcaactagcgttcttttcgaggggatccccacataccctgatgtgaaccgattgtggagtatagtagacaaatacaaggttacaaagttctacaccgccccaactgctattcgactcttaatgaaattcggagatgaacccgtgactaaacacagtagagccagcctccaggtgctggggaccgtgggggaacctatcaaccccgaggcgtggctctggtatcaccgggtcgttggcgcacagcggtgccccattgtggatactttctggcagacagagacaggcggccacatgctgacccccttaccaggagcgactcctatgaagcctgggtctgcgaccttcccctttttcggtgtcgcccctgcaattctgaatgaaagcggtgaagaactggagggggaagcagaaggatacttggtcttcaaacagccatggcctgggataatgcgcacagtttacggaaaccacgaacggtttgaaaccacctacttcaaaaagttcccgggctactatgtgacaggcgacgggtgccagagggaccaggacgggtactattggataactggccggattgatgacatgcttaatgtcagtggccacttgctttcgaccgctgaggtcgagagcgctctggttgagcacgaagccgtcgccgaagcagctgtggtgggccacccacaccccgtcaaaggcgagtgtctgtactgctttgtcaccctctgcgacggccacaccttctctcccaaattgacagaggagctcaagaagcagatccgcgagaagattggccctattgctacccctgattatatccaaaatgcaccgggactgccgaaaacccgaagcgggaagatcatgaggcgagtcctgcgcaagatagctcaaaacgaccacgacctaggggacatgagcaccgtcgctgatcctagcgtgatctcgcacctgttttcccatcggtgcctgaccattcagtag

SEQ ID NO: 34582 - DNA, 2145 bp, Artificial Sequence
  derived and/or modified sequence
atgggcctgcctgaggagcgggtgcgcagcggcagcggcagccggggccaggaggaggccggggccggcggccgggcccgctcctggagccccccacctgaggtgagccgcagcgcccacgtgcccagcctgcagcgctaccgggagctgcaccggcgctctgtggaggagccccgggagttctggggagacatcgccaaggagttctactggaagaccccctgccccggccccttcctgcgctacaactttgatgtgaccaagggcaagatcttcatcgagtggatgaagggggccaccaccaacatctgctacaacgtgctggacagaaatgtgcatgagaagaagctgggggacaaggtggccttctactgggagggcaatgagcccggggagaccacccagatcacctaccaccagctgctggtgcaggtgtgccagttcagcaatgtgctgaggaagcagggcatccagaagggggacagagtggccatctacatgcccatgatccctgagctggtggtggccatgctggcctgtgccagaattggagccctgcacagcatcgtgtttgctggcttcagcagcgagagcctgtgtgagcgcatcctggacagcagctgcagcctgctgatcaccacagatgccttctacagaggagagaagctggtgaacctgaaggagctggctgatgaggccctgcagaagtgccaggagaagggcttccctgtgcgctgctgcatcgtggtgaagcacctgggccgggcagagctgggcatgggagacagcaccagccagagcccccccatcaagaggagctgcccagatgtgcagggcaagctgaaggagaagagcaagagggtgcagccccagatctcctggaaccagggcatcgacctgtggtggcatgagctgatgcaggaggccggagatgaatgtgagcctgagtggtgtgatgctgaggaccccctcttcatcctgtacaccagcggcagcacaggcaagcccaagggcgtggtgcacacagtgggcggctacatgctgtatgtggccaccaccttcaagtatgtgtttgacttccacgcagaagatgtgttctggtgcacagctgacatcggctggatcaccggccacagctatgtgacctacggccccctggccaacggggccacctctgtgctgtttgagggcatccccacctacccagatgtgaaccggctgtggagcatcgtggacaagtacaaggtgaccaagttctacacagcccccacagccatccggctgctgatgaagtttggagatgagcctgtgaccaagcacagccgggccagcctgcaggtgctgggcaccgtgggggagcccatcaaccctgaggcctggctgtggtaccaccgggtggtgggcgcccagcgctgccccatcgtggacaccttctggcagacagaaacaggaggccacatgctgacccccctgcccggggccacccccatgaagccaggcagcgccaccttccccttctttggagtggccccagccatcctgaatgaaagtggagaggagctggagggggaggccgagggctacctggtgttcaagcagccctggccaggcatcatgaggacagtgtatggcaaccacgagagatttgagaccacctacttcaagaagtttcctggctactacgtgactggagatggctgccagagggaccaggacggctactactggatcaccggcagaattgatgacatgctgaatgtgtctggccacctgctgagcacagctgaggtggagagcgccctggtggagcacgaggccgtggccgaggccgctgtggtgggccacccccaccctgtgaagggggagtgcctgtactgctttgtgaccctgtgtgatggccacaccttcagccccaagctgacagaggagctgaagaagcagatccgggagaagattggccccatcgccaccccagactacatccagaatgcccctggcctgcccaagaccaggtctgggaagatcatgagaagagtgctgaggaagatcgcccagaatgaccatgacctgggggacatgagcacagtggccgaccccagcgtcatcagccacctgttcagccaccgctgcctgaccatccagtag

SEQ ID NO: 34583 - DNA, 2145 bp, Artificial Sequence
  derived and/or modified sequence
atgggcctgcccgaggagcgggtgcggagcggcagcggcagccggggccaggaggaggccggagccggagggcgggccagatcttggagcccacctccagaagtgtcccgaagcgcacatgtgccctcactccagcggtacagggagctgcaccgtcgatctgtggaggagccccgagaattctggggtgatatcgcaaaagaattttactggaaaaccccctgccccggaccatttctgcgttacaactttgatgtgacaaagggtaagatattcatcgaatggatgaaaggagctacaacgaacatttgctataacgtgctggaccgtaacgtgcacgagaagaaactgggagacaaggttgccttctactgggagggaaacgaacccggggaaaccacccagattacttatcatcagttgctcgtacaggtgtgtcaattctcgaacgtgttgcggaagcagggaatccagaagggagaccgtgtagccatctacatgccaatgattcctgagttggtggttgcaatgttggcttgtgcgcgaattggggccctgcactccatcgtcttcgccgggttctcctccgaatcgctgtgtgagaggatcctcgactccagctgctctcttcttatcactaccgacgccttctatcggggcgagaaactcgtgaatctcaaagagctcgctgacgaggccctccaaaagtgccaggagaagggctttcctgtcagatgctgcatcgtggttaaacacctcgggagagccgaactgggcatgggcgattccacgagccagtcccctccgattaaaagaagctgccctgacgttcaaggtaagctgaaagagaagtctaaaagggtgcagccgcagatatcttggaaccagggtatagacctatggtggcatgaattgatgcaggaggctggcgacgaatgcgagcccgagtggtgcgacgcggaagatcccctttttatactttacacttccggatcaacaggcaaaccgaaaggagtggtccacactgtgggcgggtatatgctgtacgtggctaccaccttcaagtatgtttttgactttcacgctgaagacgtgttctggtgcaccgcagatatcggctggatcaccgggcactcctatgtcacatacggccccttggctaatggggctactagcgtcctgtttgagggaatccctacgtacccagatgtaaatcgcctgtggtcaattgtggacaagtacaaggttaccaagttctacacggcccctaccgccataaggctgctgatgaagtttggggacgagccggtgaccaaacattctagggccagcctgcaggtcctgggaaccgtcggcgagccgattaatcccgaggcctggttatggtaccacagagtggtgggtgctcagcgctgtcctattgtggacacattctggcagaccgagactgggggacacatgctgactcccctccccggcgcgacgcccatgaagcccggctccgccacattcccctttttcggtgtggcccctgcaatcctcaacgaaagtggtgaggagttagaaggcgaggcggaaggctatctggtgtttaaacagccctggccaggaatcatgcggacagtctatggcaaccatgagcggttcgaaaccacatattttaagaagtttcctggttactacgttactggagatggctgtcagcgggatcaggatggatactactggatcaccggcaggatcgacgatatgctgaacgtaagcggccacctgctgtcaaccgccgaagtcgagtctgccctggtggagcacgaggcagtagctgaggcagccgttgtagggcaccctcatcctgtgaaaggcgaatgcctctattgttttgtgacactatgtgatggccatacgtttagccctaaactcaccgaagaactcaagaagcagattcgcgaaaagattgggcccatcgctacgcctgactacattcagaatgccccgggcctgccaaagacccgctccggcaagattatgcgtcgagtgctccggaaaatcgcccagaacgatcacgatctcggcgatatgtctacagttgctgacccatctgtgatctctcacctcttttcgcaccgctgccttactatacagtag

SEQ ID NO: 34584 - DNA, 2145 bp, Artificial Sequence
  derived and/or modified sequence
atgggactgccagaggaacgggtgcggagcggatctgggagtaggggccaggaagaagcaggcgctggcggacgggctcggagctggagtccccctccagaggtttcacgtagcgctcacgtccctagcctgcaacgttaccgggagttacacaggaggagtgttgaagagccacgagagttctggggcgacattgcaaaggaattctactggaaaactccctgcccaggtccctttttgagatataactttgatgtgactaagggcaagattttcattgagtggatgaaaggggcaaccaccaacatttgctataatgtgctcgatagaaacgtccatgaaaaaaagctcggcgacaaagtggcgttctactgggagggcaatgagccaggcgaaaccacccagattacttatcaccaactcctggttcaggtgtgccagtttagcaacgtcctcagaaagcaaggaattcagaagggagatagagttgccatttatatgcccatgatcccggagctggtggtggcaatgctggcctgtgcacgcatcggggcactgcattctatagtctttgccggatttagtagcgagtcgctctgcgagcgcatcctggacagtagttgcagccttcttataacaactgatgctttttaccggggagagaagctggtgaaccttaaagagctcgctgacgaggccctgcagaaatgtcaggaaaaaggcttccccgtgcgatgttgtatcgtcgtcaagcacctaggcagggcagagctggggatgggcgattcaacaagccagtctccacctatcaaacggtcatgccctgacgtgcagggcaaactgaaggaaaagtcaaaacgcgtgcagccgcaaatttcctggaaccaaggcattgacctgtggtggcatgagctgatgcaagaagctggagacgagtgcgagcctgaatggtgtgatgcggaggaccccttattcattttgtacaccagcggctccacaggcaagcctaagggcgttgtacacacagtcggagggtacatgctctacgttgcgaccacatttaagtacgtatttgattttcatgcggaagacgtgttctggtgcaccgctgacattggatggatcactggacatagctacgtgacctacggtccactcgccaatggggcaaccagtgtgttgttcgagggaatccctacgtatcccgacgtgaatagactgtggagcattgttgataagtacaaagtgactaaattctacactgccccaactgcgataagacttctgatgaagtttggggacgagcctgtgaccaagcactccagggcttccctccaagtgttgggaaccgttggcgaaccgattaacccggaggcctggctgtggtaccaccgagtagtgggcgctcagaggtgtccaattgtggacactttctggcagacagagacaggcggacacatgttgacccctttgcctggtgctactccaatgaagcccggttcggccacttttccattcttcggcgtagccccagccatcctgaatgaatccggggaagaacttgagggggaggcagagggttacttagttttcaaacagccctggcccggaataatgaggacagtgtacggaaaccacgagagattcgagacaacttacttcaagaagttccctggatactatgtgacgggagatggatgtcagcgcgaccaggacggctactactggattacaggccgaatcgacgacatgttgaatgtcagtggccaccttctatccacagccgaggtggagtctgcgctagttgaacacgaagcagttgccgaggctgcagtggtaggccatcctcacccagttaaaggcgagtgcttgtactgttttgtgaccttgtgtgacggccacacatttagtcctaagctgacagaggaactcaagaagcagattagggagaaaataggacctatcgctacccccgattatatccagaatgcccctggcttgccgaagacccgcagcgggaagatcatgagacgggtgctgaggaagatcgcccagaacgaccatgacctcggggatatgtctacggtggccgatccctccgttatctcgcaccttttctcccatcgctgcctgactatccagtag

SEQ ID NO: 34585 - DNA, 2145 bp, Artificial Sequence
  derived and/or modified sequence
atgggcctgcccgaggagagagtgagaagcggcagcggcagcagaggccaggaggaggccggcgccggcggcagagccagaagctggagccccccccccgaggtgagcagaagcgcccacgtgcccagcctgcagagatacagagagctgcacagaagaagcgtggaggagcccagagagttctggggcgacatcgccaaggagttctactggaagaccccctgccccggccccttcctgagatacaacttcgacgtgaccaagggcaagatcttcatcgagtggatgaagggcgccaccaccaacatctgctacaacgtgctggacagaaacgtgcacgagaagaagctgggcgacaaggtggccttctactgggagggcaacgagcccggcgagaccacccagatcacctaccaccagctgctggtgcaggtgtgccagttcagcaacgtgctgagaaagcagggcatccagaagggcgacagagtggccatctacatgcccatgatccccgagctggtggtggccatgctggcctgcgccagaatcggcgccctgcacagcatcgtgttcgccggcttcagcagcgagagcctgtgcgagagaatcctggacagcagctgcagcctgctgatcaccaccgacgccttctacagaggcgagaagctggtgaacctgaaggagctggccgacgaggccctgcagaagtgccaggagaagggcttccccgtgagatgctgcatcgtggtgaagcacctgggcagagccgagctgggcatgggcgacagcaccagccagagcccccccatcaagagaagctgccccgacgtgcagggcaagctgaaggagaagagcaagagagtgcagccccagatcagctggaaccagggcatcgacctgtggtggcacgagctgatgcaggaggccggcgacgagtgcgagcccgagtggtgcgacgccgaggaccccctgttcatcctgtacaccagcggcagcaccggcaagcccaagggcgtggtgcacaccgtgggcggctacatgctgtacgtggccaccaccttcaagtacgtgttcgacttccacgccgaggacgtgttctggtgcaccgccgacatcggctggatcaccggccacagctacgtgacctacggccccctggccaacggcgccaccagcgtgctgttcgagggcatccccacctaccccgacgtgaacagactgtggagcatcgtggacaagtacaaggtgaccaagttctacaccgcccccaccgccatcagactgctgatgaagttcggcgacgagcccgtgaccaagcacagcagagccagcctgcaggtgctgggcaccgtgggcgagcccatcaaccccgaggcctggctgtggtaccacagagtggtgggcgcccagagatgccccatcgtggacaccttctggcagaccgagaccggcggccacatgctgacccccctgcccggcgccacccccatgaagcccggcagcgccaccttccccttcttcggcgtggcccccgccatcctgaacgagagcggcgaggagctggagggcgaggccgagggctacctggtgttcaagcagccctggcccggcatcatgagaaccgtgtacggcaaccacgagagattcgagaccacctacttcaagaagttccccggctactacgtgaccggcgacggctgccagagagaccaggacggctactactggatcaccggcagaatcgacgacatgctgaacgtgagcggccacctgctgagcaccgccgaggtggagagcgccctggtggagcacgaggccgtggccgaggccgccgtggtgggccacccccaccccgtgaagggcgagtgcctgtactgcttcgtgaccctgtgcgacggccacaccttcagccccaagctgaccgaggagctgaagaagcagatcagagagaagatcggccccatcgccacccccgactacatccagaacgcccccggcctgcccaagaccagaagcggcaagatcatgagaagagtgctgagaaagatcgcccagaacgaccacgacctgggcgacatgagcaccgtggccgaccccagcgtgatcagccacctgttcagccacagatgcctgaccatccagtag

SEQ ID NO: 34586 - DNA, 2925 bp, Artificial Sequence
  derived and/or modified sequence
aaaggcggccgcggttctaggaacttgacgtgatggggcttcctgaggagcgggtccggagcggcagcgggagccggggccaggaggaagctggagccggaggccgggcgcggagttggtctccgccgcccgaggtcagccgctccgcgcacgtcccctcgctgcagcgctaccgcgagctgcaccggcgctccgtggaggagccgcgggaattctggggagacattgccaaggaattttactggaagactccatgccctggcccattccttcggtacaactttgatgtgactaaagggaaaatcttcattgagtggatgaaaggagcaactaccaacatctgctacaatgtactggatcgaaatgtccatgagaaaaagcttggagataaagttgctttttactgggagggcaatgagccaggggagaccactcagatcacataccatcagcttctggtccaagtgtgtcagttcagcaatgttctccgaaaacagggcattcagaagggggaccgagtggccatctacatgcctatgatcccagagcttgtggtggccatgctggcatgtgcccgcattggggctttgcactccattgtgtttgcaggcttctcttcagagtctctatgtgaacggatcttggattccagctgcagtcttctcatcactacagatgccttctacaggggggaaaagcttgtgaacctgaaggagctggctgacgaggccctgcagaagtgtcaggagaagggtttcccagtaagatgctgcattgtggtcaagcacctggggcgggcagagctcggcatgggtgactccaccagccagtcccccccaattaagaggtcatgcccagatgtgcagggtaaactgaaagagaaatccaagcgtgttcagccccagatctcatggaaccaagggattgacttgtggtggcatgagctcatgcaagaggcaggggatgagtgtgagcccgagtggtgtgatgccgaggacccactcttcatcctgtacaccagtggctccacaggcaaacccaagggtgtggttcacacagttgggggctacatgctctatgtagccacaaccttcaagtatgtgtttgacttccatgcagaggatgtgttctggtgcacggcagacattggttggatcactggtcattcctacgtcacctatgggccactggccaatggtgccaccagtgttttgtttgaggggattcccacatatccggacgtgaaccgcctgtggagcattgtggacaaatacaaggtgaccaagttctacacagcacccacagccatccgtctgctcatgaagtttggagatgagcctgtcaccaagcatagccgggcatccttgcaggtgttaggcacagtgggtgaacccatcaaccctgaggcctggctatggtaccaccgggtggtaggtgcccagcgctgccccatcgtggacaccttctggcaaacagagacaggtggccacatgttgactccccttcctggtgccacacccatgaaacccggttctgctactttcccattctttggtgtagctcctgcaatcctgaatgagtccggggaagagttggaaggtgaagctgaaggttatctggtgttcaagcagccctggccagggatcatgcgcacagtctatgggaaccacgaacgctttgagacaacctactttaagaagtttcctggatactatgttacaggagatggctgccagcgggaccaggatggctattactggatcactggcaggattgatgacatgctcaatgtatctggacacctgctgagtacagcagaggtggagtcagcacttgtggaacatgaggctgttgcagaggcagctgtggtgggccaccctcatcctgtgaagggtgaatgcctctactgctttgtcaccttgtgtgatggccacaccttcagccccaagctcaccgaggagctcaagaagcagattagagaaaagattggccccattgccacaccagactacatccagaatgcacctggcttgcctaaaacccgctcagggaaaatcatgaggcgagtgcttcggaagattgctcagaatgaccatgacctcggggacatgtctactgtggctgacccatctgtcatcagtcacctcttcagccaccgctgcctgaccatccagtgaacatgatcctgacctttacctaggattcctcctgctccaaactttgcccatcctctttgccccctcaggagtgctgagggccagtgttgacccacactaccctcccttgaccagctgtctgggaccggaaaccagctttgtctccaggtagagacaacatcctgtgactgccaggcagaaaggacagggcccaggtcagcctcagtctgctgtgcctccagactgcagagctctcagaacccagaacagagacgaaaaggctacctctcctacccaagttaagtgttcaaaggggatgtgagggcctccactgaagcagggaggcagctgtgtaatcctatgtcagctctcttaggaagccccagtacttatattgggcatgcacttgcccttaaaaacaatgatttgtgagtccaggaacaatttactatttttaaaatattttgctgcttctgttctgggtctgaattcccttttgtgccagatgccagtactgtctgcccattggctccaggggctgtatgggcagattcagtctccagagggtattcagatcatctgcttctttgaaggagtaaatgtgttttgttcctagggccagaggagcttgtcttccttgtcctctgttcccaccctcccctgaacagaacccagcccataagagacattctcagatgaaactctgttttcttgccccagtcaggctcaagccctgtggttgtaggaataaagcctgtgatctcaagaa

SEQ ID NO: 34587 - protein, 236 aa, Artificial Sequence
  derived and/or modified sequence
MAELDPFGAPAGAPGGPALGNGVAGAGEEDPAAAFLAQQESEIAGIENDEAFAILDGGAPGPQPHGEPPGGPDAVDGVMNGEYYQESNGPTDSYAAISQVDRLQSEPESIRKWREEQMERLEALDANSRKQEAEWKEKAIKELEEWYARQDEQLQKTKANNRVADEAFYKQPFADVIGYVAAEEAFVNDIDESSPGTEWERVARLCDFNPKSSKQAKDVSRMRSVLISLKQAPLVH

SEQ ID NO: 34588 - DNA, 711 bp, Artificial Sequence
  derived and/or modified sequence
atggctgagctcgatccgttcggcgctccagcaggagctcctggcgggccagctttgggcaatggggtcgctggggccggagaggaagacccggccgctgccttcttggcccagcaagaaagcgagatcgccggcatcgagaatgacgaggcattcgctattctcgacggaggagcaccagggccccagccccacggagagcctccaggtgggcccgacgcggtggacggcgtaatgaatggtgagtattaccaggagagcaatggcccaactgactcgtatgcagctattagccaggtggatcggctgcagagcgagccagagtcgatccgaaaatggcgggaggagcagatggagcgtttagaggccctcgacgccaactcacgtaagcaggaagcggagtggaaagaaaaagccataaaggagctcgaggagtggtacgcgcgccaggacgagcaactccagaagacaaaagccaacaacagagttgctgacgaggccttctacaaacaaccctttgctgacgtgataggttacgtcgctgccgaagaggcgttcgtgaacgatatagacgaaagcagcccagggactgagtgggaacgcgtcgctaggttatgcgatttcaatccgaaaagtagtaaacaggctaaagacgtgtctcgcatgcgctcagtgttgattagtcttaaacaggctcccctggtccactag

SEQ ID NO: 34589 - DNA, 711 bp, Artificial Sequence
  derived and/or modified sequence
atggccgagctggacccctttggagccccagctggggcccctgggggccctgccctgggcaatggagtggccggggccggggaggaggaccctgctgctgccttcctggcccagcaggagagcgagattgctggcattgaaaatgatgaggcctttgccatcctggatggaggagcccctggcccccagccccatggagagcccccaggcggcccagatgctgtggatggagtgatgaatggagagtactaccaggagagcaatggccccacagacagctatgctgccatcagccaggtggaccggctgcagagcgagcctgagagcatcaggaagtggagggaggagcagatggagcggctggaggccctggatgccaacagcaggaagcaggaggccgagtggaaggagaaggccatcaaggagctggaggagtggtacgcccggcaggatgagcagctgcagaagaccaaggccaacaacagagtggctgatgaggccttctacaagcagccctttgctgatgtgattggctacgtggccgctgaggaggcctttgtgaatgacattgatgagagcagccctggaacagagtgggagcgggtggcccggctgtgtgacttcaaccccaagagcagcaagcaggccaaggatgtgtccaggatgaggtctgtgctgatcagcctgaagcaggcccccctggtgcactag

SEQ ID NO: 34590 - DNA, 711 bp, Artificial Sequence
  derived and/or modified sequence
atggccgagctggaccccttcggcgcccccgccggcgcccccggcgggcccgcgctgggcaatggagtcgcaggagccggcgaggaggacccagctgcggcctttctggcccagcaagaaagcgagatcgcggggattgagaacgatgaggccttcgccattttggacggaggagccccgggtccacaacctcacggagagcctcccgggggacctgacgccgtagatggagtgatgaacggggagtactaccaggagtccaatggtccgacagattcatatgctgcaataagtcaagtcgatcggcttcagtccgagcctgaatcaattaggaagtggcgcgaagagcagatggagcggctcgaggcgcttgatgcgaacagcagaaaacaagaagccgagtggaaggaaaaagccataaaggagttggaggagtggtacgccagacaggacgaacagttgcagaagaccaaggcaaacaacagagttgcagatgaagccttctacaaacaaccctttgcagatgttattgggtacgtcgccgcagaggaggccttcgtgaacgatattgatgaatcttcacccggtactgaatgggagagagtggcccggctatgcgactttaatccaaagtcttcaaagcaggcaaaggacgtgtcgcgcatgcgtagtgtgttgattagtctgaagcaagcccctctggtgcactag

SEQ ID NO: 34591 - DNA, 711 bp, Artificial Sequence
  derived and/or modified sequence
atggccgagctggacccttttggcgctccagcaggagcccctgggggacccgcattgggaaacggagtggctggagcaggggaggaggacccagctgcggcattcctcgctcaacaggagtcagagatcgctggcatcgagaacgacgaagcatttgctattctggatgggggagctccaggccctcagccccatggggagccaccagggggacctgatgctgtggacggcgtaatgaacggcgagtactaccaggagagcaatggcccaaccgattcctatgcagctatttcccaagtcgatcggctgcaatctgagccagaaagcatccgaaagtggagggaagagcaaatggagcggctcgaagccctggacgctaactcccggaaacaggaagctgagtggaaagaaaaagccattaaggagttggaggagtggtacgcacgccaggacgagcaactccagaagaccaaggccaataatagggttgcagatgaagccttttataagcagccgtttgccgacgtgatcgggtatgtggccgcagaagaggctttcgttaacgacatagacgagtctagtcccggtacggagtgggagagagtagcaagactctgcgattttaacccaaagtcctcaaaacaagccaaggacgtaagcagaatgcgctctgtcctgatctctctaaagcaggctcccctcgtgcattag

SEQ ID NO: 34592 - DNA, 1090 bp, Artificial Sequence
  derived and/or modified sequence
agtcggcaccacagcggtggctgccgggcgtggtgtcggtgggtcggttggtttttgtctcaccgttggtgtccgtgccgttcagttgcccgccatggctgagctggatccgttcggcgcccctgccggcgcccctggcggtcccgcgctggggaacggagtggccggcgccggcgaagaagacccggctgcggccttcttggcgcagcaagagagcgagattgcgggcatcgagaacgacgaggccttcgccatcctggacggcggcgcccccgggccccagccgcacggcgagccgccggggggtccggatgctgttgatggagtaatgaatggtgaatactaccaggaaagtaatggtccaacagacagttatgcagctatttcacaagtggatcgattgcagtcagagcctgaaagtatccgtaaatggagagaagaacaaatggaacgcttggaagcccttgatgccaattctcggaagcaagaagcagagtggaaagaaaaggcaataaaggagctagaagaatggtatgcaagacaggacgagcagctacagaaaacaaaagcaaacaacagggtggcagatgaagctttctacaaacaacccttcgctgacgtgattggttatgtggcagcagaagaagcctttgtaaatgacattgacgagtcgtccccaggcactgagtgggaacgggtggcccggctgtgtgactttaaccccaagtctagcaagcaggccaaagatgtctcccgcatgcgctcagtcctcatctccctcaagcaggccccgctggtgcactgaagagccaccctgtggaaacactacatctgcaatatcttaatcctactcagtgaagctcttcacagtcattggattaattatgttgagttcttttggaccaaacctttttgtctttagagttgttcattgtttgtgattgcatgtttccttccttcaactgtgttctccctggcattcagagaggagggagaggaggaagaggaaggggagggaagcttcccaagagtagcctcaacctgtgcttctgtgcattattctgagaataaatttctgtttcaaactgta

SEQ ID NO: 34593 - DNA, 711 bp, Artificial Sequence
  derived and/or modified sequence
atggccgagctggaccccttcggcgcccccgccggcgcccccggcggccccgccctgggcaacggcgtggccggcgccggcgaggaggaccccgccgccgccttcctggcccagcaggagagcgagatcgccggcatcgagaacgacgaggccttcgccatcctggacggcggcgcccccggcccccagccccacggcgagccccccggcggccccgacgccgtggacggcgtgatgaacggcgagtactaccaggagagcaacggccccaccgacagctacgccgccatcagccaggtggacagactgcagagcgagcccgagagcatcagaaagtggagagaggagcagatggagagactggaggccctggacgccaacagcagaaagcaggaggccgagtggaaggagaaggccatcaaggagctggaggagtggtacgccagacaggacgagcagctgcagaagaccaaggccaacaacagagtggccgacgaggccttctacaagcagcccttcgccgacgtgatcggctacgtggccgccgaggaggccttcgtgaacgacatcgacgagagcagccccggcaccgagtgggagagagtggccagactgtgcgacttcaaccccaagagcagcaagcaggccaaggacgtgagcagaatgagaagcgtgctgatcagcctgaagcaggcccccctggtgcactag

SEQ ID NO: 34594 - protein, 78 aa, Artificial Sequence
  derived and/or modified sequence
MAPLPGAELVRRPLQLYRYLLRCCQQLPTKGIQQHYKHAVRQSFRVHSDEDNPERIQQIIKRAIEDADWIMNKYKKQN

SEQ ID NO: 34595 - DNA, 237 bp, Artificial Sequence
  derived and/or modified sequence
atggcccccctgcccggcgccgagctggtgagaagacccctgcagctgtacagatacctgctgagatgctgccagcagctgcccaccaagggcatccagcagcactacaagcacgccgtgagacagagcttcagagtgcacagcgacgaggacaaccccgagagaatccagcagatcatcaagagagccatcgaggacgccgactggatcatgaacaagtacaagaagcagaactag

SEQ ID NO: 34596 - DNA, 237 bp, Artificial Sequence
  derived and/or modified sequence
atggctcctcttccaggagctgaactcgtacgtaggccattacagctctaccggtatctgctgcgctgctgccagcaactacccaccaaaggaattcaacaacactataaacatgcggttagacaatcgttccgcgtccatagcgatgaagacaatcccgagcgcatccaacagattatcaaaagagcaattgaggacgccgactggattatgaataagtataaaaagcagaactag

SEQ ID NO: 34597 - DNA, 237 bp, Artificial Sequence
  derived and/or modified sequence
atggcccccttgccaggcgctgagctggtgcggagacccctgcaactgtatcgttacctcctgagatgctgccagcagctgcccaccaaaggcattcaacagcattataaacacgcggttcgtcaatcctttcgcgtccattctgacgaagacaatccggagagaattcagcagatcattaagagagccatcgaggacgcagactggatcatgaataaatacaagaaacagaactag

SEQ ID NO: 34598 - DNA, 237 bp, Artificial Sequence
  derived and/or modified sequence
atggcccccctgcctggagctgagctggtgagaagacccctgcagctgtaccgctacctgctgcgctgctgccagcagctgcccaccaagggcatccagcagcactacaagcatgctgtgcggcagagcttccgggtgcacagtgatgaggacaaccctgagcgcatccagcagatcatcaagagggccattgaagatgctgactggatcatgaacaagtacaagaagcagaactag

SEQ ID NO: 34599 - DNA, 237 bp, Artificial Sequence
  derived and/or modified sequence
atggcccccctgcccggcgccgagctggtgcggcggcccctgcagctgtaccgttatctgcttcggtgctgtcagcagctccctactaagggcatccagcaacactacaagcacgccgtgcggcagtcgtttcgtgtgcattcggacgaagacaatcccgaaagaattcaacagattatcaaacgcgccattgaggatgcagactggataatgaataagtacaagaaacaaaattag

SEQ ID NO: 34600 - DNA, 1629 bp, Artificial Sequence
  derived and/or modified sequence
gaactaatacagtatagtttcttgttcttcagaagcttacagtcagcaaggaacagaaagccaaataaagtaggaaagggctcaggcctgtaggcattctcccctctgtggcttggtgccctcgccagaccatggctgatgtcagagctggtttcctagtgattgcccctcagggtcttcctgcttttctaccctaccctgccggtgagggacacctactcatgcaccacttgaagttgagttccagaaagaagacgccagggatgaggctggacagagggtctcacggatggccccgctgccaggagcagaactggttcggaggccactgcagctctaccgatacttgctgcgctgttgccagcagctgccgaccaagggcatccagcagcattacaagcatgctgtcaggcagagttttcgggttcattcagatgaagacaaccctgagagaatccagcagattattaaaagagccattgaagatgctgactggatcatgaacaaatataaaaaacaaaactgagagctccgagggtgagccttcctggcctctggaagttgagaggcccctcttctggagctcagcagcagcagctggtttggaagagccattggccttgttggctgaaagccagaaatcaggggagaagctgaccttgctccagaggctcctcttgccgcggccatgttgctagcatcctttatgtttgcacttccagccacttacgatgtgaaatttggggagaatgtagtatttttttgcttcttttgtgtgttttttatttttgtgtttttgttcttttacttttctctgaaagtgattcatttattctggagatctctttatcattctctgagtcccagagcagatgtcccctcaggtagcaacctgtacagaagaaagcacgtgggttttagaaccagacagatctggatttgaatcccagatgcaataagatgaaggtgaagtgcctcacacaggatgtggcacatgacagtgcctgaagggctcccttcaaggaagccgtcctgccccgccccctcctctgctcctgcagcgccctgcacagctctgctccccgcatgcaccgcatcgggtctcagttttttgtttgcgagcttgccctgtccctgcttgtagcccctgagccctcacagttgtcacacacccagcagtctgccaaggagctgcttttcctgactactgtctctccatgcctagggaagtcaaagccctgggccttgccttcagggagttgacagtgtccttgaagtggtgaagtgcccaccacatgaaccaaggagagacgccaaagcagctgccatggactctggcctgtccaagcctctgtgcacctgcagtctctttccactggcacttccctgctttgctaccatcgtggaagaatggaagggagggggagaaggtgggtgggctcagggagaacggccagagtggccagaagatgcagagagaagccccactgggatctgagtattccccaagggcactcagccacagggatgaactagtgtttgtttgtatccttgcagttatgtgacttaaagtgactcagagatatctatgtatgcgagtgtactccgctggcaatgaagtaaatatat

SEQ ID NO: 34601 - DNA, 237 bp, Artificial Sequence
  derived and/or modified sequence
atggcccccctgcccggcgccgagctggtgcggcggcccctgcagctctacaggtacttactgcgttgctgccagcagcttccaaccaaaggaattcaacaacactacaaacatgccgtgcggcagagtttccgggtgcacagtgatgaggacaacccggagaggatacagcagatcatcaagagggccatcgaggatgctgactggattatgaacaaatataaaaaacagaactag

SEQ ID NO: 34602 - DNA, 237 bp, Artificial Sequence
  derived and/or modified sequence
atggcgcctcttcctggtgctgaattggtgagaaggccccttcagctctacaggtacctattgcgctgctgccagcagctcccgacaaagggaattcagcagcactacaaacacgcagttcgccagtcgtttcgtgtacacagcgatgaagacaacccggaacgcatccagcaaatcatcaagcgcgctattgaggacgccgattggattatgaacaaatataaaaagcagaattag

SEQ ID NO: 34603 - DNA, 237 bp, Artificial Sequence
  derived and/or modified sequence
atggcccctctccctggggctgaactggtacggaggcccttgcagctttaccggtatctcctgcggtgctgtcaacagctccccacaaaggggatacagcagcattacaagcatgcagtacggcagtcattcagggtgcattcagatgaggacaacccggagcgcattcagcagattattaagcgtgccattgaggatgccgattggattatgaacaaatacaaaaagcagaattag

SEQ ID NO: 34604 - protein, 761 aa, Artificial Sequence
  derived and/or modified sequence
MLQTKDLIWTLFFLGTAVSLQVDIVPSQGEISVGESKFFLCQVAGDAKDKDISWFSPNGEKLTPNQQRISVVWNDDSSSTLTIYNANIDDAGIYKCVVTGEDGSESEATVNVKIFQKLMFKNAPTPQEFREGEDAVIVCDVVSSLPPTIIWKHKGRDVILKKDVRFIVLSNNYLQIRGIKKTDEGTYRCEGRILARGEINFKDIQVIVNVPPTIQARQNIVNATANLGQSVTLVCDAEGFPEPTMSWTKDGEQIEQEEDDEKYIFSDDSSQLTIKKVDKNDEAEYICIAENKAGEQDATIHLKVFAKPKITYVENQTAMELEEQVTLTCEASGDPIPSITWRTSTRNISSEEKTLDGHMVVRSHARVSSLTLKSIQYTDAGEYICTASNTIGQDSQSMYLEVQYAPKLQGPVAVYTWEGNQVNITCEVFAYPSATISWFRDGQLLPSSNYSNIKIYNTPSASYLEVTPDSENDFGNYNCTAVNRIGQESLEFILVQADTPSSPSIDQVEPYSSTAQVQFDEPEATGGVPILKYKAEWRAVGEEVWHSKWYDAKEASMEGIVTIVGLKPETTYAVRLAALNGKGLGEISAASEFKTQPVHSPPPPASASSSTPVPLSPPDTTWPLPALATTEPAKGEPSAPKLEGQMGEDGNSIKVNLIKQDDGGSPIRHYLVRYRALSSEWKPEIRLPSGSDHVMLKSLDWNAEYEVYVVAENQQGKSKAAHFVFRTSAQPTAIPATLGGNSASYTFVSLLFSAVTLLLLC

SEQ ID NO: 34605 - DNA, 2286 bp, Artificial Sequence
  derived and/or modified sequence
atgctgcagaccaaggacctgatctggaccctgttcttcctgggcaccgccgtgagcctgcaggtggacatcgtgcccagccagggcgagatcagcgtgggcgagagcaagttcttcctgtgccaggtggccggcgacgccaaggacaaggacatcagctggttcagccccaacggcgagaagctgacccccaaccagcagagaatcagcgtggtgtggaacgacgacagcagcagcaccctgaccatctacaacgccaacatcgacgacgccggcatctacaagtgcgtggtgaccggcgaggacggcagcgagagcgaggccaccgtgaacgtgaagatcttccagaagctgatgttcaagaacgcccccaccccccaggagttcagagagggcgaggacgccgtgatcgtgtgcgacgtggtgagcagcctgccccccaccatcatctggaagcacaagggcagagacgtgatcctgaagaaggacgtgagattcatcgtgctgagcaacaactacctgcagatcagaggcatcaagaagaccgacgagggcacctacagatgcgagggcagaatcctggccagaggcgagatcaacttcaaggacatccaggtgatcgtgaacgtgccccccaccatccaggccagacagaacatcgtgaacgccaccgccaacctgggccagagcgtgaccctggtgtgcgacgccgagggcttccccgagcccaccatgagctggaccaaggacggcgagcagatcgagcaggaggaggacgacgagaagtacatcttcagcgacgacagcagccagctgaccatcaagaaggtggacaagaacgacgaggccgagtacatctgcatcgccgagaacaaggccggcgagcaggacgccaccatccacctgaaggtgttcgccaagcccaagatcacctacgtggagaaccagaccgccatggagctggaggagcaggtgaccctgacctgcgaggccagcggcgaccccatccccagcatcacctggagaaccagcaccagaaacatcagcagcgaggagaagaccctggacggccacatggtggtgagaagccacgccagagtgagcagcctgaccctgaagagcatccagtacaccgacgccggcgagtacatctgcaccgccagcaacaccatcggccaggacagccagagcatgtacctggaggtgcagtacgcccccaagctgcagggccccgtggccgtgtacacctgggagggcaaccaggtgaacatcacctgcgaggtgttcgcctaccccagcgccaccatcagctggttcagagacggccagctgctgcccagcagcaactacagcaacatcaagatctacaacacccccagcgccagctacctggaggtgacccccgacagcgagaacgacttcggcaactacaactgcaccgccgtgaacagaatcggccaggagagcctggagttcatcctggtgcaggccgacacccccagcagccccagcatcgaccaggtggagccctacagcagcaccgcccaggtgcagttcgacgagcccgaggccaccggcggcgtgcccatcctgaagtacaaggccgagtggagagccgtgggcgaggaggtgtggcacagcaagtggtacgacgccaaggaggccagcatggagggcatcgtgaccatcgtgggcctgaagcccgagaccacctacgccgtgagactggccgccctgaacggcaagggcctgggcgagatcagcgccgccagcgagttcaagacccagcccgtgcacagcccccccccccccgccagcgccagcagcagcacccccgtgcccctgagcccccccgacaccacctggcccctgcccgccctggccaccaccgagcccgccaagggcgagcccagcgcccccaagctggagggccagatgggcgaggacggcaacagcatcaaggtgaacctgatcaagcaggacgacggcggcagccccatcagacactacctggtgagatacagagccctgagcagcgagtggaagcccgagatcagactgcccagcggcagcgaccacgtgatgctgaagagcctggactggaacgccgagtacgaggtgtacgtggtggccgagaaccagcagggcaagagcaaggccgcccacttcgtgttcagaaccagcgcccagcccaccgccatccccgccaccctgggcggcaacagcgccagctacaccttcgtgagcctgctgttcagcgccgtgaccctgctgctgctgtgctag

SEQ ID NO: 34606 - DNA, 2286 bp, Artificial Sequence
  derived and/or modified sequence
atgctgcaaacaaaggacctcatatggaccctgtttttcctgggcaccgctgtcagtctgcaggtggatatcgtgccaagccagggtgaaatctccgtgggggaaagtaagttcttcctgtgccaggttgccggggacgcaaaggataaggatatttcctggttttctcccaacggcgagaagttgactccgaaccagcaacgcattagtgtggtgtggaacgacgactccagttccaccctcactatctacaacgccaatattgacgacgcaggcatttacaaatgcgtggtgaccggagaggatggctctgagtcagaagccactgtgaatgtcaaaatcttccagaagttgatgttcaaaaatgcacccaccccgcaagagttccgagaaggagaggatgctgttatcgtttgcgatgtcgtgagctctctcccgccaaccatcatatggaagcacaaagggcgtgacgtcatccttaaaaaggacgttcggtttatagtcttgtctaataactacctgcagattcgcgggatcaaaaaaactgacgagggtacatacagatgtgaaggcaggatccttgctaggggcgaaatcaactttaaggatatccaggtcatagtgaacgtgcccccaactatccaggcccggcagaacatcgtgaatgccacggccaatctcggtcagagtgttactctggtgtgtgatgcagaaggctttcccgagcctacaatgtcttggaccaaagacggagagcagattgagcaggaggaagatgacgagaagtacatattttcagatgacagtagtcagctgacgattaaaaaggtggataagaatgacgaagcagaatacatctgtatcgcggaaaataaggcgggggaacaggacgcgaccatccacctgaaggttttcgccaaacctaagattacttacgtcgagaaccagactgcaatggaattggaggagcaagtgactttgacctgtgaagcttcaggtgacccaatcccctcaattacatggcgaacttcaacgcggaacatctccagtgaggaaaagaccctggacggccacatggtggtgcggtcccatgctagagtgtcaagccttacattgaagagcatccaatatactgacgccggagagtatatctgtacagctagcaacactataggccaggactcacagagcatgtacctcgaggtgcagtatgctccaaaactgcaggggccagttgctgtgtatacatgggaagggaatcaagtgaacattacatgtgaggtattcgcctatccaagtgccacgatcagttggttcagggacggccagttgctgccctcgagcaactactctaacataaagatttataacaccccttcagctagttacctggaagttacaccagacagcgagaacgacttcgggaattataattgtacagccgttaatcggataggacaggaatctctggaattcattctggtgcaggccgatactcccagctcaccatccatcgaccaagtggagccttatagttccaccgcccaggtccaattcgatgaacctgaagcaacaggtggagtgcctatactcaagtacaaagccgagtggcgcgccgtgggtgaggaggtgtggcattctaagtggtacgatgcgaaggaggcttccatggaaggaatagtgactattgtcggcctgaaaccagagaccacctatgccgttcgcttagcggcactgaacggtaagggcctcggcgaaattagtgcagctagtgaattcaagacacaaccagttcactcccctccgcctcccgccagtgcctcatcctccaccccagtgcccctctctcctcctgatactacctggcccctgcctgctctcgcaacaaccgaaccagcaaaaggcgagccctccgcgcccaaactggaagggcagatgggtgaagacggcaactcaatcaaggttaatttgatcaaacaagatgacggcggttcaccaattagacactatctcgtgagataccgggcgttgtcttctgagtggaaacccgagattcgattgccatcagggtctgaccacgtgatgcttaagagtctggattggaacgccgagtatgaagtatatgtggtggccgaaaaccagcagggtaagagcaaggcggcccacttcgtgttccgcactagtgcccagcctacagccattcccgccaccttggggggtaacagtgcatcatatacatttgtctcactgctctttagtgccgtgactctgctgctgttgtgttag

SEQ ID NO: 34607 - DNA, 2286 bp, Artificial Sequence
  derived and/or modified sequence
atgctgcagaccaaggacctgatctggaccctcttcttcctgggcacagctgtgtccctgcaggtggacatcgtgcccagccagggcgagatctctgtgggggagagcaagttcttcctgtgccaggtggccggagatgccaaggacaaggacatctcctggttcagccccaacggggagaagctgacccccaaccagcagaggatctctgtggtgtggaatgatgacagcagcagcaccctgaccatctacaatgccaacattgatgatgctggcatctacaagtgtgtggtgactggagaagatggcagcgagagcgaggccaccgtgaatgtgaagatcttccagaagctgatgttcaagaatgcccccaccccccaggagttccgggagggagaagatgctgtgattgtgtgtgatgtggtgagcagcctgccccccaccatcatctggaagcacaagggcagagatgtgatcctgaagaaggatgtgcgcttcatcgtgctgagcaacaactacctgcagatccggggcatcaagaagacagatgagggcacctaccgctgtgagggccgcatcctggcccggggggagatcaacttcaaggacatccaggtgattgtgaatgtgccccccaccatccaggcccggcagaacatcgtgaatgccacagccaacctgggccagagcgtgaccctggtgtgtgatgctgagggcttccctgagcccaccatgtcctggaccaaggatggagagcagatcgagcaggaggaggatgatgagaagtacatcttcagtgatgacagcagccagctgaccatcaagaaggtggacaagaatgatgaagctgagtacatctgcatcgccgagaacaaggccggggagcaggatgccaccatccacctgaaggtgtttgccaagcccaagatcacctacgtggagaaccagacagccatggagctggaggagcaggtgaccctgacctgtgaggccagcggggaccccatccccagcatcacctggaggaccagcaccaggaacatcagcagcgaggagaagaccctggatggccacatggtggtgcgcagccacgcccgggtgagcagcctgaccctgaagagcatccagtacacagatgctggggagtacatctgcacagccagcaacaccatcggccaggacagccagagcatgtacctggaggtgcagtatgcccccaagctgcagggccctgtggccgtgtacacctgggagggcaaccaggtgaacatcacctgtgaggtgtttgcctaccccagcgccaccatctcctggttcagagatggccagctgctgcccagcagcaactacagcaacatcaagatctacaacacccccagcgccagctacctggaggtgaccccagacagtgaaaatgactttggaaactacaactgcacagctgtgaacagaattggccaggagagcctggagttcatcctggtgcaggccgacacccccagcagccccagcattgaccaggtggagccctacagcagcacagcccaggtgcagtttgatgagcctgaggccactggaggagtgcccatcctgaagtacaaggccgagtggagggctgtgggggaggaggtgtggcacagcaagtggtatgatgccaaggaggcctccatggagggcatcgtgaccatcgtgggcctgaagccagagaccacctatgctgtgcggctggccgccctgaatggcaagggcctgggggagatctctgctgccagcgagttcaagacccagcctgtgcacagccccccacctccagccagcgccagcagcagcacccctgtgcccctgagccccccagacaccacctggcccctgcctgccctggccaccacagagcccgccaagggggagcccagcgcccccaagctggagggccagatgggagaagatggcaacagcatcaaggtgaacctgatcaagcaggatgatggcggcagccccatccgccactacctggtgcgctaccgggccctgagcagcgagtggaagccagagatccggctgcccagcggcagtgaccacgtgatgctgaagagcctggactggaatgcagaatatgaggtgtatgtggtggccgagaaccagcagggcaagagcaaggccgcccactttgtgttccgcaccagcgcccagcccacagccatcccagccaccctgggcggcaacagcgccagctacacctttgtgtccctgctcttctctgctgtgaccctgctgctgctgtgctag

SEQ ID NO: 34608 - DNA, 2286 bp, Artificial Sequence
  derived and/or modified sequence
atgctgcagaccaaggacctgatctggaccctgttcttcctgggcacagcagtgagccttcaggtggacattgtcccctcacagggcgagatttctgtgggcgagagcaagttttttctgtgtcaggtagccggtgacgccaaagataaagacatctcttggttcagccctaacggggaaaagcttaccccaaatcagcagcgtatatctgtcgtgtggaatgacgacagctcaagcactttgacgatctataatgctaatatagacgatgcaggcatctacaaatgcgtggtgaccggcgaagacgggagcgagtctgaggccaccgtcaatgtgaaaatttttcagaagttgatgtttaagaatgcccctacaccccaggaattcagggagggcgaagatgctgtgattgtctgcgacgtcgtctcctctctgcctccaaccattatctggaagcacaaaggacgggatgtgattctaaagaaggatgtgagattcatcgtgctctccaataactatctccaaatccgtgggattaaaaagaccgacgaagggacataccgatgcgaaggccgaattctggcccggggggagataaactttaaggacattcaggttatcgtaaacgttccccctacaatacaagccagacagaatattgtaaatgcaacggccaatctgggacagtctgtgacacttgtttgcgacgctgagggcttcccagagcccaccatgtcctggacaaaagatggcgaacagatcgagcaggaggaagacgacgaaaagtatatcttctctgatgacagcagccagctgacaattaaaaaggtcgataagaacgacgaggcagaatacatatgcatcgcagagaataaggctggggaacaggacgccaccattcatttaaaggtttttgccaaacctaagatcacctacgtggagaatcagacagccatggagctcgaggagcaggtgactctcacctgcgaggcaagcggagacccgatcccctctatcacatggaggacatctacacgaaatatctctagcgaggaaaaaactttggatggacatatggtggtgcgcagccacgccagggtgtccagtcttaccctaaaaagtatacagtacactgatgccggtgagtacatatgtaccgcctcaaataccattggccaggattcgcagagcatgtatctcgaagtgcagtacgcgccaaagttgcagggacccgtagcagtgtacacatgggagggaaaccaggtcaacatcacctgcgaggttttcgcctatccgagcgctactattagctggttcagagacggacaactcctgcctagttccaactattctaatatcaagatttacaacaccccctctgcctcatatctggaagtgacccctgattcagaaaatgacttcggcaattataattgcacagctgtcaacagaatcggacaggagagcctggaattcatcctggttcaggctgacaccccatcatccccatctatcgaccaggttgaaccctacagctcaaccgcccaggtccaattcgacgagcctgaagctaccggaggagtacccatactcaagtacaaagctgagtggcgggcagttggggaggaagtgtggcactcaaagtggtacgatgctaaggaagcttcaatggagggaattgtaacaatagtcggcctgaagcccgaaacgacctacgctgtcaggctggccgcacttaacgggaagggtcttggagaaatctcggccgcatctgagttcaagacccaaccggtccacagcccaccccccccggcgtctgcatcttccagtaccccagttcctttatccccacctgacactacttggccactccccgcccttgccaccacggaacccgccaagggagagccttctgccccaaagctggaggggcaaatgggggaagacggcaatagtatcaaggttaacctcatcaaacaggacgacggggggtctccaatcaggcactatctggtgagatacagggcactgagcagcgaatggaaacctgaaattcgcctgccatccgggtctgatcatgtcatgctcaagtccctggattggaatgccgaatatgaggtgtatgttgtcgcagaaaatcagcaaggcaaatcaaaggctgcccacttcgtctttaggacaagcgcccaacccactgctatcccagcaacactgggaggcaattctgcctcatacacattcgtcagtctgctgttttcagcagtgacattgctcctgctgtgttag

SEQ ID NO: 34609 - DNA, 2787 bp, Artificial Sequence
  derived and/or modified sequence
caaaaataatcatactcagcctggcaattgtctgcccctaggtctgtcgctcagccgccgtccacactcgctgcaggggggggggcacagaatttaccgcggcaagaacatccctcccagccagcagattacaatgctgcaaactaaggatctcatctggactttgtttttcctgggaactgcagtttctctgcaggtggatattgttcccagccagggggagatcagcgttggagagtccaaattcttcttatgccaagtggcaggagatgccaaagataaagacatctcctggttctcccccaatggagaaaagctcaccccaaaccagcagcggatctcagtggtgtggaatgatgattcctcctccaccctcaccatctataacgccaacatcgacgacgccggcatttacaagtgtgtggttacaggcgaggatggcagtgagtcagaggccaccgtcaacgtgaagatctttcagaagctcatgttcaagaatgcgccaaccccacaggagttccgggagggggaagatgccgtgattgtgtgtgatgtggtcagctccctcccaccaaccatcatctggaaacacaaaggccgagatgtcatcctgaaaaaagatgtccgattcatagtcctgtccaacaactacctgcagatccggggcatcaagaaaacagatgagggcacttatcgctgtgagggcagaatcctggcacggggggagatcaacttcaaggacattcaggtcattgtgaatgtgccacctaccatccaggccaggcagaatattgtgaatgccaccgccaacctcggccagtccgtcaccctggtgtgcgatgccgaaggcttcccagagcccaccatgagctggacaaaggatggggaacagatagagcaagaggaagacgatgagaagtacatcttcagcgacgatagttcccagctgaccatcaaaaaggtggataagaacgacgaggctgagtacatctgcattgctgagaacaaggctggcgagcaggatgcgaccatccacctcaaagtctttgcaaaacccaaaatcacatatgtagagaaccagactgccatggaattagaggagcaggtcactcttacctgtgaagcctccggagaccccattccctccatcacctggaggacttctacccggaacatcagcagcgaagaaaagactctggatgggcacatggtggtgcgtagccatgcccgtgtgtcgtcgctgaccctgaagagcatccagtacactgatgccggagagtacatctgcaccgccagcaacaccatcggccaggactcccagtccatgtaccttgaagtgcaatatgccccaaagctacagggccctgtggctgtgtacacttgggaggggaaccaggtgaacatcacctgcgaggtatttgcctatcccagtgccacgatctcatggtttcgggatggccagctgctgccaagctccaattacagcaatatcaagatctacaacaccccctctgccagctatctggaggtgaccccagactctgagaatgattttgggaactacaactgtactgcagtgaaccgcattgggcaggagtccttggaattcatccttgttcaagcagacaccccctcttcaccatccatcgaccaggtggagccatactccagcacagcccaggtgcagtttgatgaaccagaggccacaggtggggtgcccatcctcaaatacaaagctgagtggagagcagttggtgaagaagtatggcattccaagtggtatgatgccaaggaagccagcatggagggcatcgtcaccatcgtgggcctgaagcccgaaacaacgtacgccgtaaggctggcggcgctcaatggcaaagggctgggtgagatcagcgcggcctccgagttcaagacgcagccagtccatagccctcctccaccggcatctgctagctcgtctacccctgttccattgtctccaccagatacaacttggcctcttcctgcccttgcaaccacagaaccagctaaaggggaacccagtgcacctaagctcgaagggcagatgggagaggatggaaactctattaaagtgaacctgatcaagcaggatgacggcggctcccccatcagacactatctggtcaggtaccgagcgctctcctccgagtggaaaccagagatcaggctcccgtctggcagtgaccacgtcatgctgaagtccctggactggaatgctgagtatgaggtctacgtggtggctgagaaccagcaaggaaaatccaaggcggctcattttgtgttcaggacctcggcccagcccacagccatcccagcaaccttgggaggcaattctgcatcctacacctttgtctcattgcttttctctgcagtgactcttcttttgctctgttaggaacttgaacacaaaaattaaatttgcttaaaagcccagttcctatgaaaaagatcagtgccccctttggaagaacctggcaggaccaccatggccacagctgctgagcaaccattctgtgtggaagagaaggttttgtgattggaaaaagctttacctccagacatgtcaccactcacagatacttttgtgccacttcataaggagtttgccccctttttaatggcagtaaaaagaatttgagagctctttctttaaatgctatttttaaaaaccatcatgctagatttacagagaagtttctgcatatctgctacttgttgcattttgggttcaaacctaaatatgatgtagcagaggaagaattc

SEQ ID NO: 34610 - DNA, 2286 bp, Artificial Sequence
  derived and/or modified sequence
atgctgcaaacaaaggacctgatctggacgctattctttctggggaccgccgtctctctgcaagtggatatcgtgccaagtcagggcgagatatctgtgggcgagtccaaatttttcttgtgtcaggtggctggggatgccaaggacaaagatatctcctggtttagccctaacggcgagaagctcactcccaaccaacagcgaatctcagttgtatggaacgacgatagcagttctaccttaacaatctacaatgccaatatcgatgatgccggaatctacaaatgcgttgttacgggcgaggatggcagcgaatcagaggctaccgtgaacgtgaagatcttccagaaactgatgttcaaaaatgcgccaactccgcaggaatttagagagggagaggacgccgtgatagtatgtgatgtggtgtcttccttgcctccaacgatcatatggaagcataaagggcgtgacgtgatcctgaagaaagacgttagattcatcgtgctgagtaacaattacttgcagatcaggggaattaaaaagaccgatgagggcacctaccggtgcgagggcagaatccttgccagaggcgagattaattttaaagacatccaggtgatcgtgaacgtaccgcctacaattcaggcgcgacaaaatatagtaaatgccaccgcaaatctaggccaatctgtgactctcgtctgtgacgctgagggctttcctgaacccacaatgagctggacaaaggacggcgaacaaatagagcaggaggaggatgatgagaagtacattttcagtgatgactcaagtcagctaacaatcaagaaggtggacaagaatgatgaagcagagtatatctgcattgccgagaataaagccggtgaacaggacgctactattcatctgaaggtatttgcgaagccaaaaatcacatatgtggaaaaccagactgctatggagctggaagagcaggttacactcacgtgtgaggcctctggagaccccatccccagcataacgtggaggacctcaacacggaatatcagttcagaagaaaagaccctggatggtcacatggttgttaggagtcatgcccgtgtttcctctctgacactcaagagcatccaatataccgacgccggagaatacatctgtactgccagcaacaccatcggccaggatagccagtccatgtacctggaagtccagtatgctccgaagctacaaggccctgtcgctgtgtatacctgggaaggcaatcaggtgaacataacttgtgaagtcttcgcttatccatcggccaccatcagctggttccgggatgggcaactacttccttctagcaactacagtaatattaagatctataacactccttccgcctcttatctcgaagtgactcctgattctgagaatgacttcggcaattataactgcaccgcagtcaaccgtatcgggcaggaatccctggaatttatactggtgcaggcagatactccatcatcaccctcgatcgatcaggtggagccttactcttctaccgcacaggtgcagttcgacgagccagaagcaacagggggagtgccaatcctgaagtacaaggctgagtggagagctgtgggagaggaggtgtggcattcaaaatggtatgatgctaaagaagcatcaatggagggcatcgtgacgattgtggggctaaagccggaaacaacctacgccgtacgattagctgcactgaatgggaagggactgggggagatttctgctgcatccgagtttaagacgcagcctgtgcattccccacccccacctgcttccgcatcctcatctacacccgtgcctctaagccctccagatactacctggcctctgcccgcattggccactacggaacccgcaaaaggggagccttcagcacctaagttagagggacagatgggcgaagacggtaactcaattaaggtcaatctgatcaagcaagatgacggtggatcccctattcggcactacctggtccgctaccgagccctgagctccgaatggaagcccgagataagacttccatcaggatctgaccacgtgatgctcaagtctctggattggaatgctgagtacgaggtgtacgtggtggccgagaatcaacaaggcaaatccaaggcggcacacttcgtgttcaggacaagcgctcaaccaacggcgatcccggcaacactgggtggcaactcggcaagctacacgttcgtctccctgctcttctccgccgtgacactcctcttactctgttag

SEQ ID NO: 34611 - protein, 727 aa, Artificial Sequence
  derived and/or modified sequence
MNGEADCPTDLEMAAPKGQDRWSQEDMLTLLECMKNNLPSNDSSKFKTTESHMDWEKVAFKDFSGDMCKLKWVEISNEVRKFRTLTELILDAQEHVKNPYKGKKLKKHPDFPKKPLTPYFRFFMEKRAKYAKLHPEMSNLDLTKILSKKYKELPEKKKMKYIQDFQREKQEFERNLARFREDHPDLIQNAKKSDIPEKPKTPQQLWYTHEKKVYLKVRPDEIMRDYIQKHPELNISEEGITKSTLTKAERQLKDKFDGRPTKPPPNSYSLYCAELMANMKDVPSTERMVLCSQQWKLLSQKEKDAYHKKCDQKKKDYEVELLRFLESLPEEEQQRVLGEEKMLNINKKQATSPASKKPAQEGGKGGSEKPKRPVSAMFIFSEEKRRQLQEERPELSESELTRLLARMWNDLSEKKKAKYKAREAALKAQSERKPGGEREERGKLPESPKRAEEIWQQSVIGDYLARFKNDRVKALKAMEMTWNNMEKKEKLMWIKKAAEDQKRYERELSEMRAPPAATNSSKKMKFQGEPKKPPMNGYQKFSQELLSNGELNHLPLKERMVEIGSRWQRISQSQKEHYKKLAEEQQKQYKVHLDLWVKSLSPQDRAAYKEYISNKRKSMTKLRGPNPKSSRTTLQSKSESEEDDEEDEDDEDEDEEEEDDENGDSSEDGGDSSESSSEDESEDGDENEEDDEDEDDDEDDDEDEDNESEGSSSSSSSSGDSSDSDSN

SEQ ID NO: 34612 - DNA, 2184 bp, Artificial Sequence
  derived and/or modified sequence
atgaacggcgaggccgactgccccaccgacctggagatggccgcccccaagggccaggacagatggagccaggaggacatgctgaccctgctggagtgcatgaagaacaacctgcccagcaacgacagcagcaagttcaagaccaccgagagccacatggactgggagaaggtggccttcaaggacttcagcggcgacatgtgcaagctgaagtgggtggagatcagcaacgaggtgagaaagttcagaaccctgaccgagctgatcctggacgcccaggagcacgtgaagaacccctacaagggcaagaagctgaagaagcaccccgacttccccaagaagcccctgaccccctacttcagattcttcatggagaagagagccaagtacgccaagctgcaccccgagatgagcaacctggacctgaccaagatcctgagcaagaagtacaaggagctgcccgagaagaagaagatgaagtacatccaggacttccagagagagaagcaggagttcgagagaaacctggccagattcagagaggaccaccccgacctgatccagaacgccaagaagagcgacatccccgagaagcccaagaccccccagcagctgtggtacacccacgagaagaaggtgtacctgaaggtgagacccgacgagatcatgagagactacatccagaagcaccccgagctgaacatcagcgaggagggcatcaccaagagcaccctgaccaaggccgagagacagctgaaggacaagttcgacggcagacccaccaagcccccccccaacagctacagcctgtactgcgccgagctgatggccaacatgaaggacgtgcccagcaccgagagaatggtgctgtgcagccagcagtggaagctgctgagccagaaggagaaggacgcctaccacaagaagtgcgaccagaagaagaaggactacgaggtggagctgctgagattcctggagagcctgcccgaggaggagcagcagagagtgctgggcgaggagaagatgctgaacatcaacaagaagcaggccaccagccccgccagcaagaagcccgcccaggagggcggcaagggcggcagcgagaagcccaagagacccgtgagcgccatgttcatcttcagcgaggagaagagaagacagctgcaggaggagagacccgagctgagcgagagcgagctgaccagactgctggccagaatgtggaacgacctgagcgagaagaagaaggccaagtacaaggccagagaggccgccctgaaggcccagagcgagagaaagcccggcggcgagagagaggagagaggcaagctgcccgagagccccaagagagccgaggagatctggcagcagagcgtgatcggcgactacctggccagattcaagaacgacagagtgaaggccctgaaggccatggagatgacctggaacaacatggagaagaaggagaagctgatgtggatcaagaaggccgccgaggaccagaagagatacgagagagagctgagcgagatgagagccccccccgccgccaccaacagcagcaagaagatgaagttccagggcgagcccaagaagccccccatgaacggctaccagaagttcagccaggagctgctgagcaacggcgagctgaaccacctgcccctgaaggagagaatggtggagatcggcagcagatggcagagaatcagccagagccagaaggagcactacaagaagctggccgaggagcagcagaagcagtacaaggtgcacctggacctgtgggtgaagagcctgagcccccaggacagagccgcctacaaggagtacatcagcaacaagagaaagagcatgaccaagctgagaggccccaaccccaagagcagcagaaccaccctgcagagcaagagcgagagcgaggaggacgacgaggaggacgaggacgacgaggacgaggacgaggaggaggaggacgacgagaacggcgacagcagcgaggacggcggcgacagcagcgagagcagcagcgaggacgagagcgaggacggcgacgagaacgaggaggacgacgaggacgaggacgacgacgaggacgacgacgaggacgaggacaacgagagcgagggcagcagcagcagcagcagcagcagcggcgacagcagcgacagcgacagcaactag

SEQ ID NO: 34613 - DNA, 2184 bp, Artificial Sequence
  derived and/or modified sequence
atgaatggagaagcggattgccccacggacttggaaatggcggcccccaagggccaggataggtggagtcaagaagacatgttaactctgctcgaatgcatgaagaataatctgccaagcaatgactcatcaaagtttaagacaacagagtcccacatggactgggagaaagtggctttcaaagacttctctggcgacatgtgcaaattgaagtgggtggagatttcaaatgaggtaaggaaatttcggactctgaccgagttaatcctcgacgcacaggaacacgtgaagaatccttataaaggcaagaagctaaagaaacaccccgattttccgaagaaacctttgactccctatttccgcttttttatggagaagagagccaaatacgccaagctgcatcctgaaatgtcaaatctggacctcacaaagatcttgtctaagaaatataaagaactgccggagaagaagaagatgaagtacatccaggattttcaacgtgagaagcaggaattcgagaggaatttggccagatttcgggaggatcacccagacttgattcagaatgcaaagaagtcagatataccagaaaagcctaaaaccccccagcagctctggtatacacacgaaaagaaggtctatctaaaggtccgaccagatgagattatgcgcgattatattcagaagcatcctgaacttaacatcagcgaggaaggtataaccaaaagcacactgacaaaggccgaacggcagctgaaggacaaattcgatggacgaccaactaaacccccccctaattcctattctctctactgtgctgagctgatggctaatatgaaagatgtcccctccaccgaacggatggtcctgtgcagtcaacagtggaagctactctcgcagaaagaaaaggacgcctatcacaagaaatgtgaccagaaaaagaaggactatgaggtggagcttttgcgtttccttgaatcgcttccagaggaggagcagcagcgggtgctgggtgaggaaaagatgcttaatatcaacaagaagcaggccacatcgcccgcatctaagaaaccggcgcaggagggaggcaaaggcggcagtgagaaacctaagcggcccgtgagcgctatgttcattttctccgaagaaaagaggaggcagcttcaggaggagagacccgagctcagcgagtcggaattgacaagactgcttgcacgcatgtggaacgacttgtccgagaagaaaaaggccaagtataaggccagggaggctgccctgaaagcacagtcagagcgcaaacccggaggggagcgggaagagagagggaagctgcccgagtccccgaaaagggcggaggagatctggcagcagtccgttatcggcgactacctagcaagattcaaaaatgatcgagtaaaggctcttaaagcaatggaaatgacctggaataacatggagaaaaaggaaaagttgatgtggatcaaaaaggctgcagaagaccagaagcgttacgaacgggagctatctgagatgagggcacctcccgcagctaccaatagctctaagaaaatgaagttccagggagaaccgaaaaagccgcccatgaacggctatcagaagttcagtcaggagcttttgtccaacggggagttgaaccatctgcctcttaaagaaagaatggtcgagataggatctcgttggcagcgcatatcccagagccaaaaagaacactataagaaacttgcggaagagcaacaaaagcagtacaaagtgcacctggacctgtgggtcaagtctctgtcaccccaggacagagccgcctataaagagtatatcagcaataagcgcaaatcaatgacaaaactgagaggaccaaatccaaagagcagtagaacgacactccaatccaagagtgaatcagaagaggacgatgaggaggatgaggacgatgaagatgaggatgaagaagaagaagatgatgagaacggggatagttcagaagatggaggcgactcgtctgagagctccagcgaggacgagtccgaggacggagatgagaacgaggaggacgatgaggacgaggacgacgacgaagacgacgacgaagacgaggataatgagagcgaaggatcgtcctcatcttctagctcgtctggggattcctcagatagtgactcaaattag

SEQ ID NO: 34614 - DNA, 2184 bp, Artificial Sequence
  derived and/or modified sequence
atgaatggcgaggcagactgccccacggatctggaaatggccgccccgaagggccaagaccgatggtcacaggaagacatgctgaccctgctcgaatgtatgaaaaacaatctgcccagcaacgacagtagcaagtttaaaactactgagagccacatggactgggaaaaggttgccttcaaggatttctccggagatatgtgcaagctgaagtgggtggagattagtaatgaagtacgaaagttccgaacactgacagagctgatcctcgacgcacaggagcacgttaaaaatccttacaagggcaagaagctgaagaagcatccagatttccccaagaaacctcttactccctactttagattcttcatggagaagagggctaagtatgccaagctccaccctgaaatgtcaaatctagatctgactaaaattctcagtaagaagtacaaggagctgccagagaagaagaagatgaagtatatccaggacttccagagagagaaacaagagttcgaacgaaatttggctagattcagggaggaccaccccgatttaattcagaatgccaagaaatcggacatccctgagaaacccaagacccctcaacaactgtggtacacacacgaaaagaaagtctatctgaaagtccgcccggatgagatcatgagagactatattcaaaaacatccagaattgaacattagcgaagaagggataaccaagagcactctgaccaaagctgagaggcagttgaaggacaagttcgacgggagacccaccaaaccccccccaaattcgtacagcttgtactgtgctgaactcatggcaaatatgaaagacgttccgtccacagagagaatggttttgtgttcacagcaatggaagctcctatcacagaaggaaaaggatgcttaccacaagaagtgtgatcagaagaagaaggactacgaagtggaactactccgctttcttgaatctttgcccgaagaagagcagcagagggtgctgggtgaggagaagatgctgaatatcaacaaaaagcaagccacctccccagccagcaaaaagccggcccaggagggaggcaagggcggctccgagaagccgaagaggccagtttcggccatgttcattttttccgaggaaaaacgtcgacagctccaagaggagcgtccagagctctccgagtcagagctaacaagactgttagctaggatgtggaacgacctcagcgaaaagaagaaggcgaaatacaaggcccgcgaggccgccctgaaagcacagtccgagcggaaacccggaggggagagggaagaacggggaaaactgcctgagagcccgaaaagggcagaagaaatctggcaacagagtgtgatcggggattatctggcccgattcaagaacgatcgcgttaaggccctgaaggctatggagatgacctggaacaacatggagaagaaggagaaacttatgtggatcaaaaaagctgcagaagaccagaaaagatatgaacgggaactaagcgagatgcgggcccctccggccgcaactaactcttccaaaaaaatgaaattccagggcgaaccgaagaagccgccgatgaacggttaccaaaaattttcacaagagctgttgagtaacggggagctgaatcatcttcctttgaaagaaaggatggtggagataggatctagatggcagcgtatttcgcaatcacagaaggagcactataagaaattggcagaggagcagcagaagcagtataaagtgcacttggatctgtgggtaaagagcctctctcctcaggatcgggccgcctacaaggagtacatatctaacaagcggaaaagtatgactaagcttcgcgggcccaacccaaaatcttcccgcaccacactgcagtcaaagagtgagtcggaagaagatgatgaggaggatgaggacgacgaagacgaggatgaagaagaggaagacgatgagaatggagactcatcagaggacggcggggacagctccgagagttcatctgaggacgaatctgaagacggcgacgaaaatgaagaagatgacgaagatgaagatgatgacgaggacgacgatgaggatgaggataatgaatcagaaggttcctcttcttcaagcagtagtagcggcgatagtagcgacagcgactctaattag

SEQ ID NO: 34615 - DNA, 2184 bp, Artificial Sequence
  derived and/or modified sequence
atgaacggcgaggccgactgtccaaccgatctcgagatggctgctcccaagggacaggataggtggagccaggaagacatgttaacccttcttgaatgcatgaagaataatcttccttctaacgatagtagcaaattcaagacgacagaatcccacatggattgggagaaggttgcttttaaggacttttctggcgacatgtgcaaactgaagtgggtggaaatttccaacgaggttcgcaagtttagaacactgacagaactgatcctcgacgcccaggagcacgttaaaaacccgtataagggtaagaagctaaaaaaacatcctgactttccgaaaaaacctcttactccctatttccgattctttatggaaaagcgcgcaaaatacgctaagttgcatccagagatgtccaaccttgacctcacaaagatactatccaagaagtacaaggaactgccagaaaaaaagaagatgaaatacattcaggatttccagcgcgagaagcaagaattcgagagaaacctggctcgatttagggaggatcatccggatctcatacagaatgctaagaagtctgacataccagagaagcccaaaactccacagcagctgtggtatacacacgagaagaaggtctacctgaaggtgaggcctgatgaaatcatgagagattatatccaaaagcaccctgagctgaacatctccgaggagggcataaccaagagtacattgacaaaggctgagcgccagctgaaggacaagtttgacggtaggccgacgaaaccacccccgaattcctacagtctgtactgcgcagagctgatggccaacatgaaggatgtgccgagtacagagagaatggtcctgtgtagtcagcaatggaagcttctgtctcagaaagagaaggatgcttatcacaagaagtgtgatcagaaaaaaaaggactacgaggtggagttgctccgatttctcgaaagcctacctgaagaggagcagcagcgggtcctgggcgaggaaaagatgctgaacatcaacaaaaagcaggctactagcccagcaagcaaaaaacctgcgcaggagggaggaaaagggggcagtgagaaacccaagcgtcccgtgtcagcgatgtttatcttttcagaagaaaaacggcgacagcttcaagaggaaaggccagagctctcagagtcggaattgactaggctgttagcaaggatgtggaatgatctgagtgaaaagaagaaagccaaatataaagcaagggaggccgcgttgaaggcacagagcgagagaaagccagggggagagagggaggaaagaggtaagcttcctgagtccccgaagcgagctgaagagatctggcagcagtccgtgattggtgactacctggctaggttcaaaaatgatcgggtcaaggccttgaaggccatggaaatgacttggaataatatggaaaagaaggaaaaactgatgtggatcaaaaaagccgcagaagaccagaaaaggtatgagcgagagctttccgagatgcgcgctcctcccgccgctacgaactcgtctaaaaaaatgaaatttcagggcgagccaaaaaaaccacccatgaacgggtatcagaagtttagccaggagttgctgtctaacggcgagttgaatcacttgcccctgaaggaacgcatggtagagatagggtcccggtggcagaggataagtcagtcgcagaaggaacattacaagaagctcgctgaagagcagcagaagcaatacaaagtgcatctcgacctgtgggtgaaaagtttaagcccgcaggaccgggccgcctacaaggagtacatcagcaacaaacgcaagtcgatgaccaagctccgtggacccaaccccaagagcagtcggaccacacttcagagtaagagtgagagtgaggaggatgacgaggaagatgaagacgacgaagatgaggacgaagaagaagaagatgatgagaacggcgattcgtcggaggatggcggcgactcctccgagagttctagcgaggatgagagtgaggacggagacgagaacgaggaggatgatgaagatgaagatgatgatgaggacgacgacgaggacgaagataacgaatccgaaggatcctcctctagctcttcctccagcggtgattcctccgactcagattctaattag

SEQ ID NO: 34616 - DNA, 2184 bp, Artificial Sequence
  derived and/or modified sequence
atgaatggcgaggccgactgccccactgacctggagatggccgcgcctaaggggcaggaccgctggagccaagaagacatgttgacgctcttggagtgcatgaagaacaatttaccgtccaatgatagcagcaagttcaaaaccacagaatcacacatggattgggaaaaagtggcctttaaagattttagtggcgacatgtgtaaactcaagtgggtcgagatcagcaacgaggtgcgaaaattccgaactttaaccgagctgatattagatgcgcaggagcacgtaaagaatccctacaagggaaagaagctcaagaagcaccctgacttccctaagaagcccctcactccgtatttcagattcttcatggagaaacgcgcaaaatacgcgaagttacaccccgagatgtcaaatcttgatctgaccaagattctttcaaaaaagtacaaggagctgccggagaaaaagaagatgaaatatattcaagatttccagcgtgaaaaacaggaatttgaaaggaacttagctcggtttcgggaagaccaccccgacctgattcagaacgcaaaaaaaagtgacattcccgaaaaacctaagaccccccagcagctgtggtacactcacgagaagaaggtttatttgaaagtgcgtcccgatgagattatgagggattacatccagaagcaccccgaactcaatataagcgaggaagggattaccaagtccacactgactaaagcggaacggcagcttaaggacaaatttgatggacggcccactaaaccacctcctaattcttacagtctatattgcgccgagttgatggccaacatgaaagacgtgccttctactgagcggatggtcctgtgctctcagcagtggaaactgttgtcccagaaagagaaggatgcttaccacaaaaaatgcgatcagaagaagaaggactatgaggtagagctgctgaggtttctggagtctctgcccgaggaagagcagcagcgggtgcttggggaagaaaagatgcttaacatcaacaaaaagcaggccactagccccgcttcaaagaagcccgcacaggaggggggaaaaggcgggtccgagaagccaaagcgccctgtgtccgctatgtttattttcagcgaggagaagagaaggcagctacaggaggaaagaccagagctatccgagtcggagcttacaaggctgctggcaaggatgtggaacgatctgagtgagaagaagaaagccaagtataaggctcgggaggccgcactgaaggcacaaagcgagcgcaagccagggggggaacgagaggagcgcgggaagctgcccgagtcccctaaaagagccgaggagatttggcagcagagcgtgataggtgactacttagcacggtttaagaacgatagagtgaaagcactgaaggccatggagatgacttggaataacatggaaaagaaagagaaacttatgtggataaagaaggcagctgaggaccagaaaaggtacgagagggaattgagcgaaatgcgtgctccccctgctgcaaccaactcaagtaagaagatgaaattccaaggggaacccaaaaagcctcctatgaatggctatcaaaagttttcccaggaattgttgagcaatggcgaactgaatcacctccccctgaaggagcgaatggttgaaataggctccagatggcagaggatttctcaatctcagaaagaacattataagaagcttgctgaggaacagcaaaagcagtataaagtgcatttagacctttgggttaagagtctgagccctcaggatcgcgcggcctacaaagagtatatctcaaataagcgtaagagtatgactaagctgcggggcccgaatccaaaatccagcagaacaacccttcagtccaagtcagagagcgaggaggacgacgaggaggacgaggacgacgaagacgaggatgaggaggaagaagatgatgagaacggtgacagttcagaggacggtggagacagctcggaaagctccagcgaagatgaatccgaggacggcgatgaaaacgaggaggatgatgaagacgaggacgacgacgaggatgacgatgaggacgaagataacgagagtgaagggagctctagttcatccagtagttctggtgatagtagcgacagtgattccaattag

SEQ ID NO: 34617 - DNA, 2184 bp, Artificial Sequence
  derived and/or modified sequence
atgaatggagaggccgactgccccacagacctggagatggccgcccccaagggccaggaccgctggagccaggaggacatgctgaccctgctggagtgcatgaagaacaacctgcccagcaatgacagcagcaagttcaagaccacagagagccacatggactgggagaaggtggccttcaaggacttcagcggggacatgtgcaagctgaagtgggtggagatcagcaatgaggtgaggaagttccgcaccctgacagagctgatcctggatgcccaggagcacgtgaagaacccctacaagggcaagaagctgaagaagcacccagacttccccaagaagcccctgaccccctacttccgcttcttcatggagaagagggccaagtatgccaagctgcaccctgagatgagcaacctggacctgaccaagatcctgagcaagaagtacaaggagctgcctgagaagaagaagatgaagtacatccaggacttccagcgggagaagcaggagtttgagaggaacctggcccgcttccgggaggaccacccagacctgatccagaatgccaagaagagtgacatccctgagaagcccaagaccccccagcagctgtggtacacccatgagaagaaggtgtacctgaaggtgcggccagatgagatcatgagggactacatccagaagcaccctgagctgaacatcagcgaggagggcatcaccaagagcaccctgaccaaggccgagcggcagctgaaggacaagtttgatggccggcccaccaagcccccacccaacagctacagcctgtactgtgccgagctgatggccaacatgaaggatgtgcccagcacagagaggatggtgctgtgcagccagcagtggaagctgctgagccagaaggagaaggatgcctaccacaagaagtgtgaccagaagaagaaggactatgaggtggagctgctgcgcttcctggagagcctgcctgaggaggagcagcagagggtgctgggggaggagaagatgctgaacatcaacaagaagcaggccaccagccctgccagcaagaagccagcccaggagggcggcaagggcggcagcgagaagcccaagaggcctgtgtctgccatgttcatcttcagcgaggagaagaggcggcagctgcaggaggagaggcctgagctgtctgagagcgagctgacccggctgctggccaggatgtggaatgacctgtctgagaagaagaaggccaagtacaaggcccgggaggccgccctgaaggcccagagcgagaggaagccaggaggagagcgggaggagcggggcaagctgcctgagagccccaagagagctgaggagatctggcagcagagcgtcatcggggactacctggcccgcttcaagaatgacagagtgaaggccctgaaggccatggagatgacctggaacaacatggagaagaaggagaagctgatgtggatcaagaaggctgctgaggaccagaagagatatgaaagagagctgtctgagatgagggcccccccagctgccaccaacagcagcaagaagatgaagttccagggcgagcccaagaagccacccatgaatggctaccagaagttcagccaggagctgctgagcaatggagagctgaaccacctgcccctgaaggagaggatggtggagatcggcagccgctggcagaggatcagccagagccagaaggagcactacaagaagctggccgaggagcagcagaagcagtacaaggtgcacctggacctgtgggtgaagagcctgagcccccaggaccgggccgcctacaaggagtacatcagcaacaagaggaagtccatgaccaagctgcggggccccaaccccaagagcagcaggaccaccctgcagagcaagtctgagagcgaggaggatgatgaggaggatgaagatgatgaagatgaagatgaggaggaggaggatgatgaaaatggagacagcagtgaagatggaggagacagcagcgagagcagcagtgaagatgaaagtgaagatggagatgaaaatgaagaagatgatgaagatgaagatgatgatgaagatgatgatgaagatgaggacaatgaaagtgagggcagcagcagcagcagcagcagcagcggggacagcagtgacagcgacagcaactag

SEQ ID NO: 34618 - DNA, 2184 bp, Artificial Sequence
  derived and/or modified sequence
atgaacggcgaggccgactgccccaccgacctggagatggccgccccaaagggtcaggaccgatggtctcaggaggacatgcttactcttctggaatgcatgaagaataacctgccgtcaaacgatagttcaaaattcaaaactacggagtcacatatggactgggagaaggtggctttcaaggacttttctggagatatgtgcaagttaaagtgggtcgaaatttccaatgaagttcgcaaatttcgcacccttactgaactcattctggatgcccaggagcatgtgaagaacccttataagggaaagaagctgaaaaaacaccctgacttcccaaaaaagccactcaccccttattttaggttcttcatggagaaaagggcaaaatatgccaagttgcaccccgaaatgtccaacctggatttgaccaagattttgtcgaaaaagtataaagaactgcccgaaaagaaaaagatgaagtacatacaggattttcagagagaaaagcaagagttcgagagaaacctcgcacggttcagagaggaccacccggatctgattcagaacgctaagaaatcagacatcccggaaaaaccaaaaacacctcagcaactgtggtacacacacgagaagaaggtgtatcttaaggtcagacccgacgaaatcatgcgcgattacattcaaaaacatccagagctgaatattagtgaagaaggcattacaaaaagcacgcttacgaaggcagaacgccagttaaaagataaattcgatggcaggcccacaaagccaccacctaacagctacagcctatattgcgcggagctgatggccaatatgaaagacgtcccctccacagagagaatggtgctgtgctcacagcagtggaaattattgtcacaaaaggagaaggatgcataccacaagaaatgcgaccaaaaaaagaaggattacgaagtggagctgctcagatttttagagtcattgcccgaggaagagcagcagcgcgtcctcggtgaggagaaaatgttgaacatcaacaaaaagcaagccacttcacccgctagtaaaaagccagcccaggaggggggcaaagggggctctgagaagccaaaaaggccagtatccgcaatgtttatttttagcgaagaaaaaagaaggcagcttcaggaagagcgtccagagcttagcgaaagcgagctcacccgcctcctagctcgaatgtggaacgacctctccgaaaaaaaaaaggcaaaatacaaagcccgtgaggcagctctgaaggcccagagcgagcgcaagcctggcggggagagggaggaacgtggtaaattgccagagtctcccaagcgagccgaagaaatttggcagcagtccgtgattggcgactaccttgcccggttcaaaaacgatcgtgtgaaggcactgaaggctatggaaatgacatggaataacatggagaaaaaggagaagctcatgtggatcaaaaaggctgccgaggaccagaagcgctacgaacgcgaactgtccgagatgagggccccccccgctgccactaactcaagtaagaagatgaaatttcagggcgaaccgaagaagcctcccatgaatgggtaccagaaattctctcaagaactgctgagtaacggggagctgaaccatttgcccctgaaagaacggatggtagaaattggctctcgatggcagcgaattagtcagagccagaaggaacactataaaaagctcgcagaggaacagcagaagcagtacaaagtacacctcgacctgtgggtgaagagtctgagtcctcaggatcgcgccgcgtacaaggagtatatctcaaataagcggaaaagtatgactaagcttaggggtcccaacccaaaaagcagccgaactaccctgcagtctaagtcagagagtgaagaggatgacgaagaagacgaggatgacgaagatgaggacgaggaggaggaagacgatgagaacggagactcctcagaggacggaggtgattcatcagagagctcctccgaggacgagtcggaagatggagacgaaaatgaagaggatgacgaggacgaggatgacgatgaggacgacgatgaggatgaggataatgagtctgagggatcctcatccagcagcagttcttccggagatagctctgactccgactccaactag

SEQ ID NO: 34619 - DNA, 2184 bp, Artificial Sequence
  derived and/or modified sequence
atgaacggcgaggccgactgccccaccgacctggagatggccgcccccaagggtcaggaccggtggtcccaagaagacatgctaacattgttagagtgcatgaaaaacaatctgcccagtaatgattcaagcaagtttaagacgacagaatcacacatggattgggagaaggttgctttcaaggatttctctggagacatgtgtaaactgaaatgggtcgaaatcagcaatgaagtgcgcaagtttcgtacattaacagagctcatcttagacgcccaggaacatgtgaagaacccttacaagggaaaaaaattaaaaaaacatcccgatttccccaagaaacctttgaccccctacttccggttcttcatggagaagagagctaaatatgcaaaactccaccccgagatgtccaatctggatcttaccaaaatactctcaaagaaatataaagagctccctgagaagaaaaagatgaagtatatccaggattttcagcgcgaaaagcaggagttcgagcgaaacctagccaggttccgcgaagaccaccccgacctgattcagaatgccaaaaagagtgacatcccagagaagcccaaaaccccccagcagctttggtatacacacgaaaaaaaggtatacctcaaggtgcgtccggatgaaatcatgcgcgattatatccagaagcaccctgagctcaacatctcagaagaggggattaccaaatctacattgacaaaagccgaacggcagcttaaagataagttcgatggccgccctaccaaaccaccaccaaacagctactccctgtactgtgccgagttgatggcgaatatgaaggacgtgccctcaacggaaaggatggtcctctgctcccaacaatggaaactgctctcccagaaagagaaagatgcttatcataagaaatgtgatcagaagaaaaaggactatgaagttgaactgctgcgtttcctggaatcccttccggaagaggagcagcaacgggttctgggcgaagaaaagatgttaaatatcaataagaagcaggcaacgagtcctgcatctaaaaaacctgcccaggagggtggaaaagggggctccgagaagcctaaaagacctgtttctgccatgtttattttctccgaggagaagcggcggcaattgcaggaggagaggcctgagctctctgagagtgaattaacaaggcttctcgcccgaatgtggaatgatttgagtgaaaaaaaaaaagcaaagtataaagccagggaagccgcactgaaagcacagtctgaaagaaaaccgggcggggagcgggaagaacgcggaaaactgcccgaaagccctaaaagagcagaggagatctggcagcagagcgtcatcggtgactacctggccagattcaagaacgaccgtgttaaagccctgaaggccatggagatgacatggaataatatggagaagaaggagaagctgatgtggattaaaaaggctgcagaagatcaaaagaggtacgagcgcgaactgtccgagatgcgtgcaccccctgccgccacgaattccagcaagaagatgaaattccaaggggaaccaaaaaagccgcccatgaacggatatcagaaattttcccaggaactgctcagcaatggtgaacttaatcatctgccactgaaggaaaggatggttgagatcggctcacgctggcagagaatctcacagagccagaaagagcactacaaaaagctggcagaggaacaacagaaacagtacaaagtccacctcgatctgtgggtcaagtccttaagccctcaggatcgggcagcttacaaggagtacatcagtaataagcgaaagagcatgactaaattacggggccccaaccctaaaagttcacgcaccactctgcaatcgaaaagcgaaagcgaggaggacgatgaagaggacgaagacgatgaagatgaggatgaggaggaagaggatgacgaaaacggcgactcttctgaggacgggggtgactcatcagaatcctcttctgaagatgaatctgaggacggcgacgagaacgaggaggatgacgaagatgaggacgacgatgaggacgatgatgaggacgaggacaacgagtcagagggctcttctagttcgtccagctcatctggagattcatcagatagtgattctaactag

SEQ ID NO: 34620 - DNA, 2184 bp, Artificial Sequence
  derived and/or modified sequence
atgaacggcgaggccgactgccccaccgacctggagatggccgcccctaagggccaagacagatggagccaggaggatatgcttacactgctagagtgtatgaagaacaacctgccgagtaatgattccagcaaattcaagaccacggaatcacacatggattgggagaaggtcgccttcaaggactttagtggcgatatgtgcaaactgaagtgggtcgagatctctaacgaggtgagaaaattccgcaccttgaccgaactgatccttgatgctcaggagcacgtaaagaacccttataaaggcaaaaaactaaagaagcacccagactttcctaaaaagccgctcactccgtacttccgattttttatggagaagagggccaaatatgcaaaactccaccctgaaatgtctaatctggacctgacgaagatcctgagcaagaaatataaggagcttcccgaaaagaaaaagatgaagtacatccaagactttcaaagagaaaaacaggagttcgagcgaaacttggctcgatttcgcgaagatcaccccgatctgattcagaatgccaagaaatctgacattccagagaagcccaaaaccccgcagcagttgtggtacacccatgagaagaaagtctacctcaaagttaggcctgacgagataatgcgggattatatccaaaaacaccccgagcttaacatatccgaggaaggaatcactaagagcaccctgaccaaggctgagcgtcagctcaaagataagttcgacggtcggccaacaaagcctccaccaaactcttactctctctactgcgcggagttaatggccaacatgaaggacgtcccaagtaccgagagaatggtgctttgctcccaacagtggaagcttttgtcacagaaggaaaaggacgcttatcataagaagtgcgaccaaaagaaaaaagattatgaggtcgagctcctgaggtttctggaatctctccccgaagaagaacagcaacgcgttctaggagaggagaagatgctgaatatcaacaaaaagcaggcaacatcccccgccagtaagaagccggctcaggagggcggtaaaggcgggtccgagaaaccaaaacggcccgtgagcgcaatgttcattttctcggaggaaaaacgacgacaattgcaggaggagagacctgagctctccgagtccgagttaaccaggctgttggcgaggatgtggaacgacctgtccgagaagaaaaaagccaagtacaaagcgcgcgaggcagctcttaaggcacagagcgagcggaagccgggcggcgagcgtgaagagcgcggtaagctgccggagtccccgaaacgtgccgaagagatctggcagcagagtgtcatcggcgattatctagcccggtttaagaacgaccgcgttaaggccttgaaagctatggaaatgacatggaataatatggaaaaaaaggagaaactgatgtggattaaaaaggcggcggaggaccagaagaggtacgagagagagctttccgaaatgcgggcacctccggcagcaaccaattcctctaagaagatgaaatttcaaggtgagcctaaaaaacctcccatgaacggttatcagaagttttcccaggagttgctgagtaacggggagctcaaccacctcccgctgaaggaacggatggtggagattggttctagatggcaaaggattagccaatcgcagaaagagcactacaaaaaactggcagaagagcagcaaaagcagtacaaagttcatctcgacctctgggtgaagtccctgtcaccccaggatagggccgcttataaggagtatatctcaaataagcgaaaatctatgactaagttgcgagggcctaaccccaaatcgtcaaggacgacgctgcagtccaaatcggagagtgaggaagacgatgaagaggatgaggatgacgaagacgaggatgaggaagaggaagacgacgaaaatggggactcatctgaagacggtggcgattcctccgaatcatcatccgaagacgagagcgaggacggggacgagaacgaggaggacgacgaggacgaagatgatgacgaggatgatgacgaagatgaagacaatgagtcggaggggtcaagctcaagtagctcttctagcggcgatagttccgatagcgactccaattag

SEQ ID NO: 34621 - DNA, 2184 bp, Artificial Sequence
  derived and/or modified sequence
atgaacggcgaggccgactgccccaccgacctggagatggccgccccgaagggccaggataggtggagccaggaggacatgttaaccctgctcgagtgcatgaagaataatctgccttcaaatgactcctcaaaatttaagacaacagagtcacatatggattgggagaaggttgcatttaaggatttctcaggtgatatgtgcaaactcaaatgggtcgagatatcaaacgaggtgcggaaattccgcacattaactgagctgatactggatgcccaggaacatgttaagaatccctataaaggcaagaaattgaaaaagcatcccgacttcccaaagaaacctctgacaccctacttcaggttcttcatggagaagagagccaagtatgcaaaactccatcctgagatgtcaaaccttgacctcacaaagatattaagcaagaaatacaaagaacttcctgaaaaaaaaaaaatgaagtatattcaggattttcagagagagaagcaggaatttgagaggaatctggcccgatttcgcgaggaccaccctgatctgatccagaatgcgaaaaaatcagacattccggagaagcctaagacgccccagcagctgtggtacacacacgagaaaaaggtatatctgaaagttcgacccgatgagataatgagagattatattcaaaagcatcctgagctcaacatcagcgaagaaggcataacaaaatctactctgacaaaggctgagagacagctcaaagataaatttgatggcagacctactaaaccgccaccaaacagttatagtctttactgtgctgaactgatggccaatatgaaggatgtgccttcaaccgagaggatggtactgtgctcacagcagtggaaactcttgagccagaaagagaaggatgcttaccacaaaaagtgcgatcagaagaagaaggattacgaggtagaactgctccggtttctagagtccctgccggaagaggagcagcagagagtcctgggagaagagaagatgctgaatattaacaaaaaacaggctacaagccccgcatcaaagaagcccgcccaggagggcggcaagggaggtagtgagaagcctaaaaggccagtgtctgccatgtttattttttcagaggaaaaaagaaggcaactgcaagaggaaagaccagagctgagcgagtccgagctgacaagactgctcgcgcgtatgtggaatgacttgagtgaaaagaaaaaagccaagtataaggcgagggaggcagcactgaaggcacagagcgagagaaagccgggcggggagagagaggagagaggcaagctgcctgagtcccctaagcgggccgaagaaatatggcagcagtccgtaattggagactacctggccagattcaagaacgatagggtgaaggctctgaaagcaatggaaatgacctggaacaacatggaaaagaaggagaaacttatgtggatcaagaaggcagccgaggatcaaaagagatatgagcgtgaactctcggaaatgcgggcaccgccggccgcaaccaacagctcaaaaaagatgaagttccagggcgagccgaaaaaacccccaatgaacggataccagaagttttctcaggagttactctcaaacggtgaactgaaccacctacccctgaaggaaagaatggtcgagattggaagccggtggcagagaatttcccagtctcagaaagagcactacaaaaaactggcagaggaacagcaaaaacagtataaggtgcacctcgacctctgggtgaaatcgctcagtccacaggatagagctgcctacaaagaatacatctccaacaaacgcaaatcgatgaccaagctccgcgggcctaacccaaagtcctcccgaaccaccttacaatccaagtccgaatcagaggaagatgacgaggaagatgaggatgacgaggacgaagacgaggaggaggaagacgacgagaacggcgactcttctgaagatggaggcgacagctccgaaagctccagtgaagacgaaagcgaggacggggacgaaaacgaggaggatgacgaagatgaagatgacgatgaggatgatgacgaagacgaagataacgagtcagaaggttcgagtagcagctcatcttcatccggagattcatcagattccgacagtaactag

SEQ ID NO: 34622 - DNA, 2184 bp, Artificial Sequence
  derived and/or modified sequence
atgaatggcgaagccgattgcccaaccgatctcgaaatggccgctcctaagggtcaggatcgatggtcacaggaggacatgctgaccctactagagtgcatgaaaaataatctaccgtctaatgatagcagcaagtttaaaaccaccgagtcacatatggactgggaaaaagtagcctttaaggatttttcgggcgatatgtgtaaactcaaatgggtggagatttctaacgaggtgcgcaaattccgaacactgactgaactcatactcgacgcacaagagcatgtcaagaacccgtacaaaggtaaaaagctgaagaagcaccctgacttccccaagaaaccgctcacaccgtattttcgattctttatggagaaaagggcaaaatatgcaaaactgcaccccgaaatgtctaacctggacctgaccaaaatattatctaagaagtataaagaactgcctgagaagaagaagatgaaatatatccaggattttcagagagagaagcaagaatttgaacgaaatctggcaaggtttcgcgaggaccatccagacctcatacagaatgccaagaaatccgacattcctgagaagccaaagacaccccagcaactgtggtacacacacgagaagaaagtgtatctgaaagtgcggccagatgaaataatgcgagactacattcagaaacatcctgaactgaatatctccgaagaggggatcacaaaatcaaccctgacaaaggcagagagacaactgaaagacaaattcgacggcagaccaaccaaacccccacccaactcttactcactctactgcgcagaacttatggctaacatgaaagacgttccctccaccgagcgaatggttctatgcagccagcagtggaagcttctaagtcaaaaagagaaggacgcgtaccataaaaaatgcgaccagaagaaaaaagattatgaggtggagttgcttcgctttctggagagcctccctgaggaggagcaacagcgggtcctgggagaggagaagatgcttaacatcaataagaagcaggcaacatcgcccgcatctaaaaaaccggctcaggaaggcggaaagggcggtagtgagaagcccaagaggcccgtgagcgctatgtttatattctctgaagagaagcgtagacaactccaggaggaacgtccagagctgtctgagtcggagctgaccagactactggcacgcatgtggaacgacttgagcgaaaaaaaaaaggcgaaatataaagcgagggaggcagccctgaaagcacagtcagaaaggaaacctggcggagaacgtgaagaaagaggcaagctgccagagagtcccaagcgcgctgaggaaatctggcagcagagcgttatcggagactaccttgcacggttcaagaacgatagagtgaaggcgctcaaggcaatggaaatgacctggaacaatatggaaaagaaagaaaagttgatgtggatcaaaaaggccgcagaagaccaaaagcgctatgaacgggaactcagcgagatgagagcccctcctgctgccactaattcttccaagaaaatgaagttccagggcgagcctaaaaagccacctatgaacggttaccagaagtttagtcaggaactgctgtccaatggcgagctgaatcacctgcccctgaaggagagaatggtggaaattgggtctcgctggcagagaatatctcaaagccagaaagagcattacaagaaactggctgaggaacagcagaagcagtataaggtgcacctggacctgtgggtgaaaagcttaagcccccaggaccgagctgcttacaaagagtatatctcgaataaacggaagtcaatgaccaaattgcggggacccaacccaaagtcctccagaaccactctccagtctaagagcgagtccgaggaagatgacgaggaagatgaggacgacgaagatgaggacgaggaggaagaagacgatgagaatggtgatagtagcgaagatggcggagactcgtccgagtcaagctccgaagatgagagtgaggacggtgacgaaaacgaagaagacgacgaagatgaggacgatgatgaggacgacgacgaggatgaagacaacgaatctgagggttcttccagttcatccagcagtagcggagattcttcggattctgacagcaactag

SEQ ID NO: 34623 - DNA, 2184 bp, Artificial Sequence
  derived and/or modified sequence
atgaacggcgaggctgactgtccaacagatctcgaaatggcagcgcctaaaggccaagatcgctggagccaggaggacatgctgaccctgctcgagtgcatgaaaaacaatcttccctccaacgattcaagtaaattcaagacgacagaatctcacatggactgggaaaaggtggcctttaaagatttttcgggggacatgtgcaagctcaagtgggtggagatcagcaatgaggtccgaaagtttcggactttaacagagttgatcctagatgctcaagaacacgtgaaaaacccctataaaggcaagaagctcaagaaacacccggactttcccaagaagccactgaccccttattttcgattcttcatggagaaaagagctaagtacgctaaacttcatcccgaaatgtccaacctagatcttactaaaattttgtcaaagaagtacaaagaactgcctgaaaagaaaaaaatgaaatacattcaggacttccagagagagaaacaggaattcgagaggaatctggctagattcagggaggatcatcccgatctgatacagaatgccaaaaagtctgatattccagaaaagcccaagacccctcagcaactgtggtacacacacgagaaaaaggtgtatctcaaagtcaggcctgacgagataatgagggactacatccagaagcatcctgaactgaacatttctgaagaagggattactaaatctactctgaccaaggccgagcgccaattaaaagacaagttcgatgggaggcctacaaaaccgcctcctaactcttacagcctgtattgtgcggaactcatggccaatatgaaagacgttcctagcacagagagaatggtgttatgttcccagcaatggaagctgctgtcgcagaaagaaaaagatgcttatcacaaaaagtgtgatcaaaagaaaaaggactatgaggtggaactgctgcggtttctagagagcctaccggaggaggaacagcaaagagtactcggggaagagaagatgctgaatattaacaaaaaacaggccacatctccagcctccaaaaagcccgctcaggagggtggtaagggaggttctgaaaagcccaagcgccctgtttccgccatgtttattttctctgaggagaagcggaggcagctgcaggaagagcggcctgagcttagcgagtctgagctaacaaggttacttgcacggatgtggaacgacttaagtgagaagaagaaggctaaatacaaggccagggaggcagcacttaaggcccagtcggagagaaaaccaggtggtgagcgcgaagagagggggaagctccctgagagtcccaagcgggctgaggagatttggcagcaatctgtgatcggagactatctcgcacggtttaaaaatgatagggtcaaggccctgaaggcaatggaaatgacctggaataacatggaaaagaaggagaagctgatgtggattaaaaaggccgcagaggatcagaaaaggtacgaaagggaactctctgagatgcgagccccaccggcagcaacaaattcttctaagaagatgaagttccagggcgagcccaaaaagcccccaatgaatggctaccagaaattctcacaagagctcttgagtaacggagagttgaatcatctgcctcttaaagagcggatggttgagatcgggagcagatggcagcgcatttcacagtcacagaaagagcattacaagaagttagcggaagagcaacagaagcagtacaaagtccacttggacctgtgggtcaaatcactgtccccacaggaccgtgctgcttataaagagtacatctccaataaacggaaaagcatgacgaaattgcgcggacccaaccccaaatcgagtcggacaacactgcaaagcaagtctgaaagcgaggaagatgacgaagaggacgaggatgatgaggatgaggatgaagaggaagaagatgacgaaaatggcgactctagcgaggatggtggtgacagcagcgagagctcaagtgaagacgagtctgaagatggcgatgagaacgaggaagacgacgaagacgaagacgatgacgaggatgatgatgaggacgaggataatgagtcagaaggcagtagcagctcatcaagtagtagtggggattcttccgactctgatagcaactag

SEQ ID NO: 34624 - DNA, 2184 bp, Artificial Sequence
  derived and/or modified sequence
atgaatggcgaagccgattgcccgacagatttggagatggctgcacccaaaggacaggatcgatggtcccaagaagatatgctcactttactggaatgtatgaaaaacaatttaccttcgaatgattcctcaaaatttaaaaccacggagtctcacatggattgggagaaggtagcattcaaggatttttcaggggatatgtgtaagctgaaatgggtggaaattagtaatgaagtgaggaagttccgaacgctgactgagttaatactggatgcccaggagcacgtcaagaacccttataaaggcaagaaactgaaaaagcacccggacttccccaaaaaacccctgactccctatttccgattctttatggagaagagggcgaagtatgccaagctacatcccgagatgtccaatctcgacttgaccaagatcctgagcaagaaatataaggaacttccagaaaagaagaagatgaaatacatccaggattttcaacgcgagaaacaggaatttgaaagaaacctggctcgttttagggaagaccatcccgatctgatccagaatgctaaaaagtctgacatcccagagaaacctaaaaccccccaacaattatggtacactcatgagaagaaggtgtacctgaaagtgcgcccagatgaaattatgcgcgactacattcaaaagcatcctgagttgaatatctccgaagaaggcatcaccaagagcactctgacgaaggctgaaagacagttgaaggacaaatttgatggccgacccacaaagccccctccgaatagctactccttgtactgtgcagaactgatggccaatatgaaggatgtgcctagcaccgaacggatggttctttgcagccagcagtggaagctgctttcccagaaggagaaggacgcataccataaaaagtgcgatcagaagaagaaggactatgaagtggaactgttacggtttctcgaatcgctgcctgaagaggagcagcaacgggtgctgggagaggaaaaaatgcttaatattaataaaaagcaggccacatcgcccgcttccaagaagccagcccaggagggaggcaaaggcggttcagagaagccaaagcggcctgttagcgctatgtttattttcagtgaagaaaaacggcgacagctgcaggaagaaaggccagaattaagcgagagcgaacttactcggctgctggccaggatgtggaacgatctgtccgaaaagaagaaggctaagtacaaggctagggaagccgcattaaaggctcagtctgaacgcaagcccggtggtgaacgcgaggaaagaggtaaacttcctgagagcccaaaaagggcagaggagatctggcagcaaagcgtcataggtgactatctggctagattcaaaaatgatcgagtgaaggctcttaaggccatggaaatgacgtggaacaacatggaaaaaaaagagaagctgatgtggatcaagaaggctgctgaggatcaaaagcggtatgagcgtgagctgtccgagatgagagccccacccgcagccaccaattcgagtaaaaagatgaaattccagggagaacccaagaagcccccaatgaatggatatcagaagttttcccaggagctactgtcaaatggggaactcaatcacctacccctcaaagaacgcatggtcgagatcggaagtcggtggcagcgtattagtcagagtcagaaagagcattataagaagctcgccgaggaacagcagaagcagtataaagtgcacctggacctctgggttaaaagtctctctcctcaggaccgtgccgcatataaagaatacatctctaacaagcgtaaatctatgacaaagctgaggggaccgaatccaaaatccagccgcacaactctgcagtccaagtcggagagcgaggaggacgacgaagaggacgaagacgacgaggacgaagacgaagaagaagaagatgacgagaacggagattcctcagaggatggtggagattcttccgaaagcagttctgaagacgaatcagaggatggtgacgagaatgaggaggacgacgaggatgaggacgatgacgaagacgacgacgaagacgaagacaacgagagtgaggggagttctagcagtagtagttcatcaggtgacagtagcgattctgatagcaactag

SEQ ID NO: 34625 - DNA, 2184 bp, Artificial Sequence
  derived and/or modified sequence
atgaacggtgaagccgattgccccaccgaccttgagatggctgcgccaaaaggccaggaccgatggtctcaggaggacatgctgacactcctggagtgcatgaagaacaacctgccctccaatgactcatctaaattcaagacgaccgagtcccacatggattgggagaaggttgcatttaaagacttcagcggagatatgtgcaagctcaagtgggtagagatctccaacgaggtcagaaaattccggacactcactgaacttattctggatgcacaggagcatgtcaaaaacccatataaaggtaagaagctcaaaaaacacccagatttccctaagaagccgttaaccccatacttcaggttcttcatggagaagcgagcgaaatatgccaagctgcaccccgagatgagcaatctggacctcacaaaaatactgagcaagaagtataaagagcttccagaaaagaaaaagatgaaatatattcaggattttcaacgggagaagcaagagttcgagaggaatctggccaggtttcgtgaggatcatccagacctcatccagaatgccaagaaaagtgacatccctgagaaacctaagacacctcagcagctatggtacactcacgaaaagaaggtttacctgaaagttaggccggacgagataatgagggactatatccagaagcaccctgagctcaatatttcagaggagggtattacaaagtccaccctgactaaagctgagaggcaacttaaggacaagttcgatgggcgacctacaaagcctcctcccaattcatatagcctttactgcgcagagctcatggccaatatgaaagatgtcccttccactgaaaggatggtgttgtgcagtcagcaatggaagctgctgtctcagaaggaaaaagatgcttatcacaagaaatgtgatcagaagaaaaaggattacgaagtcgaactcctcaggttcctagagagcctgccagaggaagaacagcaacgggtgctgggggaggagaagatgctaaacatcaataaaaaacaggcaacaagccccgcttccaagaaacccgctcaggagggtgggaaaggcggatcagagaagccaaagagaccagtgtctgccatgttcatctttagcgaagaaaaacgacgtcagctccaagaggaaaggcccgaacttagtgaatctgaactgactagactcctggctagaatgtggaacgacctgtctgagaagaaaaaagctaagtacaaagccagagaggccgcactaaaggcccaaagcgaaagaaagcccggtggagaaagagaggaaagaggaaagctgcccgagtcaccaaaacgggctgaggagatctggcagcagagtgtcattggagactatctagcacgatttaaaaatgaccgggtgaaagctctaaaagctatggaaatgacctggaataacatggaaaagaaggaaaaactgatgtggatcaaaaaagcggcagaagaccaaaaaagatacgagcgggagctgtcagaaatgcgggctccaccagctgccaccaactcatctaagaagatgaagtttcaaggagagcccaagaagcctcccatgaatggttatcagaagttttctcaggagctgctgagcaatggcgaactaaaccacttgccacttaaggagagaatggtcgagatcggctccagatggcagcgaataagccagtctcagaaggaacactataaaaagttagcagaagagcagcagaagcagtacaaagtccatttggatctctgggtgaaatccctgtcgccacaggatcgagcggcttacaaagagtacatctccaacaagcgaaagagcatgacgaaactgcgaggaccaaaccccaagagctctagaaccactcttcagtccaagtcggagtcagaggaggacgatgaagaggatgaagatgacgaggacgaggacgaagaagaggaagatgatgagaacggcgattcttctgaggatggcggagatagtagcgaatcaagctctgaggacgagtcagaagacggcgatgaaaatgaggaggatgacgaagacgaggatgacgacgaggacgacgacgaagatgaagataatgagtctgaggggagctcatcttcctcatctagctcaggggattcctctgattctgactcaaattag

SEQ ID NO: 34626 - DNA, 4684 bp, Artificial Sequence
  derived and/or modified sequence
cggagcggcgctgcgctgcgccgaggcgggcgggcgggcgggcggagcggggcgggcggagcgcggcgcgtggggctcgccattagccgtcgctccgcttcgccatctcgggctttgtctggcgactcgctgccccggcgtcggctgcagcggagctgcggctcgactgttcggcccgccgtgctcccaggtgcccccggcctgcgctcccatccacacgctcgggtgaggtggctttgaccccgggttgcccggccagcacgaccgaggaggtggctggacagctggaggatgaacggagaagccgactgccccacagacctggaaatggccgcccccaaaggccaagaccgttggtcccaggaagacatgctgactttgctggaatgcatgaagaacaaccttccatccaatgacagctccaagttcaaaaccaccgaatcacacatggactgggaaaaagtagcatttaaagacttttctggagacatgtgcaagctcaaatgggtggagatttctaatgaggtgaggaagttccgtacattgacagaattgatcctcgatgctcaggaacatgttaaaaatccttacaaaggcaaaaaactcaagaaacacccagacttcccaaagaagcccctgaccccttatttccgcttcttcatggagaagcgggccaagtatgcgaaactccaccctgagatgagcaacctggacctaaccaagattctgtccaagaaatacaaggagcttccggagaagaagaagatgaaatatattcaggacttccagagagagaaacaggagttcgagcgaaacctggcccgattcagggaggatcaccccgacctaatccagaatgccaagaaatcggacatcccagagaagcccaaaaccccccagcagctgtggtacacccacgagaagaaggtgtatctcaaagtgcggccagatgagatcatgagagactatatccagaagcacccagagctgaacatcagtgaggagggtatcaccaagtccaccctcaccaaggccgaacgccagctcaaggacaagtttgacgggcgacccaccaagccacctccgaacagctactcgctgtactgcgcagagctcatggccaacatgaaggacgtgcccagcacagagcgcatggtgctgtgcagccagcagtggaagctgctgtcccagaaggagaaggacgcctatcacaagaagtgtgatcagaaaaagaaagattacgaggtggagctgctccgtttcctcgagagcctgcctgaggaggagcagcagcgggtcttgggggaagagaagatgctgaacatcaacaagaagcaggccaccagccccgcctccaagaagccagcccaggaagggggcaagggcggctccgagaagcccaagcggcccgtgtcggccatgttcatcttctcggaggagaaacggcggcagctgcaggaggagcggcctgagctctccgagagcgagctgacccgcctgctggcccgaatgtggaacgacctgtctgagaagaagaaggccaagtacaaggcccgagaggcggcgctcaaggctcagtcggagaggaagcccggcggggagcgcgaggaacggggcaagctgcccgagtcccccaaaagagctgaggagatctggcaacagagcgttatcggcgactacctggcccgcttcaagaatgaccgggtgaaggccttgaaagccatggaaatgacctggaataacatggaaaagaaggagaaactgatgtggattaagaaggcagccgaagaccaaaagcgatatgagagagagctgagtgagatgcgggcacctccagctgctacaaattcttccaagaagatgaaattccagggagaacccaagaagcctcccatgaacggttaccagaagttctcccaggagctgctgtccaatggggagctgaaccacctgccgctgaaggagcgcatggtggagatcggcagtcgctggcagcgcatctcccagagccagaaggagcactacaaaaagctggccgaggagcagcaaaagcagtacaaggtgcacctggacctctgggttaagagcctgtctccccaggaccgtgcagcatataaagagtacatctccaataaacgtaagagcatgaccaagctgcgaggcccaaaccccaaatccagccggactactctgcagtccaagtcggagtccgaggaggatgatgaagaggatgaggatgacgaggacgaggatgaagaagaggaagatgatgagaatggggactcctctgaagatggcggcgactcctctgagtccagcagcgaggacgagagcgaggatggggatgagaatgaagaggatgacgaggacgaagacgacgacgaggatgacgatgaggatgaagataatgagtccgagggcagcagctccagctcctcctcctcaggggactcctcagactctgactccaactgaggctcagccccaccccagggcagccagggagagcccaggagctcccctccccaactgaccacctttgtttctcccccatgttctgtcccttgcccccctggcctcccccactttctttctttctttaaaaaaaaaaaaaaatacggtgggggtagggggctggaggagcccaggccaggactctgcagcctcagagacatcagcccttgggggtcctcctccagggacagcaactatcagactaagccagcaccggaccagcctggcccaccccacccacttctgcacttgcggttccggcatggacaatggaccggagagtgggggtggggggtcccaaagagtttgatgaggccctccacacctgcggcccaatccaaggtggggtggaagcttggggaagacccattccttcccagaggggcctgccacctggacccctgcattggaactggaggcagggaacatggggaggaggagggtcggtgccttcaagaaaacaggcactgccctggtggccctctcccctgccccctgcaggaaggagctgcctggacccgttcatgggggagggggcagaagtgttttttatatatgtgtatatatttttttttaagctctgagctgtcaacgagacgtttcctaccgatctcggctgccgtctctgttgtcatttctgggagagggagggtttaggggtagatttggaaccttttaaaaatggtcttgatgtatgtggaagagagtatgtgtatgtgtgttcctgtacatagcatgggtgcagctgtggatgtgtgcaaaagagtgtgagtgtgtgtgtgtgtgtgtaaaggggtctgtcctagagcccacatcagtttgttgtgaatctggaaaaagggtcggtgagggccgggagatgttgaccctggtgggagcaggctgaggctgccccgttctccacatcctctgttttgcccagtctctgattccattagggggagtgtgctgaagccattctcggatgcttcccagaccaggctccctctgccagagtcacatgcatccgagctgctggtctccattgtccagcaggaaggcggaaaggcaggcaagatggtgtgaagcttaaagcttgtatttgatggaaaaggtctcccctgttcatctgagaggccaagcctggccaccccaggctcagaacctgggcttcaagaaatgtgctgggagctcctaacttacacatccctccagccttccttgaatcctcccaccaccccctatttcctttaatttctcaggtctgctccctcctcccccaaccccacagctgggcaagaagtctgcaaaagctgcatctgcagctgtctctaactcttcccagccatctcccgtattttttggtaccttgattccttgactcttaataagccaagccaccttatctctgtagttcttatttttttgttgactaaatttggggggttcttttttatggtcatgtcactgacctattaaattggggcttggtgcttttccaccttccccctctgaatgaaagccaaggaatgggggaagagcgggaactctgccgcggaggtggagcaagaacggtgaagggccctggtcccagagaggctggtgggtccctctcccaaaggaaggcagacagtctctgctttgccttggaccttggtgctgggggtggggaggcctgggggggacactccccactcccattccccttcctttgtcctaatcctggaattaagtacaggggtttataggttctatttcttcccaagagccctgcaaagaaccccagtttcctatttggatgcccctacactgttgtgtttcagtggaatgtattttcatttaaaaacaactttgaatggggcactttttctttcctgttttaaaaattgaaaaattcttacagtacaaacaggactgtcagggtgggggtgttggtgctgtaagaggtcactcttgagtgcattttggcactgggatgggatggctggggtgggaagacccccatccccacccccaacttcttttctaatatttaaggagtgttttgtaggattcaacaaccaccacaacttgaatttgtatcatgggaggtgggagggagtggcttagaggtgtctgcctatgcttaaagccaactgtggaagttttgttttcccttttttgtataataaagtgaaaaacaaaggtttga

SEQ ID NO: 34627 - DNA, 2683 bp, Artificial Sequence
  derived and/or modified sequence
gcggcggggggtgtgcgagctgaggccggggccggcggcgggcgggctgcctgcaggcggagggcgctgtgctttgtgcttttcgccgcgaggagcagcaggcagcagccacagccgccgccgccgccgccgccgccacagcagcagcagccgccgccccagcgccgccgcctcgcccggaggaggagccgctgccgccgcgggagggagctgcggctgtgcccggccgagcgggggagggcgccgccactcagagccagggagggagccgctggagcgggaagcccggaggccgcgctgcgccggggtgaggtggctttgaccccgggttgcccggccagcacgaccgaggaggtggctggacagctggaggatgaacggagaagccgactgccccacagacctggaaatggccgcccccaaaggccaagaccgttggtcccaggaagacatgctgactttgctggaatgcatgaagaacaaccttccatccaatgacagctccaagttcaaaaccaccgaatcacacatggactgggaaaaagtagcatttaaagacttttctggagacatgtgcaagctcaaatgggtggagatttctaatgaggtgaggaagttccgtacattgacagaattgatcctcgatgctcaggaacatgttaaaaatccttacaaaggcaaaaaactcaagaaacacccagacttcccaaagaagcccctgaccccttatttccgcttcttcatggagaagcgggccaagtatgcgaaactccaccctgagatgagcaacctggacctaaccaagattctgtccaagaaatacaaggagcttccggagaagaagaagatgaaatatattcaggacttccagagagagaaacaggagttcgagcgaaacctggcccgattcagggaggatcaccccgacctaatccagaatgccaagaaatcggacatcccagagaagcccaaaaccccccagcagctgtggtacacccacgagaagaaggtgtatctcaaagtgcggccagatgagatcatgagagactatatccagaagcacccagagctgaacatcagtgaggagggtatcaccaagtccaccctcaccaaggccgaacgccagctcaaggacaagtttgacgggcgacccaccaagccacctccgaacagctactcgctgtactgcgcagagctcatggccaacatgaaggacgtgcccagcacagagcgcatggtgctgtgcagccagcagtggaagctgctgtcccagaaggagaaggacgcctatcacaagaagtgtgatcagaaaaagaaagattacgaggtggagctgctccgtttcctcgagagcctgcctgaggaggagcagcagcgggtcttgggggaagagaagatgctgaacatcaacaagaagcaggccaccagccccgcctccaagaagccagcccaggaagggggcaagggcggctccgagaagcccaagcggcccgtgtcggccatgttcatcttctcggaggagaaacggcggcagctgcaggaggagcggcctgagctctccgagagcgagctgacccgcctgctggcccgaatgtggaacgacctgtctgagaagaagaaggccaagtacaaggcccgagaggcggcgctcaaggctcagtcggagaggaagcccggcggggagcgcgaggaacggggcaagctgcccgagtcccccaaaagagctgaggagatctggcaacagagcgttatcggcgactacctggcccgcttcaagaatgaccgggtgaaggccttgaaagccatggaaatgacctggaataacatggaaaagaaggagaaactgatgtggattaagaaggcagccgaagaccaaaagcgatatgagagagagctgagtgagatgcgggcacctccagctgctacaaattcttccaagaagatgaaattccagggagaacccaagaagcctcccatgaacggttaccagaagttctcccaggagctgctgtccaatggggagctgaaccacctgccgctgaaggagcgcatggtggagatcggcagtcgctggcagcgcatctcccagagccagaaggagcactacaaaaagctggccgaggagcagcaaaagcagtacaaggtgcacctggacctctgggttaagagcctgtctccccaggaccgtgcagcatataaagagtacatctccaataaacgtaagagcatgaccaagctgcgaggcccaaaccccaaatccagccggactactctgcagtccaagtcggagtccgaggaggatgatgaagaggatgaggatgacgaggacgaggatgaagaagaggaagatgatgagaatggggactcctctgaagatggcggcgactcctctgagtccagcagcgaggacgagagcgaggatggggatgagaatgaagaggatgacgaggacgaagacgacgacgaggatgacgatgaggatgaagataatgagtccgagggcagcagctccagctcctcctcctcaggggactcctcagactctgactccaactgaggctcagccccaccccagggcagccagggagagcccaggagctcccctccccaactgaccacctttgtttctcccccatgttctgtcccttgcccccctggcctcccccactttctttctttcttt

SEQ ID NO: 34628 - DNA, 2459 bp, Artificial Sequence
  derived and/or modified sequence
gcggagccgggctgcaggggctgggggagggggtcacgaggaagaggaggggcgcactcccattcccatagaccccttaagtctaataaggtcatggctgagtctctcagagtgtggacctgcccccttctactctgggcggttagaaagtcgttagtcgttcacctctcagccttcctgagtgggaactggtatgtcttccaaagggtgaggtggctttgaccccgggttgcccggccagcacgaccgaggaggtggctggacagctggaggatgaacggagaagccgactgccccacagacctggaaatggccgcccccaaaggccaagaccgttggtcccaggaagacatgctgactttgctggaatgcatgaagaacaaccttccatccaatgacagctccaagttcaaaaccaccgaatcacacatggactgggaaaaagtagcatttaaagacttttctggagacatgtgcaagctcaaatgggtggagatttctaatgaggtgaggaagttccgtacattgacagaattgatcctcgatgctcaggaacatgttaaaaatccttacaaaggcaaaaaactcaagaaacacccagacttcccaaagaagcccctgaccccttatttccgcttcttcatggagaagcgggccaagtatgcgaaactccaccctgagatgagcaacctggacctaaccaagattctgtccaagaaatacaaggagcttccggagaagaagaagatgaaatatattcaggacttccagagagagaaacaggagttcgagcgaaacctggcccgattcagggaggatcaccccgacctaatccagaatgccaagaaatcggacatcccagagaagcccaaaaccccccagcagctgtggtacacccacgagaagaaggtgtatctcaaagtgcggccagatgagatcatgagagactatatccagaagcacccagagctgaacatcagtgaggagggtatcaccaagtccaccctcaccaaggccgaacgccagctcaaggacaagtttgacgggcgacccaccaagccacctccgaacagctactcgctgtactgcgcagagctcatggccaacatgaaggacgtgcccagcacagagcgcatggtgctgtgcagccagcagtggaagctgctgtcccagaaggagaaggacgcctatcacaagaagtgtgatcagaaaaagaaagattacgaggtggagctgctccgtttcctcgagagcctgcctgaggaggagcagcagcgggtcttgggggaagagaagatgctgaacatcaacaagaagcaggccaccagccccgcctccaagaagccagcccaggaagggggcaagggcggctccgagaagcccaagcggcccgtgtcggccatgttcatcttctcggaggagaaacggcggcagctgcaggaggagcggcctgagctctccgagagcgagctgacccgcctgctggcccgaatgtggaacgacctgtctgagaagaagaaggccaagtacaaggcccgagaggcggcgctcaaggctcagtcggagaggaagcccggcggggagcgcgaggaacggggcaagctgcccgagtcccccaaaagagctgaggagatctggcaacagagcgttatcggcgactacctggcccgcttcaagaatgaccgggtgaaggccttgaaagccatggaaatgacctggaataacatggaaaagaaggagaaactgatgtggattaagaaggcagccgaagaccaaaagcgatatgagagagagctgagtgagatgcgggcacctccagctgctacaaattcttccaagaagatgaaattccagggagaacccaagaagcctcccatgaacggttaccagaagttctcccaggagctgctgtccaatggggagctgaaccacctgccgctgaaggagcgcatggtggagatcggcagtcgctggcagcgcatctcccagagccagaaggagcactacaaaaagctggccgaggagcagcaaaagcagtacaaggtgcacctggacctctgggttaagagcctgtctccccaggaccgtgcagcatataaagagtacatctccaataaacgtaagagcatgaccaagctgcgaggcccaaaccccaaatccagccggactactctgcagtccaagtcggagtccgaggaggatgatgaagaggatgaggatgacgaggacgaggatgaagaagaggaagatgatgagaatggggactcctctgaagatggcggcgactcctctgagtccagcagcgaggacgagagcgaggatggggatgagaatgaagaggatgacgaggacgaagacgacgacgaggatgacgatgaggatgaagataatgagtccgagggcagcagctccagctcctcctcctcaggggactcctcagactctgactccaactgagg

SEQ ID NO: 34629 - DNA, 3011 bp, Artificial Sequence
  derived and/or modified sequence
cttggctcggctccccggaggccggggcgggggcgccggcggggctgggccgcaggctcgggggaggaggcggcggttcccgccgcggtcgcgcctctgtgccgggctcctccggtgaggtggctttgaccccgggttgcccggccagcacgaccgaggaggtggctggacagctggaggatgaacggagaagccgactgccccacagacctggaaatggccgcccccaaaggccaagaccgttggtcccaggaagacatgctgactttgctggaatgcatgaagaacaaccttccatccaatgacagctccaagttcaaaaccaccgaatcacacatggactgggaaaaagtagcatttaaagacttttctggagacatgtgcaagctcaaatgggtggagatttctaatgaggtgaggaagttccgtacattgacagaattgatcctcgatgctcaggaacatgttaaaaatccttacaaaggcaaaaaactcaagaaacacccagacttcccaaagaagcccctgaccccttatttccgcttcttcatggagaagcgggccaagtatgcgaaactccaccctgagatgagcaacctggacctaaccaagattctgtccaagaaatacaaggagcttccggagaagaagaagatgaaatatattcaggacttccagagagagaaacaggagttcgagcgaaacctggcccgattcagggaggatcaccccgacctaatccagaatgccaagaaatcggacatcccagagaagcccaaaaccccccagcagctgtggtacacccacgagaagaaggtgtatctcaaagtgcggccagatgagatcatgagagactatatccagaagcacccagagctgaacatcagtgaggagggtatcaccaagtccaccctcaccaaggccgaacgccagctcaaggacaagtttgacgggcgacccaccaagccacctccgaacagctactcgctgtactgcgcagagctcatggccaacatgaaggacgtgcccagcacagagcgcatggtgctgtgcagccagcagtggaagctgctgtcccagaaggagaaggacgcctatcacaagaagtgtgatcagaaaaagaaagattacgaggtggagctgctccgtttcctcgagagcctgcctgaggaggagcagcagcgggtcttgggggaagagaagatgctgaacatcaacaagaagcaggccaccagccccgcctccaagaagccagcccaggaagggggcaagggcggctccgagaagcccaagcggcccgtgtcggccatgttcatcttctcggaggagaaacggcggcagctgcaggaggagcggcctgagctctccgagagcgagctgacccgcctgctggcccgaatgtggaacgacctgtctgagaagaagaaggccaagtacaaggcccgagaggcggcgctcaaggctcagtcggagaggaagcccggcggggagcgcgaggaacggggcaagctgcccgagtcccccaaaagagctgaggagatctggcaacagagcgttatcggcgactacctggcccgcttcaagaatgaccgggtgaaggccttgaaagccatggaaatgacctggaataacatggaaaagaaggagaaactgatgtggattaagaaggcagccgaagaccaaaagcgatatgagagagagctgagtgagatgcgggcacctccagctgctacaaattcttccaagaagatgaaattccagggagaacccaagaagcctcccatgaacggttaccagaagttctcccaggagctgctgtccaatggggagctgaaccacctgccgctgaaggagcgcatggtggagatcggcagtcgctggcagcgcatctcccagagccagaaggagcactacaaaaagctggccgaggagcagcaaaagcagtacaaggtgcacctggacctctgggttaagagcctgtctccccaggaccgtgcagcatataaagagtacatctccaataaacgtaagagcatgaccaagctgcgaggcccaaaccccaaatccagccggactactctgcagtccaagtcggagtccgaggaggatgatgaagaggatgaggatgacgaggacgaggatgaagaagaggaagatgatgagaatggggactcctctgaagatggcggcgactcctctgagtccagcagcgaggacgagagcgaggatggggatgagaatgaagaggatgacgaggacgaagacgacgacgaggatgacgatgaggatgaagataatgagtccgagggcagcagctccagctcctcctcctcaggggactcctcagactctgactccaactgaggctcagccccaccccagggcagccagggagagcccaggagctcccctccccaactgaccacctttgtttctcccccatgttctgtcccttgcccccctggcctcccccactttctttctttctttaaaaaaaaaaaaaaatacggtgggggtagggggctggaggagcccaggccaggactctgcagcctcagagacatcagcccttgggggtcctcctccagggacagcaactatcagactaagccagcaccggaccagcctggcccaccccacccacttctgcacttgcggttccggcatggacaatggaccggagagtgggggtggggggtcccaaagagtttgatgaggccctccacacctgcggcccaatccaaggtggggtggaagcttggggaagacccattccttcccagaggggcctgccacctggacccctgcattggaactggaggcagggaacatggggaggaggagggtcggtgccttcaagaaaacaggcactgccctggtggccctctcccctgccccctgcaggaaggagctgcctggacccgttcatgggggagggggcagaagtgttttttatatatgtgtatatatttttttttaagctctgagctgtcaacgagacgtttcctacc

SEQ ID NO: 34630 - protein, 991 aa, Artificial Sequence
  derived and/or modified sequence
MSAVGLVLLVLALRLRATTVKPEEGSFCSNSQVAFRDACYEFVPLGRTFRDAQSWCEGQGGHLVFIQDEGTQWFLQKHISQDREWWIGLTWNLARNGTTEGPGTWLDTSNVTYSNWHGGQAAAAPDTCGHIGRGPSSEWVTSDCAQTFAFMCEFRVGQSLACEGLNATVHCGLGQVIQVQDAVYGRQNPHFCTQDAGRPSDLEQGCSWANVKEEVAGQCQELQSCQVAADETYFGNLCPTQGSYLWVQYQCREALQLMVSSESFIFDNVTISLTWLLSPYIGNLSCIISTGDSHTFDPYNPPSVSSNVTHQFTSPGEFTVFAECTTSEWHVTAQRQVTVRDKMETLSVTACSGLSQSGAGPLCQAVFGDPLWIQVELDGGTGVTYTVLLGDITLAESTTQKGSLPYNLILDRETQKLMGPGRHRLEIQATGNTTTSTISRNITVHLVELLSGLQASWASDHLELGQDLLITISLAQGTPEELTFEVAGLNATFSHEQVSFGEPFGICRLAVPVEGTFLVTMLVRNAFSNLSLEIGNITITAPSGLQEPSGMNAEGKSKDKGDMEVYIQPGPYVDPFTTVTLGWPDNDKELRFQWSCGSCWALWSSCVERQLLRTDQRELVVPASCLPPPDSAVTLRLAVLRGQELENRAEQCLYVSAPWELRPRVSCERNCRPVNASKDILLRVTMGEDSPVAMFSWYLDNTPTEQAEPLLDACRLRGFWPRSLTLLQSNTSTLLLNSSFLQSRGEVIRIRATALTRHAYGEDTYVISTVPPREVPACTIAPEEGTVLTSFAIFCNASTALGPLEFCFCLESGSCLHCGPEPALPSVYLPLGEENNDFVLTVVISATNRAGDTQQTQAMAKVALGDTCVEDVAFQAAVSEKIPTALQGEGGPEQLLQLAKAVSSMLNQEHESQGSGQSLSIDVRQKVREHVLGSLSAVTTGLEDVQRVQELAEVLREVTCRSKELTPSAQGSCMGDSWEGAPPAAHVSHAR

SEQ ID NO: 34631 - protein, 519 aa, Artificial Sequence
  derived and/or modified sequence
  misc_feature (1)..(1): Xaa can be any naturally occurring amino acid
XLAQGTPEELTFEVAGLNATFSHEQVSFGEPFGICRLAVPVEGTFLVTMLVRNAFSNLSLEIGNITITAPSGLQEPSGMNAEGKSKDKGDMEVYIQPGPYVDPFTTVTLGWPDNDKELRFQWSCGSCWALWSSCVERQLLRTDQRELVVPASCLPPPDSAVTLRLAVLRGQELENRAEQCLYVSAPWELRPRVSCERNCRPVNASKDILLRVTMGEDSPVAMFSWYLDNTPTEQAEPLLDACRLRGFWPRSLTLLQSNTSTLLLNSSFLQSRGEVIRIRATALTRHAYGEDTYVISTVPPREVPACTIAPEEGTVLTSFAIFCNASTALGPLEFCFCLESGSCLHCGPEPALPSVYLPLGEENNDFVLTVVISATNRAGDTQQTQAMAKVALGDTCVEDVAFQAAVSEKIPTALQGEGGPEQLLQLAKAVSSMLNQEHESQGSGQSLSIDVRQKVREHVLGSLSAVTTGLEDVQRVQELAEVLREVTCRSKELTPSAQGSCMGDSWEGAPPAAHVSHAR

SEQ ID NO: 34632 - DNA, 2976 bp, Artificial Sequence
  derived and/or modified sequence
atgagcgccgtgggcctggtgctgctggtgctggccctgagactgagagccaccaccgtgaagcccgaggagggcagcttctgcagcaacagccaggtggccttcagagacgcctgctacgagttcgtgcccctgggcagaaccttcagagacgcccagagctggtgcgagggccagggcggccacctggtgttcatccaggacgagggcacccagtggttcctgcagaagcacatcagccaggacagagagtggtggatcggcctgacctggaacctggccagaaacggcaccaccgagggccccggcacctggctggacaccagcaacgtgacctacagcaactggcacggcggccaggccgccgccgcccccgacacctgcggccacatcggcagaggccccagcagcgagtgggtgaccagcgactgcgcccagaccttcgccttcatgtgcgagttcagagtgggccagagcctggcctgcgagggcctgaacgccaccgtgcactgcggcctgggccaggtgatccaggtgcaggacgccgtgtacggcagacagaacccccacttctgcacccaggacgccggcagacccagcgacctggagcagggctgcagctgggccaacgtgaaggaggaggtggccggccagtgccaggagctgcagagctgccaggtggccgccgacgagacctacttcggcaacctgtgccccacccagggcagctacctgtgggtgcagtaccagtgcagagaggccctgcagctgatggtgagcagcgagagcttcatcttcgacaacgtgaccatcagcctgacctggctgctgagcccctacatcggcaacctgagctgcatcatcagcaccggcgacagccacaccttcgacccctacaacccccccagcgtgagcagcaacgtgacccaccagttcaccagccccggcgagttcaccgtgttcgccgagtgcaccaccagcgagtggcacgtgaccgcccagagacaggtgaccgtgagagacaagatggagaccctgagcgtgaccgcctgcagcggcctgagccagagcggcgccggccccctgtgccaggccgtgttcggcgaccccctgtggatccaggtggagctggacggcggcaccggcgtgacctacaccgtgctgctgggcgacatcaccctggccgagagcaccacccagaagggcagcctgccctacaacctgatcctggacagagagacccagaagctgatgggccccggcagacacagactggagatccaggccaccggcaacaccaccaccagcaccatcagcagaaacatcaccgtgcacctggtggagctgctgagcggcctgcaggccagctgggccagcgaccacctggagctgggccaggacctgctgatcaccatcagcctggcccagggcacccccgaggagctgaccttcgaggtggccggcctgaacgccaccttcagccacgagcaggtgagcttcggcgagcccttcggcatctgcagactggccgtgcccgtggagggcaccttcctggtgaccatgctggtgagaaacgccttcagcaacctgagcctggagatcggcaacatcaccatcaccgcccccagcggcctgcaggagcccagcggcatgaacgccgagggcaagagcaaggacaagggcgacatggaggtgtacatccagcccggcccctacgtggaccccttcaccaccgtgaccctgggctggcccgacaacgacaaggagctgagattccagtggagctgcggcagctgctgggccctgtggagcagctgcgtggagagacagctgctgagaaccgaccagagagagctggtggtgcccgccagctgcctgcccccccccgacagcgccgtgaccctgagactggccgtgctgagaggccaggagctggagaacagagccgagcagtgcctgtacgtgagcgccccctgggagctgagacccagagtgagctgcgagagaaactgcagacccgtgaacgccagcaaggacatcctgctgagagtgaccatgggcgaggacagccccgtggccatgttcagctggtacctggacaacacccccaccgagcaggccgagcccctgctggacgcctgcagactgagaggcttctggcccagaagcctgaccctgctgcagagcaacaccagcaccctgctgctgaacagcagcttcctgcagagcagaggcgaggtgatcagaatcagagccaccgccctgaccagacacgcctacggcgaggacacctacgtgatcagcaccgtgccccccagagaggtgcccgcctgcaccatcgcccccgaggagggcaccgtgctgaccagcttcgccatcttctgcaacgccagcaccgccctgggccccctggagttctgcttctgcctggagagcggcagctgcctgcactgcggccccgagcccgccctgcccagcgtgtacctgcccctgggcgaggagaacaacgacttcgtgctgaccgtggtgatcagcgccaccaacagagccggcgacacccagcagacccaggccatggccaaggtggccctgggcgacacctgcgtggaggacgtggccttccaggccgccgtgagcgagaagatccccaccgccctgcagggcgagggcggccccgagcagctgctgcagctggccaaggccgtgagcagcatgctgaaccaggagcacgagagccagggcagcggccagagcctgagcatcgacgtgagacagaaggtgagagagcacgtgctgggcagcctgagcgccgtgaccaccggcctggaggacgtgcagagagtgcaggagctggccgaggtgctgagagaggtgacctgcagaagcaaggagctgacccccagcgcccagggcagctgcatgggcgacagctgggagggcgccccccccgccgcccacgtgagccacgccagatag

SEQ ID NO: 34633 - DNA, 1560 bp, Artificial Sequence
  derived and/or modified sequence
tgactggcccagggcacccccgaggagctgaccttcgaggtggccggcctgaacgccaccttcagccacgagcaggtgagcttcggcgagcccttcggcatctgcagactggccgtgcccgtggagggcaccttcctggtgaccatgctggtgagaaacgccttcagcaacctgagcctggagatcggcaacatcaccatcaccgcccccagcggcctgcaggagcccagcggcatgaacgccgagggcaagagcaaggacaagggcgacatggaggtgtacatccagcccggcccctacgtggaccccttcaccaccgtgaccctgggctggcccgacaacgacaaggagctgagattccagtggagctgcggcagctgctgggccctgtggagcagctgcgtggagagacagctgctgagaaccgaccagagagagctggtggtgcccgccagctgcctgcccccccccgacagcgccgtgaccctgagactggccgtgctgagaggccaggagctggagaacagagccgagcagtgcctgtacgtgagcgccccctgggagctgagacccagagtgagctgcgagagaaactgcagacccgtgaacgccagcaaggacatcctgctgagagtgaccatgggcgaggacagccccgtggccatgttcagctggtacctggacaacacccccaccgagcaggccgagcccctgctggacgcctgcagactgagaggcttctggcccagaagcctgaccctgctgcagagcaacaccagcaccctgctgctgaacagcagcttcctgcagagcagaggcgaggtgatcagaatcagagccaccgccctgaccagacacgcctacggcgaggacacctacgtgatcagcaccgtgccccccagagaggtgcccgcctgcaccatcgcccccgaggagggcaccgtgctgaccagcttcgccatcttctgcaacgccagcaccgccctgggccccctggagttctgcttctgcctggagagcggcagctgcctgcactgcggccccgagcccgccctgcccagcgtgtacctgcccctgggcgaggagaacaacgacttcgtgctgaccgtggtgatcagcgccaccaacagagccggcgacacccagcagacccaggccatggccaaggtggccctgggcgacacctgcgtggaggacgtggccttccaggccgccgtgagcgagaagatccccaccgccctgcagggcgagggcggccccgagcagctgctgcagctggccaaggccgtgagcagcatgctgaaccaggagcacgagagccagggcagcggccagagcctgagcatcgacgtgagacagaaggtgagagagcacgtgctgggcagcctgagcgccgtgaccaccggcctggaggacgtgcagagagtgcaggagctggccgaggtgctgagagaggtgacctgcagaagcaaggagctgacccccagcgcccagggcagctgcatgggcgacagctgggagggcgccccccccgccgcccacgtgagccacgccagatag

SEQ ID NO: 34634 - DNA, 2976 bp, Artificial Sequence
  derived and/or modified sequence
atgagcgccgtgggtctcgttcttctcgtgctcgctctccgtcttcgggccacgaccgtgaaaccagaggaaggatctttctgttctaacagtcaggttgcgtttcgcgatgcctgttacgaattcgtccctctgggccgcacctttcgggacgctcagagttggtgcgaaggccaaggcgggcatttagtctttattcaggacgagggtacccagtggttcctgcagaagcatattagccaggatcgcgagtggtggatagggcttacctggaaccttgctcgaaatgggacaacagaggggcctgggacctggctcgacacctccaatgtgacatactccaactggcatggcgggcaggcggccgcagcccctgatacgtgtgggcacatcgggaggggacccagctcagaatgggtgacctctgactgcgcacagactttcgcatttatgtgcgaatttagagtgggacaaagtttagcctgtgagggtctaaacgctaccgtgcactgtgggcttgggcaggtgatccaggtacaggacgcagtgtacggccgtcagaatcctcacttttgcacacaggatgctgggaggcccagcgatctggagcagggatgttcatgggccaacgttaaggaggaggtcgcgggacagtgccaggagctgcagagctgtcaggtggcagccgatgaaacctactttggtaacctctgtccaacccaaggaagctacctgtgggtgcagtaccaatgtagagaggctctccaactgatggtgagcagcgagtctttcatctttgataacgttacgattagtctcacttggcttttgagtccctacatcggtaatctatcttgcatcatctcaacaggcgattctcacacatttgatccatataatccgccgagtgtgagcagtaatgtgactcaccagttcacctccccgggagagttcacggtctttgctgaatgcaccacctccgaatggcacgtgaccgcccaacgacaggttaccgtcagggacaaaatggaaacgctgagtgtgacagcatgtagtgggctgtctcagtccggagcaggaccactgtgccaggcagtgttcggagatccactctggattcaagttgaattggacggcgggactggcgttacctacactgtcttgctgggagatattaccctcgcggaatccacaactcagaaaggatcgctgccatacaaccttattttggatagggagacgcaaaaactgatgggacccggccggcacagactggagatccaggccaccggcaatactactacctccacaatttcccgcaacatcactgtgcacctagtagaacttctgtcaggtctgcaggcctcctgggcgtcagaccacctggaactgggtcaggatctgcttatcacaatctctctggcgcagggcacacccgaagaactcacatttgaggtcgccggactgaacgctacgttcagccatgagcaggtttcattcggggaacccttcggaatctgtaggcttgccgtgccagtggagggcacatttctggtcactatgctggtgcgtaacgcattttcaaatctctccctagagattggcaacataacgataacagcaccatcaggccttcaggaaccctctggtatgaacgccgagggtaaatctaaagataagggggacatggaggtgtatatccagccgggaccctacgtagatcctttcactaccgtcacgctgggatggcccgataatgacaaagagctgagatttcaatggagttgtggctcctgctgggcactatggtcctcctgtgtggaacggcaattgctcaggacggaccagagagaattagttgtgccagcttcgtgtttgcccccacctgatagcgctgtgaccttgagactggccgtgctcagaggacaggaactcgagaacagagcagagcaatgcctctacgtgtctgccccctgggagctcaggccccgcgtcagttgcgaaagaaattgtaggccagttaatgcatccaaagacattctgttgcgcgtgacaatgggcgaagatagtcctgtagcgatgttctcatggtacctggacaatactccgacagaacaggcggagcccttattagacgcgtgcaggctgagaggcttctggcctaggtctttgactctgctgcagagtaacactagtactctgctccttaatagttccttcctccagtctcggggagaggtcattcgcatccgtgccactgccctcaccaggcacgcttatggagaggatacttatgtaatcagcacagtgccaccccgggaggtaccggcctgcactatcgccccagaagaggggaccgttctgacttccttcgccatcttctgtaacgcatcgacggccttggggcctcttgagttctgtttttgtttggaatctggctcatgcctccattgtggccctgagccggccctgccttctgtttatctgcccctgggagaagaaaacaatgatttcgttctaacagtggtgattagcgccacaaaccgggctggagatacccaacagacgcaggcaatggctaaggtggccctgggggacacctgcgtggaggatgtcgccttccaggcagccgtgagcgaaaagattcctactgcgctgcaaggtgagggaggccccgagcagctattacagctcgccaaagctgtctcatctatgctcaaccaggagcacgagagccaggggtctggccagtccctctcaattgacgttcgccagaaagttcgcgaacatgtactgggaagcctctctgcagtgacaaccggactggaggatgtgcagagagtacaggaattggcggaggtgttaagggaggtcacgtgtcggagcaaagaactgacaccgagcgctcagggttcttgcatgggcgatagctgggaaggtgctcctcctgcggcacatgtgtcgcatgctagatag

SEQ ID NO: 34635 - DNA, 1560 bp, Artificial Sequence
  derived and/or modified sequence
taactggcccagggcacacccgaagaactcacattcgaggttgcaggattgaacgcgaccttcagccatgagcaggtctcgttcggcgaaccattcggaatatgccggttggcagtgccggtcgaagggacatttctggtgactatgctggtgcgcaacgctttctccaacctgagcctggagattggtaacattactattaccgccccttccgggctgcaggagccatccggcatgaatgcagagggcaaatccaaggataaaggtgatatggaagtgtacatccagccggggccatacgtcgatccctttactacagttaccttagggtggcctgataacgacaaggagctccgcttccagtggagttgtggttcttgttgggcactctggtccagttgtgtggaacggcaactgctgaggaccgaccaacgcgaactggtggttccagcttcctgtctccctcctccagacagcgcagttacacttagactcgccgtgctgcggggccaggagctagaaaacagagctgagcaatgcctctatgtgagtgccccatgggaacttagaccccgagtctcctgcgagagaaactgccgccccgttaatgctagtaaagacattttgctgagggtgacgatgggtgaggattctccagtcgcaatgttctcttggtacctagacaacactcccaccgaacaggccgaaccactactcgacgcttgcaggctcaggggattctggcctcgctccctgaccctcctacagtctaacacctcgactttgcttttaaactcatccttcttgcagtcacggggcgaggtgatcagaattagagccacggctcttacacgacatgcatatggggaagatacatacgttatcagcacagtcccgcctcgtgaagtgcctgcatgcacgatcgccccagaagaaggtacagtgctgacaagtttcgctattttctgcaatgcgtcaacagccttggggcccctggagttctgtttctgtctcgagagcggaagctgcctgcactgcgggcccgaacctgcgctgcctagtgtctatttgcctctgggcgaagagaacaatgatttcgtgctcacggtggtgatctctgctacgaacagagccggagacacacagcagactcaagcaatggctaaggtggcgctgggcgacacctgcgtcgaagacgtagctttccaagcggcagtctccgaaaaaatcccaacagcgctgcagggcgaaggcgggcccgagcagttactgcagctggcaaaagccgtgagttcaatgcttaaccaggaacatgaaagccagggaagcggacagtccctgtcaatcgacgtgcgacagaaggtcagagagcatgttctgggcagtctgagcgcagttaccaccggactcgaggacgtccagcgcgtgcaagaactggccgaagtgcttcgggaagtgacatgcagatccaaggagctaacacctagtgcccaaggatcctgtatgggagatagctgggagggtgctccccccgcagcccacgtgtcccatgccagatag

SEQ ID NO: 34636 - DNA, 2976 bp, Artificial Sequence
  derived and/or modified sequence
atgtctgctgtgggcctggtgctgctggtgctggccctgcggctgcgggccaccaccgtgaagccagaggagggcagcttctgcagcaacagccaggtggccttcagagatgcctgctatgaatttgtgcccctgggccgcaccttcagagatgcccagagctggtgtgagggccagggcggccacctggtgttcatccaggatgagggcacccagtggttcctgcagaagcacatcagccaggaccgggagtggtggattggcctgacctggaacctggccagaaatggcaccacagagggccctggcacctggctggacaccagcaatgtgacctacagcaactggcatggaggccaggccgctgctgccccagacacctgtggccacatcggccggggccccagcagcgagtgggtgaccagtgactgtgcccagacctttgccttcatgtgtgagttccgggtgggccagagcctggcctgtgagggcctgaatgccaccgtgcactgcggcctgggccaggtgatccaggtgcaggatgctgtgtatggccggcagaacccccacttctgcacccaggatgctggccggcccagcgacctggagcagggctgctcctgggccaacgtgaaggaggaggtggccggccagtgccaggagctgcagagctgccaggtggccgcagatgagacctacttcggcaacctgtgccccacccagggcagctacctgtgggtgcagtaccagtgccgggaggccctgcagctgatggtgtcctctgagagcttcatctttgacaacgtgaccatcagcctgacctggctgctgagcccctacatcggcaacctgagctgcatcatcagcactggagacagccacacctttgacccctacaaccccccatctgtgagcagcaatgtgacccaccagttcaccagccctggagagttcaccgtgtttgctgaatgtaccaccagcgagtggcacgtgacagcccagaggcaggtgacagtgcgggacaagatggagaccctgtctgtgacagcctgcagcggcctgagccagagcggggccggccccctgtgccaggccgtgtttggagaccccctgtggatccaggtggagctggatggcggcactggagtgacctacacagtgctgctgggggacatcaccctggccgagagcaccacccagaagggcagcctgccctacaacctgatcctggaccgggagacccagaagctgatgggccctggccgccaccggctggagatccaggccaccggcaacaccaccaccagcaccatcagcaggaacatcaccgtgcacctggtggagctgctgagcggcctgcaggcctcctgggccagtgaccacctggagctgggccaggacctgctgatcaccatcagcctggcccagggcaccccagaggagctgacctttgaggtggccggcctgaatgccaccttcagccatgagcaggtgtcctttggagagcccttcggcatctgccgcctggccgtgcctgtggagggcaccttcctggtgaccatgctggtgagaaatgccttcagcaacctgagcctggagatcggcaacatcaccatcacagcccccagcggcctgcaggagcccagcggcatgaatgctgagggcaagagcaaggacaagggggacatggaggtgtacatccagcccggcccctacgtggaccccttcaccaccgtgaccctgggctggccagacaatgacaaggagctgcgcttccagtggagctgtggcagctgctgggccctgtggagcagctgtgtggagcggcagctgctgaggacagaccagcgggagctggtggtgcctgccagctgcctgcccccaccagattctgctgtgaccctgcggctggccgtgctgcggggccaggagctggagaacagagctgagcagtgcctgtatgtgtctgccccctgggagctgcggccccgggtgtcctgtgaaagaaactgcaggcctgtgaatgccagcaaggacatcctgctgcgggtgaccatgggagaggacagccctgtggccatgttctcctggtacctggacaacacccccacagagcaggccgagcccctgctggatgcctgccgcctgcggggcttctggcccaggagcctgaccctgctgcagagcaacaccagcaccctgctgctgaacagcagcttcctgcagagcagaggagaggtgatccgcatccgggccacagccctgaccaggcatgcctacggggaggacacctacgtgatcagcacagtgcccccccgggaggtgcctgcctgcaccatcgcccctgaggagggcaccgtgctgaccagctttgccatcttctgcaatgccagcacagccctgggccccctggagttctgcttctgcctggagagcggcagctgcctgcactgcggccctgagcccgccctgcccagcgtgtacctgcccctgggggaggagaacaatgactttgtgctgactgtggtgatcagcgccaccaacagagctggggacacccagcagacccaggccatggccaaggtggccctgggggacacctgtgtggaggatgtggccttccaggccgctgtgtctgagaagatccccacagccctgcagggcgagggcggccctgagcagctgctgcagctggccaaggctgtgtcctccatgctgaaccaggagcacgagagccagggcagcggccagagcctgagcattgatgtgcggcagaaggtgcgggagcacgtgctgggcagcctgtctgctgtgaccaccggcctggaggatgtgcagagggtgcaggagctggccgaggtgctgcgggaggtgacctgccgcagcaaggagctgacccccagcgcccagggcagctgcatgggagacagctgggagggcgcccccccagctgcccacgtgtcccatgccaggtag

SEQ ID NO: 34637 - DNA, 1560 bp, Artificial Sequence
  derived and/or modified sequence
tgactggcccagggcaccccagaggagctgacctttgaggtggccggcctgaatgccaccttcagccatgagcaggtgtcctttggagagcccttcggcatctgccgcctggccgtgcctgtggagggcaccttcctggtgaccatgctggtgagaaatgccttcagcaacctgagcctggagatcggcaacatcaccatcacagcccccagcggcctgcaggagcccagcggcatgaatgctgagggcaagagcaaggacaagggggacatggaggtgtacatccagcccggcccctacgtggaccccttcaccaccgtgaccctgggctggccagacaatgacaaggagctgcgcttccagtggagctgtggcagctgctgggccctgtggagcagctgtgtggagcggcagctgctgaggacagaccagcgggagctggtggtgcctgccagctgcctgcccccaccagattctgctgtgaccctgcggctggccgtgctgcggggccaggagctggagaacagagctgagcagtgcctgtatgtgtctgccccctgggagctgcggccccgggtgtcctgtgaaagaaactgcaggcctgtgaatgccagcaaggacatcctgctgcgggtgaccatgggagaggacagccctgtggccatgttctcctggtacctggacaacacccccacagagcaggccgagcccctgctggatgcctgccgcctgcggggcttctggcccaggagcctgaccctgctgcagagcaacaccagcaccctgctgctgaacagcagcttcctgcagagcagaggagaggtgatccgcatccgggccacagccctgaccaggcatgcctacggggaggacacctacgtgatcagcacagtgcccccccgggaggtgcctgcctgcaccatcgcccctgaggagggcaccgtgctgaccagctttgccatcttctgcaatgccagcacagccctgggccccctggagttctgcttctgcctggagagcggcagctgcctgcactgcggccctgagcccgccctgcccagcgtgtacctgcccctgggggaggagaacaatgactttgtgctgactgtggtgatcagcgccaccaacagagctggggacacccagcagacccaggccatggccaaggtggccctgggggacacctgtgtggaggatgtggccttccaggccgctgtgtctgagaagatccccacagccctgcagggcgagggcggccctgagcagctgctgcagctggccaaggctgtgtcctccatgctgaaccaggagcacgagagccagggcagcggccagagcctgagcattgatgtgcggcagaaggtgcgggagcacgtgctgggcagcctgtctgctgtgaccaccggcctggaggatgtgcagagggtgcaggagctggccgaggtgctgcgggaggtgacctgccgcagcaaggagctgacccccagcgcccagggcagctgcatgggagacagctgggagggcgcccccccagctgcccacgtgtcccatgccaggtag

SEQ ID NO: 34638 - DNA, 2976 bp, Artificial Sequence
  derived and/or modified sequence
atgagcgccgtgggcctggtgctgctggtgctggccctgcggctgagagcaactacagtcaagcccgaagaggggagcttctgctcaaatagccaggtcgctttcagagacgcttgctatgaattcgtgcctttgggaagaacgtttcgggatgcccagtcctggtgcgaagggcaggggggtcatctggtctttatccaagatgaggggacccaatggtttctgcaaaagcatatcagtcaggaccgcgagtggtggatcgggctgacatggaacctggcacgcaatggtactacagagggcccaggaacatggttggatacaagcaacgttacttacagcaactggcacggcggacaggctgctgccgcacccgacacgtgcggtcacataggcagaggcccgagcagcgaatgggtgacgtccgactgcgctcagaccttcgctttcatgtgcgagttcagggtgggtcagagtttggcctgcgaggggctcaatgccactgtccactgtggtctgggacaggtcatccaggttcaagacgcagtctatgggagacagaatccccatttttgtactcaagatgccggccgcccttctgatctagagcagggctgttcctgggctaatgtgaaggaggaagttgctggacaatgccaagagctgcaatcatgccaggtagccgcggacgagacatattttgggaatctgtgtccaacccaggggtcatacctttgggtgcagtaccagtgtcgtgaagcactgcagctgatggtgtcgtcagaatctttcattttcgataatgtcactatttctttaacatggctgctgagcccttatatcggtaatctttcctgtattattagtaccggggacagtcacaccttcgacccatacaacccgccctccgtcagctcaaatgtcacacatcagtttaccagtcctggggagtttaccgtgtttgcagaatgcacaacaagtgaatggcatgtgactgcacagaggcaggtgactgtccgagacaagatggaaacattgtcagtgaccgcttgctcagggttgtctcagtccggggcaggcccgttgtgtcaggcagtctttggtgacccattatggatccaagttgaactggatggcggtaccggagtgacttacacggtcctcctaggtgacattaccctagccgagtccacgactcaaaagggctctctcccatacaacctgattctcgacagggagacccaaaaactgatgggccctggcagacaccggcttgagatccaagccaccggaaatacgaccacatccacaatctcccgcaatatcaccgtccaccttgttgaattactcagtggcttacaggctagttgggcctccgatcacctggagctggggcaagacctgctaatcactatttccctggcacaggggaccccggaagagctcaccttcgaggttgcaggcctgaatgctacttttagtcacgagcaggttagtttcggagagcctttcggcatctgtagactcgctgtcccagtggaggggacgtttctcgtgactatgcttgtgcgtaatgccttttctaatttatcactggaaataggtaatatcaccatcaccgctccctcaggccttcaggaaccatctgggatgaacgcagagggtaagtctaaagataagggcgatatggaggtgtatatccaaccaggaccctatgtcgacccattcacaacagtgacattgggctggcctgacaatgacaaagaactccgcttccagtggagttgcggaagttgctgggcactctggtctagctgcgtcgagaggcagttgcttcggacggatcaacgtgagctggtggtacccgccagctgcctgccaccaccggactccgccgtgacactgcgactggctgtcctccgcggacaggaactggagaaccgtgcggagcagtgcctatatgtgtctgcaccatgggaactgcggccaagggtctcttgcgaacggaactgtagacctgtgaacgccagcaaggacatccttctccgagtgaccatgggagaggactcacccgttgcaatgtttagctggtaccttgataacaccccgacggagcaagctgagccactgctggatgcttgtaggttgagagggttctggccacgctctttgacattactacagagcaatacaagcactctgttactgaattcttcctttttacagagtagaggcgaggtcatccgaattagagccactgctctgacgagacacgcttatggagaggacacgtatgtgatatccaccgtgccccctagggaggtgccagcctgcactattgctcccgaagagggtaccgtgctgacctcgttcgctatattctgcaatgcgagcacagcactcggtccgctcgagttttgtttttgccttgagtcgggatcatgccttcactgtggccccgaacccgcgctaccgtctgtgtatttaccccttggcgaggaaaacaacgatttcgtactaacagtcgtcatttccgccactaatagggccggggacacccagcagactcaagctatggccaaggtagccctcggtgatacgtgcgtagaagatgtcgcttttcaggccgccgtgtctgagaaaattcccactgcactgcaaggggaggggggaccggagcaattgctgcagctggccaaagccgtgtcctcaatgttaaatcaggaacatgaatcccaggggagcggacaatctctctcaatcgatgtgagacagaaagttagggaacatgtcctgggctctttgtccgccgtgacaactggacttgaagacgttcagagagtccaggagctagcggaggtgcttcgtgaggtgacctgtagaagtaaggaattaactccctctgcccagggtagctgcatgggagactcctgggaaggtgccccccctgctgcccacgtcagccatgctaggtag

SEQ ID NO: 34639 - DNA, 1560 bp, Artificial Sequence
  derived and/or modified sequence
tgactggcccagggcacccccgaggagctgaccttcgaggtggccggcttaaatgcgaccttctcccacgaacaagtcagtttcggtgagccctttggtatttgcaggctagcggtccctgtggagggaacattcctggtcacaatgctagtgaggaatgcattctccaatctaagtctggagatcggaaatatcactattacagcccctagcgggctccaagagccctccgggatgaatgcggagggtaaatccaaagacaaaggagacatggaggtctatattcagcccggaccatatgtggatcctttcaccacggttacactcggctggcccgacaatgacaaagagctccgatttcagtggtcctgcggcagctgttgggcactatggagctcctgcgtggaaaggcaattgctccgaacagaccagcgggaactggttgtgcctgcttcatgcttaccacctcccgattcggcagtgacccttcggctggcagtcttgcgtgggcaggagctggagaatcgggccgaacagtgcctgtacgtgagtgccccttgggagctaagacctcgggtttcctgcgaacggaattgtcgcccagtcaatgcctctaaagacatccttctgagggtcaccatgggggaggattcaccagtggctatgttcagttggtatttggataatacccctacagagcaggccgaacccctgctggacgcttgccgcctgcggggcttctggcccaggagtttaaccctgctgcagtctaatacttctaccctgctcctcaattcctccttcctccagtctcggggtgaggtgattcggattcgcgccaccgcgttgacccggcatgcatacggagaagacacctacgtgatcagtacagtgccgcctagggaggtgcctgcttgcaccatcgccccagaggagggcactgtattaactagcttcgccatcttctgcaatgccagtactgctcttgggccactagaattctgcttctgcctggagtccggcagctgtttacactgtggcccagagcctgccttgccctccgtctacttacccttaggagaggagaacaacgatttcgtcctgaccgtggtcatcagcgcaacaaaccgggctggggacacccagcagacccaggctatggcaaaagttgctctgggcgacacttgcgtggaggacgtcgcttttcaggccgctgtcagcgagaagatccctactgcgctccagggcgaaggcgggccggagcaactgctgcagcttgccaaagcggtcagctctatgcttaaccaagaacacgagtctcaggggtcaggccagagtctcagtattgacgtaaggcagaaagttcgggagcatgttctaggcagcctctcggctgttacgacaggtctcgaggatgtgcaaagggtccaggagctggccgaagttttgagggaggtgacctgcaggagcaaggaactgacccccagcgcccagggcagttgcatgggcgactcctgggaaggcgcacctcctgcggcccacgtgtcgcacgcaaggtag

SEQ ID NO: 34640 - DNA, 3427 bp, Artificial Sequence
  derived and/or modified sequence
atgagtgcagtgggcttggtactcctggtgcttgctctgaggcttagggccaccactgttaagccagaggaaggcagcttttgctctaacagccaggtggccttcagagatgcttgctatgaatttgtgccactcggacgcaccttccgtgatgcccagagctggtgcgaggggcaaggaggccatttggtcttcattcaggacgaaggcacccagtggtttctgcagaagcacatctcccaggacagggaatggtggattggactcacgtggaacttggcacggaatggaaccacggaggggccggggacttggttggacacctccaatgtgacctacagcaactggcatggagggcaggccgccgctgcccctgacacctgcggccacatcgggagaggcccttcctctgagtgggtgacctcggactgcgcccagaccttcgccttcatgtgcgagttccgggttggccagagcctggcctgcgagggactcaatgccaccgtgcactgtggcttggggcaggtcatccaggtccaggatgccgtctacgggcgccagaatccccatttctgcacccaggatgccgggcgtccttcagatctggagcagggatgcagctgggccaacgtcaaggaggaggtggcaggccagtgccaggagctacagtcatgccaggtggcagcagatgagacctactttggaaacctgtgtccgactcagggcagttacctgtgggtgcagtaccagtgccgggaagccctgcagctgatggtgtccagtgagagtttcatctttgacaatgtcaccatctccctgacgtggctcctctcaccctacataggaaacctgtcctgtataattagtacaggagacagccacacttttgatccctacaacccgccgagtgtgtccagcaatgtgacccaccagttcacatctcctggggaattcaccgtgtttgctgaatgcacaaccagtgagtggcatgtgacagctcagaggcaggtgaccgtgcgagacaagatggagacgctcagtgtgactgcatgctccggcctgtcccagtcaggagccggccctctctgccaggctgtctttggggatcctctgtggattcaggtggagcttgatggaggaacaggagtgacttacactgtgcttttgggtgacataaccctggccgagtccaccacccaaaagggctcgctaccgtacaatctgatcctggacagagaaacccagaaactgatgggccctgggaggcaccgcctggagatccaagccaccggcaacaccaccacctctacaatctccagaaacattacagtccacttggtggagctgctgtcagggctgcaggcctcctgggcttctgaccatttggagcttggacaggacctattgatcaccatctcattggctcagggcaccccggaagagctgacctttgaggtggctggactcaatgcaaccttctcccacgagcaagtgagctttggagagccatttgggatttgccgcctggctgttccggttgaaggcacctttctggtcaccatgctggtgaggaatgccttctccaacctgagtttggaaatcgggaacatcactatcacagccccttccggtctccaagaaccatctgggatgaatgctgaaggaaagagtaaagataaaggcgatatggaggtgtacatccaacctggtccatatgtggatcctttcacgacagtgaccctgggctggccagacaatgacaaggagttacgcttccaatggtcatgtgggtcttgctgggctctgtggagcagctgtgttgagaggcagctgcttcgcacagaccagagggagctggtggttccagcatcctgcctgccgccgcctgactctgctgtcaccctgcgcctggctgttctgagaggccaagagctggagaacagggcagagcagtgcctctacgtgtctgcgccctgggaactcaggcctcgagtcagctgtgagaggaactgcaggccagttaatgccagcaaagacattctgctcagggtcaccatgggggaggactctccagtggctatgttcagctggtatttggacaacaccccaacagagcaggctgagcccctcctggatgcctgcagactcagaggattttggccaaggtccttaaccctcctccagagcaacacctccacgttgctgttgaacagctcgtttctgcagtcccggggagaggtcatccgaatcagagccacagcactgaccaggcatgcctatggggaggacacctatgtgatcagcactgtgcctccccgtgaggtgcctgcctgcactattgccccagaggagggcaccgttctgacgagctttgccatcttctgcaacgcctccacagccctgggacccctggagttctgcttctgtctggaatcaggttcctgcctacactgtggccctgaacctgccctcccatcagtgtatctgccacttggagaggagaacaatgactttgtgctgacagtagttatttctgccaccaatcgtgcaggggacacgcagcagacccaggccatggctaaggtggcactcggagacacatgtgttgaggatgtagcattccaggctgccgtgtcagagaaaatccccacagctctgcaaggcgagggtggccccgagcagctcctccagctggccaaggctgtgtcctccatgctgaaccaagagcatgaaagccagggctcaggacagtcactgagcatagacgtcagacagaaggtcagagagcatgtgctgggatcactgtctgcagtcaccaccggcttggaggacgtgcagagggtgcaggagctggccgaggtgctgagagaggtgacctgccggagtaaggaactcacaccctcggcccaggggtcctgcatgggcgattcatgggaaggtgcccctcctgctgcccatgtatctcacgctaggtgagagggcctgtttgcccagactctcactcctgcatctgctggtgagcaagttgagggagtaactgaatctcattaatatttgggtggccaaatgtgagtccagacactgctactgactgcccatgttctcaacttcagtacatgccagcctgacatctggctgccagctcctgtgcttccttatccttctgggggtcttctctgaccctcagagcctactgtacctgcccatatggctgtgaattcatgcagtgttcagtgactaatgaagctggcttataaacaccccagctacctcacccctcttgatggataatcccaagcaggagtgaatcccaggtaatgggcttgatcacactcctgtactggcttccacccttccctgtctcacaccccctactccccacaagtgtttcttgggatcatgtccaaataaatgacttgctctcaaa

SEQ ID NO: 34641 - DNA, 2006 bp, Artificial Sequence
  derived and/or modified sequence
attggctcagggcaccccggaagagctgacctttgaggtggctggactcaatgcaaccttctcccacgagcaagtgagctttggagagccatttgggatttgccgcctggctgttccggttgaaggcacctttctggtcaccatgctggtgaggaatgccttctccaacctgagtttggaaatcgggaacatcactatcacagccccttccggtctccaagaaccatctgggatgaatgctgaaggaaagagtaaagataaaggcgatatggaggtgtacatccaacctggtccatatgtggatcctttcacgacagtgaccctgggctggccagacaatgacaaggagttacgcttccaatggtcatgtgggtcttgctgggctctgtggagcagctgtgttgagaggcagctgcttcgcacagaccagagggagctggtggttccagcatcctgcctgccgccgcctgactctgctgtcaccctgcgcctggctgttctgagaggccaagagctggagaacagggcagagcagtgcctctacgtgtctgcgccctgggaactcaggcctcgagtcagctgtgagaggaactgcaggccagttaatgccagcaaagacattctgctcagggtcaccatgggggaggactctccagtggctatgttcagctggtatttggacaacaccccaacagagcaggctgagcccctcctggatgcctgcagactcagaggattttggccaaggtccttaaccctcctccagagcaacacctccacgttgctgttgaacagctcgtttctgcagtcccggggagaggtcatccgaatcagagccacagcactgaccaggcatgcctatggggaggacacctatgtgatcagcactgtgcctccccgtgaggtgcctgcctgcactattgccccagaggagggcaccgttctgacgagctttgccatcttctgcaacgcctccacagccctgggacccctggagttctgcttctgtctggaatcaggttcctgcctacactgtggccctgaacctgccctcccatcagtgtatctgccacttggagaggagaacaatgactttgtgctgacagtagttatttctgccaccaatcgtgcaggggacacgcagcagacccaggccatggctaaggtggcactcggagacacatgtgttgaggatgtagcattccaggctgccgtgtcagagaaaatccccacagctctgcaaggcgagggtggccccgagcagctcctccagctggccaaggctgtgtcctccatgctgaaccaagagcatgaaagccagggctcaggacagtcactgagcatagacgtcagacagaaggtcagagagcatgtgctgggatcactgtctgcagtcaccaccggcttggaggacgtgcagagggtgcaggagctggccgaggtgctgagagaggtgacctgccggagtaaggaactcacaccctcggcccaggggtcctgcatgggcgattcatgggaaggtgcccctcctgctgcccatgtatctcacgctaggtgagagggcctgtttgcccagactctcactcctgcatctgctggtgagcaagttgagggagtaactgaatctcattaatatttgggtggccaaatgtgagtccagacactgctactgactgcccatgttctcaacttcagtacatgccagcctgacatctggctgccagctcctgtgcttccttatccttctgggggtcttctctgaccctcagagcctactgtacctgcccatatggctgtgaattcatgcagtgttcagtgactaatgaagctggcttataaacaccccagctacctcacccctcttgatggataatcccaagcaggagtgaatcccaggtaatgggcttgatcacactcctgtactggcttccacccttccctgtctcacaccccctactccccacaagtgtttcttgggatcatgtccaaataaatgacttgctctc

SEQ ID NO: 34642 - DNA, 2976 bp, Artificial Sequence
  derived and/or modified sequence
atgtctgccgttggactcgttctgctggtgcttgctctgagattacgggcaaccacagtgaagcctgaagaagggagtttctgctcaaacagccaagtggcttttcgcgatgcgtgttacgagttcgttcccttggggaggacattcagagacgcacagagctggtgtgaggggcagggcggacatctggtctttatccaggacgaaggaactcaatggttcctgcaaaaacacatttctcaggatagggaatggtggattggactaacctggaatctggcacggaatggtacaaccgagggcccaggtacatggctcgatacttcgaacgtgacctatagcaactggcatggcggtcaggccgctgcagccccagatacctgtggtcacattggcagaggcccatcatcagaatgggttacgtctgattgcgctcagaccttcgcctttatgtgcgagtttagagtaggtcagagccttgcgtgcgaaggacttaacgcaaccgtacattgcggcctgggtcaagtgatccaagtgcaggatgcagtttacggtaggcagaacccccacttctgcacacaggacgccggaaggccttcagatttggaacaggggtgttcttgggctaacgtgaaggaggaagtggcaggtcaatgtcaagagctccaaagttgtcaggtggctgccgacgagacttattttgggaatctctgccccacccagggctcctatttgtgggtgcaatatcagtgcagggaagctcttcagctgatggttagctctgaatcttttatatttgataacgtgacgatatctctcacctggcttctttcaccatatattgggaacctgagctgcattatttctactggggactcccatacattcgacccctacaacccaccaagtgtaagcagcaacgtgacccaccagttcactagccctggcgaattcacagtgtttgccgagtgcacaaccagtgagtggcatgttaccgctcagaggcaggtcaccgtacgcgataaaatggagacactgagtgtgactgcctgcagcgggctctctcaatcaggggctggacccttatgccaggccgtgttcggcgatcccctctggatccaggtggaactcgatggcggaacgggcgtgacctacactgttttgctcggcgacattacgctcgctgaatcaactacgcagaaggggagccttccatataacctgatcctcgatagagagacacagaaactgatggggcctggacggcacagacttgaaatccaggctacagggaatacaactacaagcactattagtagaaacattactgtgcacttggtggaattactgtccggtctgcaagccagctgggcctctgaccacctggagttggggcaggacttgctcatcaccataagcctggcccaaggcactcctgaggaacttaccttcgaagtcgcaggacttaacgctactttctctcatgagcaggtgagcttcggagaaccgtttgggatctgcaggctcgcagtgcccgtcgaggggacttttttggtgactatgttggtccggaacgctttctccaatctgtcactggagattggcaatatcacaattacagcccctagcggactgcaggagccctcgggtatgaacgctgaaggcaaatccaaagataagggggacatggaggtttacatccagccagggccatacgttgacccatttaccaccgtgacgcttgggtggcctgataatgacaaagaattgcgcttccagtggtcctgtgggtcctgctgggcactctggagctcttgtgtggagcgacaactgttgcgtacggatcagagagaattggttgtgccagcttcgtgcctgcccccacctgactccgccgtgaccctccgcctggctgtcctcagaggccaagaactggagaacagggccgaacagtgtctgtatgtgtcagcgccttgggagttgcggcctagagtaagctgtgagagaaattgtcgacccgtgaacgcctccaaggacattttgctcagagtaacgatgggcgaggacagtcccgttgccatgttttcctggtaccttgataacaccccgactgagcaggcagagcctctgctggatgcctgtcgactgagaggattctggccccgaagcttgactctccttcaatccaatacttcaactttgctgctgaactcttccttcctccagagcaggggagaagtaattcgtattagagctacagctctgactagacatgcctatggagaagatacgtacgtgataagtaccgtacccccaagggaggtgcccgcatgtactatagcccctgaagagggcactgtgctcactagtttcgctatcttttgtaacgcctcgactgcacttggcccactcgaattctgtttttgcctggaatctggtagttgcctgcactgtggcccagaaccagccctaccttccgtgtacttgccgttgggggaagaaaacaacgatttcgtgctgacagtagtgatttccgccactaatcgggctggtgatacacagcaaacccaagctatggccaaagtggcactcggggatacctgcgtagaggatgttgccttccaggccgctgtcagtgaaaagatccccactgccctgcagggcgaggggggtcccgaacaattgctgcagctggcaaaggccgtctcctcaatgctgaaccaggagcatgagtcccagggtagcggccagtcactaagtatagatgtcaggcagaaggttagagagcatgtgctgggaagcctaagtgcggtgaccaccggtcttgaggatgtccagcgagtgcaggaactggctgaagtgctcagggaagtgacatgtaggagcaaggagctgactccttccgctcagggatcctgcatgggagatagttgggaaggcgctccgcctgccgctcatgtgtcccatgccaggtag

SEQ ID NO: 34643 - DNA, 1560 bp, Artificial Sequence
  derived and/or modified sequence
tgattagcccagggcacccctgaggaactgacatttgaggttgccggactgaatgccacatttagtcacgaacaggttagctttggggagccctttgggatctgcagactggccgtgccagtagaggggacctttctggtgactatgctcgttcggaacgccttctctaatctctctctggagattggtaatattactatcaccgcgccttccggcttacaggagccatccgggatgaacgcagaaggtaaaagcaaagacaaaggagatatggaggtgtatattcagcctggaccttatgtagacccttttacaaccgtgactttgggctggccagacaatgataaagagctgcggttccagtggtcgtgtggatcttgctgggccctttggtcaagctgtgtcgagaggcagctgctccggacagaccaaagagaactggtggtgcccgcatcatgcctgccccctcccgattcagcagtgacgctgaggctggctgtcctcagagggcaagaattggagaaccgagctgaacagtgcctttacgtgagcgccccttgggagctgcgcccacgcgtctcttgtgagcgaaattgccggccagtgaatgcctcaaaggacatcctgctgagggtgaccatgggtgaggactcccctgtggcgatgttttcttggtacttagataatactcctaccgaacaggctgagcctctgctggatgcatgtcgcctccggggtttttggcctcggtctctgactttactgcagtccaatacttctacgctcctgttgaattcctcattccttcagagtagaggtgaggtgatcaggattagagcaaccgcccttactcgccacgcctatggggaagatacttatgtgatcagcacggtgcccccacgcgaagtgccagcctgcacaatcgcacccgaagagggaactgtcctcacgagctttgccatcttttgcaatgcctccaccgctctcgggccactggagttctgtttctgtctcgagtcaggttcctgcctccactgtggcccagaaccagctttgccttctgtatacctacccctcggggaggagaataatgacttcgttctaaccgttgtcatctcagctacgaatcgagctggcgatactcagcaaacccaagctatggccaaagtagcactgggcgatacgtgcgtggaagatgttgcatttcaggcagctgtgtctgaaaagattccaactgctcttcagggagaaggtggcccagaacagcttttgcagctcgccaaggcagtcagctcaatgctgaatcaggagcatgagtcccagggaagcgggcagtccctcagtattgacgtgagacaaaaagttagagagcacgttttggggtctctatcggcagtgacaaccggattagaagacgtgcagcgggtacaggaactggccgaggtcctgcgagaggtgacgtgtagatccaaagagctgacaccttctgcccaggggagctgtatgggtgatagctgggaaggagcccctccagcagcacacgtctcacacgcacggtag

SEQ ID NO: 34644 - protein, 317 aa, Artificial Sequence
  derived and/or modified sequence
MRLLAGWLCLSLASVWLARRMWTLRSPLTRSLYVNMTSGPGGPAAAAGGRKENHQWYVCNREKLCESLQAVFVQSYLDQGTQIFLNNSIEKSGWLFIQLYHSFVSSVFSLFMSRTSINGLLGRGSMFVFSPDQFQRLLKINPDWKTHRLLDLGAGDGEVTKIMSPHFEEIYATELSETMIWQLQKKKYRVLGINEWQNTGFQYDVISCLNLLDRCDQPLTLLKDIRSVLEPTRGRVILALVLPFHPYVENGGKWEKPSEILEIKGQNWEEQVNSLPEVFRKAGFVIEAFTRLPYLCEGDMYNDYYVLDDAVFVLKPV

SEQ ID NO: 34645 - DNA, 954 bp, Artificial Sequence
  derived and/or modified sequence
atgagactgctggccggctggctgtgcctgagcctggccagcgtgtggctggccagaagaatgtggaccctgagaagccccctgaccagaagcctgtacgtgaacatgaccagcggccccggcggccccgccgccgccgccggcggcagaaaggagaaccaccagtggtacgtgtgcaacagagagaagctgtgcgagagcctgcaggccgtgttcgtgcagagctacctggaccagggcacccagatcttcctgaacaacagcatcgagaagagcggctggctgttcatccagctgtaccacagcttcgtgagcagcgtgttcagcctgttcatgagcagaaccagcatcaacggcctgctgggcagaggcagcatgttcgtgttcagccccgaccagttccagagactgctgaagatcaaccccgactggaagacccacagactgctggacctgggcgccggcgacggcgaggtgaccaagatcatgagcccccacttcgaggagatctacgccaccgagctgagcgagaccatgatctggcagctgcagaagaagaagtacagagtgctgggcatcaacgagtggcagaacaccggcttccagtacgacgtgatcagctgcctgaacctgctggacagatgcgaccagcccctgaccctgctgaaggacatcagaagcgtgctggagcccaccagaggcagagtgatcctggccctggtgctgcccttccacccctacgtggagaacggcggcaagtgggagaagcccagcgagatcctggagatcaagggccagaactgggaggagcaggtgaacagcctgcccgaggtgttcagaaaggccggcttcgtgatcgaggccttcaccagactgccctacctgtgcgagggcgacatgtacaacgactactacgtgctggacgacgccgtgttcgtgctgaagcccgtgtag

SEQ ID NO: 34646 - DNA, 954 bp, Artificial Sequence
  derived and/or modified sequence
atgagactgcttgctggttggttgtgcttgtcactcgcgagcgtgtggctcgcacggcgcatgtggacactgagatctcccctcaccaggtccctgtacgtaaatatgacatctggacctggagggcctgccgctgcggcaggtggcaggaaggagaaccaccagtggtacgtgtgcaaccgcgagaagctgtgtgaatccttgcaggccgtgtttgttcaatcctacttagaccaggggacacagatctttctgaacaattctatcgagaagtcaggatggctgttcatccaactctaccacagctttgtgagcagcgtgttctctttgttcatgagccgtactagtattaacggcctcctgggacgtggcagcatgttcgtgttcagtcccgaccagttccaacgcctgttaaagattaacccagattggaaaactcacagactgctcgaccttggagccggcgatggcgaggtcacaaaaattatgtctccacattttgaagaaatctacgcaaccgagctcagtgagactatgatttggcagttacaaaagaaaaagtacagggtacttgggataaacgagtggcagaacactggtttccaatatgacgtgatctcttgcctgaatcttttagaccggtgtgatcagcccctcacactactgaaggacatccggtctgtactggagccaaccagaggaagggttattctcgccctggtcctgccgtttcacccgtacgttgaaaacggagggaaatgggagaagcctagcgaaatcctggaaattaaagggcagaactgggaggagcaggtaaactcactgccagaagtctttcggaaggctggattcgtgattgaagcgttcacccggctcccatatctatgtgagggggacatgtacaacgattattatgtcctcgatgacgccgtgtttgtactgaagccagtatag

SEQ ID NO: 34647 - DNA, 954 bp, Artificial Sequence
  derived and/or modified sequence
atgaggctgctggccggctggctgtgcctgagcctggcctctgtgtggctggcccggaggatgtggaccctgcggagccccctgaccaggagcctgtatgtgaacatgaccagcggccctgggggccctgctgctgctgctgggggcaggaaggagaaccaccagtggtacgtgtgcaaccgggagaagctgtgtgagagcctgcaggccgtgtttgtgcagagctacctggaccagggcacccagatcttcctgaacaacagcattgagaagagcggctggctgttcatccagctgtaccacagctttgtgagcagcgtcttcagcctcttcatgagcaggaccagcatcaatggcctgctgggccggggctccatgtttgtgttctccccagaccagttccagaggctgctgaagatcaacccagactggaagacccaccggctgctggacctgggcgctggagatggagaggtgaccaagatcatgagcccccactttgaggagatctatgccacagagctgtctgagaccatgatctggcagctgcagaagaagaagtacagagtgctgggcatcaatgagtggcagaacacaggcttccagtatgatgtgatcagctgcctgaacctgctggacagatgtgaccagcccctgaccctgctgaaggacatccgctctgtgctggagcccacccggggccgggtcatcctggccctggtgctgcccttccacccctacgtggagaatggaggcaagtgggagaagcccagcgagatcctggagatcaagggccagaactgggaggagcaggtgaacagcctgcctgaggtgttcaggaaggccggcttcgtcatcgaggccttcacccggctgccctacctgtgtgagggggacatgtacaatgactactacgtgctggatgatgctgtgtttgtgctgaagcctgtgtag

SEQ ID NO: 34648 - DNA, 954 bp, Artificial Sequence
  derived and/or modified sequence
atgcggctgctggccggctggctgtgcctgagcctggccagcgtgtggctggcccgcaggatgtggaccctgagatccccgcttaccagaagtctgtatgtcaacatgacaagcggcccaggcggccctgctgcggctgccggcggccgtaaagaaaaccatcagtggtacgtctgcaatagggaaaaactgtgcgagtccctgcaagccgtcttcgtgcagagttacctggaccaagggactcagatctttctcaataatagtatagaaaaaagcgggtggctctttatccagctctaccatagtttcgtaagttcagtatttagcctgtttatgtcaagaactagtataaacgggttgctcggccgcgggtcgatgttcgttttctcgcctgaccaatttcagcggctcctgaaaattaaccctgactggaagactcatcgcttgctggacctgggcgcgggagacggcgaagtgaccaagattatgagcccgcacttcgaagagatctatgcaactgaattgagtgaaaccatgatctggcagctgcagaaaaaaaagtacagggtgctggggataaatgagtggcaaaatacgggttttcagtacgacgtgatatcatgtctgaaccttctggatcgttgcgatcagcctctgaccctgttgaaggacatccggagtgttcttgaaccaacacggggccgcgttatcctggctcttgtcctccccttccatccgtacgtagaaaacgggggcaaatgggagaaacccagtgagattttagaaattaaagggcagaattgggaggagcaggtaaattcactgccggaggtctttaggaaagccgggttcgtaatcgaggccttcaccaggctcccatacctgtgtgagggtgatatgtataacgattactacgtactggacgatgccgtttttgtgctgaagcccgtgtag

SEQ ID NO: 34649 - DNA, 3191 bp, Artificial Sequence
  derived and/or modified sequence
ggaagggaagggggaggtgccgaggctgcgcgccggctgctcctccccacccccagcctttgccctgaagggggctggatgggcaaggcggccgcgatggctcgagctcgggcggtggcggcggtggccggaggcggcggtgcctcctcctcctcgccccggcgccggcggtgatccgagcgagcggccgcggcccccgatgagactgctggcgggctggctgtgcctgagcctggcgtccgtgtggctggcgcggaggatgtggacgctgcggagcccgctcacccgctccctgtacgtgaacatgactagcggcccgggtgggccggcggcggccgcgggcggcaggaaggagaaccaccagtggtatgtgtgcaacagagagaaattatgcgaatcactccaggctgtctttgttcagagttaccttgatcaaggaacacagatcttcttaaacaacagcattgagaaatcgggctggctatttatccaattatatcattcttttgtgtcatctgtttttagcctgtttatgtctagaacatctatcaatgggttgctaggaagaggctcaatgtttgtgttttcaccagatcagtttcagagactgcttaaaattaatccagactggaaaacccacagacttcttgatttaggtgctggagatggagaagtcacaaaaatcatgagccctcattttgaagaaatctatgccactgagctttctgaaactatgatatggcagcttcagaaaaagaaatacagagtccttggtataaatgaatggcagaatacggggttccagtatgatgtcatcagctgcctgaacttgctggaccgctgtgatcagcccctgactttgttaaaagatatcagaagtgtcttggagccaactagaggcagggtcatccttgcccttgtcctcccctttcatccctatgtggaaaacggtggcaagtgggagaaaccatcagaaattttggaaatcaaaggacagaactgggaagaacaagtgaatagtctgcctgaagttttcagaaaagctggttttgttatcgaagctttcaccagactaccatacctgtgtgaaggcgacatgtataatgactactacgttctggatgacgctgtctttgttctcaaaccagtataaacacgtggaggtcgaagtcttcagagtccgcaccctccgggatgtgcccttggaagagggtctgtgttcacaattacgtgaagggaggacccttggggaccgccattctaaatatcatgtaggaatttaaaaagccaaaatactaattatttctttgtagtgtgtaaaggaatgtttttaaaagacaaaaacccaactctttgtggatttttatcaactctttactcagagccactctccaatgcaggtcacactccaattatgatggaagatattttttatacttaattgcagtagggactcattcccagacaaagcaatagtcacgacttcatggaaccaatcaatggattgttttttgaagactggcaataaagctgtccattcaattccaaatactggttttaaggtatagccactgatattctttcatgtttagaaattctttctgttattattcaagaaaatgtttttaatcatgctaataaacttttttggagatgactttggcatcatgtttgaattcatataaagctcccctagcattttttattggtttggcttcaggagtacccaaatagtagcattatgagaatgacgcagacaatttgaataggggggaaggaaggcttcagacttgggggaaggggagattattgcaaattgcagtgaacactgagtcagtaaaaaaaaaaaacagaaacaaaaacccagcctcattcagatacagaacttcagggacccctccccccacccccccagttaatgctgctgtgaaaaatgcaaaataacctggttctgactttgtgatcactcatgtcccatacactgaactttgtttttttctggacaatctcaggttctcagaattgaaacattcagttttgtctactgacaaaatgcaactaaaaatgttttaattcaacttcttactctacacttatatacctctctcccagagcttggctcttccctgaaatccttaaaggagtttattatttgccaagaatatggtttgatgaagaccgtgtcagactcatgcattctggaatccgtgagtgcctccaaccataaacccagaaatgctgccatagaggaacccattagcaagatcaataaccatcgtggatattccaaagagcagagcatttaacccagaatctgaaatctcagtaataacagaaatgtcaatatgagattgtggttattaacaatatgttatcctcactactttatttcttttttcatccaggtgtttcattaagtattctcatttatatgctcatagaagtcatcagatcaacacattcactccaacacctgggtataaaggcgaattaaaacctgaagaattactttattattcattaagaactgcattcccacatcctcacaccaatatcttccactgttactgtgcagtcataataagagttgggttatgtgatttatgcaaaattgttattggtgtgttctaatgatttttttccaggaattcaagtaagtgaagtacaaatacttagcaccatagattgtaaaaatagaaagaggaaatgagaaaacttaatgtcgttcttgtacagttgagttttgcttctttataaactgtctgttaaaatcaggggttgctgttagactgtcaagcagaagtgatggatgttcaaggaggcaggttgccccaaagtgttttctaactttcaagtagagaactttatgctctaataagaaaaatacaactcattcttaaccacccccccaaaacagagaaaacacatacatttatgcattttaaagataaaaagtagtttctcaaaaaaatctgaagttctctgaaaaccagcttattaaaagtgctgttttgtggtgaaaattgaaaccaaatccactcacatttcctatcgggtcttgaaattcttggtggtgtgtcaccattccactagatggcagtgttgcttactgagtgtcaatggcttttttccccgtaaatggaatcatgtttttctcccccaaagtacaataaagctgccttgtctgcacc

SEQ ID NO: 34650 - DNA, 954 bp, Artificial Sequence
  derived and/or modified sequence
atgcggctgctggcaggctggttgtgtctgtcactggcctcggtctggctggcccgtcgaatgtggacgctgcgtagtcctctcacgagatctctctatgtgaatatgacttccggcccaggagggccagcggcagcagcgggaggcaggaaggagaatcaccagtggtacgtgtgtaatcgcgaaaagctctgcgagtccctacaagctgtcttcgtacagtcctatctcgaccagggaacgcagattttcctgaataattcgatcgagaaatctggctggttgtttatccagctgtaccatagcttcgtatcatcagtgtttagtctgtttatgtctagaaccagtataaatggcctacttggaagggggagcatgttcgttttcagccccgaccagttccagcggctcctaaaaattaaccctgattggaaaacacatcggctgctggacctcggtgccggagacggagaggtgactaagatcatgtccccacacttcgaagagatttacgcaacagagctgtctgagactatgatatggcagctacagaagaagaagtacagagtgctggggattaacgagtggcagaatacagggttccagtatgacgtgattagctgcctcaacctcctcgatcgctgtgaccagcccctgaccctgctgaaggatatccgctcagtcttagagccaactcgtggcagggtgatcctggccctcgtcctgcccttccacccatatgtcgagaatggcggtaagtgggaaaagccgagcgagattctcgagatcaagggacagaattgggaggagcaggtaaactctcttccggaggtgtttcgcaaggcgggattcgtcattgaggccttcactcgtttaccatacttatgcgaaggggacatgtataacgattattacgttctggatgatgccgtgttcgtcctgaagccggtgtag

SEQ ID NO: 34651 - protein, 461 aa, Artificial Sequence
  derived and/or modified sequence
MSREGAGAALVAEVIKDRLCFAILYSRPKSASNVHYFSIDNELEYENFYADFGPLNLAMVYRYCCKINKKLKSITMLRKKIVHFTGSDQRKQANAAFLVGCYMVIYLGRTPEEAYRILIFGETSYIPFRDAAYGSCNFYITLLDCFHAVKKAMQYGFLNFNSFNLDEYEHYEKAENGDLNWIIPDRFIAFCGPHSRARLESGYHQHSPETYIQYFKNHNVTTIIRLNKRMYDAKRFTDAGFDHHDLFFADGSTPTDAIVKEFLDICENAEGAIAVHCKAGLGRTGTLIACYIMKHYRMTAAETIAWVRICRPGSVIGPQQQFLVMKQTNLWLEGDYFRQKLKGQENGQHRAAFSKLLSGVDDISINGVENQDQQEPEPYSDDDEINGVTQGDRLRALKSRRQSKTNAIPLTVILQSSVQSCKTSEPNISGSAGITKRTTRSASRKSSVKSLSISRTKTVLR

SEQ ID NO: 34652 - protein, 462 aa, Artificial Sequence
  derived and/or modified sequence
MDEKSNKLLLALVMLFLFAVIVLQYVCPGTECQLLRLQAFSSPVPDPYRSEDESSARFVPRYNFTRGDLLRKVDFDIKGDDLIVFLHIQKTGGTTFGRHLVRNIQLEQPCECRVGQKKCTCHRPGKRETWLFSRFSTGWSCGLHADWTELTSCVPSVVDGKRDARLRPSRWRIFQILDAASKDKRGSPNTNAGANSPSSTKTRNTSKSGKNFHYITILRDPVSRYLSEWRHVQRGATWKASLHVCDGRPPTSEELPSCYTGDDWSGCPLKEFMDCPYNLANNRQVRMLSDLTLVGCYNLSVMPEKQRNKVLLESAKSNLKHMAFFGLTEFQRKTQYLFEKTFNMNFISPFTQYNTTRASSVEINEEIQKRIEGLNFLDMELYSYAKDLFLQRYQFMRQKEHQEARRKRQEQRKFLKGRLLQTHFQSQGQGQSQNPNQNQSKEQNDNTSNGTNDYIGSVEKWR

SEQ ID NO: 34653 - protein, 645 aa, Artificial Sequence
  derived and/or modified sequence
MALPACAVREFEPPRQPERGAPVRTTCPRRHSRVEAELAASRPGSVAASVRAGPPRGVSHGFHTRPLLDKPRKASSSLAGAACAPLFALLSRGRRRRMHVLRRRWDLGSLCRALLTRGLAALGHSLKHVLGAIFSKIFGPMASVGNMDEKSNKLLLALVMLFLFAVIVLQYVCPGTECQLLRLQAFSSPVPDPYRSEDESSARFVPRYNFTRGDLLRKVDFDIKGDDLIVFLHIQKTGGTTFGRHLVRNIQLEQPCECRVGQKKCTCHRPGKRETWLFSRFSTGWSCGLHADWTELTSCVPSVVDGKRDARLRPSRWRIFQILDAASKDKRGSPNTNAGANSPSSTKTRNTSKSGKNFHYITILRDPVSRYLSEWRHVQRGATWKASLHVCDGRPPTSEELPSCYTGDDWSGCPLKEFMDCPYNLANNRQVRMLSDLTLVGCYNLSVMPEKQRNKVLLESAKSNLKHMAFFGLTEFQRKTQYLFEKTFNMNFISPFTQYNTTRASSVEINEEIQKRIEGLNFLDMELYSYAKDLFLQRYQFMRQKEHQEARRKRQEQRKFLKGRLLQTHFQSQGQGQSQNPNQNQSQNPNPNANQNLTQNLMQNLTQSLSQKENRESPKQNSGKEQNDNTSNGTNDYIGSVEKWR

SEQ ID NO: 34654 - DNA, 1938 bp, Artificial Sequence
  derived and/or modified sequence
atggctctgcctgcatgtgctgttcgggaattcgagccccctcgacagcccgagaggggggcgccagtcaggacgacgtgcccacgacgtcactctagggtagaggcagagctggcagcctcccgacccggctctgtcgccgcctcagttcgcgccggcccccctcggggggtatcccatgggttccacacccggcccttgttggacaaacctcgtaaggcttcgtcatcgctggctggcgccgcgtgtgcacctttgttcgctctgctatctcgcggcaggcggcgtcgtatgcacgtgcttcggagacgatgggatctgggaagcctatgccgcgctctcctgaccagaggactggcagccctcggacacagccttaagcacgtcctcggggccatttttagtaagatcttcggcccaatggccagcgtggggaatatggatgaaaagagcaataagcttctgttagctctggttatgctgtttttattcgccgtgattgtattgcagtatgtgtgcccagggactgagtgtcagctgctgaggctccaggcattctctagcccagtgcctgacccttatcgctccgaggacgagtccagcgcaaggttcgtgccgaggtacaactttactcgaggcgatttactcaggaaggtggacttcgatattaagggagatgatctgatcgtttttctgcacattcagaagactggcggcactacctttggcagacatctggtgcggaacatacagctggaacagccatgtgagtgccgagtgggccagaagaagtgcacttgccataggcctggaaagcgggagacatggctctttagtagattcagtacaggctggagttgtggcctgcatgcagactggaccgagctaaccagctgcgttccctccgtggtcgatggtaagagagacgccaggctgcgcccgtccagatggaggatcttccaaatccttgatgcagcctctaaagataaacggggtagcccgaacacgaatgccggcgcaaattcaccttccagcacaaagacaagaaacacctccaagagtggcaagaattttcactatattaccattttgagagaccctgtgagtcgctatctgagtgagtggagacacgttcagcggggtgctacgtggaaagccagcctccacgtttgtgacggcaggccaccgacttctgaagaacttccctcatgctacacaggcgatgattggagtggctgtcctctgaaagagttcatggactgcccctataatcttgccaacaaccggcaggtgagaatgctcagtgacctgactttagtcggatgctataatttatccgtcatgccagaaaagcaaaggaacaaagtcctgctggaatcagcgaagagcaacctgaagcacatggcctttttcgggctgaccgagtttcaaaggaaaactcagtatctattcgagaaaacgtttaatatgaactttatcagcccttttacccagtacaatactactcgtgccagttccgtcgagatcaacgaggaaatccagaagaggattgaggggctcaatttcctggatatggagttgtattcctatgccaaagacctctttctgcagcgctatcagttcatgagacagaaagaacaccaggaagcgcgtaggaagcgacaggagcaaaggaaattcttgaaaggaagactcctccagacgcacttccagagtcagggtcaaggtcagtctcaaaatcctaaccagaatcaatcccagaaccctaatccgaacgccaaccagaatcttacgcaaaatctaatgcagaatcttactcagagcctcagccagaaagaaaacagagagtctcccaaacaaaattctggcaaagaacagaatgataacacctccaatggtaccaatgactatatcggctcagtagaaaaatggcgctag

SEQ ID NO: 34655 - DNA, 2607 bp, Artificial Sequence
  derived and/or modified sequence
aagccaggctgacctttatgctcccagaatcatcagccttttcattggaaaccatggaaggacggttctgggaaaataatgaaaatcataccacaccatagagacaaccagaagccctgctcagatgacagagttctcctcgccttccagaaaatgcccccgcttccgctggagaatggaaattggcaaagagagacggaaaagctccaatttgcgcctttgctattttaggagaggttgaaattacgagccaaagtggagtgatgcgctaagcggagtgacctccgtactccaagaaaagagaaaacccaggttctctgcttgtgaagtggctcgagctcttaggcgtgaggcattattatataaattcaagctcgctcgtgatccttagtaccctgagttgcctgaaggggggaatggcactgcctgcgtgtgcagtccgggagttcgagccgccgcggcaaccggagcgaggagcgcccgtccgcaccacctgtccccgccggcattccagagtagaggccgaattggcagcgagccggcccgggtcggtcgccgcctcagttcgcgcgggccctcctaggggtgtgtctcacggattccacacccggccgctcctggacaagccccgaaaggcgtcttcttccctggcgggagccgcgtgcgccccgcttttcgcgctgctgtcccggggccgccgcaggcggatgcacgtcctcaggcgacgctgggacctgggctccctctgccgggccctgctcactcggggcctggccgccctgggccactcgctgaagcacgtgctcggtgcgatcttctccaagattttcggccccatggccagcgtcgggaacatggatgagaaatccaacaagctgctgctagctttggtgatgctcttcctatttgccgtgatcgtcctccaatacgtgtgccccggcacagaatgccagctcctccgcctgcaggcgttcagctccccggtgccggacccgtaccgctcggaggatgagagctccgccaggttcgtgccccgctacaatttcacccgcggcgacctcctgcgcaaggtagacttcgacatcaagggcgatgacctgatcgtgttcctgcacatccagaagaccgggggcaccactttcggccgccacttggtgcgtaacatccagctggagcagccgtgcgagtgccgcgtgggtcagaagaaatgcacttgccaccggccgggtaagcgggaaacctggctcttctccaggttctccacgggctggagctgcgggttgcacgccgactggaccgagctcaccagctgtgtgccctccgtggtggacggcaagcgcgacgccaggctgagaccgtccaggtggaggatttttcagattctagatgcagcaagtaaggataaacggggttctccaaacactaacgcaggcgccaactctccgtcatccacaaagacccggaacacatctaagagtgggaagaacttccactacatcaccatcctccgagacccagtgtcccggtacttgagtgagtggaggcatgtccagagaggggcaacatggaaagcatccctgcatgtctgcgatggaaggcctccaacctccgaagagctgcccagctgctacactggcgatgactggtctggctgccccctcaaagagtttatggactgtccctacaatctagccaacaaccgccaggtgcgcatgctctccgacctgaccctggtaggctgctacaacctctctgtcatgcctgaaaagcaaagaaacaaggtccttctggaaagtgccaagtcaaatctgaagcacatggcgttcttcggcctcactgagtttcagcggaagacccaatatctgtttgagaaaaccttcaacatgaactttatttcgccatttacccagtataataccactagggcctctagtgtagagatcaatgaggaaattcaaaagcgtattgagggactgaattttctggatatggagttgtacagctatgccaaagacctttttttgcagaggtatcagtttatgaggcagaaagagcatcaggaggccaggcgaaagcgtcaggaacaacgcaaatttctgaagggaaggctccttcagacccatttccagagccagggtcagggccagagccagaatccgaatcagaatcagagtcagaacccaaatccgaatgccaatcagaacctgactcagaatctgatgcagaatctgactcagagtttgagccagaaggagaaccgggaaagcccgaagcagaactcaggcaaggagcagaatgataacaccagcaatggcaccaacgactacataggcagtgtagagaaatggcgttaaatggctcaaaaaggcctgtacatacttctcccaaagcgccactgaaaagatggcatagcttaaaagatgaaagtgtccaaacacatcctgcttccttcattggggaagttttaaaaaaaagtttagatgttgcctttacagttgcctttcaattcagtgttatactgtgtgtaggtaaaacaaatctcaatatggaattaaattgtctttttggggttggactaaatatgaaatccgaaagccaaaccagact

SEQ ID NO: 34656 - DNA, 1938 bp, Artificial Sequence
  derived and/or modified sequence
atggccctgcctgcctgtgctgtgcgggagtttgagcccccccggcagcctgagcggggggcccctgtgaggaccacctgccccaggaggcacagccgggtggaggccgagctggccgccagcaggcctggctctgtggccgcctctgtgcgggccggccccccccggggcgtgagccacggcttccacacccggcccctgctggacaagcccaggaaggccagcagcagcctggccggggccgcctgtgcccccctgtttgccctgctgagccggggcagaagaagaaggatgcacgtgctgcggcggcgctgggacctgggcagcctgtgccgggccctgctgacccggggcctggccgccctgggccacagcctgaagcacgtgctgggcgccatcttcagcaagatcttcggccccatggcctctgtgggcaacatggatgagaagagcaacaagctgctgctggccctggtgatgctgttcctgtttgctgtgattgtgctgcagtatgtgtgccccggcacagagtgccagctgctgcggctgcaggccttcagcagccctgtgcctgacccctacagaagtgaagatgagagcagcgccaggtttgtgccccgctacaacttcaccaggggggacctgctgaggaaggtggactttgacatcaagggagatgacctgattgtgttcctgcacatccagaagacaggaggcaccaccttcggccgccacctggtgaggaacatccagctggagcagccctgtgaatgtcgggtgggccagaagaagtgcacctgccacaggcctgggaagcgggagacctggctgttcagccgcttcagcacaggctggagctgtggcctgcatgctgactggacagagctgaccagctgtgtgcccagcgtggtggatggcaagagagatgcccggctgcggcccagccgctggaggatcttccagatcctggatgctgccagcaaggacaagaggggcagccccaacaccaatgctggggccaacagccccagcagcaccaagaccaggaacaccagcaagagcggcaagaacttccactacatcaccatcctgcgggaccctgtgagccgctacctgtctgagtggaggcatgtgcagagaggagccacctggaaggccagcctgcacgtgtgtgatggccggccccccaccagcgaggagctgcccagctgctacacaggagatgactggagcggctgccccctgaaggagttcatggactgcccctacaacctggccaacaaccggcaggtgaggatgctgagtgacctgaccctggtgggctgctacaacctgtctgtgatgcctgagaagcagaggaacaaggtgctgctggagagcgccaagagcaacctgaagcacatggccttcttcggcctgacagagttccagaggaagacccagtacctgtttgagaagaccttcaacatgaacttcatcagccccttcacccagtacaacaccacccgggccagctctgtggagatcaatgaggagatccagaagagaattgagggcctgaacttcctggacatggagctgtacagctatgccaaggacctcttcctgcagcgctaccagttcatgaggcagaaggagcaccaggaggcccggaggaagaggcaggagcagaggaagttcctgaagggccgcctgctgcagacccacttccagagccagggccagggccagagccagaaccccaaccagaaccagagccagaaccccaaccccaatgccaaccagaacctgacccagaacctgatgcagaacctgacccagagcctgagccagaaggaaaatcgggagagccccaagcagaacagcggcaaggagcagaatgacaacaccagcaatggcaccaatgactacatcggctctgtggagaagtggaggtag

SEQ ID NO: 34657 - DNA, 1938 bp, Artificial Sequence
  derived and/or modified sequence
atggccctgcccgcctgcgccgtgcgggagttcgagcccccccggcagccagagcgcggggctcctgtccgcaccacttgcccgagaaggcatagcagggtggaggcggagctagctgcaagccgcccaggctccgtcgcagctagcgttagggcagggcctccccgcggtgtgagccacggctttcacaccagaccgcttctcgacaaaccacgcaaggcctcttcctcattggctggcgccgcctgtgctccgctgtttgcgctactgagccgcgggaggcgtcgcaggatgcacgttttgcgcaggaggtgggatctcgggagtttgtgtagagcactgctgacaagaggtctggcagccctcggtcactctctcaagcacgtgctgggcgcaattttcagtaaaatttttggcccgatggcatccgttggcaacatggatgagaagtccaacaaactgctcctggctctggtgatgctattcttgtttgcggtaattgtgttgcagtatgtctgcccgggaacagagtgtcaactgttacgacttcaggccttcagcagtccggtgcctgacccctacagatccgaagatgagtcgagcgcaaggtttgttccacgttataacttcactcgaggagaccttctgcggaaagtcgacttcgatattaagggggacgacttgatcgttttcctacacattcaaaagactggcggaacaaccttcggcaggcatctggtcagaaacatccagctggagcagccatgcgaatgccgggtggggcaaaagaaatgcacatgccacagacccggcaagagggagacatggctttttagccgcttctctacgggttggagttgtggactccacgccgactggacagagctcaccagctgtgtcccctctgtcgtggacgggaagagagatgctagacttcgtccgtcccgctggcggatatttcagatcctggatgccgcgtctaaagacaagcgcggcagccctaacactaacgccggcgcgaactcacctagcagtacaaagaccaggaacacctccaagagcggcaaaaactttcattatattacaattctacgggatccggtttcgcggtacctgtctgaatggcggcatgttcaaaggggggcaacatggaaggccagccttcacgtgtgcgatggtaggcccccaacatccgaggaactgccaagctgttataccggcgacgactggtcaggctgcccattaaaagaattcatggactgtccttacaacctcgccaacaacaggcaggtgcggatgctgtctgatctgaccctggtgggatgctacaacttatctgttatgcctgagaagcagagaaacaaagttctattggaaagcgccaagagcaatctgaagcacatggcgttcttcggtttgacagaatttcaacggaagacacagtacctgttcgagaagacttttaacatgaacttcatctcacccttcacccaatacaatacaacgagagcatcctccgtggagatcaatgaagagatccaaaaaagaatcgaaggcctaaacttccttgatatggagctgtattcatatgctaaggatctgttcctccagaggtatcagtttatgcggcagaaggagcaccaggaggcgcggagaaagcggcaggagcaaagaaagtttctgaagggccgactgctccagacccactttcagtcacagggccaggggcagtcccagaaccctaatcagaaccagagccagaatccgaaccccaatgcaaaccagaatttaacccagaaccttatgcagaacctcactcaatctctgagtcagaaagagaatcgtgagagccccaagcagaactccggaaaagaacagaatgacaatacatccaacggcactaacgactacatcggaagtgtcgaaaagtggcgttag

SEQ ID NO: 34658 - DNA, 1938 bp, Artificial Sequence
  derived and/or modified sequence
atggcgttgcccgcttgcgccgtgagagaatttgagcctccacgccagcctgagcgcggtgccccagtccgcacaacttgtcccagacgacactcacgagtggaggcagagctcgccgcttcacgccctgggagtgtggctgcctctgtgagagccggtcccccaaggggcgtctcccacggttttcatacacggccactcctggacaagcccaggaaagcctcttcctccttggccggagccgcatgtgcccctctgtttgccctcctcagtaggggcagacgccgacgaatgcacgttttgcgacggaggtgggaccttggctctctttgccgggcactcctcacccggggtctggcggctctcggtcattctctgaagcacgtgcttggggcaatcttcagtaaaatctttggcccaatggcctccgttggaaatatggacgagaagagcaataagctgttgctggcccttgtcatgctgtttttattcgccgtcatcgttctacagtacgtgtgtccaggtaccgagtgccaattgttgcggctgcaggccttcagctccccagttcctgatccatacagaagcgaggacgaaagctcagctcgattcgtgcctcggtacaacttcaccagaggggacctactgcgcaaggtcgactttgacatcaagggcgatgacctcatcgtctttctgcacattcaaaagacagggggaaccacctttggccgacacctggtgaggaatattcaactggagcagccttgcgagtgccgagttggccagaagaagtgcacctgccaccgccctggaaaacgcgagacgtggctgttctctcggttctcaaccggctggtcctgtgggttgcacgctgactggactgaactcacttcctgcgtaccctcggtggtcgacggtaagcgcgatgctcggctacggccttcgagatggcgcatattccaaatactggatgccgctagcaaggataagagaggttcccccaacacaaatgctggcgcaaactccccttcttccacaaaaacacgcaacacctctaaaagcggaaaaaacttccactacatcactatcctgagggacccagtgtctagatatctgagcgagtggcgtcatgtgcagagaggggctacatggaaggcttccttgcatgtgtgtgacgggcgtcccccaacctctgaggagcttccctcgtgctacaccggggacgattggtccgggtgccccttaaaagaattcatggactgcccttacaacctggccaataataggcaagttcgcatgctttctgaccttacacttgttggctgctacaatctgagcgtgatgcctgaaaaacaacgcaacaaagtcctgttggaaagcgcaaaatcaaacctgaagcatatggcttttttcggtctgacagaattccagcgaaagacacaatatttgtttgaaaagacatttaacatgaatttcatttcccctttcacacaatataataccacgcgagctagctcagtcgagatcaacgaagagatccagaaaaggatagaaggcctgaattttctggacatggagctgtattcatacgcaaaagacctgtttctgcagagatatcagtttatgagacagaaagagcaccaggaagcccgacgcaaacggcaggagcagcggaagttcctgaaagggagactgttgcagacacactttcagtctcagggccaaggccaaagccagaatcctaaccagaaccagagtcaaaacccaaatcccaacgcaaaccagaacctcacgcaaaaccttatgcagaatctgacgcagagtttgagtcagaaggagaatcgggagtcccctaaacaaaattctgggaaggagcaaaatgataacacgtccaatggcacgaatgactacattggttccgtggagaagtggagatag

SEQ ID NO: 34659 - DNA, 1938 bp, Artificial Sequence
  derived and/or modified sequence
atggccctgcccgcctgcgccgtgagagagttcgagccccccagacagcccgagagaggcgcccccgtgagaaccacctgccccagaagacacagcagagtggaggccgagctggccgccagcagacccggcagcgtggccgccagcgtgagagccggcccccccagaggcgtgagccacggcttccacaccagacccctgctggacaagcccagaaaggccagcagcagcctggccggcgccgcctgcgcccccctgttcgccctgctgagcagaggcagaagaagaagaatgcacgtgctgagaagaagatgggacctgggcagcctgtgcagagccctgctgaccagaggcctggccgccctgggccacagcctgaagcacgtgctgggcgccatcttcagcaagatcttcggccccatggccagcgtgggcaacatggacgagaagagcaacaagctgctgctggccctggtgatgctgttcctgttcgccgtgatcgtgctgcagtacgtgtgccccggcaccgagtgccagctgctgagactgcaggccttcagcagccccgtgcccgacccctacagaagcgaggacgagagcagcgccagattcgtgcccagatacaacttcaccagaggcgacctgctgagaaaggtggacttcgacatcaagggcgacgacctgatcgtgttcctgcacatccagaagaccggcggcaccaccttcggcagacacctggtgagaaacatccagctggagcagccctgcgagtgcagagtgggccagaagaagtgcacctgccacagacccggcaagagagagacctggctgttcagcagattcagcaccggctggagctgcggcctgcacgccgactggaccgagctgaccagctgcgtgcccagcgtggtggacggcaagagagacgccagactgagacccagcagatggagaatcttccagatcctggacgccgccagcaaggacaagagaggcagccccaacaccaacgccggcgccaacagccccagcagcaccaagaccagaaacaccagcaagagcggcaagaacttccactacatcaccatcctgagagaccccgtgagcagatacctgagcgagtggagacacgtgcagagaggcgccacctggaaggccagcctgcacgtgtgcgacggcagaccccccaccagcgaggagctgcccagctgctacaccggcgacgactggagcggctgccccctgaaggagttcatggactgcccctacaacctggccaacaacagacaggtgagaatgctgagcgacctgaccctggtgggctgctacaacctgagcgtgatgcccgagaagcagagaaacaaggtgctgctggagagcgccaagagcaacctgaagcacatggccttcttcggcctgaccgagttccagagaaagacccagtacctgttcgagaagaccttcaacatgaacttcatcagccccttcacccagtacaacaccaccagagccagcagcgtggagatcaacgaggagatccagaagagaatcgagggcctgaacttcctggacatggagctgtacagctacgccaaggacctgttcctgcagagataccagttcatgagacagaaggagcaccaggaggccagaagaaagagacaggagcagagaaagttcctgaagggcagactgctgcagacccacttccagagccagggccagggccagagccagaaccccaaccagaaccagagccagaaccccaaccccaacgccaaccagaacctgacccagaacctgatgcagaacctgacccagagcctgagccagaaggagaacagagagagccccaagcagaacagcggcaaggagcagaacgacaacaccagcaacggcaccaacgactacatcggcagcgtggagaagtggagatag

SEQ ID NO: 34660 - DNA, 375 bp, Artificial Sequence
  derived and/or modified sequence
atgttgatgacggcatgcgacctgggcgccgtgactaagccatgggagatcagtcggcaggtggctgaactagtcactagcgaattctttgagcaaggagaccgcgaacgactcgaactgaagcttaccccttcggcaatttttgaccgaaaccggaaggacgagttgccccgattgcaactggagtggattgactctatctgcatgccgttataccaggctctcgttaaggtgaatgtcaaattgaagcccatgcttgactccgttgccacaaacagatctaagtgggaggaattgcaccagaagaggctcttggcatccacagcgtcaagctcccccgcctctgttatggttgccaaagaggaccggaattag

SEQ ID NO: 34661 - DNA, 375 bp, Artificial Sequence
  derived and/or modified sequence
atgctgatgacagcctgtgacctgggcgctgtgaccaagccctgggagatcagccggcaggtggccgagctggtgaccagcgagttctttgagcagggcgaccgggagcggctggagctgaagctgaccccatctgccatctttgacaggaacaggaaggatgagctgccccggctgcagctggagtggattgacagcatctgcatgcccctgtaccaggccctggtgaaggtgaatgtgaagctgaagcccatgctggacagcgtggccaccaacagaagcaagtgggaggagctgcaccagaagaggctgctggccagcacagccagcagcagccctgcctctgtgatggtggccaaggaggacagaaattag

SEQ ID NO: 34662 - DNA, 375 bp, Artificial Sequence
  derived and/or modified sequence
atgctgatgaccgcctgcgacctgggcgccgtgaccaagccctgggagatctccagacaggtcgcagagctcgtaacatccgaattcttcgagcagggcgacagagaaagacttgagctgaagttgacgccaagtgctatcttcgacagaaaccggaaagacgagctacctcggctgcagctagaatggattgattctatatgcatgccactgtatcaagctctggttaaggtcaatgttaagttgaagccaatgcttgattccgtggccaccaacaggagtaagtgggaagaactgcaccaaaagcggctactggccagcactgcctccagtagtcccgcatcagtcatggtcgcaaaggaggaccggaattag

SEQ ID NO: 34663 - DNA, 1204 bp, Artificial Sequence
  derived and/or modified sequence
agtgctgccccttgttgaggaaaggaagatatcaatgttaatgacagcctgtgaccttggagccgtgaccaaaccgtgggagatctccagacaggtggcagaacttgtaaccagtgagttcttcgaacaaggagatcgggagagattagagctcaaactcactccttcagcaatttttgatcggaaccggaaggatgaactgcctcggttgcaactggagtggattgatagcatctgcatgcctttgtatcaggcactggtgaaggtcaacgtgaaactgaagccgatgctagattcagtagctacaaacagaagtaagtgggaagagctacaccaaaaacgactgctggcctcaactgcctcatcctcccctgccagtgttatggtagccaaggaagacaggaactaaacctccaggtcagctgcagctgcaaaatgactacagcctgaagggccattttcagtccagcaatgtcatccttttgttcttttagctcagaaagacctaacatctcaaggatgcactgggaagcatgcctgggctttcaccttgaagcatggtcagcagcagagagagcaacgggaaggacaaagaaagaggtggggcagggagcacaccccaggaccctcacttttccctaatgaacacgcatgggctgaaatgaaggctctgggtaggggactgttttggatccaaggacctgtggacagtcggcctacttactctgagctgagggaacactgaacagtaaaagcgtcattagcgctgcttcgttttgtatagggcttttctgtttgttacaagccaaacactgcctgtctttgcttcctgtccctgaatgcctttttgtgccagactgtcccaagaatcctaatttgtattccatagaggtattttatttttaatcctagagcttcttattgatggatcctttagaattgcctacctaaaaggtaaactatactatccttataaatactgatcaatcccagttctccccctaaaaatgaatacatagtaggactatagcaaatgtgtttgatgggtaattctagactgggactatggtacccttttccagagttttaaaattcaaccttcattacagacaaagttttctcccagaaggaatggattgatagattttgattaaagtaagggtggaaggaaatctgtagctggatttaccacaagtgacatcta

SEQ ID NO: 34664 - DNA, 375 bp, Artificial Sequence
  derived and/or modified sequence
atgttgatgaccgcttgcgacctaggcgctgttactaaaccctgggaaatttcccgacaagtggctgagctggtgacaagtgaattttttgaacaaggcgacagggaacgccttgagcttaaattgactccatctgctatcttcgacagaaataggaaggacgagcttccgaggctgcaattggagtggatcgatagtatttgcatgcctctgtaccaggcactggttaaagtgaacgtgaagctcaaacccatgctcgactcagtggccacaaaccgcagcaaatgggaagagctgcaccagaaacggctgctggcaagtactgcctcaagctcaccagcatctgtaatggtggcaaaggaagataggaattag

SEQ ID NO: 34665 - DNA, 375 bp, Artificial Sequence
  derived and/or modified sequence
atgctgatgaccgcctgcgacctgggcgccgtgaccaagccctgggagatcagcagacaggtggccgagctggtgaccagcgagttcttcgagcagggcgacagagagagactggagctgaagctgacccccagcgccatcttcgacagaaacagaaaggacgagctgcccagactgcagctggagtggatcgacagcatctgcatgcccctgtaccaggccctggtgaaggtgaacgtgaagctgaagcccatgctggacagcgtggccaccaacagaagcaagtgggaggagctgcaccagaagagactgctggccagcaccgccagcagcagccccgccagcgtgatggtggccaaggaggacagaaactag

SEQ ID NO: 34666 - protein, 683 aa, Artificial Sequence
  derived and/or modified sequence
MLKQARRPLFRNVLSATQWKKVKITRLVQISGASLAEKQEKHQDFLIQRQTKTKDRRFNDEIDKLTGYKTKSLLCMPIRSSDGEIIGVAQAINKIPEGAPFTEDDEKVMQMYLPFCGIAISNAQLFAASRKEYERSRALLEVVNDLFEEQTDLEKIVKKIMHRAQTLLKCERCSVLLLEDIESPVVKFTKSFELMSPKCSADAENSFKESMEKSSYSDWLINNSIAELVASTGLPVNISDAYQDPRFDAEADQISGFHIRSVLCVPIWNSNHQIIGVAQVLNRLDGKPFDDADQRLFEAFVIFCGLGINNTIMYDQVKKSWAKQSVALDVLSYHATCSKAEVDKFKAANIPLVSELAIDDIHFDDFSLDVDAMITAALRMFMELGMVQKFKIDYETLCRWLLTVRKNYRMVLYHNWRHAFNVCQLMFAMLTTAGFQDILTEVEILAVIVGCLCHDLDHRGTNNAFQAKSGSALAQLYGTSATLEHHHFNHAVMILQSEGHNIFANLSSKEYSDLMQLLKQSILATDLTLYFERRTEFFELVSKGEYDWNIKNHRDIFRSMLMTACDLGAVTKPWEISRQVAELVTSEFFEQGDRERLELKLTPSAIFDRNRKDELPRLQLEWIDSICMPLYQALVKVNVKLKPMLDSVATNRSKWEELHQKRLLASTASSSPASVMVAKEDRN

SEQ ID NO: 34667 - protein, 130 aa, Artificial Sequence
  derived and/or modified sequence
MPIRSSDGEIIGVAQAINKIPEGAPFTEDDEKVMQMYLPFCGIAISNAQLFAASRKEYERSRALLEVVNDLFEEQTDLEKIVKKIMHRAQTLLKCERCSVLLLEDIESPVVKFTKSFELMSPKCSADAEN

SEQ ID NO: 34668 - DNA, 2052 bp, Artificial Sequence
  derived and/or modified sequence
atgctcaagcaagcccgaaggcccttatttcgaaacgttctgtctgccacccaatggaagaaagtgaaaatcacacgactcgtacagattagcggcgcatctctcgctgagaagcaggagaagcatcaggactttttaattcagaggcagaccaagactaaagacaggcgctttaatgatgaaatcgacaagttaaccgggtacaagacaaaatctcttctctgcatgccaattcgctcatccgacggcgagattatcggcgtggcacaggctattaataagattccagagggcgccccattcacagaggatgacgagaaggtgatgcagatgtacctcccattctgtggcattgcaatcagtaacgcccaattgttcgcagcttctcgaaaagaatacgagcgcagtagggccctgctcgaggtggtcaacgacctgtttgaggagcaaactgacctcgaaaaaatcgttaagaagattatgcaccgcgcccagacactgcttaagtgcgagcgctgttcggttctgttactagaggacattgaatctcccgtcgtgaagttcacgaaatcatttgaactaatgagccccaagtgttccgcagatgccgagaatagtttcaaagagtccatggaaaagagctcgtatagtgattggctgatcaacaacagcattgctgagttggtggcctccaccggtctgcccgtgaatatatcggatgcgtaccaggaccccaggttcgacgccgaagctgatcagatctcggggtttcacatccgcagtgttctctgcgtgcccatatggaatagcaatcatcagatcataggggtcgcccaggtactgaataggcttgatggcaagccattcgatgatgctgaccagcgtttgtttgaggcattcgtgatcttttgcggcctggggataaataacaccataatgtatgatcaggtcaaaaaatcctgggcaaagcagtccgtcgcacttgacgttctctcataccacgctacctgttccaaagccgaagtggataaatttaaggcagcaaatataccgcttgtgtctgaactggccatcgacgacatccacttcgatgacttcagcttggacgtagatgctatgatcactgccgccctgcgcatgttcatggagctggggatggtgcagaagttcaaaatcgactatgagaccttgtgtagatggttgctaactgtcaggaagaactaccgaatggtactctaccacaactggagacatgcatttaatgtgtgtcaactcatgttcgccatgctgactactgctggtttccaggacatactgacagaagtggaaatcctggccgtcattgtggggtgcctttgtcacgaccttgatcatcgaggaacaaataacgcctttcaagccaaatcaggctccgcactagctcagctgtatggaactagcgctacactggagcaccaccacttcaaccatgctgtgatgatactgcaaagtgaaggccacaacatctttgcaaacctttcgtcaaaagagtattctgatttgatgcagctccttaaacagtctatcctggcaacagatcttacactgtacttcgagaggcgtacagagttttttgagcttgtgtccaagggagagtacgattggaatataaagaatcacagggatatatttagatccatgttgatgactgcctgcgaccttggcgcggtcacgaagccatgggaaatctcacgacaggtcgcagaacttgttacttccgagtttttcgaacagggcgatcgggaaagactggagctgaagctgaccccttctgctatctttgataggaacagaaaggatgagctgcctcggctacaactagagtggattgattccatttgcatgcctttatatcaagcgctggtgaaggttaacgtgaagcttaagcccatgctggactccgtggcaacgaataggagcaagtgggaagagttgcaccagaaaaggctgctggcttcaacagcctccagctcgcctgctagtgtgatggtagctaaggaggaccggaactag

SEQ ID NO: 34669 - DNA, 1470 bp, Artificial Sequence
  derived and/or modified sequence
atgagcccgaaatgctccgccgacgcagagaactccttcaaagaaagcatggagaaatcctcttactcagactggctgataaacaacagtatcgccgagctggtggctagcaccggccttcccgttaacatttcagacgcctatcaagacccacggttcgatgctgaagccgaccaaatctccggtttccatatccgcagcgtgctgtgtgttccgatatggaattctaatcatcagattatcggcgtggcacaggtactaaatcgcttagatggcaaaccgtttgatgatgccgatcagcgcctgtttgaggcgttcgtgatcttctgcgggctgggaattaacaatacaattatgtacgaccaggtgaaaaaaagttgggccaaacagagcgtcgctttggatgttctgtcctatcatgcaacctgttcaaaggccgaagtggataaattcaaagctgcgaatattcccctggtcagcgagctggctatcgatgatatccactttgatgatttttctctagacgttgacgccatgatcaccgcagcactgcggatgttcatggaactcggcatggttcagaagttcaagatcgactatgagactctgtgccgctggttgttgacagtgcgcaagaactacaggatggtgctttatcacaattggaggcacgcctttaacgtgtgccagctcatgttcgccatgcttacaactgctgggtttcaggacatcttaaccgaagtggaaatcttagcggtgattgtgggttgcctctgtcacgatctagaccatcgcggcacaaacaatgcgttccaggctaaatcaggctctgctctggcacagttgtatggtacttcagccacacttgagcatcatcatttcaaccacgcagtgatgatattacagagtgagggccacaacattttcgcaaacttatctagcaaggaatatagtgatctgatgcaactgctcaagcaatcaatacttgcaaccgatctaacactttatttcgaaaggaggactgagttttttgagctggtgtctaagggagaatacgactggaacatcaaaaatcatcgggacatttttaggtcaatgctgatgaccgcgtgtgacctgggcgccgtgacgaagccttgggagatcagtcgacaggttgcagagctggttaccagcgaattcttcgaacagggggacagagagagactggaattgaagctgacaccctccgctatattcgaccggaacaggaaggacgagctcccccgactgcagctggaatggatagactccatctgtatgccactgtatcaggccctggtgaaggtgaatgttaaattgaagcctatgctggacagtgtcgcaacgaacagatctaaatgggaggaactccaccaaaagcggctgttagcgagtacagcgtcaagcagccccgctagcgtgatggtcgccaaagaggatcgtaattag

SEQ ID NO: 34670 - DNA, 1728 bp, Artificial Sequence
  derived and/or modified sequence
atgcagatgtacttgcctttctgcggaattgccataagtaacgcccagttattcgccgccagtcggaaagaatacgaacgctcaagggcattgctggaggttgtcaacgatctttttgaggagcagacagacttggaaaaaatcgtcaaaaaaatcatgcatcgggctcagacactgctgaagtgcgaaaggtgctccgtgttactgctggaggacatagagtcacctgtcgtcaagttcacaaaaagtttcgaactgatgtctccaaagtgttcagcagacgctgaaaacagttttaaagaatctatggagaaatccagttattccgactggttgatcaacaattctatcgcagagctggtggcttctacgggcctccccgtgaatataagcgacgcataccaggacccaaggttcgatgccgaagcagatcagatatcagggtttcacatcaggtctgtactgtgtgtacccatctggaactctaaccaccaaatcatcggggtagcacaggtcctgaatcgcctagacggaaaaccatttgatgatgcagaccaaaggctcttcgaggcattcgtcatattctgtgggcttggcatcaacaataccatcatgtacgatcaggtcaagaaaagctgggctaagcaaagtgtcgccctagacgttctgagttaccatgccacctgttccaaggctgaagtcgacaagttcaaggcagcaaacatacctctggtgagcgagctcgcgatcgacgatatccattttgatgacttttccttggacgttgacgctatgatcacagccgctctgcgcatgttcatggagttgggtatggtacagaagtttaaaatcgattatgagacattgtgccgatggctactgacagtgaggaaaaattacaggatggttctgtaccacaactggcgccacgcatttaacgtgtgccagcttatgtttgccatgttgactaccgcggggttccaagacattctgacagaggtcgaaatactagcagtaattgtggggtgcctgtgccatgacctggaccatagagggacaaataacgctttccaggcaaagtccggatcagcattggcccagctgtatgggacctctgctaccttagaacaccaccactttaaccatgcagtgatgatcctacagtcagagggtcataacatttttgcaaatttaagctctaaggaatattccgacctgatgcagctactcaaacagagcattctggccacagacttaacactgtactttgagcgtagaacggagtttttcgagctggtgtccaaaggcgaatacgattggaatataaaaaaccatcgggacatcttccgctcaatgctcatgacagcatgtgatctcggggctgtaaccaagccttgggaaatctcccgccaggtagctgagctcgtcactagcgaattcttcgagcagggtgacagagagcggctggagcttaagctgacacccagtgcgatctttgataggaataggaaagatgaacttccacggcttcagctggagtggattgactctatatgcatgccactgtaccaggctctcgtaaaagtaaatgtgaaattaaagcctatgctggattccgttgccactaatcggtctaagtgggaggagctccaccaaaagcgccttctggccagtacggcttcctcctccccagcctcagtaatggtcgcaaaggaagacaggaactag

SEQ ID NO: 34671 - DNA, 393 bp, Artificial Sequence
  derived and/or modified sequence
atgccaattagaagtagtgacggggagatcatcggggtggctcaagccatcaacaagatccccgagggggcccctttcaccgaggacgatgagaaagtgatgcagatgtatctccccttttgtggaatagccatttccaacgcccaactcttcgccgcgagccggaaagaatacgagcgcagccgagccctgttggaagtagtcaacgatctgtttgaggagcagaccgacctggaaaagatcgtaaagaaaataatgcacagagctcaaacgctgctgaaatgcgaacggtgctccgtgctgctgctcgaggacatcgagtccccagtggtgaagtttactaaaagctttgaactaatgtcgcccaagtgcagtgccgatgctgagaactag

SEQ ID NO: 34672 - DNA, 1728 bp, Artificial Sequence
  derived and/or modified sequence
atgcagatgtacctgcccttttgtgggattgccatctccaacgcacagctgtttgccgcatccagaaaggagtacgagagaagtagggcactactagaagtggttaacgatctgtttgaggagcagactgacctggaaaaaatagttaagaaaattatgcacagagcccagacactgttaaagtgtgagcgctgcagcgtactgctccttgaagatattgagagtccggtggtgaagttcaccaagtcctttgagctgatgtcaccgaagtgctcagccgatgctgaaaattctttcaaggagtcaatggaaaaatcatcttactccgattggctcatcaacaactctatcgcagagctggtggcaagcaccggactgccagtgaacatatctgacgcttatcaggaccctaggtttgacgcagaggcggaccagatttctggattccatatcagaagcgtgctctgtgtccctatttggaactccaatcatcaaattatcggggtcgcccaggtcttgaatcgactggatggaaagccctttgatgatgctgatcagaggctgttcgaagcttttgtcatcttttgcggtttagggatcaacaacaccatcatgtacgaccaggtaaagaaaagctgggccaagcagagcgtggcgctggacgtgctgtcgtatcacgccacgtgctctaaggcagaggtggacaagttcaaggctgccaacatccctctagtttctgagttggcaattgacgacatccattttgacgacttcagcctcgatgttgacgccatgattaccgcagcactgcgtatgttcatggaactgggaatggtgcagaagtttaagatagactacgagacactctgcaggtggctgctgactgtcagaaaaaattacagaatggttctttaccacaattggcgccacgctttcaacgtctgccagctcatgtttgctatgttaaccacagctggattccaggacatcctgacagaggtggagattttggctgttatcgtcggatgtttgtgccacgacctcgatcatagaggtaccaataatgcctttcaagctaaatctggatcggctctggcacagctgtacggcacctcagctacactggagcaccaccacttcaaccacgctgtaatgatcctccagtccgagggacataatatttttgcaaacctcagttccaaggagtactccgatctaatgcagctcttgaagcagtcaatcctcgctacagaccttacgctgtatttcgaacgacgtacagagttctttgaactggttagcaaaggagagtacgactggaatataaagaaccaccgggatatcttccgctcaatgctgatgaccgcatgcgatttgggtgctgtgacaaagccttgggaaattagcaggcaggtcgccgaactggtcacttcggaattttttgagcagggggatagagaacgcctggagctcaagctgacgccatcagctatctttgataggaacaggaaggacgagctccccaggttacagctggaatggatcgatagcatttgcatgcctttataccaagctctcgttaaggtgaatgtgaagctaaagcccatgctggattcagttgcaacaaatcgctccaaatgggaagaactacatcagaagagactgttggcctcaaccgccagcagctcacctgcatcagtgatggtggctaaagaggataggaactag

SEQ ID NO: 34673 - DNA, 2052 bp, Artificial Sequence
  derived and/or modified sequence
atgctgaagcaggcccggcggcccctcttcagaaatgtgctgagcgccacccagtggaagaaggtgaagatcacccggctggtgcagatcagcggggccagcctggccgagaagcaggagaagcaccaggacttcctgatccagaggcagaccaagaccaaggaccggcgcttcaatgatgaaattgacaagctgaccggctacaagaccaagagcctgctgtgcatgcccatccgcagcagtgatggagagatcatcggcgtggcccaggccatcaacaagatccctgagggcgcccccttcacagaagatgatgagaaggtgatgcagatgtacctgcccttctgtggcatcgccatcagcaatgcccagctgtttgctgccagcaggaaggagtatgaaagaagccgggccctgctggaggtggtgaatgacctgtttgaggagcagacagacctggagaagatcgtgaagaagatcatgcaccgggcccagaccctgctgaagtgtgagcgctgcagcgtgctgctgctggaggacatcgagagccctgtggtgaagttcaccaagagctttgagctgatgagccccaagtgcagcgcagatgctgagaacagcttcaaggagagcatggagaagagcagctacagcgactggctgatcaacaacagcattgctgagctggtggccagcacaggcctgcctgtgaacatcagtgatgcctaccaggaccccaggtttgatgctgaggccgaccagatcagcggcttccacatccgctctgtgctgtgtgtgcccatctggaacagcaaccaccagatcattggagtggcccaggtgctgaaccggctggatggcaagccctttgatgatgctgaccagaggctgtttgaggccttcgtcatcttctgtggcctgggcatcaacaacaccatcatgtatgaccaggtgaagaagtcctgggccaagcagagcgtggccctggatgtgctgagctaccacgccacctgcagcaaggccgaggtggacaagttcaaggccgccaacatccccctggtgtctgagctggccattgatgacatccactttgatgacttcagcctggatgtggatgccatgatcacagctgccctgaggatgttcatggagctgggcatggtgcagaagttcaagattgattatgagaccctgtgccgctggctgctgactgtgaggaagaactacaggatggtgctgtaccacaactggaggcatgccttcaacgtgtgccagctgatgtttgccatgctgaccacagctggcttccaggacatcctgacagaggtggagatcctggccgtcatcgtgggctgcctgtgccacgacctggaccaccggggcaccaacaatgccttccaggccaagagcggcagcgccctggcccagctgtatggcaccagcgccaccctggagcaccaccacttcaaccacgctgtgatgatcctgcagagcgagggccacaacatctttgccaacctgagcagcaaggagtacagcgacctgatgcagctgctgaagcagagcatcctggccacagacctgaccctgtactttgaaagaagaacagagttctttgagctggtgtccaaaggagaatatgactggaacatcaagaaccaccgggacatcttccgctccatgctgatgacagcctgtgacctgggcgctgtgaccaagccctgggagatcagccggcaggtggccgagctggtgaccagcgagttctttgagcagggcgaccgggagcggctggagctgaagctgacccccagcgccatctttgacaggaacaggaaggatgagctgccccggctgcagctggagtggattgacagcatctgcatgcccctgtaccaggccctggtgaaggtgaatgtgaagctgaagcccatgctggacagcgtggccaccaacagaagcaagtgggaggagctgcaccagaagaggctgctggccagcacagccagcagcagccctgcctctgtgatggtggccaaggaggacaggaactag

SEQ ID NO: 34674 - DNA, 1470 bp, Artificial Sequence
  derived and/or modified sequence
atgagccccaagtgcagcgcagatgctgagaacagcttcaaggagagcatggagaagagcagctacagcgactggctgatcaacaacagcattgctgagctggtggccagcacaggcctgcctgtgaacatcagtgatgcctaccaggaccccaggtttgatgctgaggccgaccagatcagcggcttccacatccgctctgtgctgtgtgtgcccatctggaacagcaaccaccagatcattggagtggcccaggtgctgaaccggctggatggcaagccctttgatgatgctgaccagaggctgtttgaggccttcgtcatcttctgtggcctgggcatcaacaacaccatcatgtatgaccaggtgaagaagtcctgggccaagcagagcgtggccctggatgtgctgagctaccacgccacctgcagcaaggccgaggtggacaagttcaaggccgccaacatccccctggtgtctgagctggccattgatgacatccactttgatgacttcagcctggatgtggatgccatgatcacagctgccctgaggatgttcatggagctgggcatggtgcagaagttcaagattgattatgagaccctgtgccgctggctgctgactgtgaggaagaactacaggatggtgctgtaccacaactggaggcatgccttcaacgtgtgccagctgatgtttgccatgctgaccacagctggcttccaggacatcctgacagaggtggagatcctggccgtcatcgtgggctgcctgtgccacgacctggaccaccggggcaccaacaatgccttccaggccaagagcggcagcgccctggcccagctgtatggcaccagcgccaccctggagcaccaccacttcaaccacgctgtgatgatcctgcagagcgagggccacaacatctttgccaacctgagcagcaaggagtacagcgacctgatgcagctgctgaagcagagcatcctggccacagacctgaccctgtactttgaaagaagaacagagttctttgagctggtgtccaaaggagaatatgactggaacatcaagaaccaccgggacatcttccgctccatgctgatgacagcctgtgacctgggcgctgtgaccaagccctgggagatcagccggcaggtggccgagctggtgaccagcgagttctttgagcagggcgaccgggagcggctggagctgaagctgacccccagcgccatctttgacaggaacaggaaggatgagctgccccggctgcagctggagtggattgacagcatctgcatgcccctgtaccaggccctggtgaaggtgaatgtgaagctgaagcccatgctggacagcgtggccaccaacagaagcaagtgggaggagctgcaccagaagaggctgctggccagcacagccagcagcagccctgcctctgtgatggtggccaaggaggacaggaactag

SEQ ID NO: 34675 - DNA, 1728 bp, Artificial Sequence
  derived and/or modified sequence
atgcagatgtacctgcccttctgtggcatcgccatcagcaatgcccagctgtttgctgccagcaggaaggagtatgaaagaagccgggccctgctggaggtggtgaatgacctgtttgaggagcagacagacctggagaagatcgtgaagaagatcatgcaccgggcccagaccctgctgaagtgtgagcgctgcagcgtgctgctgctggaggacatcgagagccctgtggtgaagttcaccaagagctttgagctgatgagccccaagtgcagcgcagatgctgagaacagcttcaaggagagcatggagaagagcagctacagcgactggctgatcaacaacagcattgctgagctggtggccagcacaggcctgcctgtgaacatcagtgatgcctaccaggaccccaggtttgatgctgaggccgaccagatcagcggcttccacatccgctctgtgctgtgtgtgcccatctggaacagcaaccaccagatcattggagtggcccaggtgctgaaccggctggatggcaagccctttgatgatgctgaccagaggctgtttgaggccttcgtcatcttctgtggcctgggcatcaacaacaccatcatgtatgaccaggtgaagaagtcctgggccaagcagagcgtggccctggatgtgctgagctaccacgccacctgcagcaaggccgaggtggacaagttcaaggccgccaacatccccctggtgtctgagctggccattgatgacatccactttgatgacttcagcctggatgtggatgccatgatcacagctgccctgaggatgttcatggagctgggcatggtgcagaagttcaagattgattatgagaccctgtgccgctggctgctgactgtgaggaagaactacaggatggtgctgtaccacaactggaggcatgccttcaacgtgtgccagctgatgtttgccatgctgaccacagctggcttccaggacatcctgacagaggtggagatcctggccgtcatcgtgggctgcctgtgccacgacctggaccaccggggcaccaacaatgccttccaggccaagagcggcagcgccctggcccagctgtatggcaccagcgccaccctggagcaccaccacttcaaccacgctgtgatgatcctgcagagcgagggccacaacatctttgccaacctgagcagcaaggagtacagcgacctgatgcagctgctgaagcagagcatcctggccacagacctgaccctgtactttgaaagaagaacagagttctttgagctggtgtccaaaggagaatatgactggaacatcaagaaccaccgggacatcttccgctccatgctgatgacagcctgtgacctgggcgctgtgaccaagccctgggagatcagccggcaggtggccgagctggtgaccagcgagttctttgagcagggcgaccgggagcggctggagctgaagctgacccccagcgccatctttgacaggaacaggaaggatgagctgccccggctgcagctggagtggattgacagcatctgcatgcccctgtaccaggccctggtgaaggtgaatgtgaagctgaagcccatgctggacagcgtggccaccaacagaagcaagtgggaggagctgcaccagaagaggctgctggccagcacagccagcagcagccctgcctctgtgatggtggccaaggaggacaggaactag

SEQ ID NO: 34676 - DNA, 393 bp, Artificial Sequence
  derived and/or modified sequence
atgcccatccgcagcagtgatggagagatcattggagtggcccaggccatcaacaagatccctgagggcgcccccttcacagaagatgatgagaaggtgatgcagatgtacctgcccttctgtggcatcgccatcagcaatgcccagctgtttgctgccagcaggaaggagtatgaaagaagccgggccctgctggaggtggtgaatgacctgtttgaggagcagacagacctggagaagatcgtgaagaagatcatgcaccgggcccagaccctgctgaagtgtgagcgctgcagcgtgctgctgctggaggacatcgagagccctgtggtgaagttcaccaagagctttgagctgatgagccccaagtgcagcgcagatgctgaaaattag

SEQ ID NO: 34677 - DNA, 2052 bp, Artificial Sequence
  derived and/or modified sequence
atgctgaagcaggcccggcggcccctgttccggaacgtgctgagcgccacacaatggaagaaagtcaaaatcacaaggctggtgcagattagcggcgccagcctggccgagaagcaggagaaacaccaagactttctgatacagaggcagaccaagacaaaagaccgccggttcaacgatgaaatagacaaactcacggggtacaagactaagagcctgctgtgtatgcctattcggagcagcgacggggaaataatcggcgtagcccaagcgattaacaagatccccgagggtgccccatttactgaggatgacgaaaaagtgatgcaaatgtacctccctttttgtggaatagcaatctcaaatgcccagctgttcgccgcaagcaggaaagagtacgaacgctccagggccctgctggaagtagtcaacgacttgttcgaagagcagaccgacttagagaagattgtgaaaaaaatcatgcacagggcacagaccttactcaagtgcgagcgctgctctgtactcctactagaggatatcgaatctcctgtggtgaagttcacgaaatcatttgagctcatgagtccaaagtgctcagccgatgccgagaactccttcaaggagagcatggagaagagttcctattccgactggttgattaataacagcatcgcggaattggtagccagcacagggttgcctgtgaacatttccgatgcctatcaggatccccgtttcgacgctgaagccgaccaaatatcagggttccacatccgttcggtcctgtgtgtgcccatatggaacagcaatcaccagataatcggcgtagcccaggttctaaatcgactggacggaaagccttttgacgatgcagatcaaaggctgtttgaagcttttgtgatcttttgtggtttaggaataaacaataccatcatgtacgaccaggtcaaaaagtcgtgggccaagcagagcgtggcgctggacgtgctcagctatcacgctacatgctccaaggccgaagtggacaagtttaaggctgccaatatcccattggtgagtgagctcgcaatcgatgatatccactttgacgatttttcactggacgtggatgcgatgatcaccgctgccctgcgcatgtttatggagctggggatggtccaaaagtttaagattgattacgagactttgtgtaggtggctactcacagtgcgcaagaactatcggatggtactttatcacaactggagacacgcctttaatgtctgccagttaatgtttgcaatgttgactactgctggttttcaggacatcctgaccgaagtggagatcctcgcagtcattgtgggttgtctttgccacgacctggatcatcgggggacaaacaatgcttttcaggcaaaaagcggatccgccctggctcagctgtacggcacctctgctactctggagcatcatcacttcaaccacgctgtgatgatactacaatctgaggggcataatatatttgccaacctttccagtaaggagtactctgatctgatgcagctcctcaaacagtcaatactggcaaccgacctgacactgtatttcgaacgcaggaccgaattcttcgaactcgtgtccaagggcgagtatgattggaatataaaaaatcaccgcgatattttcagaagtatgcttatgacggcctgcgacctgggagccgtaacgaagccttgggagatctcccgacaggtggccgaactagttactagtgagtttttcgagcaaggggatcgggagcggctagaactgaagctaaccccctctgcaatcttcgaccggaaccggaaagatgaactgcctagattacaactcgaatggatcgatagtatatgcatgcccctctaccaggcactggtcaaggtgaatgtgaagctgaaacccatgttggacagtgttgccactaatcggtcgaagtgggaagagttacaccagaagcgccttctagccagcacggctagctcttcccctgcaagcgtgatggtcgcgaaggaagacaggaattag

SEQ ID NO: 34678 - DNA, 1470 bp, Artificial Sequence
  derived and/or modified sequence
atgagccccaagtgcagcgccgacgccgagaacagcttcaaggagagcatggagaaatcctcctacagtgactggttgattaataacagcatcgccgagctggtagccagcactggcctgcccgtcaatatatccgacgcgtatcaggatcctcgatttgatgccgaggctgaccagattagcgggttccacataagaagcgtgctgtgtgtgcctatctggaattcaaaccatcaaattattggagttgcccaggtgctgaacagactggacggcaagccctttgacgatgccgaccagcgcttatttgaggcctttgttattttctgcggtcttggtattaacaacaccattatgtacgatcaggtcaagaaaagttgggctaagcagtccgttgccctcgacgtgctgtcttaccacgctacctgctctaaggcagaggtggacaagttcaaggccgcaaacatccctttggtgagtgagctcgctatagatgacatccattttgacgacttttcccttgatgtcgacgcaatgattaccgcagctctgcgcatgtttatggaattagggatggtacagaaattcaaaatagattacgagaccctgtgccgatggctgctcactgtgcggaaaaactacaggatggtactataccataattggcgtcacgccttcaatgtgtgccagttgatgtttgccatgctgaccacagccggattccaggatatcctaacagaggtggagatattggctgtgatagtagggtgtctctgccacgacttggaccataggggtactaataacgccttccaggccaagtctgggagcgcgctggctcagttgtacggcacatccgccactctggagcaccatcatttcaaccatgccgtgatgatcctgcaatctgaaggccataatatctttgcgaatctgagcagtaaggagtacagtgatttgatgcaactcctgaaacagagcatcttggcaactgacctgacgctgtatttcgagcgtcgtaccgaattttttgaactggtgtcgaaaggagaatacgactggaatatcaagaatcatcgcgacattttccgttcaatgctgatgactgcctgcgatttaggcgccgtgaccaaaccttgggaaatcagtcgtcaggtagcagagctggtgacaagtgagttttttgaacagggggacagagaaagactggagctcaagctcaccccgtctgctatatttgatcggaatcggaaagacgaattgcccagactccagctggaatggatcgactctatttgtatgccactttatcaggccctcgtgaaggtaaacgtgaaactcaagcccatgctggactccgtcgctactaacagatcgaaatgggaagagctgcatcagaaacggttattagcaagcaccgcctcgtcctcgccagccagtgttatggtggcaaaagaggataggaattag

SEQ ID NO: 34679 - DNA, 1728 bp, Artificial Sequence
  derived and/or modified sequence
atgcagatgtacctgcccttctgcggcatcgccatcagcaacgcccagctttttgctgcatccagaaaggagtacgaaaggtcaagggcacttcttgaggtggtcaatgacttatttgaggaacagaccgacctggagaaaatagtgaagaagatcatgcatagagcacaaacactgctgaagtgtgagaggtgttctgttctgctattggaggacatagagtctccagtggtgaagtttaccaagagctttgaactcatgagcccaaagtgttctgcagatgcggagaactctttcaaggaatccatggaaaaatcaagttattctgattggctgatcaataactcaatcgctgagttggtcgccagtacaggccttcccgttaatatttccgatgcatatcaagatccaagatttgatgcagaagctgatcagattagcgggttccacatccgttccgtgttgtgcgtgcctatctggaattctaaccatcagatcattggcgtagcccaggtcctgaatcgcctagatgggaagccattcgacgacgctgatcaaaggttgttcgaggctttcgtcattttttgtgggctggggattaataataccattatgtacgaccaggtgaagaaaagctgggctaaacagtcagtggcacttgatgtgctgtcctaccatgcaacttgttccaaggccgaggttgacaagttcaaagcggccaacatccccctcgtttcggaactagctattgacgatattcattttgacgacttctctctggacgtggacgccatgattaccgcagcgctccgaatgttcatggagctcggcatggtgcagaagtttaagattgattatgaaaccctttgccgctggttgctcacggtacggaagaattaccggatggtgctgtaccacaattggaggcatgccttcaacgtgtgccagttgatgttcgccatgcttaccaccgctggctttcaggatattctgaccgaggtggagatcctggctgtcatcgtaggctgtctatgtcatgatctcgaccatagaggcactaacaacgccttccaagccaagtccgggtcagccctggcccagctgtatgggacttccgcaactctcgaacaccatcacttcaatcatgctgtcatgatcctccagagcgagggccacaatattttcgctaacctttctagtaaagagtacagcgacttaatgcagctgctcaagcagtcaatactagctacagatcttacactctactttgaacgacgtacagaattttttgagttggtttctaagggcgaatatgactggaacatcaaaaaccacagggacattttccgaagtatgctgatgaccgcttgcgatctgggtgcagttaccaagccctgggagatttccaggcaggtcgccgagctggtgacctcagaatttttcgagcaaggagatcgcgagcgccttgaattgaagctgactccttccgccatttttgatagaaatcggaaggatgagctgcctagactgcagctggaatggatcgacagtatctgcatgccgttataccaggctctggtcaaggtcaacgtgaagttaaagcccatgcttgacagtgtagccactaatagatccaagtgggaagagttacatcagaaacggctccttgctagtacggcctcttcgtcccctgcttcagtgatggttgcaaaggaagatagaaactag

SEQ ID NO: 34680 - DNA, 393 bp, Artificial Sequence
  derived and/or modified sequence
atgcccatccggagcagcgacggcgagatcatcggcgtggcccaggcaatcaataagattccggaaggagcaccttttacggaggatgatgaaaaggtaatgcagatgtatctgcctttttgtggcattgccatctcaaatgcccagctctttgctgcatcccggaaagaatatgaacgtagccgggctctgctggaagtggtaaatgacctcttcgaagaacagacagatctcgagaaaatcgttaagaagattatgcaccgggcacagacattgctgaagtgcgaaaggtgcagtgttctactgctggaggatatcgagtctccagttgtcaaattcaccaagagctttgaacttatgtcaccaaagtgctccgcagatgctgaaaactag

SEQ ID NO: 34681 - DNA, 1728 bp, Artificial Sequence
  derived and/or modified sequence
atgcagatgtacctgcccttctgcggcatcgccatcagcaacgcccagttgtttgccgcaagtcggaaagaatacgaacgaagcagggcgctgctggaggttgttaatgacctgttcgaagaacagaccgacctcgagaaaattgtgaaaaaaattatgcatagagcccagaccttgctaaagtgcgaaagatgttccgtgcttctgctggaggatatcgagtctccagtggtgaaatttacaaagtccttcgaattaatgtcccctaagtgttctgccgacgcagaaaacagtttcaaagagagcatggaaaagtctagctactctgactggttaatcaataattccatcgctgagctggtcgccagcaccgggctgccagttaatatctccgatgcctatcaggaccccagattcgacgcagaggctgatcaaatttccggattccacatccgatcagtcctttgtgttccaatatggaactcgaatcaccagatcatcggagtggcgcaggtgttgaacagactcgatggcaagcctttcgacgacgctgaccagcgcctgttcgaggctttcgtgatcttctgtgggcttgggattaacaacactattatgtacgatcaggtgaagaaatcatgggccaagcagagcgttgccctcgatgttctcagctatcacgctacctgtagcaaagcagaggtagataaattcaaggcagccaatatccccctcgtgtcagaactggccatcgacgatattcactttgacgacttttctctggacgtggatgcaatgattacggccgccctacgaatgtttatggaacttggaatggtccagaagtttaaaatagactacgagaccctctgtagatggttgttaacagtgcgcaaaaattataggatggtgctctatcacaattggcgtcatgcctttaacgtttgccagctgatgttcgcgatgttaactacggcaggttttcaggacatactgaccgaagtggaaatactggcagttatcgttggatgcctttgtcacgacctcgaccatcgcggtaccaataatgccttccaggctaaaagtggcagtgccttagcccaactgtatggtacatccgcaacacttgagcaccaccacttcaaccacgctgttatgatactccagagtgaagggcacaatatttttgccaatctctcatctaaggagtactccgacttaatgcagctattaaagcaatcaatccttgccaccgacctcacgctctacttcgagcggcggacagaattttttgagttggtgtctaaaggcgaatacgattggaatatcaagaaccacagagacatatttagatcaatgctgatgacagcctgtgaccttggggccgtgaccaaaccttgggagatttcccggcaggtagccgagcttgtaacatccgagttcttcgagcaaggtgacagggaacggctggagttaaaattgacccccagcgcaatttttgacaggaaccgtaaagacgagttgccaagacttcaactggagtggatagactcgatttgcatgcctctgtaccaagctctggtgaaggtgaatgttaaacttaagccaatgttggactccgtagccactaacaggagcaaatgggaggaattgcaccagaagagattgctggcaagtacagcttcctcttcccccgcatccgtcatggtggcaaaagaggaccggaactag

SEQ ID NO: 34682 - DNA, 3489 bp, Artificial Sequence
  derived and/or modified sequence
cgcttgcagcccagggcgtgaggtgctctttctggatcgccagcctcgaagttgaggcgtggactctggccaggtggctgttccagagcaacatgggagatgctgaagcaggcaagaagacctttattcagaaatgtgctcagtgccacacagtggaaaaaggtgaaaatcacaagactggtccaaatctctggggcctctttggctgaaaaacaggaaaagcaccaggattttcttatacagaggcaaacaaaaacaaaggatcgacgattcaatgatgaaatcgacaagctaactggatacaagacaaaatcattattgtgcatgcctatccgaagcagtgatggtgagattattggtgtggcccaagcgataaataagattcctgaaggagctccatttactgaagatgatgaaaaagttatgcagatgtatcttccattttgtggaatcgccatatctaacgctcagctctttgctgcctcaaggaaagaatatgaaagaagcagagctttgctagaggtggttaatgacctctttgaagaacagactgacctggagaaaattgtcaagaaaataatgcatcgggcccaaactctgctgaaatgtgaacgctgttctgttttactcctagaggacatcgaatcaccagtggtgaaatttaccaaatcctttgaattgatgtccccaaagtgcagtgctgatgctgagaacagtttcaaagaaagcatggagaaatcatcatactccgactggctaataaataacagcattgctgagctggttgcttcaacaggccttccagtgaacatcagtgatgcctaccaggatccgcgctttgatgcagaggcagaccagatatctggttttcacataagatctgttctttgtgtccctatttggaatagcaaccaccaaataattggagtggctcaagtgttaaacagacttgatgggaaaccttttgatgatgcagatcaacgactttttgaggcttttgtcatcttttgtggacttggcatcaacaacacaattatgtatgatcaagtgaagaagtcctgggccaagcagtctgtggctcttgatgtgctatcataccatgcaacatgttcaaaagctgaagttgacaagtttaaggcagccaacatccctctggtgtcagaacttgccatcgatgacattcattttgatgacttttctctcgacgttgatgccatgatcacagctgctctccggatgttcatggagctggggatggtacagaaatttaaaattgactatgagacactgtgtaggtggcttttgacagtgaggaaaaactatcggatggttctataccacaactggagacatgccttcaacgtgtgtcagctgatgttcgcgatgttaaccactgctgggtttcaagacattctgaccgaggtggaaattttagcggtgattgtgggatgcctgtgtcatgacctcgaccacaggggaaccaacaatgccttccaagctaagagtggctctgccctggcccaactctatggaacctctgctaccttggagcatcaccatttcaaccacgccgtgatgatccttcaaagtgagggtcacaatatctttgctaacctgtcctccaaggaatatagtgaccttatgcagcttttgaagcagtcaatattggcaacagacctcacgctgtactttgagaggagaactgaattctttgaacttgtcagtaaaggagaatacgattggaacatcaaaaaccatcgtgatatatttcgatcaatgttaatgacagcctgtgaccttggagccgtgaccaaaccgtgggagatctccagacaggtggcagaacttgtaaccagtgagttcttcgaacaaggagatcgggagagattagagctcaaactcactccttcagcaatttttgatcggaaccggaaggatgaactgcctcggttgcaactggagtggattgatagcatctgcatgcctttgtatcaggcactggtgaaggtcaacgtgaaactgaagccgatgctagattcagtagctacaaacagaagtaagtgggaagagctacaccaaaaacgactgctggcctcaactgcctcatcctcccctgccagtgttatggtagccaaggaagacaggaactaaacctccaggtcagctgcagctgcaaaatgactacagcctgaagggccattttcagtccagcaatgtcatccttttgttcttttagctcagaaagacctaacatctcaaggatgcactgggaagcatgcctgggctttcaccttgaagcatggtcagcagcagagagagcaacgggaaggacaaagaaagaggtggggcagggagcacaccccaggaccctcacttttccctaatgaacacgcatgggctgaaatgaaggctctgggtaggggactgttttggatccaaggacctgtggacagtcggcctacttactctgagctgagggaacactgaacagtaaaagcgtcattagcgctgcttcgttttgtatagggcttttctgtttgttacaagccaaacactgcctgtctttgcttcctgtccctgaatgcctttttgtgccagactgtcccaagaatcctaatttgtattccatagaggtattttatttttaatcctagagcttcttattgatggatcctttagaattgcctacctaaaaggtaaactatactatccttataaatactgatcaatcccagttctccccctaaaaatgaatacatagtaggactatagcaaatgtgtttgatgggtaattctagactgggactatggtacccttttccagagttttaaaattcaaccttcattacagacaaagttttctcccagaaggaatggattgatagattttgattaaagtaagggtggaaggaaatctgtagctggatttaccacaagtgacatctagaaactatagttcacaggacagagcagagccatggagactaagcattgactaccttgagttctcctagtgaggagttctggtataaaatttaagattactaccagtaaccaacttaaagcaaactataggggtccctaattttggatttttccttaagtgtaagaaacaatgcttcaaatgttaagaaataacagtctgggcaaagaacgcatattctataggaagccaggtttacaataggtaagaataaactgtattaagtagatgtaatgactagaaagctgctttgctccctatattgagaaattgtggacatggtatgtgttatccaaagaacattgggctagaagatagatttctatccttagctttggcattattgactggattgacttgaacaagtcacttaacttctacaagcttgtttccttatttgtcaaattagattacactaggaaacgattctcgaacatgttttaaccttacaactctttgttcaaataaatctttcaatgaatccccaacatataaaacgtcaaaaa

SEQ ID NO: 34683 - DNA, 1781 bp, Artificial Sequence
  derived and/or modified sequence
tggaaagatgttacttcatctcccaggtttgctcactgcaaatacaatcctgagaactgaactagggccttaaagtcctgacatgcatggcttggttttgtggattgcctctctcaacaggtggtgaaatttaccaaatcctttgaattgatgtccccaaagtgcagtgctgatgctgagaacagtttcaaagaaagcatggagaaatcatcatactccgactggctaataaataacagcattgctgagctggttgcttcaacaggccttccagtgaacatcagtgatgcctaccaggatccgcgctttgatgcagaggcagaccagatatctggttttcacataagatctgttctttgtgtccctatttggaatagcaaccaccaaataattggagtggctcaagtgttaaacagacttgatgggaaaccttttgatgatgcagatcaacgactttttgaggcttttgtcatcttttgtggacttggcatcaacaacacaattatgtatgatcaagtgaagaagtcctgggccaagcagtctgtggctcttgatgtgctatcataccatgcaacatgttcaaaagctgaagttgacaagtttaaggcagccaacatccctctggtgtcagaacttgccatcgatgacattcattttgatgacttttctctcgacgttgatgccatgatcacagctgctctccggatgttcatggagctggggatggtacagaaatttaaaattgactatgagacactgtgtaggtggcttttgacagtgaggaaaaactatcggatggttctataccacaactggagacatgccttcaacgtgtgtcagctgatgttcgcgatgttaaccactgctgggtttcaagacattctgaccgaggtggaaattttagcggtgattgtgggatgcctgtgtcatgacctcgaccacaggggaaccaacaatgccttccaagctaagagtggctctgccctggcccaactctatggaacctctgctaccttggagcatcaccatttcaaccacgccgtgatgatccttcaaagtgagggtcacaatatctttgctaacctgtcctccaaggaatatagtgaccttatgcagcttttgaagcagtcaatattggcaacagacctcacgctgtactttgagaggagaactgaattctttgaacttgtcagtaaaggagaatacgattggaacatcaaaaaccatcgtgatatatttcgatcaatgttaatgacagcctgtgaccttggagccgtgaccaaaccgtgggagatctccagacaggtggcagaacttgtaaccagtgagttcttcgaacaaggagatcgggagagattagagctcaaactcactccttcagcaatttttgatcggaaccggaaggatgaactgcctcggttgcaactggagtggattgatagcatctgcatgcctttgtatcaggcactggtgaaggtcaacgtgaaactgaagccgatgctagattcagtagctacaaacagaagtaagtgggaagagctacaccaaaaacgactgctggcctcaactgcctcatcctcccctgccagtgttatggtagccaaggaagacaggaactaaacctccaggtcagctgcagctgcaaaatgactacagcctgaagggccattttcagtccagcaatgtcatccttttgttcttttagctcagaaagacctaacatctcaaggatgcactgggaagcatgcctgggctttcaccttgaagcatggtcagcagca

SEQ ID NO: 34684 - DNA, 2102 bp, Artificial Sequence
  derived and/or modified sequence
aaaagtccactgtgtgttgggaatagattatgaagggctttgagtgtaggccctgtaagcaataggaagccatggaacagccagaaaggttatgcagatgtatcttccattttgtggaatcgccatatctaacgctcagctctttgctgcctcaaggaaagaatatgaaagaagcagagctttgctagaggtggttaatgacctctttgaagaacagactgacctggagaaaattgtcaagaaaataatgcatcgggcccaaactctgctgaaatgtgaacgctgttctgttttactcctagaggacatcgaatcaccagtggtgaaatttaccaaatcctttgaattgatgtccccaaagtgcagtgctgatgctgagaacagtttcaaagaaagcatggagaaatcatcatactccgactggctaataaataacagcattgctgagctggttgcttcaacaggccttccagtgaacatcagtgatgcctaccaggatccgcgctttgatgcagaggcagaccagatatctggttttcacataagatctgttctttgtgtccctatttggaatagcaaccaccaaataattggagtggctcaagtgttaaacagacttgatgggaaaccttttgatgatgcagatcaacgactttttgaggcttttgtcatcttttgtggacttggcatcaacaacacaattatgtatgatcaagtgaagaagtcctgggccaagcagtctgtggctcttgatgtgctatcataccatgcaacatgttcaaaagctgaagttgacaagtttaaggcagccaacatccctctggtgtcagaacttgccatcgatgacattcattttgatgacttttctctcgacgttgatgccatgatcacagctgctctccggatgttcatggagctggggatggtacagaaatttaaaattgactatgagacactgtgtaggtggcttttgacagtgaggaaaaactatcggatggttctataccacaactggagacatgccttcaacgtgtgtcagctgatgttcgcgatgttaaccactgctgggtttcaagacattctgaccgaggtggaaattttagcggtgattgtgggatgcctgtgtcatgacctcgaccacaggggaaccaacaatgccttccaagctaagagtggctctgccctggcccaactctatggaacctctgctaccttggagcatcaccatttcaaccacgccgtgatgatccttcaaagtgagggtcacaatatctttgctaacctgtcctccaaggaatatagtgaccttatgcagcttttgaagcagtcaatattggcaacagacctcacgctgtactttgagaggagaactgaattctttgaacttgtcagtaaaggagaatacgattggaacatcaaaaaccatcgtgatatatttcgatcaatgttaatgacagcctgtgaccttggagccgtgaccaaaccgtgggagatctccagacaggtggcagaacttgtaaccagtgagttcttcgaacaaggagatcgggagagattagagctcaaactcactccttcagcaatttttgatcggaaccggaaggatgaactgcctcggttgcaactggagtggattgatagcatctgcatgcctttgtatcaggcactggtgaaggtcaacgtgaaactgaagccgatgctagattcagtagctacaaacagaagtaagtgggaagagctacaccaaaaacgactgctggcctcaactgcctcatcctcccctgccagtgttatggtagccaaggaagacaggaactaaacctccagctcagaaagacctaacatctcaaggatgcactgggaagcatgcctgggctttcaccttgaagcatggtcagcagcagagagagcaacgggaaggacaaagaaagaggtggggcagggagcacaccccaggaccctcacttttccctaatgaacacgcatgggctgaaatgaaggctctgggtaggggactgttttggatccaaggacctgtggacagtcggcctacttactctgagctgagggaacactgaacagtaaaagcgtcattagcgctg

SEQ ID NO: 34685 - DNA, 2449 bp, Artificial Sequence
  derived and/or modified sequence
gcgcgcgtccggctgcgcttgcagcccagggcgtgaggtgctctttctggatcgccagcctcgaagttgaggcgtggactctggccaggtggctgttccagagcaacatgggagatgctgaagcaggcaagaagacctttattcagaaatgtgctcagtgccacacagtggaaaaaggtgaaaatcacaagactggtccaaatctctggggcctctttggctgaaaaacaggaaaagcaccaggattttcttatacagaggcaaacaaaaacaaaggatcgacgattcaatgatgaaatcgacaagctaactggatacaagacaaaatcattattgtgcatgcctatccgaagcagtgatggtgagattattggtgtggcccaagcgataaataagattcctgaaggagctccatttactgaagatgatgaaaaagttatgcagatgtatcttccattttgtggaatcgccatatctaacgctcagctctttgctgcctcaaggaaagaatatgaaagaagcagagctttgctagaggtggttaatgacctctttgaagaacagactgacctggagaaaattgtcaagaaaataatgcatcgggcccaaactctgctgaaatgtgaacgctgttctgttttactcctagaggacatcgaatcaccagtggtgaaatttaccaaatcctttgaattgatgtccccaaagtgcagtgctgatgctgagaacagtttcaaagaaagcatggagaaatcatcatactccgactggctaataaataacagcattgctgagctggttgcttcaacaggccttccagtgaacatcagtgatgcctaccaggatccgcgctttgatgcagaggcagaccagatatctggttttcacataagatctgttctttgtgtccctatttggaatagcaaccaccaaataattggagtggctcaagtgttaaacagacttgatgggaaaccttttgatgatgcagatcaacgactttttgaggcttttgtcatcttttgtggacttggcatcaacaacacaattatgtatgatcaagtgaagaagtcctgggccaagcagtctgtggctcttgatgtgctatcataccatgcaacatgttcaaaagctgaagttgacaagtttaaggcagccaacatccctctggtgtcagaacttgccatcgatgacattcattttgatgacttttctctcgacgttgatgccatgatcacagctgctctccggatgttcatggagctggggatggtacagaaatttaaaattgactatgagacactgtgtaggtggcttttgacagtgaggaaaaactatcggatggttctataccacaactggagacatgccttcaacgtgtgtcagctgatgttcgcgatgttaaccactgctgggtttcaagacattctgaccgaggtggaaattttagcggtgattgtgggatgcctgtgtcatgacctcgaccacaggggaaccaacaatgccttccaagctaagagtggctctgccctggcccaactctatggaacctctgctaccttggagcatcaccatttcaaccacgccgtgatgatccttcaaagtgagggtcacaatatctttgctaacctgtcctccaaggaatatagtgaccttatgcagcttttgaagcagtcaatattggcaacagacctcacgctgtactttgagaggagaactgaattctttgaacttgtcagtaaaggagaatacgattggaacatcaaaaaccatcgtgatatatttcgatcaatgttaatgacagcctgtgaccttggagccgtgaccaaaccgtgggagatctccagacaggtggcagaacttgtaaccagtgagttcttcgaacaaggagatcgggagagattagagctcaaactcactccttcagcaatttttgatcggaaccggaaggatgaactgcctcggttgcaactggagtggattgatagcatctgcatgcctttgtatcaggcactggtgaaggtcaacgtgaaactgaagccgatgctagattcagtagctacaaacagaagtaagtgggaagagctacaccaaaaacgactgctggcctcaactgcctcatcctcccctgccagtgttatggtagccaaggaagacaggaactaaacctccagctcagaaagacctaacatctcaaggatgcactgggaagcatgcctgggctttcaccttgaagcatggtcagcagcagagagagcaacgggaaggacaaagaaagaggtggggcagggagcacaccccaggaccctcacttttccctaatgaacacgcatgggctgaaatgaaggctctgggtaggggactgttttggatccaaggacctgtggacagtcggcctacttactctgagctgagggaacactgaacagtaaaagcgtcattagcgctg

SEQ ID NO: 34686 - DNA, 1869 bp, Artificial Sequence
  derived and/or modified sequence
caagaaatgtagagggagaagagtgctggaagatgagtcaagaaaagtccactgtgtgttgggaatagattatgaagggctttgagtgtaggccctgtaagcaataggaagccatggaacagccagaaaggttatgcagatgtatcttccattttgtggaatcgccatatctaacgctcagctctttgctgcctcaaggaaagaatatgaaagaagcagagctttgctagaggtggttaatgacctctttgaagaacagactgacctggagaaaattgtcaagaaaataatgcatcgggcccaaactctgctgaaatgtgaacgctgttctgttttactcctagaggacatcgaatcaccagtggtgaaatttaccaaatcctttgaattgatgtccccaaagtgcagtgctgatgctgagaacagtttcaaagaaagcatggagaaatcatcatactccgactggctaataaataacagcattgctgagctggttgcttcaacaggccttccagtgaacatcagtgatgcctaccaggatccgcgctttgatgcagaggcagaccagatatctggttttcacataagatctgttctttgtgtccctatttggaatagcaaccaccaaataattggagtggctcaagtgttaaacagacttgatgggaaaccttttgatgatgcagatcaacgactttttgaggcttttgtcatcttttgtggacttggcatcaacaacacaattatgtatgatcaagtgaagaagtcctgggccaagcagtctgtggctcttgatgtgctatcataccatgcaacatgttcaaaagctgaagttgacaagtttaaggcagccaacatccctctggtgtcagaacttgccatcgatgacattcattttgatgacttttctctcgacgttgatgccatgatcacagctgctctccggatgttcatggagctggggatggtacagaaatttaaaattgactatgagacactgtgtaggtggcttttgacagtgaggaaaaactatcggatggttctataccacaactggagacatgccttcaacgtgtgtcagctgatgttcgcgatgttaaccactgctgggtttcaagacattctgaccgaggtggaaattttagcggtgattgtgggatgcctgtgtcatgacctcgaccacaggggaaccaacaatgccttccaagctaagagtggctctgccctggcccaactctatggaacctctgctaccttggagcatcaccatttcaaccacgccgtgatgatccttcaaagtgagggtcacaatatctttgctaacctgtcctccaaggaatatagtgaccttatgcagcttttgaagcagtcaatattggcaacagacctcacgctgtactttgagaggagaactgaattctttgaacttgtcagtaaaggagaatacgattggaacatcaaaaaccatcgtgatatatttcgatcaatgttaatgacagcctgtgaccttggagccgtgaccaaaccgtgggagatctccagacaggtggcagaacttgtaaccagtgagttcttcgaacaaggagatcgggagagattagagctcaaactcactccttcagcaatttttgatcggaaccggaaggatgaactgcctcggttgcaactggagtggattgatagcatctgcatgcctttgtatcaggcactggtgaaggtcaacgtgaaactgaagccgatgctagattcagtagctacaaacagaagtaagtgggaagagctacaccaaaaacgactgctggcctcaactgcctcatcctcccctgccagtgttatggtagccaaggaagacaggaactaaacctccag

SEQ ID NO: 34687 - DNA, 2052 bp, Artificial Sequence
  derived and/or modified sequence
atgctcaaacaggctagaagacccctgtttagaaatgtcctgtcggctacccagtggaaaaaggtaaaaatcacacgcctggtccaaatctctggtgcctcactggcggagaaacaggaaaagcatcaggactttcttatacagcgacaaacaaagaccaaggatcggcgattcaatgatgagatcgacaagctaacagggtataaaaccaagtccttactctgcatgccgatacgtagttccgacggagagataatcggagtcgcccaggcaattaacaaaattcccgagggggcaccatttactgaggatgacgaaaaggtcatgcaaatgtacctcccgttttgtggaatcgctattagcaacgctcagctctttgctgcctcacgaaaggagtatgaacgctctcgcgctctgctggaggtggtcaatgatcttttcgaagagcaaactgaccttgagaagattgtgaagaagatcatgcatcgcgcacagacactgctcaaatgtgagagatgtagcgtactcctattggaagacatcgagtcacctgtcgtcaagtttaccaagtcgtttgaattaatgtcacctaagtgttccgcagatgccgagaatagttttaaggaatctatggagaaaagtagctattcagactggctgataaataattcaatagccgaactagtcgcaagcactggattgcccgtcaacatcagtgatgcataccaggaccccagattcgacgccgaggccgaccagatctcagggtttcacatcaggtccgtcttatgtgtgcccatttggaatagtaatcaccaaatcattggggtggcgcaggtgttgaatagactcgacggcaaaccatttgacgatgcagaccagaggctctttgaagcctttgtgattttttgtgggttgggtatcaataacaccataatgtatgaccaggtgaagaaatcatgggctaaacagagtgtcgccttggatgttctgagctatcatgccacgtgctcaaaggccgaagtcgataaatttaaggctgccaatatcccactagtcagcgagttagccattgacgacatacacttcgacgatttctctctcgatgtggacgccatgatcaccgccgcactgcgaatgttcatggagctcggaatggtgcagaagttcaagattgattacgaaactctgtgccgctggctgcttaccgtgcgtaaaaactaccggatggtgctgtaccataactggagacatgctttcaatgtttgccaactcatgtttgctatgttgaccactgccggattccaggatattctgacggaggtggaaattctggcagtgatcgtcggatgcttatgccatgacctggatcacagaggaacgaacaacgccttccaggctaaatcaggttcagcactcgctcaactttacggcacctctgccactctggaacaccaccacttcaatcacgcagtcatgatcttgcagagtgaggggcacaatatctttgctaacctgtctagcaaggaatactccgatttgatgcagcttttgaagcaatccattttggccactgacctgactctgtattttgagagacggaccgagttttttgaacttgtgtctaaaggggaatatgactggaatattaagaatcatcgagatatcttcaggtctatgctgatgaccgcgtgcgaccttggggctgtgacaaaaccctgggagataagtagacaagtagcagagctcgtcaccagtgagttctttgaacaaggcgacagagagagattggagctaaagctaacaccctctgccattttcgaccgaaaccgtaaagacgaactgccccgtctgcagcttgagtggatcgacagtatctgtatgcccctgtaccaagccctcgtcaaagtaaatgtcaaactgaagccaatgttggactcagtggccacaaaccggtccaaatgggaggagctgcaccagaagagactgctggcgtccacagcatctagctcccccgcatctgtcatggtcgcaaaagaagatcggaattag

SEQ ID NO: 34688 - DNA, 1470 bp, Artificial Sequence
  derived and/or modified sequence
atgagcccaaagtgcagtgccgacgctgaaaattcattcaaggagtctatggaaaagtcgagttattctgactggctgattaacaattctatcgcagaactcgtggctagcacagggcttcctgtgaatatctcagacgcttaccaggaccccagattcgacgcggaggccgatcagatatccggtttccacataagatctgtgttgtgcgtacccatctggaactccaaccaccagattatcggagtcgcacaggtgctaaatagacttgatggcaagcccttcgacgatgcagaccaacgactttttgaggcgttcgtgatcttttgcgggctggggatcaataataccatcatgtacgaccaggtgaagaaaagctgggccaaacagtctgttgcactggatgtcctgagctaccacgctacctgttccaaggcagaggtagataagttcaaagccgcaaacatccctctggtgagcgagctcgctatcgatgatatccacttcgatgatttttccctggatgtcgatgctatgatcactgccgctctacgcatgttcatggagttgggcatggtacagaagttcaagattgattacgagacgttgtgtaggtggctgctgaccgtaagaaagaattacagaatggtattatatcataactggcggcatgcattcaacgtctgccagctcatgtttgccatgttaactacagctggcttccaagacattttgaccgaggtggaaattctggctgtcattgtgggctgtctgtgtcatgacctggatcacaggggtaccaataacgcctttcaggctaaaagcggcagcgcgttagcacagctatatggaacctcagccactttagagcaccaccactttaaccacgccgtgatgatcctgcagagcgaggggcataatatctttgcaaatctaagcagtaaagagtactcagacttgatgcagctgctaaagcaatcaatcctcgccaccgatctaactctttacttcgaacggaggacagagttcttcgaactcgtttccaagggggaatacgactggaacattaaaaatcacagagacattttccggtcaatgctgatgacagcttgtgatttaggcgctgtcacgaagccttgggagatcagccggcaggtggcagagctagtgacttctgaatttttcgaacagggagaccgcgaacgtctggagttgaagcttacccccagcgccattttcgacaggaatcgcaaagacgagttgccccgactgcaactcgagtggatcgactctatttgcatgcccctctatcaggctctggtgaaagttaatgtcaagttgaagcctatgctggattccgtggctactaaccgaagcaagtgggaggaacttcaccagaagcgcctactggcttctaccgccagcagtagccctgcctccgttatggttgcaaaggaagaccgcaattag

SEQ ID NO: 34689 - DNA, 1728 bp, Artificial Sequence
  derived and/or modified sequence
atgcagatgtatcttccattctgtgggatcgccatctccaacgcacaactgtttgcagcctcccgaaaagagtatgaaagaagccgggctctgcttgaagtcgtcaatgacctgttcgaagagcagactgacctggaaaagattgttaagaaaatcatgcaccgggcacaaaccctgctgaaatgtgagagatgctctgttctcctgttagaggacatcgaatcgcccgtagtgaaattcaccaagagcttcgaacttatgtctcccaaatgcagcgcagacgctgaaaactcattcaaagagtcaatggaaaagagcagctacagcgactggctaattaacaattccatagccgagctcgttgcaagcacggggctccccgtgaatattagtgatgcttatcaagatccgcgttttgacgccgaagcggatcaaattagtggcttccacattcggtccgtcctgtgcgtgccgatttggaacagtaatcaccagatcattggtgtggctcaagtcctaaacagactcgatggcaagccctttgacgacgctgaccagcgcctctttgaggcgttcgtgatcttttgcggcctggggatcaacaatacaataatgtacgaccaagtcaaaaaaagttgggcaaagcagtctgttgcgctggatgtcctgtcctaccacgccacatgtagcaaagccgaggtcgataaattcaaagccgctaatattccactggtctctgaattggctattgatgacatacacttcgacgacttttcactggacgtcgacgccatgatcaccgctgcactgcgcatgtttatggagctgggcatggtccagaaattcaagattgactacgagaccttatgccggtggctgctgaccgtgcgtaagaattatcgcatggtgctctatcataactggaggcacgcctttaatgtctgtcagctcatgttcgcaatgctgacaacagccggatttcaggacattctcaccgaggtggagatcctcgcagtgattgtgggatgcctctgtcatgacctggaccacaggggaactaataatgccttccaggcaaagagtggcagcgcattagcacaactgtatggtacctccgccaccttggagcaccaccatttcaaccacgcagttatgatcctgcagtctgagggtcataacattttcgcgaatctgtcatcaaaagaatattccgatctgatgcagctgctgaagcagtctatcctggctacagatttgacactatatttcgaacgacgaacagaattttttgagcttgtctctaagggtgagtacgattggaacatcaaaaaccatagggacattttccggtcgatgctaatgacagcctgcgatcttggcgctgtaactaagccttgggagatttcgcggcaggtcgcagagctggttacctctgagtttttcgagcagggtgacagagagagactggaactgaaacttacccctagtgctattttcgacaggaacaggaaagatgagctccctcggctgcaactagaatggatcgactccatctgtatgccattataccaggcactagtcaaggtgaacgtgaagcttaagcccatgctggatagtgtcgcaacaaaccgtagtaaatgggaagagctccatcagaaacgcctgcttgcctctactgcaagcagctcccccgcatccgtgatggtggccaaggaggaccgaaattag

SEQ ID NO: 34690 - DNA, 393 bp, Artificial Sequence
  derived and/or modified sequence
atgcccattagaagcagtgatggggaaatcatcggggttgctcaggcaataaataaaatccctgagggggctccattcaccgaggacgatgaaaaggtgatgcagatgtacctgccattctgcggaatagccattagtaacgcacagctgtttgccgcttctcgaaaggagtatgagcggagtcgtgccttactcgaggtagtgaatgacctgtttgaagagcagactgacctcgagaaaattgtgaagaagattatgcaccgagctcagactctgttgaagtgtgaaagatgttctgtgctcctgctggaagatatagaatcacccgtggtgaagttcacaaaaagtttcgagctgatgtccccaaaatgcagtgctgatgccgaaaactag

SEQ ID NO: 34691 - DNA, 1728 bp, Artificial Sequence
  derived and/or modified sequence
atgcagatgtacctgcctttctgcggtattgcaatttcaaacgctcaactcttcgctgcttccagaaaggaatacgagaggtcacgggctcttctcgaggtggttaacgacctctttgaagagcaaacagatctagagaagattgtgaagaagataatgcacagagcccagacgctgctgaaatgtgaacggtgcagcgtgctgctcttggaggatattgaaagtcctgtggttaaatttacaaaatccttcgaactcatgtctcccaaatgtagtgccgatgcagaaaactcttttaaagagtctatggagaagagttcctacagtgactggctgatcaacaatagtatcgccgagctcgtggcttcaaccggtctgcctgttaacatctccgacgcctatcaggatccaaggtttgacgcggaggcggaccagatctctggatttcacatcagatccgtgttgtgcgttccaatatggaacagcaatcaccaaatcatcggagtggctcaagttctgaaccgtctcgacgggaaaccctttgacgacgcagaccaaagactgttcgaggccttcgtgatcttctgcggtctcggaatcaataatacaattatgtatgaccaggttaagaaatcgtgggccaaacagtcagtggcactggacgttcttagctatcacgcaacctgtagtaaagccgaggttgataagtttaaggccgcaaacattcctttggtcagtgaactggcaatcgacgacattcattttgacgacttttccctggatgtggacgccatgatcaccgcagcactccgcatgttcatggagctgggtatggtgcagaagtttaaaatcgactacgagacgctctgtaggtggctactgaccgtgcgcaagaactacagaatggttctctaccacaactggagacatgcattcaatgtgtgccaactcatgtttgctatgcttacaacggctggcttccaggacatcctaaccgaagtggagatcctggcagtgatcgtcggctgtctgtgtcacgatctggatcaccggggtactaacaatgccttccaggctaagtccggctccgcactggcccaactgtacggaacgtcggccaccttggagcaccatcatttcaaccacgcagtaatgattctccagtctgaagggcataatatttttgcgaatctttcctctaaagagtactccgacttgatgcagctgctgaagcagtcaattctcgccacagacctgaccctctacttcgagcgcaggacagagttcttcgaattggtgtccaagggtgaatatgactggaacattaaaaaccaccgtgacatcttcaggtctatgttgatgaccgcctgcgacctgggcgctgtgacgaagccctgggaaatctccaggcaggtggctgagctggtgacctcggagttcttcgagcagggggatcgggaacgtctggagcttaaactgaccccatcagcgatttttgataggaatcgaaaagacgaactccctagacttcagctggaatggattgacagcatttgtatgccactctatcaggctcttgttaaggtaaacgtcaagctgaaaccgatgctggactccgtggccaccaacagatccaagtgggaggaactgcatcagaaaaggcttttggccagcaccgctagcagctcaccggcaagtgtgatggtggctaaggaggaccggaattag

SEQ ID NO: 34692 - DNA, 2052 bp, Artificial Sequence
  derived and/or modified sequence
atgctgaagcaggccagaagacccctgttcagaaacgtgctgagcgccacccagtggaagaaggtgaagatcaccagactggtgcagatcagcggcgccagcctggccgagaagcaggagaagcaccaggacttcctgatccagagacagaccaagaccaaggacagaagattcaacgacgagatcgacaagctgaccggctacaagaccaagagcctgctgtgcatgcccatcagaagcagcgacggcgagatcatcggcgtggcccaggccatcaacaagatccccgagggcgcccccttcaccgaggacgacgagaaggtgatgcagatgtacctgcccttctgcggcatcgccatcagcaacgcccagctgttcgccgccagcagaaaggagtacgagagaagcagagccctgctggaggtggtgaacgacctgttcgaggagcagaccgacctggagaagatcgtgaagaagatcatgcacagagcccagaccctgctgaagtgcgagagatgcagcgtgctgctgctggaggacatcgagagccccgtggtgaagttcaccaagagcttcgagctgatgagccccaagtgcagcgccgacgccgagaacagcttcaaggagagcatggagaagagcagctacagcgactggctgatcaacaacagcatcgccgagctggtggccagcaccggcctgcccgtgaacatcagcgacgcctaccaggaccccagattcgacgccgaggccgaccagatcagcggcttccacatcagaagcgtgctgtgcgtgcccatctggaacagcaaccaccagatcatcggcgtggcccaggtgctgaacagactggacggcaagcccttcgacgacgccgaccagagactgttcgaggccttcgtgatcttctgcggcctgggcatcaacaacaccatcatgtacgaccaggtgaagaagagctgggccaagcagagcgtggccctggacgtgctgagctaccacgccacctgcagcaaggccgaggtggacaagttcaaggccgccaacatccccctggtgagcgagctggccatcgacgacatccacttcgacgacttcagcctggacgtggacgccatgatcaccgccgccctgagaatgttcatggagctgggcatggtgcagaagttcaagatcgactacgagaccctgtgcagatggctgctgaccgtgagaaagaactacagaatggtgctgtaccacaactggagacacgccttcaacgtgtgccagctgatgttcgccatgctgaccaccgccggcttccaggacatcctgaccgaggtggagatcctggccgtgatcgtgggctgcctgtgccacgacctggaccacagaggcaccaacaacgccttccaggccaagagcggcagcgccctggcccagctgtacggcaccagcgccaccctggagcaccaccacttcaaccacgccgtgatgatcctgcagagcgagggccacaacatcttcgccaacctgagcagcaaggagtacagcgacctgatgcagctgctgaagcagagcatcctggccaccgacctgaccctgtacttcgagagaagaaccgagttcttcgagctggtgagcaagggcgagtacgactggaacatcaagaaccacagagacatcttcagaagcatgctgatgaccgcctgcgacctgggcgccgtgaccaagccctgggagatcagcagacaggtggccgagctggtgaccagcgagttcttcgagcagggcgacagagagagactggagctgaagctgacccccagcgccatcttcgacagaaacagaaaggacgagctgcccagactgcagctggagtggatcgacagcatctgcatgcccctgtaccaggccctggtgaaggtgaacgtgaagctgaagcccatgctggacagcgtggccaccaacagaagcaagtgggaggagctgcaccagaagagactgctggccagcaccgccagcagcagccccgccagcgtgatggtggccaaggaggacagaaactag

SEQ ID NO: 34693 - DNA, 1470 bp, Artificial Sequence
  derived and/or modified sequence
atgagccccaagtgcagcgccgacgccgagaacagcttcaaggagagcatggagaagagcagctacagcgactggctgatcaacaacagcatcgccgagctggtggccagcaccggcctgcccgtgaacatcagcgacgcctaccaggaccccagattcgacgccgaggccgaccagatcagcggcttccacatcagaagcgtgctgtgcgtgcccatctggaacagcaaccaccagatcatcggcgtggcccaggtgctgaacagactggacggcaagcccttcgacgacgccgaccagagactgttcgaggccttcgtgatcttctgcggcctgggcatcaacaacaccatcatgtacgaccaggtgaagaagagctgggccaagcagagcgtggccctggacgtgctgagctaccacgccacctgcagcaaggccgaggtggacaagttcaaggccgccaacatccccctggtgagcgagctggccatcgacgacatccacttcgacgacttcagcctggacgtggacgccatgatcaccgccgccctgagaatgttcatggagctgggcatggtgcagaagttcaagatcgactacgagaccctgtgcagatggctgctgaccgtgagaaagaactacagaatggtgctgtaccacaactggagacacgccttcaacgtgtgccagctgatgttcgccatgctgaccaccgccggcttccaggacatcctgaccgaggtggagatcctggccgtgatcgtgggctgcctgtgccacgacctggaccacagaggcaccaacaacgccttccaggccaagagcggcagcgccctggcccagctgtacggcaccagcgccaccctggagcaccaccacttcaaccacgccgtgatgatcctgcagagcgagggccacaacatcttcgccaacctgagcagcaaggagtacagcgacctgatgcagctgctgaagcagagcatcctggccaccgacctgaccctgtacttcgagagaagaaccgagttcttcgagctggtgagcaagggcgagtacgactggaacatcaagaaccacagagacatcttcagaagcatgctgatgaccgcctgcgacctgggcgccgtgaccaagccctgggagatcagcagacaggtggccgagctggtgaccagcgagttcttcgagcagggcgacagagagagactggagctgaagctgacccccagcgccatcttcgacagaaacagaaaggacgagctgcccagactgcagctggagtggatcgacagcatctgcatgcccctgtaccaggccctggtgaaggtgaacgtgaagctgaagcccatgctggacagcgtggccaccaacagaagcaagtgggaggagctgcaccagaagagactgctggccagcaccgccagcagcagccccgccagcgtgatggtggccaaggaggacagaaactag

SEQ ID NO: 34694 - DNA, 1728 bp, Artificial Sequence
  derived and/or modified sequence
atgcagatgtacctgcccttctgcggcatcgccatcagcaacgcccagctgttcgccgccagcagaaaggagtacgagagaagcagagccctgctggaggtggtgaacgacctgttcgaggagcagaccgacctggagaagatcgtgaagaagatcatgcacagagcccagaccctgctgaagtgcgagagatgcagcgtgctgctgctggaggacatcgagagccccgtggtgaagttcaccaagagcttcgagctgatgagccccaagtgcagcgccgacgccgagaacagcttcaaggagagcatggagaagagcagctacagcgactggctgatcaacaacagcatcgccgagctggtggccagcaccggcctgcccgtgaacatcagcgacgcctaccaggaccccagattcgacgccgaggccgaccagatcagcggcttccacatcagaagcgtgctgtgcgtgcccatctggaacagcaaccaccagatcatcggcgtggcccaggtgctgaacagactggacggcaagcccttcgacgacgccgaccagagactgttcgaggccttcgtgatcttctgcggcctgggcatcaacaacaccatcatgtacgaccaggtgaagaagagctgggccaagcagagcgtggccctggacgtgctgagctaccacgccacctgcagcaaggccgaggtggacaagttcaaggccgccaacatccccctggtgagcgagctggccatcgacgacatccacttcgacgacttcagcctggacgtggacgccatgatcaccgccgccctgagaatgttcatggagctgggcatggtgcagaagttcaagatcgactacgagaccctgtgcagatggctgctgaccgtgagaaagaactacagaatggtgctgtaccacaactggagacacgccttcaacgtgtgccagctgatgttcgccatgctgaccaccgccggcttccaggacatcctgaccgaggtggagatcctggccgtgatcgtgggctgcctgtgccacgacctggaccacagaggcaccaacaacgccttccaggccaagagcggcagcgccctggcccagctgtacggcaccagcgccaccctggagcaccaccacttcaaccacgccgtgatgatcctgcagagcgagggccacaacatcttcgccaacctgagcagcaaggagtacagcgacctgatgcagctgctgaagcagagcatcctggccaccgacctgaccctgtacttcgagagaagaaccgagttcttcgagctggtgagcaagggcgagtacgactggaacatcaagaaccacagagacatcttcagaagcatgctgatgaccgcctgcgacctgggcgccgtgaccaagccctgggagatcagcagacaggtggccgagctggtgaccagcgagttcttcgagcagggcgacagagagagactggagctgaagctgacccccagcgccatcttcgacagaaacagaaaggacgagctgcccagactgcagctggagtggatcgacagcatctgcatgcccctgtaccaggccctggtgaaggtgaacgtgaagctgaagcccatgctggacagcgtggccaccaacagaagcaagtgggaggagctgcaccagaagagactgctggccagcaccgccagcagcagccccgccagcgtgatggtggccaaggaggacagaaactag

SEQ ID NO: 34695 - DNA, 393 bp, Artificial Sequence
  derived and/or modified sequence
atgcccatcagaagcagcgacggcgagatcatcggcgtggcccaggccatcaacaagatccccgagggcgcccccttcaccgaggacgacgagaaggtgatgcagatgtacctgcccttctgcggcatcgccatcagcaacgcccagctgttcgccgccagcagaaaggagtacgagagaagcagagccctgctggaggtggtgaacgacctgttcgaggagcagaccgacctggagaagatcgtgaagaagatcatgcacagagcccagaccctgctgaagtgcgagagatgcagcgtgctgctgctggaggacatcgagagccccgtggtgaagttcaccaagagcttcgagctgatgagccccaagtgcagcgccgacgccgagaactag

SEQ ID NO: 34696 - protein, 839 aa, Artificial Sequence
  derived and/or modified sequence
MAQFDTEYQRLEASYSDSPPGEEDLLVHVAEGSKSPWHHIENLDLFFSRVYNLHQKNGFTCMLIGEIFELMQFLFVVAFTTFLVSCVDYDILFANKMVNHSLHPTEPVKVTLPDAFLPAQVCSARIQENGSLITILVIAGVFWIHRLIKFIYNICCYWEIHSFYLHALRIPMSALPYCTWQEVQARIVQTQKEHQICIHKRELTELDIYHRILRFQNYMVALVNKSLLPLRFRLPGLGEAVFFTRGLKYNFELILFWGPGSLFLNEWSLKAEYKRGGQRLELAQRLSNRILWIGIANFLLCPLILIWQILYAFFSYAEVLKREPGALGARCWSLYGRCYLRHFNELEHELQSRLNRGYKPASKYMNCFLSPLLTLLAKNGAFFAGSILAVLIALTIYDEDVLAVEHVLTTVTLLGVTVTVCRSFIPDQHMVFCPEQLLRVILAHIHYMPDHWQGNAHRSQTRDEFAQLFQYKAVFILEELLSPIVTPLILIFCLRPRALEIIDFFRNFTVEVVGVGDTCSFAQMDVRQHGHPQWLSAGQTEASVYQQAEDGKTELSLMHFAITNPGWQPPRESTAFLGFLKEQVQRDGAAASLAQGGLLPENALFTSIQSLQSESEPLSLIANVVAGSSCRGPPLPRDLQGSRHRAEVASALRSFSPLQPGQAPTGRAHSTMTGSGVDARTASSGSSVWEGQLQSLVLSEYASTEMSLHALYMHQLHKQQAQAEPERHVWHRRESDESGESAPDEGGEGARAPQSIPRSASYPCAAPRPGAPETTALHGGFQRRYGGITDPGTVPRVPSHFSRLPLGGWAEDGQSASRHPEPVPEEGSEDELPPQVHKV

SEQ ID NO: 34697 - protein, 778 aa, Artificial Sequence
  derived and/or modified sequence
MLIGEIFELMQFLFVVAFTTFLVSCVDYDILFANKMVNHSLHPTEPVKVTLPDAFLPAQVCSARIQENGSLITILVIAGVFWIHRLIKFIYNICCYWEIHSFYLHALRIPMSALPYCTWQEVQARIVQTQKEHQICIHKRELTELDIYHRILRFQNYMVALVNKSLLPLRFRLPGLGEAVFFTRGLKYNFELILFWGPGSLFLNEWSLKAEYKRGGQRLELAQRLSNRILWIGIANFLLCPLILIWQILYAFFSYAEVLKREPGALGARCWSLYGRCYLRHFNELEHELQSRLNRGYKPASKYMNCFLSPLLTLLAKNGAFFAGSILAVLIALTIYDEDVLAVEHVLTTVTLLGVTVTVCRSFIPDQHMVFCPEQLLRVILAHIHYMPDHWQGNAHRSQTRDEFAQLFQYKAVFILEELLSPIVTPLILIFCLRPRALEIIDFFRNFTVEVVGVGDTCSFAQMDVRQHGHPQWLSAGQTEASVYQQAEDGKTELSLMHFAITNPGWQPPRESTAFLGFLKEQVQRDGAAASLAQGGLLPENALFTSIQSLQSESEPLSLIANVVAGSSCRGPPLPRDLQGSRHRAEVASALRSFSPLQPGQAPTGRAHSTMTGSGVDARTASSGSSVWEGQLQSLVLSEYASTEMSLHALYMHQLHKQQAQAEPERHVWHRRESDESGESAPDEGGEGARAPQSIPRSASYPCAAPRPGAPETTALHGGFQRRYGGITDPGTVPRVPSHFSRLPLGGWAEDGQSASRHPEPVPEEGSEDELPPQVHKV

SEQ ID NO: 34698 - protein, 169 aa, Artificial Sequence
  derived and/or modified sequence
MAQFDTEYQRLEASYSDSPPGEEDLLVHVAEGSKSPWHHIENLDLFFSRVYNLHQKNGFTCMLIGEIFELMQFLFVVAFTTFLVSCVDYDILFANKMVNHSLHPTEPVKVTLPDAFLPAQVCSARIQENGSLITILVIAGVFWIHRLIKFIYNICCYWEIHSFYLHALR

SEQ ID NO: 34699 - protein, 144 aa, Artificial Sequence
  derived and/or modified sequence
MAQFDTEYQRLEASYSDSPPGEEDLLVHVAEGSKSPWHHIENLDLFFSRVYNLHQKNGFTCMLIGEIFELMQFLFVVAFTTFLVSCVDYDILFANKMVNHSLHPTEPVKVTLPDAFLPAQVCSARIQENGSLITILVIAGVFWI

SEQ ID NO: 34700 - protein, 93 aa, Artificial Sequence
  derived and/or modified sequence
MAQFDTEYQRLEASYSDSPPGEEDLLVHVAEGSKSPWHHIENLDLFFSRVYNLHQKNGFTCMLIGEIFELMQFLFVVAFTTFLVSCVDYDILF

SEQ ID NO: 34701 - protein, 188 aa, Artificial Sequence
  derived and/or modified sequence
MAQFDTEYQRLEASYSDSPPGEEDLLVHVAEGSKSPWHHIENLDLFFSRVYNLHQKNGFTCMLIGEIFELMQFLFVVAFTTFLVSCVDYDILFANKMVNHSLHPTEPVKVTLPDAFLPAQVCSARIQENGSLITILVIAGVFWIHRLIKFIYNICCYWEIHSFYLHALRIPMSALPYCTWQEVQARIV

SEQ ID NO: 34702 - protein, 131 aa, Artificial Sequence
  derived and/or modified sequence
MAQFDTEYQRLEASYSDSPPGEEDLLVHVAEGSKSPWHHIENLDLFFSRVYNLHQKNGFTCMLIGEIFELMQFLFVVAFTTFLVSCVDYDILFANKMVNHSLHPTEPVKVTLPDAFLPAQVCSARIQENGS

SEQ ID NO: 34703 - protein, 97 aa, Artificial Sequence
  derived and/or modified sequence
MAQFDTEYQRLEASYSDSPPGEEDLLVHVAEGSKSPWHHIENLDLFFSRVYNLHQKNGFTCMLIGEIFELMQFLFVVAFTTFLVSCVDYDILFANKM

SEQ ID NO: 34704 - protein, 172 aa, Artificial Sequence
  derived and/or modified sequence
MAQFDTEYQRLEASYSDSPPGEEDLLVHVAEGSKSPWHHIENLDLFFSRVYNLHQKNGFTCMLIGEIFELMQFLFVVAFTTFLVSCVDYDILFANKMVNHSLHPTEPVKVTLPDAFLPAQVCSARIQENGSLITILVIAGVFWIHRLIKFIYNICCYWEIHSFYLHALRIPM

SEQ ID NO: 34705 - DNA, 2520 bp, Artificial Sequence
  derived and/or modified sequence
atggcacagttcgataccgagtaccagcgcctggaagcatcttattcggactcacccccaggtgaggaggaccttctcgttcatgtggctgagggttctaaaagtccatggcaccacattgagaatctagacttgttttttagccgagtgtacaatttgcatcagaagaatggcttcacctgcatgctgattggagaaatattcgaactgatgcagtttctgttcgtggtcgctttcaccacatttttggtttcctgcgttgactatgatattctgttcgctaataagatggtgaaccattcacttcatcctaccgaacctgtgaaggtaacactgcccgatgccttcctccctgctcaggtgtgttcagcccgaattcaagaaaatggatcccttatcactatccttgttattgccggggtcttctggatccataggctgatcaagtttatctacaatatttgttgttactgggagatccactcattctacctccacgctcttcgaataccgatgtccgccctgccctattgcacttggcaggaggttcaggcacgcatagtacagactcagaaagaacatcagatatgcatacacaaaagggagctcaccgagctggatatctaccaccgcatattacgttttcagaattatatggtagcactcgtgaacaagagcctgctgcccttgcgcttccgcctcccaggactaggggaagcagttttcttcacgcgtgggctgaagtacaactttgaactcatccttttctgggggcccgggagtctgttcttaaacgaatggtcccttaaagctgagtataaacgaggtggtcagcgattggaactcgctcaacgtctgtccaaccggatactctggatagggattgcaaacttcttgctgtgtccactcattttgatttggcaaatcctctatgcctttttcagctacgccgaggtgctcaaaagagaaccaggcgcccttggcgctcgatgttggtctctatacggacggtgttacctccgccacttcaacgagctcgagcacgagctccagtctagactcaaccggggctacaagcccgccagtaagtacatgaactgctttcttagccctctcctaactctcttggctaaaaatggcgcgttctttgctgggagcatcctggcggtattgatcgcgctcacgatctatgacgaagacgttcttgccgtggagcacgtgctaacaacagtcactctgctcggcgttacagtgaccgtttgtcgctccttcatcccggaccagcacatggtgttttgtcccgagcaacttctgcgtgtaatcctcgcccacatacactacatgcccgatcactggcaggggaatgcccatcgtagccagacccgggacgaattcgcgcagctgtttcagtacaaagcagttttcattctggaagaactgctctcgccaatcgtgacacccctgattctgatcttctgtttgaggcctcgtgcactagaaatcatcgacttcttccggaacttcacagttgaggttgtgggagttggcgacacctgtagcttcgcccagatggacgtgaggcagcatgggcatccccagtggttgtccgccggccagacagaagcttccgtatatcagcaggccgaggacgggaagaccgaattgtccctcatgcacttcgcaataactaaccctggttggcagcctccccgtgagtcaacagcctttctggggtttctgaaggaacaggtgcagagggatggcgcagccgcttctctcgcccaaggcgggttactgccagagaatgccctttttacctccatacagtctttgcagtccgaatcggaaccgctgtctctgatcgctaacgtcgtggcaggctcatcgtgtcgtgggccacctctgccgagggacctgcaggggagccggcatagagcggaggtggcctctgcactgcgcagttttagtcccctgcagcccggtcaggctcccacaggacgggcccacagtacaatgacaggatccggcgtcgacgccaggacggcctctagcgggtcttcggtgtgggagggtcagctgcagtctctagttctgagcgaatatgcgagcacagagatgagtctccacgcattatacatgcatcagttgcataagcagcaggctcaggcagaacccgagcgccacgtttggcatcgtcgggagagcgatgaatctggggagagcgctcctgacgagggtggagaaggggccagggcccctcagagcatcccccgctctgccagttacccatgcgctgctccaagacccggtgcccccgagacaactgctctccacggaggtttccaacggaggtatggtggaatcaccgaccccggaaccgtgccccgggtaccatcccatttctcaagattacccctcggcggatgggccgaggatggccagagtgccagcagacacccagagcccgttccagaggagggttccgaggacgaactcccccctcaagtgcataaggtctag

SEQ ID NO: 34706 - DNA, 2520 bp, Artificial Sequence
  derived and/or modified sequence
atggcacagttcgacaccgaataccagaggctggaagcctcgtatagtgactcccctccaggcgaagaagacctgttagttcatgtggccgaagggagcaaatcaccatggcaccacatcgagaatctagatctgttctttagtagagtgtataatctccatcaaaagaatggatttacctgcatgctgatcggggagatcttcgaactgatgcagtttctttttgtggttgcgttcaccacattcttggtgtcatgcgtggactatgatattctgtttgcaaataagatggtgaaccatagcctccatcctactgagcctgtaaaggtgacactgccagacgcgttccttccagcacaggtgtgcagcgcgaggatccaggagaacgggagtctgataaccattctggtcatcgctggagttttctggatccacaggcttattaagtttatctataacatttgttgttactgggagattcactctttctatctgcacgctctcaggatccctatgtcagccctcccatattgtacatggcaggaagtacaggctagaatcgtccagactcaaaaggagcatcaaatttgcattcataaacgcgagttgaccgagctggacatttatcataggattctgaggttccagaactacatggttgctctggtaaacaagagcctgttacctcttagattccgcctccctggcttgggcgaggcggtatttttcaccaggggactcaaatacaacttcgaactgattctattctggggccctggaagtttgtttctcaatgaatggagcctgaaagcagaatataagcgtggggggcaacgcctcgaactcgcgcagcggttgagcaaccgcattctttggatcggaatagctaacttccttttgtgtcccctgatcctgatttggcagattctctacgcctttttctcctatgcggaagttcttaagcgggaacccggtgcattgggtgcgagatgttggagtctgtatggcaggtgctacttacgccacttcaatgaactggagcacgagcttcagtcccggctgaataggggctacaaacccgcatcgaaatatatgaattgctttctaagccctttgctgacacttctggcaaaaaacggcgcatttttcgctggttctatcttggcagtgctgatcgccctgacgatctacgatgaggatgtgttggccgtggaacacgtgctgactaccgttacgctgttaggggttaccgtcactgtttgcagatccttcatccccgaccaacacatggttttctgccccgagcaacttcttcgcgtcatattggctcatatccactatatgcccgaccactggcaggggaatgcacacaggtcacagacaagggacgaattcgctcagctgttccaatataaggccgtgttcatcctcgaagagcttctttctcccattgttacccccctaattctgattttctgcttacgaccacgggccctggaaatcattgatttctttagaaattttacggtggaggtcgtcggcgtgggtgacacttgttccttcgctcagatggacgttaggcagcacggccacccgcagtggcttagcgccggtcagacggaagccagtgtgtaccagcaggctgaggacggcaaaaccgaactcagcctgatgcactttgctatcaccaacccaggttggcaacctcctcgagaaagtaccgcgttcctgggcttcctgaaggagcaggtccagcgagacggggctgcagcctccctggcgcagggtggacttttacccgaaaacgctctgttcaccagcatacaatcactgcagagcgagtcagaaccattgtcacttatcgcgaacgtggtggccggcagtagctgccgggggccacctctgccgcgggacctgcaagggtctcgacacagagctgaagtcgccagtgccctgaggagcttctcacccttacagcctggtcaagccccgaccggccgagcccactccacaatgaccggcagcggcgttgatgcaaggactgcctcgtccggctctagcgtctgggagggacaactccagagcctcgttctaagcgagtatgctagtactgagatgtcccttcacgccctgtatatgcaccaactccacaagcagcaggctcaagcagaacccgaaagacatgtatggcatcggcgtgagagcgacgagagcggtgagagcgcgcccgatgagggaggtgaaggcgctcgggcaccccagtccatccctcggtctgcctcctatccctgcgcagccccacgaccaggcgctcctgagacaaccgctctgcatggcgggttccagagacgctacggtggaattacagacccggggaccgttccacgcgtgccttcccacttcagccgactgcctcttggaggatgggctgaagatgggcagagtgcatcgcggcatcctgagcccgttcctgaggaagggtcggaagacgagctgccacctcaggtgcacaaagtctag

SEQ ID NO: 34707 - DNA, 2337 bp, Artificial Sequence
  derived and/or modified sequence
atgttgatcggagaaattttcgaactcatgcaatttctgtttgtcgtcgctttcaccacattcttagtttcctgtgtggactacgacatactgtttgctaataagatggtgaaccactcacttcaccccaccgagccggtcaaggtcacacttccagacgcatttttacctgctcaggtgtgttcagcccggatacaagagaatggctcactcatcactattttagtaatcgccggagtgttttggattcatcgtcttataaaatttatttataatatctgctgctactgggagatacactctttctacctccacgccttgcggattcctatgagtgcactgccatattgtacatggcaggaggtccaggctcggatcgtccagactcaaaaggaacaccagatatgtatccacaaaagggaactgaccgagctggatatttatcacagaatattgagatttcagaattacatggttgcactggttaacaagtctctgctgccactgagattccggctccccggactgggagaggcagtgttctttacaaggggcttaaagtataatttcgagctgatccttttctggggaccagggtctttatttctgaatgagtggagcctaaaagcagagtacaaaaggggcggccaaaggttggaactggcgcagcggcttagcaaccgaattctctggattggaatcgctaatttcctgttgtgcccactcattcttatctggcagatcctatacgcgttcttctcatatgccgaggttcttaaacgggaaccaggcgctctgggggcacgttgttggagtctatatggcaggtgctacctaagacatttcaacgagctggaacatgagcttcagagccgcctgaatcggggctacaaaccagcctcaaaatatatgaattgttttctcagccctctcctaacactactggctaaaaacggcgcctttttcgccggctccattctggccgtgctgattgctctgacaatatatgacgaagacgtgctagccgtggaacatgtgctgactactgtgaccctgcttggggtcacagtgactgtctgtagaagtttcatcccagatcagcatatggttttttgcccagagcaactcctgcgagtgatactggctcatattcattatatgcccgatcattggcagggaaatgcacatagatctcagacaagagacgagttcgcacaactgttccaatacaaagcggtgtttattctagaggagctcctgtcacctatcgtgactcctctgattcttatcttttgtttacgcccccgggctctggagattattgattttttccgaaatttcacggtcgaggtggtgggggtgggggacacttgttcctttgcgcagatggacgtgcggcagcacgggcacccacagtggctgagcgccgggcagaccgaagctagcgtgtaccagcaggcagaggatggcaagacagaattgtctctgatgcactttgcaatcacgaaccccggatggcagcccccccgggagagcacagccttcctaggatttctgaaggagcaagtgcagagagacggagccgcagccagcctggcacagggtggcctgctgccagaaaatgctctgttcacgagtatccagtctttacagtcagagtccgaaccgctgtcgctcatcgcaaatgtggtcgcaggttcctcatgtcggggcccccctctcccgcgggatctgcagggctccaggcatagagctgaggtggcttccgccctccggagtttctcgccactgcagcccggccaggccccaaccggtcgtgcccatagtaccatgaccggatccggagtcgatgcaagaaccgctagttctggctccagcgtctgggagggccagctgcagagcttggtcctgagcgagtacgcctcaaccgagatgtcactgcatgcactgtatatgcaccagcttcacaagcagcaagcccaggccgagcctgagaggcacgtgtggcacaggcgggagtccgacgaatcaggcgaatcggccccggatgagggcggtgaaggagcaagggctccccagtccatccctagatccgcttcttacccatgtgccgccccgcgcccaggagctcctgaaaccacagccttgcacggggggtttcagcgcagatacggcgggatcacagacccgggaactgttcctcgagtaccatcacactttagcaggttgcctctaggcgggtgggcagaggatggccagtcagcatccagacatccagaacccgtgccagaggaggggtcagaggatgaactccctcctcaagtgcacaaggtctag

SEQ ID NO: 34708 - DNA, 2520 bp, Artificial Sequence
  derived and/or modified sequence
atggctcaattcgataccgagtaccagcgtctcgaagcctcatatagtgactctcccccaggggaagaggacttacttgtccacgtggctgaggggtctaagagtccatggcaccacatcgagaacctggatctgttcttctcgcgcgtgtataatcttcatcagaaaaacgggtttacctgtatgttgattggggagatcttcgagctgatgcagttcttgtttgtcgtcgctttcacaaccttccttgtcagctgcgtcgactacgacattcttttcgcaaacaagatggtcaaccactctctgcaccccacagagcctgttaaagtgacactcccagatgcttttctcccagctcaggtttgttcagcccgaattcaggagaatggctccctgattacaatcctcgtcattgcaggagtgttctggattcaccggctgataaagtttatctacaacatttgctgttactgggagatccatagcttctatttgcatgctcttcggattcccatgtccgctctgccatactgcacctggcaggaggtccaagcgagaatcgtgcagactcagaaagaacaccagatatgcattcacaagcgtgaactaaccgagctcgacatttatcacaggattcttaggttccaaaattatatggtggcactggtcaataaatctctcctcccacttagatttagactgcccggcctgggagaagccgttttctttacaaggggactgaaatacaacttcgagttgatactgttctgggggcctgggagcttgtttctcaatgagtggtcactcaaggctgaatataagcggggggggcagcggcttgagttggcacaacggctgagcaatcggattctgtggatcggcatcgccaactttctgctgtgtcctctgattctaatatggcaaattctttatgcttttttttcatatgctgaagtgctgaaaagggaacccggagccctgggggctcgatgctggagcttgtacgggcgttgttacctaagacactttaacgagctagagcatgagcttcagagcaggctaaacagagggtacaagcctgcctctaaatatatgaactgctttttgtccccactgctcacactgttggccaaaaacggtgcattcttcgcggggtcgatactcgcagtcctgatagccctgaccatatacgacgaggacgtgctggctgtggaacatgtcctaaccactgtgacactgctcggcgtgacagtgacggtttgcaggagttttattccggaccagcatatggtcttctgccccgagcagctgctcagggtgatactagcccacattcattacatgcccgaccactggcaaggcaacgcacatcgttctcagacgcgtgacgagttcgcgcagctgttccagtataaggcagtgttcatcttagaagagctcttatcccccatcgtgacgcctctcatcttgattttctgtctcagaccacgcgctctcgagattatcgacttcttcaggaacttcacagtggaagtcgtaggcgtcggggatacttgttcctttgcccaaatggatgtccgccaacatgggcaccctcaatggctgagcgcaggccagacagaggccagtgtttatcagcaggccgaggacggcaagaccgagctcagcttgatgcatttcgctattactaatcccggctggcagcctccaagggagtccaccgctttcctggggtttctcaaggagcaggtccagagagacggtgcggctgcctctctagcccagggcggtctgcttcccgaaaatgcacttttcacaagcatccagagtcttcagtccgagtcagaaccactgtcactaattgccaacgttgtggcgggaagctcatgccgcggtccacctctaccccgggacctacaggggagtcgccatcgcgctgaagtcgcctctgctctgcgcagtttcagccctctgcagcccgggcaggcccctacaggccgggcacacagcacaatgacaggctctggggttgacgcaaggacagccagcagcggcagctccgtctgggaaggccagctacaatcactcgtgctcagcgaatacgcaagcaccgaaatgtctctgcacgccctttatatgcatcagctccacaaacaacaggctcaggctgagccagagcgccacgtgtggcatcggcgagaatctgatgagagcggtgagtcagcgcctgatgaaggcggcgagggtgcgcgggctccccagagtatacctaggagtgctagctatccctgcgccgcccccagaccgggcgcacctgaaaccaccgctctgcatgggggtttccagaggaggtatggcgggattacagatcccggaacggtaccacgggtcccttctcacttcagccgcttgccactcggcgggtgggccgaggacgggcagtcagcatcgcgccacccggagcccgttcctgaggaggggagtgaggacgaactgccaccacaggtgcataaagtgtag

SEQ ID NO: 34709 - DNA, 510 bp, Artificial Sequence
  derived and/or modified sequence
atggctcagtttgatacagagtatcagcgcctggaagccagctactccgacagtccaccaggagaggaggatctacttgtgcatgtggccgagggatctaagtccccttggcatcatattgagaacctggatctgtttttttctagagtgtacaatctccaccagaagaatggatttacttgtatgctgattggtgagatcttcgaactaatgcagttcctgttcgtcgtcgccttcaccacatttctggtgtcctgcgttgattatgacatcctgtttgccaacaagatggtaaaccactccctgcaccccactgagcccgttaaggtgacactgcccgatgctttcttgcctgcacaggtctgttctgcacggattcaggagaacggaagcctcattactattctggtgatcgccggggtcttctggatccataggctcatcaagttcatttacaacatctgttgttactgggagatacatagcttctatctgcatgcgctgaggtag

SEQ ID NO: 34710 - DNA, 435 bp, Artificial Sequence
  derived and/or modified sequence
atggcccaatttgacacagagtaccaacgtctcgaggcaagctacagcgatagtcctccgggcgaagaagacttgctcgtgcacgtcgccgaaggctctaaaagcccttggcaccatattgaaaaccttgatctattctttagccgggtgtacaatttacatcaaaaaaacggttttacctgcatgcttatcggggagatctttgagctgatgcagtttctgttcgtcgtggcgttcacgacttttctcgtgtcatgcgtggactacgacattctcttcgccaacaagatggtcaaccattcgctccatcccacagaacccgtgaaggtgaccctacccgacgcatttctgcccgcacaggtgtgctccgcccgcatccaggagaacggaagcctcataaccatccttgttatcgccggcgtgttttggatctag

SEQ ID NO: 34711 - DNA, 282 bp, Artificial Sequence
  derived and/or modified sequence
atggctcaattcgatactgagtatcagaggctggaggctagttattctgattccccccccggggaagaggatctactggtccacgtcgccgagggaagcaagtcgccttggcaccatattgagaatcttgacctattcttttcccgggtgtataacctgcatcagaagaatgggttcacatgtatgttgattggggagatctttgagctcatgcagtttttattcgtggtagccttcacaaccttcctcgtttcctgcgtggattatgatatactgttttag

SEQ ID NO: 34712 - DNA, 567 bp, Artificial Sequence
  derived and/or modified sequence
atggcccagttcgacacggagtaccagagactggaagcgtcttattctgattcacctcccggggaagaggatctcctcgttcacgtagccgaaggaagtaagtccccttggcatcacattgagaatttggatctcttcttctctcgtgtctacaacctccaccagaaaaacggtttcacgtgtatgttaattggtgagatttttgagctaatgcagttcctatttgtcgtcgcctttacaactttccttgtgtcatgtgtggactatgatattctgttcgccaacaagatggtcaatcatagtctccacccgaccgagccagtgaaggttactctgcctgatgcatttttacccgcacaggtgtgctccgccaggatccaggaaaacggctccctgatcactatccttgtcatcgctggcgtcttttggatacatcgtctaattaagtttatctataatatctgttgctactgggagattcactccttctaccttcatgctctgcgcatcccaatgtctgctctgccctactgtacctggcaggaggtgcaggcccgtatagtgtag

SEQ ID NO: 34713 - DNA, 396 bp, Artificial Sequence
  derived and/or modified sequence
atggcccagttcgacactgaatatcaaaggctagaggcttcatattctgacagccctcctggggaagaggacctgctggtgcatgtcgccgaaggaagcaaaagcccctggcaccacatcgagaatctcgacctgtttttttcaagggtctacaatctccaccagaagaacggatttacgtgcatgctgattggcgaaatattcgagcttatgcagtttttattcgtggtcgcctttacgacctttctggtgagctgtgtggactacgatattctcttcgcaaataagatggtaaatcatagtctgcatccaaccgagcccgtgaaggtcacactccctgacgcctttctgcctgcgcaggtgtgtagtgcccgcattcaagaaaacggctcttag

SEQ ID NO: 34714 - DNA, 294 bp, Artificial Sequence
  derived and/or modified sequence
atggcccaattcgatacagagtaccagaggctcgaagcgagctacagcgacagtccacccggggaagaagacctgctggtgcacgttgccgaaggctccaagtccccttggcatcacattgaaaaccttgatctgtttttctctagggtctataacctgcaccaaaagaacggtttcacctgtatgctcattggtgaaattttcgagctcatgcagtttttattcgtcgtcgccttcaccacattccttgtcagttgcgtagattacgacattctgttcgcgaataagatgtag

SEQ ID NO: 34715 - DNA, 519 bp, Artificial Sequence
  derived and/or modified sequence
atggcccagttcgacacagaatatcagcgtttggaagcgtcttacagcgatagtccaccaggagaggaggacctgctggtgcatgtggcagaagggtctaaatccccatggcaccatattgagaatttggatttgtttttctctagagtgtataacctgcatcagaaaaacgggttcacctgcatgctgatcggcgaaatctttgaactgatgcagttcctgtttgtggttgccttcactactttccttgtgagctgcgtggattacgatatactgttcgcaaacaagatggttaaccatagcctgcatccgaccgaacccgttaaggttacattacccgatgcatttcttcccgcacaggtgtgctcagcccgaatacaggagaatggaagcctgatcacgattctggtaatagctggggttttttggatacatcgcttaattaagtttatatataacatctgctgctactgggaaattcacagtttctatctgcacgcccttcgcattcctatgtag

SEQ ID NO: 34716 - DNA, 2520 bp, Artificial Sequence
  derived and/or modified sequence
atggcccagtttgacacagagtaccagaggctggaggccagctacagcgacagccccccaggagaggaggacctgctggtgcacgtggccgagggcagcaagagcccctggcaccacatcgagaacctggacctcttcttcagccgggtgtacaacctgcaccagaagaatggcttcacctgcatgctgattggagagatctttgagctgatgcagttcctgtttgtggtggccttcaccaccttcctggtgtcctgtgtggactatgacatcctgtttgccaacaagatggtgaaccacagcctgcaccccacagagcctgtgaaggtgaccctgcctgatgccttcctgcctgcccaggtgtgcagcgcccgcatccaggagaatggcagcctcatcaccatcctggtgattgctggggtcttctggatccacaggctcatcaagttcatctacaacatctgctgctactgggagatccacagcttctacctgcacgccctgcgcatccccatgtctgccctgccctactgcacctggcaggaggtgcaggccagaattgtgcagacccagaaggagcaccagatctgcatccacaagcgggagctgacagagctggacatctaccaccgcatcctgcgcttccagaactacatggtggccctggtgaacaagagcctgctgcccctgcgcttccggctgcccggcctgggggaggccgtgttcttcacccggggcctgaagtacaactttgagctgatcctcttctggggccctggcagcctcttcctgaatgagtggagcctgaaggccgagtacaagaggggcggccagaggctggagctggcccagaggctgagcaaccgcatcctgtggattggaattgccaacttcctgctgtgccccctcatcctgatctggcagatcctgtatgccttcttctcctatgcagaggtgctgaagcgggagcccggggccctgggcgcccgctgctggagcctgtatggccgctgctacctgcggcacttcaatgagctggagcacgagctgcagagccggctgaacagaggctacaagccagccagcaagtacatgaactgcttcctgagccccctgctgaccctgctggccaagaatggagccttctttgctggcagcatcctggccgtgctgattgccctgaccatctatgatgaagatgtgctggccgtggagcacgtgctgaccaccgtgaccctgctgggcgtgacagtgacagtgtgccgctccttcatcccagaccagcacatggtgttctgcccagagcagctgctgcgggtcatcctggcccacatccactacatgccagaccactggcagggcaatgcccacaggagccagaccagagatgaatttgcccagctgttccagtacaaggctgtgttcatcctggaggagctgctgagccccatcgtgacccccctcatcctgatcttctgcctgcggccccgggccctggagatcatcgacttcttcaggaacttcaccgtggaggtggtgggcgtgggggacacctgcagctttgcccagatggatgtgcggcagcacggccacccccagtggctgtctgctggccagacagaggcctctgtgtaccagcaggctgaagatggcaagacagagctgagcctgatgcactttgccatcaccaaccctggctggcagcccccccgggagagcacagccttcctgggcttcctgaaggagcaggtgcagagagatggagctgctgccagcctggcccagggcggcctgctgcctgaaaatgccctcttcaccagcatccagagcctgcagagcgagagcgagcccctgagcctgattgccaacgtggtggccggcagcagctgccggggcccccccctgccccgggacctgcagggcagccgccacagagctgaggtggccagcgccctgcggagcttcagccccctgcagcccggccaggcccccaccggccgggcccacagcaccatgactggaagtggagtggatgccaggacagccagcagcggcagctctgtgtgggagggccagctgcagagcctggtgctgtctgaatatgccagcacagagatgagcctgcacgccctgtacatgcaccagctgcacaagcagcaggcccaggccgagcctgagcggcacgtgtggcaccggcgggagagtgatgagagcggggagagcgccccagatgagggcggggagggcgcccgggccccccagagcatccccaggtctgccagctacccctgtgccgcccccaggcctggggcccctgagaccacagccctgcacggcggcttccagaggagatatggaggcatcacagatcctggcaccgtgccccgggtgcccagccacttcagccggctgcccctgggcggctgggccgaggatggccagagcgccagccgccaccctgagcctgtgcctgaggagggctctgaagatgagctgcccccccaggtgcacaaggtgtag

SEQ ID NO: 34717 - DNA, 2337 bp, Artificial Sequence
  derived and/or modified sequence
atgctgattggagagatctttgagctgatgcagttcctgtttgtggtggccttcaccaccttcctggtgtcctgtgtggactatgacatcctgtttgccaacaagatggtgaaccacagcctgcaccccacagagcctgtgaaggtgaccctgcctgatgccttcctgcctgcccaggtgtgcagcgcccgcatccaggagaatggcagcctcatcaccatcctggtgattgctggggtcttctggatccacaggctcatcaagttcatctacaacatctgctgctactgggagatccacagcttctacctgcacgccctgcgcatccccatgtctgccctgccctactgcacctggcaggaggtgcaggcccgcatcgtgcagacccagaaggagcaccagatctgcatccacaagcgggagctgacagagctggacatctaccaccgcatcctgcgcttccagaactacatggtggccctggtgaacaagagcctgctgcccctgcgcttccggctgcccggcctgggggaggccgtgttcttcacccggggcctgaagtacaactttgagctgatcctcttctggggccctggcagcctcttcctgaatgagtggagcctgaaggccgagtacaagagaggaggccagaggctggagctggcccagaggctgagcaaccgcatcctgtggattggcatcgccaacttcctgctgtgccccctcatcctgatctggcagatcctgtatgccttcttctcctatgcagaggtgctgaagcgggagcccggggccctgggcgcccgctgctggagcctgtatggccgctgctacctgcggcacttcaatgagctggagcacgagctgcagagccggctgaacagaggctacaagccagccagcaagtacatgaactgcttcctgagccccctgctgaccctgctggccaagaatggagccttctttgctggcagcatcctggccgtgctgattgccctgaccatctatgatgaagatgtgctggccgtggagcacgtgctgaccaccgtgaccctgctgggcgtgacagtgacagtgtgccgctccttcatcccagaccagcacatggtgttctgcccagagcagctgctgcgggtcatcctggcccacatccactacatgccagaccactggcagggcaatgcccacaggagccagaccagagatgaatttgcccagctgttccagtacaaggctgtgttcatcctggaggagctgctgagccccatcgtgacccccctcatcctgatcttctgcctgcggccccgggccctggagatcatcgacttcttcaggaacttcaccgtggaggtggtgggcgtgggggacacctgcagctttgcccagatggatgtgcggcagcacggccacccccagtggctgtctgctggccagacagaggcctctgtgtaccagcaggccgaggatggcaagacagagctgagcctgatgcactttgccatcaccaaccctggctggcagcccccccgggagagcacagccttcctgggcttcctgaaggagcaggtgcagagagatggagctgctgccagcctggcccagggcggcctgctgcctgaaaatgccctcttcaccagcatccagagcctgcagagcgagagcgagcccctgagcctcatcgccaacgtggtggccggcagcagctgccggggcccccccctgccccgggacctgcagggcagccgccacagagctgaggtggccagcgccctgcgctccttcagccccctgcagcccggccaggcccccaccggccgggcccacagcaccatgacaggcagcggcgtggatgccaggacagccagcagcggcagctctgtgtgggagggccagctgcagagcctggtgctgtctgaatatgccagcacagagatgagcctgcacgccctgtacatgcaccagctgcacaagcagcaggcccaggccgagcctgagagacatgtgtggcacagaagagaaagtgatgaaagtggagagagcgccccagatgaaggaggagagggcgcccgggccccccagagcatccccaggtctgccagctacccctgtgccgcccccaggcctggggcccctgagaccacagccctgcatggaggcttccagaggagatatggaggcatcacagaccccggcaccgtgccccgggtgcccagccacttcagccggctgcccctgggcggctgggccgaggatggccagagcgccagccgccaccctgagcctgtgcctgaggagggctctgaagatgagctgcccccccaggtgcacaaggtgtag

SEQ ID NO: 34718 - DNA, 510 bp, Artificial Sequence
  derived and/or modified sequence
atggcccagtttgacacagagtaccagaggctggaggccagctacagcgacagccccccaggagaggaggacctgctggtgcacgtggccgagggcagcaagagcccctggcaccacatcgagaacctggacctcttcttcagccgggtgtacaacctgcaccagaagaatggcttcacctgcatgctgattggagagatctttgagctgatgcagttcctgtttgtggtggccttcaccaccttcctggtgtcctgtgtggactatgacatcctgtttgccaacaagatggtgaaccacagcctgcaccccacagagcctgtgaaggtgaccctgcctgatgccttcctgcctgcccaggtgtgcagcgcccgcatccaggagaatggcagcctcatcaccatcctggtgattgctggggtcttctggatccacaggctcatcaagttcatctacaacatctgctgctactgggagatccacagcttctacctgcacgccctgaggtag

SEQ ID NO: 34719 - DNA, 435 bp, Artificial Sequence
  derived and/or modified sequence
atggcccagtttgacacagagtaccagaggctggaggccagctacagcgacagccccccaggagaggaggacctgctggtgcacgtggccgagggcagcaagagcccctggcaccacatcgagaacctggacctcttcttcagccgggtgtacaacctgcaccagaagaatggcttcacctgcatgctgattggagagatctttgagctgatgcagttcctgtttgtggtggccttcaccaccttcctggtgtcctgtgtggactatgacatcctgtttgccaacaagatggtgaaccacagcctgcaccccacagagcctgtgaaggtgaccctgcctgatgccttcctgcctgcccaggtgtgcagcgcccgcatccaggagaatggcagcctcatcaccatcctggtgattgctggggtcttctggatctag

SEQ ID NO: 34720 - DNA, 282 bp, Artificial Sequence
  derived and/or modified sequence
atggcccagtttgacacagagtaccagaggctggaggccagctacagcgacagccccccaggagaggaggacctgctggtgcacgtggccgagggcagcaagagcccctggcaccacatcgagaacctggacctcttcttcagccgggtgtacaacctgcaccagaagaatggcttcacctgcatgctgattggagagatctttgagctgatgcagttcctgtttgtggtggccttcaccaccttcctggtgtcctgtgtggactatgacatcctcttctag

SEQ ID NO: 34721 - DNA, 567 bp, Artificial Sequence
  derived and/or modified sequence
atggcccagtttgacacagagtaccagaggctggaggccagctacagcgacagccccccaggagaggaggacctgctggtgcacgtggccgagggcagcaagagcccctggcaccacatcgagaacctggacctcttcttcagccgggtgtacaacctgcaccagaagaatggcttcacctgcatgctgattggagagatctttgagctgatgcagttcctgtttgtggtggccttcaccaccttcctggtgtcctgtgtggactatgacatcctgtttgccaacaagatggtgaaccacagcctgcaccccacagagcctgtgaaggtgaccctgcctgatgccttcctgcctgcccaggtgtgcagcgcccgcatccaggagaatggcagcctcatcaccatcctggtgattgctggggtcttctggatccacaggctcatcaagttcatctacaacatctgctgctactgggagatccacagcttctacctgcacgccctgcgcatccccatgtctgccctgccctactgcacctggcaggaggtgcaggccagaattgtgtag

SEQ ID NO: 34722 - DNA, 396 bp, Artificial Sequence
  derived and/or modified sequence
atggcccagtttgacacagagtaccagaggctggaggccagctacagcgacagccccccaggagaggaggacctgctggtgcacgtggccgagggcagcaagagcccctggcaccacatcgagaacctggacctcttcttcagccgggtgtacaacctgcaccagaagaatggcttcacctgcatgctgattggagagatctttgagctgatgcagttcctgtttgtggtggccttcaccaccttcctggtgtcctgtgtggactatgacatcctgtttgccaacaagatggtgaaccacagcctgcaccccacagagcctgtgaaggtgaccctgcctgatgccttcctgcctgcccaggtgtgcagcgcccgcatccaggagaatggcagctag

SEQ ID NO: 34723 - DNA, 294 bp, Artificial Sequence
  derived and/or modified sequence
atggcccagtttgacacagagtaccagaggctggaggccagctacagcgacagccccccaggagaggaggacctgctggtgcacgtggccgagggcagcaagagcccctggcaccacatcgagaacctggacctcttcttcagccgggtgtacaacctgcaccagaagaatggcttcacctgcatgctgattggagagatctttgagctgatgcagttcctgtttgtggtggccttcaccaccttcctggtgtcctgtgtggactatgacatcctgtttgccaacaagatgtag

SEQ ID NO: 34724 - DNA, 519 bp, Artificial Sequence
  derived and/or modified sequence
atggcccagtttgacacagagtaccagaggctggaggccagctacagcgacagccccccaggagaggaggacctgctggtgcacgtggccgagggcagcaagagcccctggcaccacatcgagaacctggacctcttcttcagccgggtgtacaacctgcaccagaagaatggcttcacctgcatgctgattggagagatctttgagctgatgcagttcctgtttgtggtggccttcaccaccttcctggtgtcctgtgtggactatgacatcctgtttgccaacaagatggtgaaccacagcctgcaccccacagagcctgtgaaggtgaccctgcctgatgccttcctgcctgcccaggtgtgcagcgcccgcatccaggagaatggcagcctcatcaccatcctggtgattgctggggtcttctggatccacaggctcatcaagttcatctacaacatctgctgctactgggagatccacagcttctacctgcacgccctgcgcatccccatgtag

SEQ ID NO: 34725 - DNA, 2520 bp, Artificial Sequence
  derived and/or modified sequence
atggcccagttcgacaccgagtaccagcggctggaggccagctacagtgactcccctcccggcgaggaagatctacttgttcatgtggccgaaggctctaagtctccttggcaccacattgaaaatctagacctattttttagtagagtttataacctccatcagaaaaacggattcacgtgcatgctaataggcgagatttttgagcttatgcagttcctgttcgtggtggcgtttacaacatttctcgttagctgcgtggactatgacatccttttcgccaacaagatggtcaaccactcactccacccgaccgagccagtgaaagtcacccttcccgatgccttcctgcctgcgcaggtgtgttccgccaggatccaggagaacggttccctaatcaccatcctagtcattgccggcgtgttttggatccatcgcctgataaagtttatttacaacatatgttgttactgggagattcactcattttatctgcacgcattaagaattcctatgtcagctctcccctactgcacgtggcaggaggtacaggcccgcattgtgcagactcagaaggaacaccagatttgcattcataagcgggaactcactgagctagatatttaccatcgcattctgcgcttccaaaattacatggtggccctggtcaataaaagcctgctgcctctgagattccggttgccaggactgggggaggcagtattttttaccagaggactgaagtataacttcgaactcatattattctggggtcccggatccttgttcctgaatgaatggagtctgaaggcagaatataaaagaggtggacagagactggaactggcgcagcgacttagcaacagaatcctgtggataggcattgcgaacttcctcctctgccccctgatactgatttggcagattctttatgcttttttcagttacgcagaggtgctgaagcgagaacctggcgccttgggagccagatgctggtccctgtacgggcggtgttacttgaggcattttaacgaacttgaacatgaacttcaatctagactcaatcgcggttataaacctgcttcaaaatacatgaattgcttcctcagcccattacttacactgttggccaagaacggcgccttctttgctggctccatcctggctgttcttattgcactgactatttacgatgaggatgtcctcgctgtcgagcatgtcctcacaacagtgactttactgggcgtgacggtcaccgtctgtaggtcatttattcccgatcaacacatggtgttctgccctgagcagcttctgcgcgtcatccttgctcacattcattacatgccagatcattggcagggaaatgcccaccgctcgcaaactcgcgatgaattcgcccaactcttccagtacaaagcagtctttatactggaggagttattgtcaccgatcgtgactcctctgattctcatattctgtttacgcccacgggctcttgagattatcgattttttcagaaattttacagtcgaggtggtgggcgtcggcgatacttgttcattcgcacagatggacgtccgtcagcatgggcaccctcagtggctctccgccggacaaaccgaggctagtgtgtaccagcaagccgaggacggtaagactgagctgtctctcatgcattttgcaattacaaaccccgggtggcagcctccgcgtgagtcaactgcatttctgggctttttgaaagagcaggtccaaagggacggggccgccgcgagtttggctcagggggggttgctccctgagaatgccctgtttacatctattcagtctctccagagtgaatctgagccgctctccctgattgctaatgtggttgctggttccagctgccggggcccgccgttaccaagagatctccagggtagcagacaccgcgccgaagtcgcaagtgctcttaggtctttcagcccacttcagcccggccaggcacctacgggaagagctcacagcacaatgaccggcagcggggttgacgcccgcaccgcgagctcaggctcatccgtgtgggaaggacagttacaaagtctcgtcctgagcgaatacgcttcgactgagatgagtctgcacgccctgtatatgcaccaactacacaagcagcaagcgcaggccgaacccgagcgacatgtatggcatcggcgagaaagcgacgagtccggggaatcagcacctgacgaaggaggcgagggagcccgcgcgccccagagcatcccacggagcgccagctacccctgtgccgctccccggccaggcgcacccgagacaactgcactgcatggcggctttcagcgccgatacggagggattacagacccaggaactgtgcccagggtgcctagtcatttttcaaggctaccccttggtggttgggccgaagacgggcagagcgcctcccgccatcccgaacctgttcccgaggaggggagcgaagacgaacttccaccacaggtgcacaaggtgtag

SEQ ID NO: 34726 - DNA, 2520 bp, Artificial Sequence
  derived and/or modified sequence
atggcccagttcgacaccgagtaccagcggctggaggccagctacagtgattccccaccgggggaggaggacttgctggttcatgtggcagaaggcagcaagtccccctggcaccatatcgaaaatttagaccttttttttagtagagtttacaatctccatcagaagaacgggttcacatgcatgctcatcggcgaaatctttgaactcatgcagtttctgttcgtagtcgctttcactacatttcttgttagctgtgttgactacgatattctgtttgctaataaaatggtcaaccactcactgcaccccactgagccagtgaaagtgacccttcctgatgcctttcttccagcgcaggtgtgttctgcacggatccaggagaatggatccctcattacgatcctggttattgccggtgtgttttggatccacaggctgataaagttcatctataacatctgctgttactgggagatccactctttttatctacacgccttgcgaatacccatgtccgcccttccctattgcacttggcaggaggttcaagcacgcattgtgcagacacagaaagaacaccaaatttgcattcataagagggagctcacagaactcgacatttaccatcggatcctgcgctttcaaaactatatggtagcgctcgtgaataagtctctgctgcccctgcgcttccgtcttcccgggctcggagaagctgtgttctttactcgtgggctgaaatataattttgaactcattctgttttgggggccaggatcactctttctgaatgagtggtccttgaaggcagagtataagcggggcggtcagcggctggagctggcgcagagactgtccaataggatactgtggattggaatagcgaatttcttgttgtgcccactgatcctgatatggcagattctgtacgcctttttttcgtacgctgaagtgctgaagagagaacctggggctcttggcgccaggtgctggtcactttacggccggtgttacctccggcacttcaacgagctagaacatgaattgcagtctcggctcaatcgcggctacaaacccgcctccaagtacatgaactgttttctaagccctctgctgaccctactggctaagaacggtgccttcttcgcggggtccatacttgctgtgctgatcgcactcacaatctacgatgaggacgtacttgcagtggaacatgtgctcactaccgtgaccctccttggtgtcacagtaacagtgtgtcggagctttattcctgaccagcacatggtgttctgccctgagcagctcctaagggtgatactcgctcacattcactatatgccagaccactggcagggaaacgcgcacagaagccagactcgggacgagtttgctcagctgtttcagtacaaagcggtattcatcttggaggaactcctatctcctatcgtgaccccactgatcctcattttttgcctgcgcccccgggctctagaaattattgatttcttccggaacttcactgtcgaggtggttggcgtaggggacacctgcagcttcgcccagatggatgtaagacagcatggacatcctcagtggctctctgccggtcagaccgaggcctcggtttatcagcaagctgaggatgggaaaactgaactttccctcatgcactttgcaatcaccaatcccggatggcagcctcctcgcgagtccaccgcttttctcggcttcctcaaggagcaggtgcagcgggatggcgctgccgccagcttggctcagggagggctgctgccagaaaatgctctgttcacctccatccagagcttacagagtgagagtgagccgttgtcattgatagctaacgtggtggcaggcagtagttgccgcggccccccgctacccagagaccttcagggatctagacacagggctgaggtcgcctccgcactgcgcagcttttcccccctgcaaccaggccaggcacctacaggtcgggcccacagtactatgacgggttcaggagtggacgccaggaccgcctctagcggcagcagtgtctgggagggacagctgcagtctttggttttatcagagtatgcctctacggagatgagtttgcacgctctttatatgcatcaattacacaagcaacaggcgcaggccgagcccgaaagacacgtgtggcataggcgggaaagcgacgaaagtggggagtccgcaccggatgaggggggggaaggggcaagagctccacagtctatccccagatcggccagctacccctgcgcagcacctaggcctggcgctcctgagacaactgcattgcacggcggtttccaacggcgctatggcggtatcactgatccgggcacagtgcctcgggtcccttctcacttctccagactgccactgggcggatgggccgaagatgggcagagcgcttcccggcatcccgaaccagttcccgaggaaggatcagaagacgagttgcctccccaggtccataaggtatag

SEQ ID NO: 34727 - DNA, 2337 bp, Artificial Sequence
  derived and/or modified sequence
atgctgatcggcgagatcttcgagctgatgcagttcctgttcgtggttgccttcactacgtttctagtctcttgcgtcgattatgacatactgttcgccaataagatggtaaaccactcccttcacccaactgaaccggtgaaggtaaccttgcccgacgcattcctgcctgctcaggtctgctcagctagaatccaagaaaatgggagtttaatcacaattctggtcatagcgggcgtgttttggatccataggctcattaagtttatatacaatatttgctgttactgggagatccactccttctacttgcacgcgctcaggattccgatgtctgcgcttccctactgtacttggcaagaggtgcaggcccgcattgtgcagactcagaaggagcaccagatatgtatccacaaaagagagcttaccgagttagatatctaccatcgcatccttagatttcagaactatatggttgcgctggtaaacaagtctcttctgcccttgcgcttccgcctccctggactcggggaagctgtcttttttaccagagggctcaagtacaacttcgaactgatcctgttttggggccccggatcgctgttcctaaacgagtggagcctgaaagctgagtacaagcgaggaggccagaggttggaactggctcagcggctctccaatcggattctttggataggtatcgcaaacttcctcctgtgcccactgattctcatttggcagattttgtatgccttcttctcctacgctgaggtcctaaagcgcgaaccgggcgcgctcggcgccaggtgctggtccctatacggaaggtgctacctgagacattttaacgaactcgagcacgagctgcagagtcgcctgaatcgcggctataagcccgcgagcaagtacatgaactgtttcttaagccctctgctgactcttctcgctaaaaatggggcattcttcgccgggtcgattttggctgtgctgatcgcattaaccatttatgatgaggacgtcctggcagtggaacacgtgttaaccacagtaacccttttgggcgtcacggttacagtatgtcgaagtttcattcctgaccaacatatggtattctgccccgagcaacttctccgggtgattcttgcacacattcattatatgcccgaccactggcagggaaacgctcaccggtcacagactcgcgacgagtttgctcagctgtttcagtataaggccgttttcatcttagaagagctgttgtcacctattgtaaccccgctgatactgattttttgtctccgacctcgagccctggagataattgatttctttcgcaatttcactgtcgaagtagtcggcgtgggtgatacttgctctttcgctcagatggacgtcagacagcacggtcacccacagtggctatctgcaggtcagaccgaggcgtcagtatatcagcaagctgaagatggcaagacagaactttcgttaatgcatttcgcgattacgaaccccgggtggcagccccccagggaaagcacagcgtttctgggttttctgaaggaacaggttcagcgggatggcgctgcagccagcttggcacagggaggactgcttcctgagaacgcattgttcacttccatccagtcgttacagtcggaatcagagccattgtccctgattgccaatgtggtcgctggatcatcgtgtaggggccctcctctgccccgcgacctgcaggggagcagacatcgggcagaggtcgctagtgccttgagatccttttccccactccaacccggccaggcccccacgggccgggcgcacagtacgatgactggctctggggttgatgcccgcactgctagcagcgggtcttctgtctgggagggacagcttcagagcctagtactatctgagtatgcttcaacagagatgtccttgcatgccttatacatgcatcagcttcataagcaacaagcccaggccgagcctgagaggcacgtgtggcatagaagagagtcagatgaaagcggcgagtcagcccctgatgaagggggggagggcgccagggccccacagtccatccctcgcagcgcctcttatccatgcgctgcccctcgaccaggtgcaccagaaaccaccgctttacatgggggattccagagaagatacggtggtattactgatcctggcacagtgccaagagtgcccagccatttttcaagactgccactgggtgggtgggcagaggacggtcagagcgcaagtagacatccagaacccgtgcctgaggagggcagtgaagacgaactgcccccccaagtccataaagtatag

SEQ ID NO: 34728 - DNA, 2520 bp, Artificial Sequence
  derived and/or modified sequence
atggcccagttcgacaccgagtaccagcggctggaggccagctactcagactctcctccaggcgaggaggacttgcttgtgcacgtagctgaaggctccaaaagcccctggcaccacatcgagaatttagacctgttcttctcacgggtttataacctgcatcagaaaaatggcttcacctgtatgctcatcggcgagatcttcgagctgatgcagtttctgtttgtggtggccttcacgacatttctcgtgtcctgcgtcgactacgatatcctgttcgccaacaaaatggttaaccacagtctgcacccaacagaacctgtcaaagtgaccctaccagatgcttttcttcctgcacaggtgtgttcggccaggatacaagagaatggttctctgataacaattctggttatcgccggagtgttctggatccacaggcttatcaagttcatctacaatatctgctgctactgggagatccattcattttacctccacgccctgcgcattccaatgtcagctctgccttattgcacatggcaggaagtgcaggcccggatcgtgcaaactcagaaggagcaccaaatctgcatacacaagcgagagctgacggaattagacatctaccaccggatcctgcggttccagaactacatggttgctttagtcaataagagtttgctaccactgcgtttccgactgcctggcctgggggaggctgtgttttttacacggggtctcaagtacaattttgaattaatacttttttggggacccggcagtctgtttctgaatgaatggagtctaaaggctgagtataaaaggggtggacagcggctcgaattggcccaacggttgtctaaccgcattctctggataggcatcgctaattttttgctctgtccactcattttgatttggcagattttgtacgcattcttcagctatgctgaagtcctgaagcgagaacccggggctttaggggctagatgctggtccctgtatggccgttgctatctccgccacttcaacgaactggagcacgagctccagagcagattgaatcggggctacaagcctgccagtaaatacatgaattgttttttatccccgctcctgacactgctcgcaaagaacggggcgtttttcgcaggatcaatcttagccgtactaattgccctgacaatctacgacgaggatgtgctggcagttgaacacgtgctgactactgtgacacttttgggagtcactgtgacagtatgccggtcctttattccggaccagcacatggtgttttgtcccgaacagctgctccgcgttatcctcgcgcatattcactacatgccagaccactggcaggggaatgcccaccgtagccagactcgcgatgagtttgctcaactcttccagtataaagccgtcttcatcctcgaggagttactctctcccattgttacacctctaatattaattttttgcctaaggcctcgcgccctagagataatcgatttttttcgcaatttcactgtcgaagtggtgggggtgggtgacacttgctcttttgctcaaatggatgtgcgacagcatggccacccacagtggctttccgcaggacagactgaagccagcgtctaccaacaggcagaggacgggaagaccgagctctcactgatgcactttgcaatcacaaatccgggatggcagccccctagagagtccactgcttttcttggctttttgaaagagcaagtgcaaagggatggcgccgcggcaagcctggctcagggcggtctgctccctgagaatgcactcttcacttccattcagagcctgcagtccgagagcgaaccccttagtttgatagcgaatgtagtcgcgggctctagttgccgcggtccacctctgccacgggacctgcaaggttcaaggcaccgcgccgaagtggcatctgcacttcgaagcttctcccccttgcagcccggccaagccccaaccggtcgcgcgcatagcacaatgaccggctcaggcgtcgatgctaggacagcgagctccggatcctctgtgtgggaaggacagttgcaatcgctggtgctgagcgaatacgcatctaccgagatgagcctccacgctctgtacatgcaccagctgcataaacagcaggcccaagctgagccggaacgccacgtctggcatcggagggagagcgatgagagtggcgaatccgcgcctgatgagggcggcgagggggcccgggcacctcagagcattccccggtccgctagctacccctgcgctgcaccaagacccggcgcccctgaaactactgccctgcacggggggtttcagcgaagatacggtggtattaccgatcccggcacggtgccaagggtcccaagtcacttctccagacttcccctcggcgggtgggctgaggacgggcagtctgctagtaggcatcctgaaccagtgcctgaggagggcagtgaggacgaattgcccccccaagtgcacaaggtgtag

SEQ ID NO: 34729 - DNA, 510 bp, Artificial Sequence
  derived and/or modified sequence
atggcccagttcgacaccgagtaccagcggctggaggccagctacagcgattcaccccccggagaggaggatctgctagtccacgttgctgaaggctctaagtcaccctggcatcacatcgagaacctggaccttttcttttcccgagtgtacaaccttcaccagaaaaatggattcacatgtatgcttatcggcgagattttcgagctgatgcagtttttattcgttgtcgccttcactactttcctagtgagttgcgtcgactatgatattctcttcgcgaataaaatggtcaatcacagccttcacccaactgagccggtaaaagtgactctgcccgatgcatttcttcccgctcaggtgtgttctgctaggattcaggaaaacggaagtctgatcacaattctcgttatcgccggggtgttctggattcacaggctgattaagttcatctataatatttgttgttattgggaaatccactccttctatcttcacgcactcagatag

SEQ ID NO: 34730 - DNA, 435 bp, Artificial Sequence
  derived and/or modified sequence
atggcccagttcgacaccgagtaccagcggctggaggccagctactcagattcccctcctggcgaggaagacctgctcgtgcacgtcgccgaagggagcaaaagtccatggcaccacatagaaaatctggacttgttcttctctagggtctacaacctgcaccagaagaacggattcacctgcatgcttattggcgaaattttcgagctaatgcagtttctcttcgtcgtggcatttaccactttcctggtgtcctgcgtcgattatgacatcttgtttgccaacaagatggtgaatcatagtctccaccctaccgagcccgttaaggtaaccctccctgacgcattcctgcctgcacaggtgtgcagtgctaggatccaggagaacgggagcctcatcacaattttagtgatagccggcgtgttttggatctag

SEQ ID NO: 34731 - DNA, 282 bp, Artificial Sequence
  derived and/or modified sequence
atggcccagttcgacaccgagtaccagcggctggaggccagctacagcgactcccctcctggagaggaagatcttctcgtgcatgttgctgagggtagtaaatcaccatggcaccacatagaaaacctggatctgtttttctctagggtgtataatcttcaccaaaagaacggattcacctgtatgctcataggagaaatctttgaacttatgcaatttttgttcgtggtcgcattcacaacatttctggtctcgtgcgtggattacgacattctcttctag

SEQ ID NO: 34732 - DNA, 567 bp, Artificial Sequence
  derived and/or modified sequence
atggcccagttcgacaccgagtaccagcggctggaggccagctacagcgatagtccgccaggcgaagaggatctgctcgttcacgtggccgagggtagtaagagcccgtggcatcacattgaaaatctcgatctgtttttctcgcgggtgtataacctgcatcagaaaaatggtttcacttgcatgcttattggcgaaatcttcgagttaatgcagtttctctttgtggtggcgtttacaacctttctggtgagttgtgtggactacgacattctgttcgccaacaaaatggtgaaccactcactccaccccacggagccggtgaaagtaaccctgccagatgcgtttctccccgcccaggtatgcagtgcccggatacaagaaaacggtagtctgataactattctggtgattgccggagttttctggattcaccggctcattaagtttatctacaacatctgttgttattgggaaatacatagcttctacctgcacgctctgagaatccccatgagcgctttgccctactgcacgtggcaggaagtgcaggcaaggattgtgtag

SEQ ID NO: 34733 - DNA, 396 bp, Artificial Sequence
  derived and/or modified sequence
atggcccagttcgacaccgagtaccagcggctggaggccagctacagcgactcccctcccggtgaggaagacctcctggtgcatgtggcggagggcagtaagtctccttggcaccatatcgagaatctggacttattcttctctcgagtttacaatctccatcagaaaaacgggtttacctgcatgctgattggcgagatatttgaattgatgcagttcttgtttgtggtcgcattcacaacctttctggtatcgtgcgttgactatgacattttgtttgcaaataagatggtgaaccatagtctgcatccgaccgagccggtgaaagtcaccttgccggacgctttcctacctgcccaggtgtgcagcgcccggatacaggaaaacggatcctag

SEQ ID NO: 34734 - DNA, 294 bp, Artificial Sequence
  derived and/or modified sequence
atggcccagttcgacaccgagtaccagcggctggaggccagctacagtgactctccccctggcgaagaggaccttctggtgcatgtcgccgagggctctaagagcccctggcatcacatcgagaacctggatttattcttcagccgcgtatacaacctgcaccagaaaaacggctttacttgtatgctcataggcgagatttttgaactgatgcagttcctgtttgtcgtcgctttcacaacattcctcgttagctgcgtcgactacgacatcttgttcgccaacaaaatgtag

SEQ ID NO: 34735 - DNA, 519 bp, Artificial Sequence
  derived and/or modified sequence
atggcccagttcgacaccgagtaccagcggctggaggccagctactcagactcgccgccgggcgaagaggatctgctcgtacacgtcgctgaggggagcaaaagcccttggcatcacatagaaaatctcgatctgttcttcagccgggtgtataatctccaccagaagaatgggttcacatgcatgctcatcggggaaatttttgagctgatgcagtttttgttcgtcgtcgctttcaccaccttcctcgtgtcctgcgtcgattacgacatcctgttcgctaataagatggttaaccactccctgcaccccactgagcctgtgaaggtcaccttgccagacgcttttctgcccgcccaggtttgttcagcccgaatccaggaaaacggttccttgataacgatactggtgattgccggtgtcttctggattcaccgtctgattaagttcatttataacatatgctgctattgggagatccactctttctaccttcatgctctgagaattccgatgtag

SEQ ID NO: 34736 - DNA, 2520 bp, Artificial Sequence
  derived and/or modified sequence
atggcccaattcgataccgagtatcaacgcctggaagcttcatactctgacagcccaccaggagaggaggatttgctggtgcatgttgccgagggttccaagtctccgtggcatcacatagagaatttggatctgttcttttccagagtgtataacctgcatcaaaagaatggatttacatgcatgctgatcggagagattttcgagctgatgcagtttctgtttgtggttgcctttacaacttttctggtgagctgcgtagactatgatattctgtttgccaacaagatggtgaaccattctctacatcctactgaacccgtgaaggtgaccttgccagacgcattcctgcccgctcaggtgtgctcagcacgcattcaggagaatggctccctcattaccattctcgtgatcgctggtgtcttttggatccaccgcttgattaaatttatatacaacatttgctgctattgggagatacactctttctatctgcatgccttaagaattcctatgagcgcattgccttactgcacatggcaggaagttcaggccaggattgttcagacacagaaagagcaccagatctgcatccataaacgtgaactgacggagctggatatttaccaccggatactaaggttccagaattatatggtggctctggttaacaagtcactgctcccactccggttcaggttgcccggactgggtgaagccgtttttttcacccgcggactcaagtataactttgaactcatccttttttgggggcctggaagcctgttcctgaatgagtggtccctcaaagctgaatacaagcgcggtggtcagcgcctggagctagcccagcgcctcagtaaccgtattctttggatcggaatcgcaaatttcctgctgtgccccttgatcctgatttggcagatcctgtatgccttctttagttacgccgaagtccttaaacgcgagccgggtgccctgggcgcacggtgctggagcctgtatgggagatgttacctgcggcatttcaatgaactggagcacgagcttcagtcgcgtctgaataggggttataagcccgcatccaagtatatgaattgctttcttagcccactgctgacactgttggctaagaacggcgcttttttcgcgggaagtatcctcgctgtcctcatagcactgaccatttacgacgaggacgtgctcgctgttgaacacgtgctcactacggtgactctgctaggggtgactgtcactgtgtgccgcagtttcattcctgaccagcacatggtcttctgccccgaacagctgctgcgcgtcatcctggcccatatacactacatgccggatcactggcaaggcaatgcccatcgctctcaaacgagggatgagttcgcacagttgtttcagtacaaagctgttttcatactggaggaactactcagtcccatagtaactcctctcatactgattttctgcctccgcccacgggctttggaaataattgactttttccgaaatttcaccgtagaagtggtgggggtaggagacacctgttcttttgcacagatggacgttcgtcaacatgggcatcctcagtggctgtctgccggtcagactgaggcctccgtctaccaacaggcagaagacggtaaaaccgaattatcactgatgcatttcgcaataactaaccccggttggcagcctccacgcgagagtacagcgttcctgggatttcttaaggagcaagttcagcgcgatggagctgccgcatcactggcccagggagggctactacctgagaacgctctatttacatccatccaatccttgcagagcgagtctgaacccctgagtctaattgctaacgtcgtagctggcagttcctgccgaggcccaccactgcccagagacctccaaggctcccgtcatcgagccgaggtggcctcagcgttgcgttccttctctcccctgcaacccggtcaagccccaactggtcgcgcacactcaaccatgacaggttccggcgtggacgcccgaacagcgtcctcgggcagcagtgtatgggagggacaactgcagtccctggtgctctctgaatatgcttcaaccgaaatgagcctacatgccctgtatatgcatcaacttcataaacagcaagctcaggcagaaccagagcgtcacgtttggcaccggcgagaaagcgatgagtccggtgagagtgccccagatgaggggggagagggggctagagcgcctcaaagcatcccacgcagcgccagttacccgtgtgccgcaccccgtccaggagcccctgaaaccactgcactgcacgggggattccagaggaggtatgggggtataactgaccccggtacagtccccagagtgcccagtcacttctctcgcctgcccctcggtggctgggctgaggatggtcagtcagcgagtcgccatcccgagcccgtacccgaagagggctctgaggacgaacttccaccacaggtgcacaaggtgtag

SEQ ID NO: 34737 - DNA, 2520 bp, Artificial Sequence
  derived and/or modified sequence
atggcgcagtttgacacagaatatcaacgcctggaggcctcctacagtgatagtcctccaggggaagaagatctgctcgtgcacgtcgccgaaggcagcaagtctccttggcaccacatcgaaaacctcgacctcttcttctctagagtctacaacttacatcaaaagaacggctttacctgcatgcttattggagagatcttcgagcttatgcagttcctatttgtggtcgccttcacgacctttcttgtatcgtgtgtagattacgatatccttttcgcaaacaaaatggtaaatcattctttgcaccccacggaacctgtaaaggtgactctgcccgacgcgtttctgccagcccaggtgtgtagcgccagaatccaggagaacgggtccctgattacgattctggtcatcgcaggcgtcttttggatccacaggcttatcaagtttatctataacatatgctgctactgggaaattcactccttttatctgcatgccctgcgcattcccatgtcagccctgccatattgcacgtggcaggaggtgcaagcaagaatcgtccagactcagaaggagcaccagatttgtattcataaaagagagctgaccgaacttgacatctaccatagaatcctgcgatttcagaattatatggtcgctctggtgaacaaatcactgcttcccctgagatttaggctccccggactgggcgaggccgtcttctttactcggggtttgaaatataattttgaactgattcttttttggggtcccggtagcctctttctgaacgaatggagcctgaaggctgaatacaaacggggtgggcagcggcttgaactggcccaacggttaagtaaccggattctttggataggcattgcaaatttcctcctctgtccacttatcctcatctggcagatcttgtacgcattcttctcgtacgcagaagtgcttaagcgtgagcccggtgcgttaggagcgagatgttggtcactgtacggcagatgttatttgcgacacttcaatgaattagagcatgagttgcagagccgccttaacaggggctacaaacccgcaagcaagtacatgaactgtttcctgagtcccctgctgaccctgctggctaaaaacggggcattctttgccggatccatattggcagttcttatcgcgctgaccatctatgacgaggacgtgctggccgtcgagcatgtactgaccaccgtgacactcctgggggtcactgtaactgtgtgtcggagttttattcctgatcagcatatggtcttttgtcctgagcaactgctgcgggtcatactggcccacatccactatatgccagaccattggcagggcaacgcccatcggtcacagaccagggacgagtttgcacaactctttcagtacaaggccgtattcatcctcgaggagctgctctctcccatagtgacgcccctcattctaatcttctgcttgaggccgagagcattggagattatcgacttttttcggaattttaccgtcgaggtggtcggagtcggcgacacctgttcgttcgcccaaatggacgtgagacagcacggccacccacagtggctgtctgccggtcagactgaggcgagcgtgtaccaacaggcggaagacgggaagacagagctgtccctgatgcattttgctatcacaaacccaggctggcagcctcctagagaaagcacagccttcctggggttcttgaaggaacaggtgcaacgagacggtgccgctgcctcactggcccaggggggactgctgcctgagaacgcgctgtttacctcaatacagtctctccaatctgagtccgagcccctttctttgattgccaacgtcgtggctggcagttcatgccgagggcctccgttgcccagagatttacagggcagccgtcatagagctgaggtggcgtccgccctgcgatcattctcgcccctgcaaccaggtcaggcccctacaggtagggcccattccaccatgactggctccggagtggatgccaggaccgcctcctccgggtcttccgtttgggaaggacagctccaatccttggtgctcagcgaatatgcttccaccgaaatgtcccttcatgcattatatatgcatcagctccacaagcagcaagctcaggctgaacccgaaagacatgtatggcatcggcgagagagcgacgagagtggtgaatccgccccagacgagggtggagagggcgcaagagccccacagagtataccccgatcagcatcctacccttgcgcagcaccgcgaccaggcgctccagagacaacagccctccacggcggattccagcgacgatatgggggaataacggatcccggaacggtgccacgggtgcccagtcacttctcacgcctgcctctcgggggatgggcagaggacggacagtctgcatcgaggcatccggagccggttccagaggaagggtcagaggatgagttacccccacaggtgcataaggtgtag

SEQ ID NO: 34738 - DNA, 2337 bp, Artificial Sequence
  derived and/or modified sequence
atgctcattggagaaatctttgagctgatgcagtttctgtttgtggttgcttttactacctttctggtcagttgtgtggattacgatatacttttcgcaaataagatggtgaaccactctctgcaccccaccgagcccgtgaaggtcactttgccagatgcttttctcccagcacaagtatgttcagctcgcatccaggaaaacggaagcctgatcacaatactggttatcgctggcgtcttctggatccatcgcttaattaaatttatttacaacatatgctgttattgggaaatccactctttctatctccatgccctcagaataccaatgagcgcgttgccttattgcacctggcaagaggtgcaggctcggattgttcagactcagaaagaacaccagatatgcattcataagagagagttgacggaactagacatataccaccggattctgagatttcagaattatatggtggccctggtcaataagagtctgctgcctctacgtttcaggctcccagggctgggtgaagccgtgttcttcactaggggactgaagtataactttgaactcatactgttctggggccctgggtccttatttttaaatgagtggagcctgaaagcagagtacaaaagaggaggccagagactcgaattggcacagcgactgtctaaccggatactatggatcggcatcgctaacttcttgctgtgcccactgatcttgatttggcagatcctgtatgctttcttctcttatgctgaggtcctcaagcgggagccaggcgctctgggcgctcgatgctggagcctgtacggcaggtgctaccttcgccactttaacgagctggaacatgagcttcagagtaggctgaatcgtgggtacaagccagcttccaaatacatgaattgctttctgtcgcctctgcttaccctgttggccaagaatggagccttctttgcagggagcatactggcggtgctcatagctttaactatttacgatgaagatgtgctagcggttgaacacgtgctcaccactgttaccctcctcggggttacggtcactgtttgccgatcgttcattcctgatcagcatatggtgttttgccccgaacagttgctgagagtgatactcgctcacatacattatatgccagatcactggcaaggaaacgcgcaccggagccagactcgcgacgagtttgcccagctgttccagtacaaggctgtgtttatccttgaagagctcctcagcccaattgtgacacccctaattctgatcttttgtctgaggcctcgagccctggagataatcgacttcttccgaaacttcaccgttgaagtcgttggggtaggggatacgtgctccttcgctcagatggacgttcgacaacacggccacccccagtggctctctgcgggacagactgaagcaagtgtgtatcagcaggctgaggacggtaaaacggagctgagcctgatgcattttgcgattacaaaccccggatggcaaccccctagggagtccaccgcattcctggggtttctaaaggagcaggtccagagggacggcgcagcagcttcgctcgcacaggggggtcttctgccggaaaatgctctatttaccagcattcagtcattacagtctgagagtgaacccctatctctcattgccaatgtcgttgccggaagctcttgcaggggccctcccctgccaagagacttgcaggggtctaggcatcgagctgaggtggcctctgctctgcggtctttttcgccactccagcccggacaggcacctacaggcagggcgcatagcaccatgactggcagcggcgtggatgctcgaacagcttcctccggcagcagtgtgtgggagggtcagctccagagtcttgtactctccgagtacgctagcaccgagatgagtctccatgctctttatatgcatcagctccacaagcagcaggcacaagctgagcccgaaagacacgtgtggcatagacgagaatcggacgagagtggcgaaagcgcccctgacgaaggaggcgagggagctcgcgcacctcagagtattccacggagcgcctcttatccctgtgcagcaccgagacctggcgcaccggagactacagccctccacggtggctttcaacgtaggtacgggggtatcacagatccgggaaccgtgcctagagtccctagccacttcagtcgcctgccactgggtggctgggcggaagacggacagtccgcatcccggcatcccgaacccgtacccgaagagggaagtgaagatgaactgcccccacaggtgcacaaagtgtag

SEQ ID NO: 34739 - DNA, 2520 bp, Artificial Sequence
  derived and/or modified sequence
atggcgcagtttgatactgagtaccaacgcttggaagcctcctattctgatagtccaccaggggaggaagatctgctggtccatgtcgcagaaggttccaagagtccttggcaccatatagagaatcttgatctgtttttctcacgtgtatacaatctccatcagaagaacggatttacatgcatgctgattggcgagatattcgaactcatgcagtttctatttgttgtggccttcaccaccttccttgtgagctgcgtcgattacgatattttgtttgccaacaagatggttaatcactctctccacccgacggagccagtgaaggttacccttcccgatgctttcctgccagcccaggtgtgcagcgctcgtatacaggaaaatggtagcttgataacaatcctcgtgattgctggcgttttctggattcaccgactcataaagtttatctataacatatgttgttattgggaaattcactctttctatctgcacgctctgaggatccctatgtccgctctcccctactgtacctggcaggaggtgcaggcccgtatcgtacagacgcagaaggagcatcagatttgtattcacaaaagggagctgactgagctcgacatataccacagaatcctgcgattccaaaattatatggtggccctagtgaacaagtccttgttgcctcttaggttccgtctgcccggattgggtgaggccgtgttcttcacccggggactgaagtataatttcgagcttattctgttttgggggcctggctctcttttcttgaatgagtggagcctgaaggcggagtacaagcgaggcggtcagagactagagctggcgcagcgtctgtccaaccggatcctctggatcgggattgctaatttcttactctgtcctctcattctgatttggcagatcctttatgctttcttctcatacgcagaggtgctgaagcgcgagccaggtgcattaggcgctaggtgctggtccttgtatggacggtgctacctgcggcacttcaacgagctggagcacgaacttcagagtaggctgaaccgtgggtataagcccgcatccaagtacatgaactgcttcctgtcccccctcctcaccctgctggccaaaaacggggcattttttgccggtagcattttagctgtattaatcgccctcactatttatgatgaggacgtgctcgccgtggaacacgtgttaactacagtcacattacttggcgtgacagtgaccgtctgcagaagctttattccggaccagcacatggttttttgtccagaacagcttttgagagtgattctggcacatatccattacatgcctgaccattggcaggggaacgcccataggagtcagacaagagacgagttcgcccagttgtttcagtataaagccgtttttatccttgaggagttactgagccccattgtgacccctttgatcctgatcttttgtctgagaccaagagcgctggaaatcatagacttctttcgcaatttcacggtagaggtggtgggcgtaggggatacgtgcagctttgctcagatggatgtgcgacaacatgggcacccccaatggctaagtgcaggccagaccgaggcgagcgtttaccagcaggccgaagacggtaagactgaactctctctgatgcactttgcaattacaaaccccggttggcagcctcctcgggagtcaaccgcttttctggggttcctgaaagagcaagtgcagagggatggagcagcagcaagcctcgctcaaggaggacttttacccgagaacgcactcttcacaagtatccaaagcctgcagagcgagtccgagcctctctcgcttatcgccaacgtggtcgcaggttcttcctgtcggggacctccactgcccagagatttgcaaggcagtcgacatagagccgaagttgcttcggccctgagaagcttttctccattgcagccaggtcaggcacctacaggacgagcacacagcacaatgacagggtctggggtcgacgccaggactgccagttctggcagttctgtgtgggagggtcagctccagtcgctggttctgtccgaatacgcctctaccgaaatgagtcttcatgcactttatatgcaccagctccacaagcaacaggctcaggcagagcctgagaggcatgtatggcaccgacgggagtccgacgagagtggagagtcagcccctgatgaaggaggcgagggagctcgggcaccccagtctatccccagatccgccagctacccatgcgccgcacccagacctggcgcaccagaaactaccgccttgcacgggggatttcagaggcgttatggaggcattactgatcccggaacagtcccgagagtgccctcccatttttcaagactgccattgggtgggtgggccgaggacggtcagagtgccagccgacaccctgaaccggtgcccgaagagggaagcgaggacgagctccctccccaggtgcacaaggtgtag

SEQ ID NO: 34740 - DNA, 510 bp, Artificial Sequence
  derived and/or modified sequence
atggcccagttcgataccgaatatcagcggctcgaggcaagctactctgattcgccaccaggagaggaggatttgctcgtgcatgtcgcagaaggctcaaagtccccctggcaccacatcgagaatctggacctcttttttagtcgggtgtacaatctgcaccaaaagaacggattcacgtgcatgctgattggggaaatttttgaactgatgcagtttcttttcgtggttgctttcaccacattcttagtatcctgcgtggattacgatatactgttcgcgaataagatggtcaaccattcattgcatcctacagaaccggttaaggtgacccttccagacgcctttctgcctgctcaggtgtgcagcgctaggatacaagaaaacggcagtcttatcacgatcctggtgattgcaggcgtcttctggattcatcgccttatcaaatttatttataacatttgttgctactgggaaattcacagcttctacctccacgccctgcgatag

SEQ ID NO: 34741 - DNA, 435 bp, Artificial Sequence
  derived and/or modified sequence
atggcccaattcgacaccgagtatcagcgattggaggcttcatatagtgactctccacccggtgaggaagacttactggttcacgtggccgaggggtcaaaaagtccctggcaccacattgagaatctggatctcttcttcagccgcgtgtacaatcttcatcaaaagaacggattcacctgtatgctgattggggagatatttgagctgatgcaatttctcttcgtagtagcctttaccacattcctagtgtcatgtgtggactatgacatcctctttgccaacaagatggtgaaccacagcctccaccctaccgagcctgtgaaagttacactccctgacgcgttcttaccagcacaggtctgttccgctcggatccaagaaaacggcagcctaattacaatcttggtcatcgctggagtcttttggatctag

SEQ ID NO: 34742 - DNA, 282 bp, Artificial Sequence
  derived and/or modified sequence
atggcccaatttgacacagaatatcagaggctagaagcatcctattctgactcaccgcctggcgaggaggacctgctcgtgcatgtcgcagaaggctccaagtccccatggcaccatatcgaaaacctggatctgtttttcagccgggtctataatcttcaccagaagaatggcttcacctgcatgctcattggtgaaattttcgagctaatgcagtttctctttgttgtggcatttacaacttttctggtgagctgcgtggactacgacatcctcttctag

SEQ ID NO: 34743 - DNA, 567 bp, Artificial Sequence
  derived and/or modified sequence
atggctcagttcgataccgaatatcaacggctggaggcatcttacagcgacagccctcctggtgaagaagacctccttgtgcacgtagctgaaggatcgaaatcaccttggcatcacatcgaaaatttggatctgtttttctccagagtttataatctccaccagaaaaacggcttcacatgcatgctaatcggcgaaatatttgagctgatgcagtttttgtttgtcgtcgcttttacaactttcctggtcagttgtgtggattatgatatcctgtttgctaataaaatggttaaccactcccttcacccgactgagcccgtaaaagtgactttgcccgatgcattcctgcctgctcaagtgtgctccgcacgaatccaggaaaacggaagcctgattaccatactcgtgatagcaggtgtgttttggatccatcgactcataaagttcatttacaatatttgttgttattgggaaattcattccttctatctacacgctcttaggatccctatgtccgcattgccctactgcacgtggcaggaagtgcaggcacggattgtctag

SEQ ID NO: 34744 - DNA, 396 bp, Artificial Sequence
  derived and/or modified sequence
atggcccagttcgacaccgagtaccagcggctggaagcgtcttattccgattcccctcctggcgaagaggatctactcgtgcacgtggcagagggttcgaaatccccctggcatcatatcgagaatctggatctgttttttagtagagtttacaatctgcaccagaagaatggattcacttgcatgctgatcggcgaaatttttgaactgatgcaattcctcttcgtggtggcttttactacctttctggtaagttgtgtcgactacgacattctgtttgccaacaagatggtcaatcactcgctccatcctactgaacccgttaaggttactctacccgacgccttcctgccagctcaggtgtgcagtgccaggattcaggaaaatggtagctag

SEQ ID NO: 34745 - DNA, 294 bp, Artificial Sequence
  derived and/or modified sequence
atggcccagtttgacaccgaatatcagcggctggaggcgagttacagtgatagtccacctggtgaggaagacctgctcgtgcacgtcgctgaaggcagcaagagcccatggcatcacatagaaaacttagacctgttcttcagtcgggtatacaacctgcatcagaaaaacggctttacttgtatgctgatcggagagatttttgagctaatgcagtttctctttgttgttgcttttaccacttttttagtaagctgcgtcgactacgacatcttgttcgccaataaaatgtag

SEQ ID NO: 34746 - DNA, 519 bp, Artificial Sequence
  derived and/or modified sequence
atggcccaatttgacacagaataccagcgactcgaggcctcatactctgatagccctcctggagaggaggatctcttggtgcatgtggcagaaggctcaaaaagtccttggcaccatatcgaaaatctcgacctattcttctcccgcgtctataatctgcaccaaaagaatgggttcacctgcatgctgatcggggaaatcttcgagttgatgcagttcctcttcgtggtcgccttcacaacttttctcgtttcctgcgtggattacgatatcctctttgccaataagatggtgaaccattcactgcaccctacggagccggttaaggtcactctgccagatgcatttttgcccgcacaggtgtgtagcgcacgcatccaagaaaatgggtcactaattaccattctggtcattgcgggagtattctggatccaccgtttgatcaaatttatctacaacatttgctgctactgggaaatccattctttctatctccatgcactgcggatccccatgtag

SEQ ID NO: 34747 - DNA, 3130 bp, Artificial Sequence
  derived and/or modified sequence
gtgcttattggccagcctggctgcgggtgacagtgagtggcagacacccggcctagcgccgcgggtcgcgccgagccgagccgagccgagcggagccggcggagcctctggaatcacccgggtcgctgttcctgagcagctgcagagcatcgagggctggagaggagcacatactgtccatggagctggtggtcaaggtggacagggggcggtggtgatggcgcagtttgacactgaataccagcgcctagaggcctcctatagtgattcacccccaggggaggaggacctgttggtgcacgtcgccgaggggagcaagtcaccttggcaccatattgaaaaccttgacctcttcttctctcgagtttataatctgcaccagaagaatggcttcacatgtatgctcatcggggagatctttgagctcatgcagttcctctttgtggttgccttcactaccttcctggtcagctgcgtggactatgacatcctatttgccaacaagatggtgaaccacagtcttcaccctactgaacccgtcaaggtcactctgccagacgcctttttgcctgctcaagtctgtagtgccaggattcaggaaaatggctcccttatcaccatcctggtcattgctggtgtcttctggatccaccggcttatcaagttcatctataacatttgctgctactgggagatccactccttctacctgcacgctctgcgcatccctatgtctgcccttccgtattgcacgtggcaagaagtgcaggcccggatcgtgcagacgcagaaggagcaccagatctgcatccacaaacgtgagctgacagaactggacatctaccaccgcatcctccgtttccagaactacatggtggcactggttaacaaatccctcctgcctctgcgcttccgcctgcctggcctcggggaagctgtcttcttcacccgtggtctcaagtacaactttgagctgatcctcttctggggacctggctctctgtttctcaatgaatggagcctcaaggccgagtacaaacgtggggggcaacggctagagctggcccagcgcctcagcaaccgcatcctgtggattggcatcgctaacttcctgctgtgccccctcatcctcatatggcaaatcctctatgccttcttcagctatgctgaggtgctgaagcgggagccgggggccctgggagcacgctgctggtcactctatggccgctgctacctccgccacttcaacgagctggagcacgagctgcagtcccgcctcaaccgtggctacaagcccgcctccaagtacatgaattgcttcttgtcacctcttttgacactgctggccaagaatggagccttcttcgctggctccatcctggctgtgcttattgccctcaccatttatgacgaagatgtgttggctgtggaacatgtgctgaccaccgtcacactcctgggggtcaccgtgaccgtgtgcaggtcctttatcccggaccagcacatggtgttctgccctgagcagctgctccgcgtgatcctcgctcacatccactacatgcctgaccactggcagggtaatgcccaccgctcgcagacccgggacgagtttgcccagctcttccagtacaaggcagtgttcattttggaagagttgctgagccccattgtcacacccctcatcctcatcttctgcctgcgcccacgggccctggagattatagacttcttccgaaacttcaccgtggaggtcgttggtgtgggagatacctgctcctttgctcagatggatgttcgccagcatggtcatccccagtggctatctgctgggcagacagaggcctcagtgtaccagcaagctgaggatggaaagacagagttgtcactcatgcactttgccatcaccaaccctggctggcagccaccacgtgagagcacagccttcctaggcttcctcaaggagcaggttcagcgggatggagcagctgctagcctcgcccaagggggtctgctccctgaaaatgccctctttacgtctatccagtccttacaatctgagtctgagcccctgagccttatcgcaaatgtggtagctggctcatcctgccggggccctccactgcccagagacctgcagggctccaggcacagggctgaagtcgcctctgccctgcgctccttctccccgctgcaacccgggcaggcgcccacaggccgggctcacagcaccatgacaggctctggggtggatgccaggacagccagctccgggagcagcgtgtgggaaggacagctgcagagcctggtgctgtcagaatatgcatccacagagatgagcctgcatgccctctatatgcaccagctccacaagcagcaggcccaggctgaacctgagcggcatgtatggcaccgccgggagagtgatgagagtggagaaagcgcccctgatgaagggggagagggcgcccgggccccccagtctatccctcgctctgctagctatccctgtgcagcaccccggcctggagctcctgagaccactgccctgcatgggggcttccagaggcgctacggtggcatcacagatcctggcacagtgcccagggttccctctcatttctctcggctgcctcttggagggtgggcagaagatgggcagtcggcatcaaggcaccctgagcccgtgcccgaagagggctcggaggatgagctaccccctcaggtgcacaaggtatagacaaggctgagcagggttcctgtggcccaggatggaggccaccgctgccctgccatcccgtctgcctgccatgggacggctcctctgagtgttccctggccccacgtgtgtggtgtttgtgtgtctgtgcctggccaagggaggtgccaacactgggcttgccacagccccaggagaggaatttggggcctaggaaccgagggcacacgggactctagcctcatccccaggacccccttggctcagagtgtggtgctagaaactggcccccagcccagccccagtactgccacctttacacctacccctgcaagtccccagagggctgcccacgatagaagctgccaagcagggagaacctgtgccaactgtggagtggggaggttgggcctg

SEQ ID NO: 34748 - DNA, 3799 bp, Artificial Sequence
  derived and/or modified sequence
agtcccgtccctgaagccgagaattggccgttgtgtctccgccccccgtgcttattggccagcctggctgcgggtgacagtgagtggcagacacccggcctagcgccgcgggtcgcgccgagccgagccgagccgagcggagccggcggagcctctggaatcacccgggtcgctgttcctgaggtggtcaaggtggacagggggcggtggtgatggcgcagtttgacactgaataccagcgcctagaggcctcctatagtgattcacccccaggggaggaggacctgttggtgcacgtcgccgaggggagcaagtcaccttggcaccatattgaaaaccttgacctcttcttctctcgagtttataatctgcaccagaagaatggcttcacatgtatgctcatcggggagatctttgagctcatgcagttcctctttgtggttgccttcactaccttcctggtcagctgcgtggactatgacatcctatttgccaacaagatggtgaaccacagtcttcaccctactgaacccgtcaaggtcactctgccagacgcctttttgcctgctcaagtctgtagtgccaggattcaggaaaatggctcccttatcaccatcctggtcattgctggtgtcttctggatccaccggcttatcaagttcatctataacatttgctgctactgggagatccactccttctacctgcacgctctgcgcatccctatgtctgcccttccgtattgcacgtggcaagaagtgcaggcccggatcgtgcagacgcagaaggagcaccagatctgcatccacaaacgtgagctgacagaactggacatctaccaccgcatcctccgtttccagaactacatggtggcactggttaacaaatccctcctgcctctgcgcttccgcctgcctggcctcggggaagctgtcttcttcacccgtggtctcaagtacaactttgagctgatcctcttctggggacctggctctctgtttctcaatgaatggagcctcaaggccgagtacaaacgtggggggcaacggctagagctggcccagcgcctcagcaaccgcatcctgtggattggcatcgctaacttcctgctgtgccccctcatcctcatatggcaaatcctctatgccttcttcagctatgctgaggtgctgaagcgggagccgggggccctgggagcacgctgctggtcactctatggccgctgctacctccgccacttcaacgagctggagcacgagctgcagtcccgcctcaaccgtggctacaagcccgcctccaagtacatgaattgcttcttgtcacctcttttgacactgctggccaagaatggagccttcttcgctggctccatcctggctgtgcttattgccctcaccatttatgacgaagatgtgttggctgtggaacatgtgctgaccaccgtcacactcctgggggtcaccgtgaccgtgtgcaggtcctttatcccggaccagcacatggtgttctgccctgagcagctgctccgcgtgatcctcgctcacatccactacatgcctgaccactggcagggtaatgcccaccgctcgcagacccgggacgagtttgcccagctcttccagtacaaggcagtgttcattttggaagagttgctgagccccattgtcacacccctcatcctcatcttctgcctgcgcccacgggccctggagattatagacttcttccgaaacttcaccgtggaggtcgttggtgtgggagatacctgctcctttgctcagatggatgttcgccagcatggtcatccccagtggctatctgctgggcagacagaggcctcagtgtaccagcaagctgaggatggaaagacagagttgtcactcatgcactttgccatcaccaaccctggctggcagccaccacgtgagagcacagccttcctaggcttcctcaaggagcaggttcagcgggatggagcagctgctagcctcgcccaagggggtctgctccctgaaaatgccctctttacgtctatccagtccttacaatctgagtctgagcccctgagccttatcgcaaatgtggtagctggctcatcctgccggggccctccactgcccagagacctgcagggctccaggcacagggctgaagtcgcctctgccctgcgctccttctccccgctgcaacccgggcaggcgcccacaggccgggctcacagcaccatgacaggctctggggtggatgccaggacagccagctccgggagcagcgtgtgggaaggacagctgcagagcctggtgctgtcagaatatgcatccacagagatgagcctgcatgccctctatatgcaccagctccacaagcagcaggcccaggctgaacctgagcggcatgtatggcaccgccgggagagtgatgagagtggagaaagcgcccctgatgaagggggagagggcgcccgggccccccagtctatccctcgctctgctagctatccctgtgcagcaccccggcctggagctcctgagaccactgccctgcatgggggcttccagaggcgctacggtggcatcacagatcctggcacagtgcccagggttccctctcatttctctcggctgcctcttggagggtgggcagaagatgggcagtcggcatcaaggcaccctgagcccgtgcccgaagagggctcggaggatgagctaccccctcaggtgcacaaggtatagacaaggctgagcagggttcctgtggcccaggatggaggccaccgctgccctgccatcccgtctgcctgccatgggacggctcctctgagtgttccctggccccacgtgtgtggtgtttgtgtgtctgtgcctggccaagggaggtgccaacactgggcttgccacagccccaggagaggaatttggggcctaggaaccgagggcacacgggactctagcctcatccccaggacccccttggctcagagtgtggtgctagaaactggcccccagcccagccccagtactgccacctttacacctacccctgcaagtccccagagggctgcccacgatagaagctgccaagcagggagaacctgtgccaactgtggagtggggaggttgggcctggaccctcaacccctgcaaccttccctagccccctcaatagatgagcaggtcaggctgtggcccttacctcacccgcagttctcgcccagtgctgcagccggctcacctctctccgcttcttgcacatcactggcctgtgtgtgctgcttgctcctgttctgttcgcttgctcccgttccgttcggcttttgctttgcgttagggtgaagaccctagcgtccagctcccctcaacgctatattttgacactaaaaaagaaggtttctaaattgtaggagcaggatggaaatactttgctgcccttgccatcttttaggatgggcccccaggagactgaggtcttcctgggccctcattgctgcttatcgtaccccccatcacctgcacatgggacagaccgggctggagggtgaccttggctgtgtgcgtcccagcaaaagagctctggcccgcatctcgctgtgccctgaagggggatgaagggcgatgcctcgcccgaggctttgggctgctgcactgcatgctgggactgctcctactctctgtcccacccctcacccagctgtggtccggctttgggagagtggtgaattgcgctgcccgaactcggagcggagcagggtagggaccgtgtacagcttgataacccttaataaaaagggagtttgaccaga

SEQ ID NO: 34749 - DNA, 2512 bp, Artificial Sequence
  derived and/or modified sequence
agacacccggcctagcgccgcgggtcgcgccgagccgagccgagccgagcggagccggcggagcctctggaatcacccgggtcgctgttcctgagcaccttggcaccatattgaaaaccttgacctcttcttctctcgagtttataatctgcaccagaagaatggcttcacatgtatgctcatcggggagatctttgagctcatgcagttcctctttgtggttgccttcactaccttcctggtcagctgcgtggactatgacatcctatttgccaacaagatggtgaaccacagtcttcaccctactgaacccgtcaaggtcactctgccagacgcctttttgcctgctcaagtctgtagtgccaggattcaggaaaatggctcccttatcaccatcctggtcattgctggtgtcttctggatccaccggcttatcaagttcatctataacatttgctgctactgggagatccactccttctacctgcacgctctgcgcatccctatgtctgcccttccgtattgcacgtggcaagaagtgcaggcccggatcgtgcagacgcagaaggagcaccagatctgcatccacaaacgtgagctgacagaactggacatctaccaccgcatcctccgtttccagaactacatggtggcactggttaacaaatccctcctgcctctgcgcttccgcctgcctggcctcggggaagctgtcttcttcacccgtggtctcaagtacaactttgagctgatcctcttctggggacctggctctctgtttctcaatgaatggagcctcaaggccgagtacaaacgtggggggcaacggctagagctggcccagcgcctcagcaaccgcatcctgtggattggcatcgctaacttcctgctgtgccccctcatcctcatatggcaaatcctctatgccttcttcagctatgctgaggtgctgaagcgggagccgggggccctgggagcacgctgctggtcactctatggccgctgctacctccgccacttcaacgagctggagcacgagctgcagtcccgcctcaaccgtggctacaagcccgcctccaagtacatgaattgcttcttgtcacctcttttgacactgctggccaagaatggagccttcttcgctggctccatcctggctgtgcttattgccctcaccatttatgacgaagatgtgttggctgtggaacatgtgctgaccaccgtcacactcctgggggtcaccgtgaccgtgtgcaggtcctttatcccggaccagcacatggtgttctgccctgagcagctgctccgcgtgatcctcgctcacatccactacatgcctgaccactggcagggtaatgcccaccgctcgcagacccgggacgagtttgcccagctcttccagtacaaggcagtgttcattttggaagagttgctgagccccattgtcacacccctcatcctcatcttctgcctgcgcccacgggccctggagattatagacttcttccgaaacttcaccgtggaggtcgttggtgtgggagatacctgctcctttgctcagatggatgttcgccagcatggtcatccccagtggctatctgctgggcagacagaggcctcagtgtaccagcaagctgaggatggaaagacagagttgtcactcatgcactttgccatcaccaaccctggctggcagccaccacgtgagagcacagccttcctaggcttcctcaaggagcaggttcagcgggatggagcagctgctagcctcgcccaagggggtctgctccctgaaaatgccctctttacgtctatccagtccttacaatctgagtctgagcccctgagccttatcgcaaatgtggtagctggctcatcctgccggggccctccactgcccagagacctgcagggctccaggcacagggctgaagtcgcctctgccctgcgctccttctccccgctgcaacccgggcaggcgcccacaggccgggctcacagcaccatgacaggctctggggtggatgccaggacagccagctccgggagcagcgtgtgggaaggacagctgcagagcctggtgctgtcagaatatgcatccacagagatgagcctgcatgccctctatatgcaccagctccacaagcagcaggcccaggctgaacctgagcggcatgtatggcaccgccgggagagtgatgagagtggagaaagcgcccctgatgaagggggagagggcgcccgggccccccagtctatccctcgctctgctagctatccctgtgcagcaccccggcctggagctcctgagaccactgccctgcatgggggcttccagaggcgctacggtggcatcacagatcctggcacagtgcccagggttccctctcatttctctcggctgcctcttggagggtgggcagaagatgggcagtcggcatcaaggcaccctgagcccgtgcccgaagagggctcggaggatgagctaccccctcaggtgcacaaggtatag

SEQ ID NO: 34750 - DNA, 4025 bp, Artificial Sequence
  derived and/or modified sequence
ggggcgcgcgcgggcgccggggccgcgcgcgaggttgtccgctgttgggagctgccagcccttggcctggggccgggcgaccctggggcgaggtggactccggtccacggtcgccgcggctgggtgtggggaggcaagccaacccacccgggctatcagctgtaaggctgactcgatccctgcaacatccgcaggaacccctgagcccaggcccagccggccggggctccacgggccctggtccacactgaccctgtgagtggtgacttccctgaggggcagggctctcactagcccagggaatcccaccggggccaggctgggccaagatccacggcccccaggggctgcacggacagcagctgcagagcatcgagggctggagaggagcacatactgtccatggagctggtggtcaaggtggacagggggcggtggtgatggcgcagtttgacactgaataccagcgcctagaggcctcctatagtgattcacccccaggggaggaggacctgttggtgcacgtcgccgaggggagcaagtcaccttggcaccatattgaaaaccttgacctcttcttctctcgagtttataatctgcaccagaagaatggcttcacatgtatgctcatcggggagatctttgagctcatgcagttcctctttgtggttgccttcactaccttcctggtcagctgcgtggactatgacatcctatttgccaacaagatggtgaaccacagtcttcaccctactgaacccgtcaaggtcactctgccagacgcctttttgcctgctcaagtctgtagtgccaggattcaggaaaatggctcccttatcaccatcctggtcattgctggtgtcttctggatccaccggcttatcaagttcatctataacatttgctgctactgggagatccactccttctacctgcacgctctgcgcatccctatgtctgcccttccgtattgcacgtggcaagaagtgcaggcccggatcgtgcagacgcagaaggagcaccagatctgcatccacaaacgtgagctgacagaactggacatctaccaccgcatcctccgtttccagaactacatggtggcactggttaacaaatccctcctgcctctgcgcttccgcctgcctggcctcggggaagctgtcttcttcacccgtggtctcaagtacaactttgagctgatcctcttctggggacctggctctctgtttctcaatgaatggagcctcaaggccgagtacaaacgtggggggcaacggctagagctggcccagcgcctcagcaaccgcatcctgtggattggcatcgctaacttcctgctgtgccccctcatcctcatatggcaaatcctctatgccttcttcagctatgctgaggtgctgaagcgggagccgggggccctgggagcacgctgctggtcactctatggccgctgctacctccgccacttcaacgagctggagcacgagctgcagtcccgcctcaaccgtggctacaagcccgcctccaagtacatgaattgcttcttgtcacctcttttgacactgctggccaagaatggagccttcttcgctggctccatcctggctgtgcttattgccctcaccatttatgacgaagatgtgttggctgtggaacatgtgctgaccaccgtcacactcctgggggtcaccgtgaccgtgtgcaggtcctttatcccggaccagcacatggtgttctgccctgagcagctgctccgcgtgatcctcgctcacatccactacatgcctgaccactggcagggtaatgcccaccgctcgcagacccgggacgagtttgcccagctcttccagtacaaggcagtgttcattttggaagagttgctgagccccattgtcacacccctcatcctcatcttctgcctgcgcccacgggccctggagattatagacttcttccgaaacttcaccgtggaggtcgttggtgtgggagatacctgctcctttgctcagatggatgttcgccagcatggtcatccccagtggctatctgctgggcagacagaggcctcagtgtaccagcaagctgaggatggaaagacagagttgtcactcatgcactttgccatcaccaaccctggctggcagccaccacgtgagagcacagccttcctaggcttcctcaaggagcaggttcagcgggatggagcagctgctagcctcgcccaagggggtctgctccctgaaaatgccctctttacgtctatccagtccttacaatctgagtctgagcccctgagccttatcgcaaatgtggtagctggctcatcctgccggggccctccactgcccagagacctgcagggctccaggcacagggctgaagtcgcctctgccctgcgctccttctccccgctgcaacccgggcaggcgcccacaggccgggctcacagcaccatgacaggctctggggtggatgccaggacagccagctccgggagcagcgtgtgggaaggacagctgcagagcctggtgctgtcagaatatgcatccacagagatgagcctgcatgccctctatatgcaccagctccacaagcagcaggcccaggctgaacctgagcggcatgtatggcaccgccgggagagtgatgagagtggagaaagcgcccctgatgaagggggagagggcgcccgggccccccagtctatccctcgctctgctagctatccctgtgcagcaccccggcctggagctcctgagaccactgccctgcatgggggcttccagaggcgctacggtggcatcacagatcctggcacagtgcccagggttccctctcatttctctcggctgcctcttggagggtgggcagaagatgggcagtcggcatcaaggcaccctgagcccgtgcccgaagagggctcggaggatgagctaccccctcaggtgcacaaggtatagacaaggctgagcagggttcctgtggcccaggatggaggccaccgctgccctgccatcccgtctgcctgccatgggacggctcctctgagtgttccctggccccacgtgtgtggtgtttgtgtgtctgtgcctggccaagggaggtgccaacactgggcttgccacagccccaggagaggaatttggggcctaggaaccgagggcacacgggactctagcctcatccccaggacccccttggctcagagtgtggtgctagaaactggcccccagcccagccccagtactgccacctttacacctacccctgcaagtccccagagggctgcccacgatagaagctgccaagcagggagaacctgtgccaactgtggagtggggaggttgggcctggaccctcaacccctgcaaccttccctagccccctcaatagatgagcaggtcaggctgtggcccttacctcacccgcagttctcgcccagtgctgcagccggctcacctctctccgcttcttgcacatcactggcctgtgtgtgctgcttgctcctgttctgttcgcttgctcccgttccgttcggcttttgctttgcgttagggtgaagaccctagcgtccagctcccctcaacgctatattttgacactaaaaaagaaggtttctaaattgtaggagcaggatggaaatactttgctgcccttgccatcttttaggatgggcccccaggagactgaggtcttcctgggccctcattgctgcttatcgtaccccccatcacctgcacatgggacagaccgggctggagggtgaccttggctgtgtgcgtcccagcaaaagagctctggcccgcatctcgctgtgccctgaagggggatgaagggcgatgcctcgcccgaggctttgggctgctgcactgcatgctgggactgctcctactctctgtcccacccctcacccagctgtggtccggctttgggagagtggtgaattgcgctgcccgaactcggagcggagcagggtagggaccgtgtacagcttgataacccttaataaaaagggagtttgacca

SEQ ID NO: 34751 - DNA, 700 bp, Artificial Sequence
  derived and/or modified sequence
ctagcgccgcgggtcgcgccgagccgagccgagccgagcggagccggcggagcctctggaatcacccgggtcgctgttcctgagcagctgcagagcatcgagggctggagaggagcacatactgtccatggagctgggtctcttcttcctccttattggcaggtggtcaaggtggacagggggcggtggtgatggcgcagtttgacactgaataccagcgcctagaggcctcctatagtgattcacccccaggggaggaggacctgttggtgcacgtcgccgaggggagcaagtcaccttggcaccatattgaaaaccttgacctcttcttctctcgagtttataatctgcaccagaagaatggcttcacatgtatgctcatcggggagatctttgagctcatgcagttcctctttgtggttgccttcactaccttcctggtcagctgcgtggactatgacatcctatttgccaacaagatggtgaaccacagtcttcaccctactgaacccgtcaaggtcactctgccagacgcctttttgcctgctcaagtctgtagtgccaggattcaggaaaatggctcccttatcaccatcctggtcattgctggtgtcttctggatccaccggcttatcaagttcatctataacatttgctgctactgggagatccactccttctacctgcacgctctgcgcat

SEQ ID NO: 34752 - DNA, 796 bp, Artificial Sequence
  derived and/or modified sequence
gcgcgaggttgtccgctgttgggagctgccagcccttggcctggggccgggcgaccctggggcgaggtggactccggtccacggtcgccgcggctgggtgtggggaggcaagccaacccacccgggctatcagctgtaaggctgactcgatccctgcaacatccgcaggaacccctgagcccaggcccagccggccggggctccacgggccctggtccacactgaccctgtgagtggtgacttccctgaggggcagggctctcactagcccagggaatcccaccggggccaggctgggccaagatccacggcccccaggggctgcacggacaggtggtcaaggtggacagggggcggtggtgatggcgcagtttgacactgaataccagcgcctagaggcctcctatagtgattcacccccaggggaggaggacctgttggtgcacgtcgccgaggggagcaagtcaccttggcaccatattgaaaaccttgacctcttcttctctcgagtttataatctgcaccagaagaatggcttcacatgtatgctcatcggggagatctttgagctcatgcagttcctctttgtggttgccttcactaccttcctggtcagctgcgtggactatgacatcctatttgccaacaagatggtgaaccacagtcttcaccctactgaacccgtcaaggtcactctgccagacgcctttttgcctgctcaagtctgtagtgccaggattcaggaaaatggctcccttatcaccatcctggtcattgctggtgtcttctggatcca

SEQ ID NO: 34753 - DNA, 568 bp, Artificial Sequence
  derived and/or modified sequence
cttgagaccctggagttggaagagtggcccggtttagcacagccagaggaagtgctcgtagtcctgggctggaagggtgcttcttccccactgcagccttcctgccccatgcttggcctcctcttggtggggtgtggatggctgggagggttgggttcctttttatccccactgcccactctctggggcctgacatcttctcctccagcagctgcagagcatcgagggctggagaggagcacatactgtccatggagctggtggtcaaggtggacagggggcggtggtgatggcgcagtttgacactgaataccagcgcctagaggcctcctatagtgattcacccccaggggaggaggacctgttggtgcacgtcgccgaggggagcaagtcaccttggcaccatattgaaaaccttgacctcttcttctctcgagtttataatctgcaccagaagaatggcttcacatgtatgctcatcggggagatctttgagctcatgcagttcctctttgtggttgccttcactaccttcctggtcagctgcgtggactatgacatcctattt

SEQ ID NO: 34754 - DNA, 893 bp, Artificial Sequence
  derived and/or modified sequence
ctagcgccgcgggtcgcgccgagccgagccgagccgagcggagccggcggagcctctggaatcacccgggtcgctgttcctgaggaacccctgagcccaggcccagccggccggggctccacgggccctggtccacactgaccctgtgagtggtgacttccctgaggggcagggctctcactagcccagggaatcccaccggggccaggctgggccaagatccacggcccccaggggctgcacggacagcagctgcagagcatcgagggctggagaggagcacatactgtccatggagctggtggtcaaggtggacagggggcggtggtgatggcgcagtttgacactgaataccagcgcctagaggcctcctatagtgattcacccccaggggaggaggacctgttggtgcacgtcgccgaggggagcaagtcaccttggcaccatattgaaaaccttgacctcttcttctctcgagtttataatctgcaccagaagaatggcttcacatgtatgctcatcggggagatctttgagctcatgcagttcctctttgtggttgccttcactaccttcctggtcagctgcgtggactatgacatcctatttgccaacaagatggtgaaccacagtcttcaccctactgaacccgtcaaggtcactctgccagacgcctttttgcctgctcaagtctgtagtgccaggattcaggaaaatggctcccttatcaccatcctggtcattgctggtgtcttctggatccaccggcttatcaagttcatctataacatttgctgctactgggagatccactccttctacctgcacgctctgcgcatccctatgtctgcccttccgtattgcacgtggcaagaagtgcaggcccggatcgt

SEQ ID NO: 34755 - DNA, 589 bp, Artificial Sequence
  derived and/or modified sequence
agtgagtggcagacacccggcctagcgccgcgggtcgcgccgagccgagccgagccgagcggagccggcggagcctctggaatcacccgggtcgctgttcctgagcagctgcagagcatcgagggctggagaggagcacatactgtccatggagctggtagggccatgtggtcaaggtggacagggggcggtggtgatggcgcagtttgacactgaataccagcgcctagaggcctcctatagtgattcacccccaggggaggaggacctgttggtgcacgtcgccgaggggagcaagtcaccttggcaccatattgaaaaccttgacctcttcttctctcgagtttataatctgcaccagaagaatggcttcacatgtatgctcatcggggagatctttgagctcatgcagttcctctttgtggttgccttcactaccttcctggtcagctgcgtggactatgacatcctatttgccaacaagatggtgaaccacagtcttcaccctactgaacccgtcaaggtcactctgccagacgcctttttgcctgctcaagtctgtagtgccaggattcaggaaaatggctcc

SEQ ID NO: 34756 - DNA, 685 bp, Artificial Sequence
  derived and/or modified sequence
gttgggagctgccagcccttggcctggggccgggcgaccctggggcgaggtggactccggtccacggtcgccgcggctgggtgtggggaggcaagccaacccacccgggctatcagctgtaaggctgactcgatccctgcaacatccgcaggaacccctgagcccaggcccagccggccggggctccacgggccctggtccacactgaccctgtgagtggtgacttccctgaggggcagggctctcactagcccagggaatcccaccggggccaggctgggccaagatccacggcccccaggggctgcacggacagctgcagagcatcgagggctggagaggagcacatactgtccatggagctggtggtcaaggtggacagggggcggtggtgatggcgcagtttgacactgaataccagcgcctagaggcctcctatagtgattcacccccaggggaggaggacctgttggtgcacgtcgccgaggggagcaagtcaccttggcaccatattgaaaaccttgacctcttcttctctcgagtttataatctgcaccagaagaatggcttcacatgtatgctcatcggggagatctttgagctcatgcagttcctctttgtggttgccttcactaccttcctggtcagctgcgtggactatgacatcctatttgccaacaagatg

SEQ ID NO: 34757 - DNA, 699 bp, Artificial Sequence
  derived and/or modified sequence
agtgagtggcagacacccggcctagcgccgcgggtcgcgccgagccgagccgagccgagcggagccggcggagcctctggaatcacccgggtcgctgttcctgagctgcagagcatcgagggctggagaggagcacatactgtccatggagctggtggtcaaggtggacagggggcggtggtgatggcgcagtttgacactgaataccagcgcctagaggcctcctatagtgattcacccccaggggaggaggacctgttggtgcacgtcgccgaggggagcaagtcaccttggcaccatattgaaaaccttgacctcttcttctctcgagtttataatctgcaccagaagaatggcttcacatgtatgctcatcggggagatctttgagctcatgcagttcctctttgtggttgccttcactaccttcctggtcagctgcgtggactatgacatcctatttgccaacaagatggtgaaccacagtcttcaccctactgaacccgtcaaggtcactctgccagacgcctttttgcctgctcaagtctgtagtgccaggattcaggaaaatggctcccttatcaccatcctggtcattgctggtgtcttctggatccaccggcttatcaagttcatctataacatttgctgctactgggagatccactccttctacctgcacgctctgcgcatccctatg

SEQ ID NO: 34758 - DNA, 2520 bp, Artificial Sequence
  derived and/or modified sequence
atggcccagttcgacaccgagtaccagagactggaggccagctacagcgacagcccccccggcgaggaggacctgctggtgcacgtggccgagggcagcaagagcccctggcaccacatcgagaacctggacctgttcttcagcagagtgtacaacctgcaccagaagaacggcttcacctgcatgctgatcggcgagatcttcgagctgatgcagttcctgttcgtggtggccttcaccaccttcctggtgagctgcgtggactacgacatcctgttcgccaacaagatggtgaaccacagcctgcaccccaccgagcccgtgaaggtgaccctgcccgacgccttcctgcccgcccaggtgtgcagcgccagaatccaggagaacggcagcctgatcaccatcctggtgatcgccggcgtgttctggatccacagactgatcaagttcatctacaacatctgctgctactgggagatccacagcttctacctgcacgccctgagaatccccatgagcgccctgccctactgcacctggcaggaggtgcaggccagaatcgtgcagacccagaaggagcaccagatctgcatccacaagagagagctgaccgagctggacatctaccacagaatcctgagattccagaactacatggtggccctggtgaacaagagcctgctgcccctgagattcagactgcccggcctgggcgaggccgtgttcttcaccagaggcctgaagtacaacttcgagctgatcctgttctggggccccggcagcctgttcctgaacgagtggagcctgaaggccgagtacaagagaggcggccagagactggagctggcccagagactgagcaacagaatcctgtggatcggcatcgccaacttcctgctgtgccccctgatcctgatctggcagatcctgtacgccttcttcagctacgccgaggtgctgaagagagagcccggcgccctgggcgccagatgctggagcctgtacggcagatgctacctgagacacttcaacgagctggagcacgagctgcagagcagactgaacagaggctacaagcccgccagcaagtacatgaactgcttcctgagccccctgctgaccctgctggccaagaacggcgccttcttcgccggcagcatcctggccgtgctgatcgccctgaccatctacgacgaggacgtgctggccgtggagcacgtgctgaccaccgtgaccctgctgggcgtgaccgtgaccgtgtgcagaagcttcatccccgaccagcacatggtgttctgccccgagcagctgctgagagtgatcctggcccacatccactacatgcccgaccactggcagggcaacgcccacagaagccagaccagagacgagttcgcccagctgttccagtacaaggccgtgttcatcctggaggagctgctgagccccatcgtgacccccctgatcctgatcttctgcctgagacccagagccctggagatcatcgacttcttcagaaacttcaccgtggaggtggtgggcgtgggcgacacctgcagcttcgcccagatggacgtgagacagcacggccacccccagtggctgagcgccggccagaccgaggccagcgtgtaccagcaggccgaggacggcaagaccgagctgagcctgatgcacttcgccatcaccaaccccggctggcagccccccagagagagcaccgccttcctgggcttcctgaaggagcaggtgcagagagacggcgccgccgccagcctggcccagggcggcctgctgcccgagaacgccctgttcaccagcatccagagcctgcagagcgagagcgagcccctgagcctgatcgccaacgtggtggccggcagcagctgcagaggcccccccctgcccagagacctgcagggcagcagacacagagccgaggtggccagcgccctgagaagcttcagccccctgcagcccggccaggcccccaccggcagagcccacagcaccatgaccggcagcggcgtggacgccagaaccgccagcagcggcagcagcgtgtgggagggccagctgcagagcctggtgctgagcgagtacgccagcaccgagatgagcctgcacgccctgtacatgcaccagctgcacaagcagcaggcccaggccgagcccgagagacacgtgtggcacagaagagagagcgacgagagcggcgagagcgcccccgacgagggcggcgagggcgccagagccccccagagcatccccagaagcgccagctacccctgcgccgcccccagacccggcgcccccgagaccaccgccctgcacggcggcttccagagaagatacggcggcatcaccgaccccggcaccgtgcccagagtgcccagccacttcagcagactgcccctgggcggctgggccgaggacggccagagcgccagcagacaccccgagcccgtgcccgaggagggcagcgaggacgagctgcccccccaggtgcacaaggtgtag

SEQ ID NO: 34759 - DNA, 2337 bp, Artificial Sequence
  derived and/or modified sequence
atgctgatcggcgagatcttcgagctgatgcagttcctgttcgtggtggccttcaccaccttcctggtgagctgcgtggactacgacatcctgttcgccaacaagatggtgaaccacagcctgcaccccaccgagcccgtgaaggtgaccctgcccgacgccttcctgcccgcccaggtgtgcagcgccagaatccaggagaacggcagcctgatcaccatcctggtgatcgccggcgtgttctggatccacagactgatcaagttcatctacaacatctgctgctactgggagatccacagcttctacctgcacgccctgagaatccccatgagcgccctgccctactgcacctggcaggaggtgcaggccagaatcgtgcagacccagaaggagcaccagatctgcatccacaagagagagctgaccgagctggacatctaccacagaatcctgagattccagaactacatggtggccctggtgaacaagagcctgctgcccctgagattcagactgcccggcctgggcgaggccgtgttcttcaccagaggcctgaagtacaacttcgagctgatcctgttctggggccccggcagcctgttcctgaacgagtggagcctgaaggccgagtacaagagaggcggccagagactggagctggcccagagactgagcaacagaatcctgtggatcggcatcgccaacttcctgctgtgccccctgatcctgatctggcagatcctgtacgccttcttcagctacgccgaggtgctgaagagagagcccggcgccctgggcgccagatgctggagcctgtacggcagatgctacctgagacacttcaacgagctggagcacgagctgcagagcagactgaacagaggctacaagcccgccagcaagtacatgaactgcttcctgagccccctgctgaccctgctggccaagaacggcgccttcttcgccggcagcatcctggccgtgctgatcgccctgaccatctacgacgaggacgtgctggccgtggagcacgtgctgaccaccgtgaccctgctgggcgtgaccgtgaccgtgtgcagaagcttcatccccgaccagcacatggtgttctgccccgagcagctgctgagagtgatcctggcccacatccactacatgcccgaccactggcagggcaacgcccacagaagccagaccagagacgagttcgcccagctgttccagtacaaggccgtgttcatcctggaggagctgctgagccccatcgtgacccccctgatcctgatcttctgcctgagacccagagccctggagatcatcgacttcttcagaaacttcaccgtggaggtggtgggcgtgggcgacacctgcagcttcgcccagatggacgtgagacagcacggccacccccagtggctgagcgccggccagaccgaggccagcgtgtaccagcaggccgaggacggcaagaccgagctgagcctgatgcacttcgccatcaccaaccccggctggcagccccccagagagagcaccgccttcctgggcttcctgaaggagcaggtgcagagagacggcgccgccgccagcctggcccagggcggcctgctgcccgagaacgccctgttcaccagcatccagagcctgcagagcgagagcgagcccctgagcctgatcgccaacgtggtggccggcagcagctgcagaggcccccccctgcccagagacctgcagggcagcagacacagagccgaggtggccagcgccctgagaagcttcagccccctgcagcccggccaggcccccaccggcagagcccacagcaccatgaccggcagcggcgtggacgccagaaccgccagcagcggcagcagcgtgtgggagggccagctgcagagcctggtgctgagcgagtacgccagcaccgagatgagcctgcacgccctgtacatgcaccagctgcacaagcagcaggcccaggccgagcccgagagacacgtgtggcacagaagagagagcgacgagagcggcgagagcgcccccgacgagggcggcgagggcgccagagccccccagagcatccccagaagcgccagctacccctgcgccgcccccagacccggcgcccccgagaccaccgccctgcacggcggcttccagagaagatacggcggcatcaccgaccccggcaccgtgcccagagtgcccagccacttcagcagactgcccctgggcggctgggccgaggacggccagagcgccagcagacaccccgagcccgtgcccgaggagggcagcgaggacgagctgcccccccaggtgcacaaggtgtag

SEQ ID NO: 34760 - DNA, 510 bp, Artificial Sequence
  derived and/or modified sequence
atggcccagttcgacaccgagtaccagagactggaggccagctacagcgacagcccccccggcgaggaggacctgctggtgcacgtggccgagggcagcaagagcccctggcaccacatcgagaacctggacctgttcttcagcagagtgtacaacctgcaccagaagaacggcttcacctgcatgctgatcggcgagatcttcgagctgatgcagttcctgttcgtggtggccttcaccaccttcctggtgagctgcgtggactacgacatcctgttcgccaacaagatggtgaaccacagcctgcaccccaccgagcccgtgaaggtgaccctgcccgacgccttcctgcccgcccaggtgtgcagcgccagaatccaggagaacggcagcctgatcaccatcctggtgatcgccggcgtgttctggatccacagactgatcaagttcatctacaacatctgctgctactgggagatccacagcttctacctgcacgccctgagatag

SEQ ID NO: 34761 - DNA, 435 bp, Artificial Sequence
  derived and/or modified sequence
atggcccagttcgacaccgagtaccagagactggaggccagctacagcgacagcccccccggcgaggaggacctgctggtgcacgtggccgagggcagcaagagcccctggcaccacatcgagaacctggacctgttcttcagcagagtgtacaacctgcaccagaagaacggcttcacctgcatgctgatcggcgagatcttcgagctgatgcagttcctgttcgtggtggccttcaccaccttcctggtgagctgcgtggactacgacatcctgttcgccaacaagatggtgaaccacagcctgcaccccaccgagcccgtgaaggtgaccctgcccgacgccttcctgcccgcccaggtgtgcagcgccagaatccaggagaacggcagcctgatcaccatcctggtgatcgccggcgtgttctggatctag

SEQ ID NO: 34762 - DNA, 282 bp, Artificial Sequence
  derived and/or modified sequence
atggcccagttcgacaccgagtaccagagactggaggccagctacagcgacagcccccccggcgaggaggacctgctggtgcacgtggccgagggcagcaagagcccctggcaccacatcgagaacctggacctgttcttcagcagagtgtacaacctgcaccagaagaacggcttcacctgcatgctgatcggcgagatcttcgagctgatgcagttcctgttcgtggtggccttcaccaccttcctggtgagctgcgtggactacgacatcctgttctag

SEQ ID NO: 34763 - DNA, 567 bp, Artificial Sequence
  derived and/or modified sequence
atggcccagttcgacaccgagtaccagagactggaggccagctacagcgacagcccccccggcgaggaggacctgctggtgcacgtggccgagggcagcaagagcccctggcaccacatcgagaacctggacctgttcttcagcagagtgtacaacctgcaccagaagaacggcttcacctgcatgctgatcggcgagatcttcgagctgatgcagttcctgttcgtggtggccttcaccaccttcctggtgagctgcgtggactacgacatcctgttcgccaacaagatggtgaaccacagcctgcaccccaccgagcccgtgaaggtgaccctgcccgacgccttcctgcccgcccaggtgtgcagcgccagaatccaggagaacggcagcctgatcaccatcctggtgatcgccggcgtgttctggatccacagactgatcaagttcatctacaacatctgctgctactgggagatccacagcttctacctgcacgccctgagaatccccatgagcgccctgccctactgcacctggcaggaggtgcaggccagaatcgtgtag

SEQ ID NO: 34764 - DNA, 396 bp, Artificial Sequence
  derived and/or modified sequence
atggcccagttcgacaccgagtaccagagactggaggccagctacagcgacagcccccccggcgaggaggacctgctggtgcacgtggccgagggcagcaagagcccctggcaccacatcgagaacctggacctgttcttcagcagagtgtacaacctgcaccagaagaacggcttcacctgcatgctgatcggcgagatcttcgagctgatgcagttcctgttcgtggtggccttcaccaccttcctggtgagctgcgtggactacgacatcctgttcgccaacaagatggtgaaccacagcctgcaccccaccgagcccgtgaaggtgaccctgcccgacgccttcctgcccgcccaggtgtgcagcgccagaatccaggagaacggcagctag

SEQ ID NO: 34765 - DNA, 294 bp, Artificial Sequence
  derived and/or modified sequence
atggcccagttcgacaccgagtaccagagactggaggccagctacagcgacagcccccccggcgaggaggacctgctggtgcacgtggccgagggcagcaagagcccctggcaccacatcgagaacctggacctgttcttcagcagagtgtacaacctgcaccagaagaacggcttcacctgcatgctgatcggcgagatcttcgagctgatgcagttcctgttcgtggtggccttcaccaccttcctggtgagctgcgtggactacgacatcctgttcgccaacaagatgtag

SEQ ID NO: 34766 - DNA, 519 bp, Artificial Sequence
  derived and/or modified sequence
atggcccagttcgacaccgagtaccagagactggaggccagctacagcgacagcccccccggcgaggaggacctgctggtgcacgtggccgagggcagcaagagcccctggcaccacatcgagaacctggacctgttcttcagcagagtgtacaacctgcaccagaagaacggcttcacctgcatgctgatcggcgagatcttcgagctgatgcagttcctgttcgtggtggccttcaccaccttcctggtgagctgcgtggactacgacatcctgttcgccaacaagatggtgaaccacagcctgcaccccaccgagcccgtgaaggtgaccctgcccgacgccttcctgcccgcccaggtgtgcagcgccagaatccaggagaacggcagcctgatcaccatcctggtgatcgccggcgtgttctggatccacagactgatcaagttcatctacaacatctgctgctactgggagatccacagcttctacctgcacgccctgagaatccccatgtag

SEQ ID NO: 34767 - protein, 624 aa, Artificial Sequence
  derived and/or modified sequence
MNSGGGFGLGLGFGLTPTSVIQVTNLSSAVTSEQMRTLFSFLGEIEELRLYPPDNAPLAFSSKVCYVKFRDPSSVGVAQHLTNTVFIDRALIVVPCAEGKIPEESKALSLLAPAPTMTSLMPGAGLLPIPTPNPLTTLGVSLSSLGAIPAAALDPNIATLGEIPQPPLMGNVDPSKIDEIRRTVYVGNLNSQTTTADQLLEFFKQVGEVKFVRMAGDETQPTRFAFVEFADQNSVPRALAFNGVMFGDRPLKINHSNNAIVKPPEMTPQAAAKELEEVMKRVREAQSFISAAIEPESGKSNERKGGRSRSHTRSKSRSSSKSHSRRKRSQSKHRSRSHNRSRSRQKDRRRSKSPHKKRSKSRERRKSRSRSHSRDKRKDTREKIKEKERVKEKDREKEREREKEREKEKERGKNKDRDKEREKDREKDKEKDREREREKEHEKDRDKEKEKEQDKEKEREKDRSKEIDEKRKKDKKSRTPPRSYNASRRSRSSSRERRRRRSRSSSRSPRTSKTIKRKSSRSPSPRSRNKKDKKREKERDHISERRERERSTSMRKSSNDRDGKEKLEKNSTSLKEKEHNKEPDSSVSKEVDDKDAPRTEENKIQHNGNCQLNEENLSTKTEAV

SEQ ID NO: 34768 - protein, 1106 aa, Artificial Sequence
  derived and/or modified sequence
MKLKEVDRTAMQAWSPAQNHPIYLATGTSAQQLDATFSTNASLEIFELDLSDPSLDMKSCATFSSSHRYHKLIWGPYKMDSKGDVSGVLIAGGENGNIILYDPSKIIAGDKEVVIAQNDKHTGPVRALDVNIFQTNLVASGANESEIYIWDLNNFATPMTPGAKTQPPEDISCIAWNRQVQHILASASPSGRATVWDLRKNEPIIKVSDHSNRMHCSGLAWHPDVATQMVLASEDDRLPVIQMWDLRFASSPLRVLENHARGILAIAWSMADPELLLSCGKDAKILCSNPNTGEVLYELPTNTQWCFDIQWCPRNPAVLSAASFDGRISVYSIMGGSTDGLRQKQVDKLSSSFGNLDPFGTGQPLPPLQIPQQTAQHSIVLPLKKPPKWIRRPVGASFSFGGKLVTFENVRMPSHQGAEQQQQQHHVFISQVVTEKEFLSRSDQLQQAVQSQGFINYCQKKIDASQTEFEKNVWSFLKVNFEDDSRGKYLELLGYRKEDLGKKIALALNKVDGANVALKDSDQVAQSDGEESPAAEEQLLGEHIKEEKEESEFLPSSGGTFNISVSGDIDGLITQALLTGNFESAVDLCLHDNRMADAIILAIAGGQELLARTQKKYFAKSQSKITRLITAVVMKNWKEIVESCDLKNWREALAAVLTYAKPDEFSALCDLLGTRLENEGDSLLQTQACLCYICAGNVEKLVACWTKAQDGSHPLSLQDLIEKVVILRKAVQLTQAMDTSTVGVLLAAKMSQYANLLAAQGSIAAALAFLPDNTNQPNIMQLRDRLCRAQGEPVAGHESPKIPYEKQQLPKGRPGPVAGHHQMPRVQTQQYYPHGENPPPPGFIMHGNVNPNAAGQLPTSPGHMHTQVPPYPQPQRPQNGWNDPPALNRVPKKKKMPENFMPPVPITSPIMNPLGDPQSQMLQQQPSAPVPLSSQSSFPQPHLPGGQPFHGVQQPLGQTGMPPSFSKPNIEGAPGAPIGNTFQHVQSLPTKKITKKPIPDEHLILKTTFEDLIQRCLSSATDPQTKRKLDDASKRLEFLYDKLREQTLSPTITSGLHNIARSIETRNYSEGLTMHTHIVSTSNFSETSAFMPVLKVVLTQANKLGV

SEQ ID NO: 34769 - DNA, 3321 bp, Artificial Sequence
  derived and/or modified sequence
atgaagctgaaggaggtggacagaaccgccatgcaggcctggagccccgcccagaaccaccccatctacctggccaccggcaccagcgcccagcagctggacgccaccttcagcaccaacgccagcctggagatcttcgagctggacctgagcgaccccagcctggacatgaagagctgcgccaccttcagcagcagccacagataccacaagctgatctggggcccctacaagatggacagcaagggcgacgtgagcggcgtgctgatcgccggcggcgagaacggcaacatcatcctgtacgaccccagcaagatcatcgccggcgacaaggaggtggtgatcgcccagaacgacaagcacaccggccccgtgagagccctggacgtgaacatcttccagaccaacctggtggccagcggcgccaacgagagcgagatctacatctgggacctgaacaacttcgccacccccatgacccccggcgccaagacccagccccccgaggacatcagctgcatcgcctggaacagacaggtgcagcacatcctggccagcgccagccccagcggcagagccaccgtgtgggacctgagaaagaacgagcccatcatcaaggtgagcgaccacagcaacagaatgcactgcagcggcctggcctggcaccccgacgtggccacccagatggtgctggccagcgaggacgacagactgcccgtgatccagatgtgggacctgagattcgccagcagccccctgagagtgctggagaaccacgccagaggcatcctggccatcgcctggagcatggccgaccccgagctgctgctgagctgcggcaaggacgccaagatcctgtgcagcaaccccaacaccggcgaggtgctgtacgagctgcccaccaacacccagtggtgcttcgacatccagtggtgccccagaaaccccgccgtgctgagcgccgccagcttcgacggcagaatcagcgtgtacagcatcatgggcggcagcaccgacggcctgagacagaagcaggtggacaagctgagcagcagcttcggcaacctggaccccttcggcaccggccagcccctgccccccctgcagatcccccagcagaccgcccagcacagcatcgtgctgcccctgaagaagccccccaagtggatcagaagacccgtgggcgccagcttcagcttcggcggcaagctggtgaccttcgagaacgtgagaatgcccagccaccagggcgccgagcagcagcagcagcagcaccacgtgttcatcagccaggtggtgaccgagaaggagttcctgagcagaagcgaccagctgcagcaggccgtgcagagccagggcttcatcaactactgccagaagaagatcgacgccagccagaccgagttcgagaagaacgtgtggagcttcctgaaggtgaacttcgaggacgacagcagaggcaagtacctggagctgctgggctacagaaaggaggacctgggcaagaagatcgccctggccctgaacaaggtggacggcgccaacgtggccctgaaggacagcgaccaggtggcccagagcgacggcgaggagagccccgccgccgaggagcagctgctgggcgagcacatcaaggaggagaaggaggagagcgagttcctgcccagcagcggcggcaccttcaacatcagcgtgagcggcgacatcgacggcctgatcacccaggccctgctgaccggcaacttcgagagcgccgtggacctgtgcctgcacgacaacagaatggccgacgccatcatcctggccatcgccggcggccaggagctgctggccagaacccagaagaagtacttcgccaagagccagagcaagatcaccagactgatcaccgccgtggtgatgaagaactggaaggagatcgtggagagctgcgacctgaagaactggagagaggccctggccgccgtgctgacctacgccaagcccgacgagttcagcgccctgtgcgacctgctgggcaccagactggagaacgagggcgacagcctgctgcagacccaggcctgcctgtgctacatctgcgccggcaacgtggagaagctggtggcctgctggaccaaggcccaggacggcagccaccccctgagcctgcaggacctgatcgagaaggtggtgatcctgagaaaggccgtgcagctgacccaggccatggacaccagcaccgtgggcgtgctgctggccgccaagatgagccagtacgccaacctgctggccgcccagggcagcatcgccgccgccctggccttcctgcccgacaacaccaaccagcccaacatcatgcagctgagagacagactgtgcagagcccagggcgagcccgtggccggccacgagagccccaagatcccctacgagaagcagcagctgcccaagggcagacccggccccgtggccggccaccaccagatgcccagagtgcagacccagcagtactacccccacggcgagaacccccccccccccggcttcatcatgcacggcaacgtgaaccccaacgccgccggccagctgcccaccagccccggccacatgcacacccaggtgcccccctacccccagccccagagaccccagaacggctggaacgacccccccgccctgaacagagtgcccaagaagaagaagatgcccgagaacttcatgccccccgtgcccatcaccagccccatcatgaaccccctgggcgacccccagagccagatgctgcagcagcagcccagcgcccccgtgcccctgagcagccagagcagcttcccccagccccacctgcccggcggccagcccttccacggcgtgcagcagcccctgggccagaccggcatgccccccagcttcagcaagcccaacatcgagggcgcccccggcgcccccatcggcaacaccttccagcacgtgcagagcctgcccaccaagaagatcaccaagaagcccatccccgacgagcacctgatcctgaagaccaccttcgaggacctgatccagagatgcctgagcagcgccaccgacccccagaccaagagaaagctggacgacgccagcaagagactggagttcctgtacgacaagctgagagagcagaccctgagccccaccatcaccagcggcctgcacaacatcgccagaagcatcgagaccagaaactacagcgagggcctgaccatgcacacccacatcgtgagcaccagcaacttcagcgagaccagcgccttcatgcccgtgctgaaggtggtgctgacccaggccaacaagctgggcgtgtag

SEQ ID NO: 34770 - DNA, 3321 bp, Artificial Sequence
  derived and/or modified sequence
atgaaactcaaagaggttgaccggactgcaatgcaggcttggtccccagcgcagaatcacccgatctatctcgccaccgggacttcagcgcagcagctcgatgccacgttttctactaatgcaagcctggagatcttcgaactggacctgtcggacccctcactggacatgaagagttgtgctaccttcagctcttcacacagataccataagctgatctggggaccttataaaatggattctaagggagacgtaagcggggtccttattgcaggcggcgagaatgggaatatcatcttatatgatccttctaagatcattgcaggagataaggaggtggtgattgcgcaaaatgacaagcacacaggccccgtaagagctctggatgtgaacatcttccagaccaacttagtggcttctggcgcgaacgagagcgagatttacatctgggatctaaataatttcgcaacacccatgactccgggcgcaaaaactcagccccccgaagacatttcctgtatcgcttggaacagacaggtgcagcatattctggcttctgcctctccttctgggcgggctacagtatgggatctcaggaaaaacgaacccattattaaggtctctgaccactctaacaggatgcattgcagcggcttagcatggcatcctgatgttgctacccagatggtcctggctagcgaggacgatcggctcccagtgatacagatgtgggatcttagattcgcaagctcaccgctgagagtactcgagaaccacgctcgcgggattctggcaatcgcttggagcatggcagacccggaattgcttctatcctgcgggaaagatgcaaagattctttgttcaaaccctaacaccggtgaagtcctttacgagttgcccacaaacactcagtggtgtttcgacatccagtggtgcccgcgcaatccggccgtcctgagcgccgctagcttcgacggaagaatctctgtgtactcaataatgggaggaagtaccgacgggttgcgccagaaacaggtagataaattgtccagtagcttcggaaaccttgatcctttcgggacgggccagcctcttcctccattacagattccgcagcagactgctcaacacagcattgtactgcccctgaagaagccacccaagtggattcgcaggccggtgggtgcatcattttccttcggtggcaagctggttacattcgaaaacgtgcgtatgccgtctcatcagggggccgagcagcagcagcagcaacatcacgtgttcatcagtcaggtggtgaccgaaaaggagttcctatctagaagtgatcagcttcagcaggccgtccagtcccagggctttatcaattattgccagaagaaaatcgatgcatctcagaccgaatttgagaagaatgtctggtcttttttaaaggtcaactttgaggacgattccagggggaaatacctagaactgctcggttaccgaaaggaggatctgggcaaaaagatcgcgctggcactcaacaaggtggacggggcaaatgtcgcactgaaagattctgaccaggtggcccagagcgatggtgaggagagtcccgcggccgaggagcaacttctgggcgagcacattaaggaagagaaggaggaatccgaatttctgccctcctctggtggtaccttcaacataagcgtttccggcgacatcgatggactaattactcaggcgctccttaccggcaatttcgagagtgctgtggatttatgccttcacgataataggatggctgacgctatcattctggctatcgccggaggacaggagttgcttgcccgaacccaaaagaagtatttcgcgaaaagccagtccaagatcacccgtctgattactgcagtagtgatgaagaattggaaagaaatcgtggagtcctgtgacctgaaaaactggagagaggccctcgccgctgtgctaacttatgcgaagccggacgagttttccgccttgtgtgacttgttgggcactcgcttggagaacgagggcgattcattactgcaaacccaagcctgcctgtgctacatctgcgccgggaatgtagagaaactggtggcctgttggaccaaggcgcaggacggatcccaccccctatccctgcaggacctgattgagaaggtcgtgatcctgcgtaaggccgtccagctgactcaggcgatggacacatcgacagttggtgtgcttcttgctgctaaaatgagccagtacgcaaatcttttggctgcccaaggttctatagctgcagctttagcctttctgcctgacaataccaatcagccaaatatcatgcagctgagggataggctttgcagggcgcagggggaacctgttgcggggcatgagagtcctaaaatcccctacgagaaacaacagcttccaaagggcagacctggcccagtggctggacatcatcaaatgccgagggttcagacccagcaatactatccccatggagaaaatcctcctccacccggcttcatcatgcatgggaatgttaatcctaacgcagctgggcagctgccaacgagccctggtcatatgcatacccaggtgccgccttatcctcagccacagagaccacaaaacggatggaacgatcctccggcactcaaccgagttcctaagaaaaaaaagatgcccgagaacttcatgccaccggtgcccataacctctcccatcatgaatcccctgggagatccccaatctcagatgctgcagcagcagcccagcgccccagtgcccttgagcagccagtcctcattcccacagccccacctgcccgggggccagcccttccatggcgtgcaacagccattgggacaaaccgggatgcccccgagcttctccaagccgaatatagagggagcccctggagccccaattggaaacacctttcagcatgtgcagtctcttccaactaaaaagattactaaaaaaccaattcccgacgagcatctgatcctgaaaaccactttcgaggacctgatccaacgatgcttgagctcagctacagatccacaaactaaaagaaagctggacgatgcttccaagcgattggagttcttatacgataagctccgggagcagactcttagcccaacaatcacctccggcttgcataatatcgctagatcaattgagacgcgaaattacagtgaggggctgactatgcatacgcatatcgtgagtacaagcaatttctccgagacgagcgccttcatgcctgtgctgaaagtggtcctgactcaggctaacaagttgggagtttag

SEQ ID NO: 34771 - DNA, 3321 bp, Artificial Sequence
  derived and/or modified sequence
atgaagctgaaggaagttgatcggaccgcaatgcaagcctggagcccagcccagaatcacccaatctatctggctaccgggacctctgcgcagcagttggatgccacttttagcaccaacgccagtttagagatattcgagctagatctgagcgacccctcattggatatgaagtcttgtgccacctttagctcatcccaccggtatcacaagctgatttgggggccctacaagatggacagtaagggcgatgtgtctggtgtacttattgctggcggagagaatggaaacatcattctctatgatccatctaaaattatcgcaggcgataaggaggtggttatagcacaaaatgataaacacactggccctgtgagggcactggacgttaacattttccagactaacctggtcgctagcggtgcaaacgagtccgaaatctacatatgggatctcaataatttcgctaccccaatgacccctggcgcaaagacacagccccccgaggacatctcatgtattgcatggaatagacaggtgcagcatattctcgcgtccgctagtccttctggcagggcgacggtctgggatctccgcaagaacgagccaattatcaaggtttctgatcattcaaatcggatgcactgctcggggctagcctggcaccccgacgtggccacccaaatggtgctagccagcgaggacgatcgcctgccagttatccaaatgtgggatctgcgcttcgcttcatcccctctgcgggtgctcgaaaaccacgcacggggcattttggcaattgcctggtcaatggctgaccccgagctgctgctgtcttgcggcaaagacgctaaaattctctgctctaaccccaatacgggtgaggtgctgtatgagctaccaacgaacacacaatggtgtttcgacatacaatggtgcccacgcaacccggctgtgctgtctgccgcatcctttgatgggaggatctcagtttatagtatcatgggcggctctacagatggcctgagacagaaacaggtcgacaaactgagctccagttttgggaacctggacccatttggaactggacagccgcttccaccacttcaaatcccccagcaaacagcacaacacagcatcgttctgcccctgaaaaaaccacctaagtggattcgcagaccagttggagcatccttctcgtttggcggaaagctggtgacctttgaaaatgttagaatgccatcacatcagggggccgagcaacagcaacagcagcaccacgtgtttatcagtcaggttgtgaccgaaaaggagttcttgtccaggtctgatcaattgcaacaggcagtgcagtcccaaggattcatcaactattgccaaaaaaagattgacgctagtcagacagagttcgagaagaatgtatggtcatttctgaaggtgaattttgaggacgacagcaggggcaagtatctggagctgctgggctacaggaaggaagatctcggaaaaaaaattgccctggcactcaacaaggtggacggggccaatgttgcccttaaggattccgatcaagtggcccagtccgatggtgaagagagccctgccgcagaagagcagctgctcggcgagcatattaaagaggagaaggaagagtcagagttcctgccaagctcaggagggacctttaatatctccgtcagcggcgacattgacggcctcattacacaggccttactgaccgggaacttcgagagtgctgtcgatctttgcctccatgacaaccgtatggcagatgcaatcattctcgctattgctggagggcaggagctgctcgcgcggacgcagaagaagtactttgccaagtctcagtccaaaattacacgcttaataacagctgttgtaatgaagaattggaaagaaatcgtggaaagctgtgacctgaaaaattggcgggaagccctcgcagctgtgttgacttacgcgaaacccgatgaattcagtgcactctgcgatctgctgggtacccgattagaaaatgagggggatagtcttcttcagacccaggcttgcctgtgctacatctgtgctggaaacgtggaaaagctggtggcctgttggacgaaagcacaggatggatcgcacccactttctcttcaagatctgatcgagaaggtggtgattctcagaaaggcagttcagctgacacaagctatggatacatccacagtcggggtcctgctcgccgctaaaatgtctcagtacgctaatttgctggccgctcagggaagcatcgccgccgcactcgcctttttgccagataacactaaccagcctaatattatgcaactccgggatcgcctgtgcagggctcagggtgagcctgtagcgggtcatgaaagtcccaagatcccatatgaaaagcagcaactgcctaaaggccgcccagggcccgttgccgggcatcatcagatgccaagagtgcagacacagcaatactaccctcacggtgaaaacccacctccccccggcttcataatgcacgggaatgttaatccaaatgccgcggggcaattgcccacaagtcctggccatatgcacacacaggtcccgccctatccacaacctcagcgaccccagaatggctggaatgaccccccagcactgaatcgggtcccgaagaaaaaaaaaatgccagagaatttcatgcctccggtcccaataaccagccctataatgaacccattgggcgatcctcagagtcagatgcttcagcagcagcctagcgctccagtgcctctgagcagccaaagcagtttcccccaaccccatctgcctggcggacagccgtttcatggtgtacagcaaccattagggcaaaccgggatgcccccgtctttctctaaacccaacatagaaggggctcctggggcccctattggcaatacattccagcatgtccagtcactgccaacaaaaaagattacaaagaagccaatcccagatgagcacctgatcctaaagactacctttgaggatttaatacagagatgcctgagcagcgccaccgatcctcaaaccaagcgcaagttggacgatgcctctaagagactggagttcctctatgacaagctccgagaacagaccctttccccaacaatcacaagcggcctgcataacatcgcacggtctatcgaaacccgtaactacagtgaaggcttaaccatgcatactcatatcgtgagcaccagcaacttttccgagacgtcagcatttatgcctgtattgaaagtggtcctcactcaggctaacaagctgggggtgtag

SEQ ID NO: 34772 - DNA, 3321 bp, Artificial Sequence
  derived and/or modified sequence
atgaagctgaaggaggtggacagaacagccatgcaggcctggagccctgcccagaaccaccccatctacctggccaccggcaccagcgcccagcagctggatgccaccttcagcaccaatgccagcctggagatctttgagctggacctgagtgaccccagcctggacatgaagagctgtgccaccttcagcagcagccaccgctaccacaagctgatctggggcccctacaagatggacagcaaaggagatgtgtctggagtgctgattgctggaggagaaaatggaaacatcatcctgtatgaccccagcaagatcatcgccggggacaaggaggtggtgattgcccagaatgacaagcacacaggccctgtgcgggccctggatgtgaacatcttccagaccaacctggtggccagcggggccaatgaaagtgagatctacatctgggacctgaacaactttgccacccccatgacccctggggccaagacccagcccccagaggacatcagctgcatcgcctggaaccggcaggtgcagcacatcctggccagcgccagccccagcggccgggccaccgtgtgggacctgaggaagaatgagcccatcatcaaggtgtctgaccacagcaacaggatgcactgcagcggcctggcctggcacccagatgtggccacccagatggtgctggcctctgaagatgaccggctgcctgtgatccagatgtgggacctgcgctttgccagcagccccctgcgggtgctggagaaccacgcccggggcatcctggccatcgcctggagcatggctgaccctgagctgctgctgagctgtgggaaggatgccaagatcctgtgcagcaaccccaacacaggagaggtgctgtatgagctgcccaccaacacccagtggtgctttgacatccagtggtgccccaggaacccagctgtgctgtctgctgccagctttgatggccgcatctctgtgtacagcatcatgggcggcagcacagatggcctgcggcagaagcaggtggacaagctgagcagcagctttggaaacctggacccctttggaacaggccagcccctgccccccctgcagatcccccagcagacagcccagcacagcatcgtgctgcccctgaagaagccacccaagtggatcagaagacctgtgggcgccagcttctcctttggaggcaagctggtgacctttgaaaatgtgaggatgcccagccaccagggcgctgagcagcagcagcagcagcaccacgtgttcatcagccaggtggtgacagagaaggagttcctgagcagaagtgaccagctgcagcaggccgtgcagagccagggcttcatcaactactgccagaagaagattgatgccagccagacagaatttgagaagaatgtgtggagcttcctgaaggtgaactttgaagatgacagccggggcaagtacctggagctgctgggctacaggaaggaggacctgggcaagaagatcgccctggccctgaacaaggtggatggagccaacgtggccctgaaggacagcgaccaggtggcccagagtgatggagaggagagccctgctgctgaggagcagctgctgggggagcacatcaaggaggagaaggaggagagcgagttcctgcccagcagcggcggcaccttcaacatctctgtgtctggggacattgatggcctcatcacccaggccctgctgactggaaactttgagagcgctgtggacctgtgcctgcatgacaacaggatggctgatgccatcatcctggccatcgccggcggccaggagctgctggcccggacccagaagaagtactttgccaagagccagagcaagatcaccaggctcatcacagctgtggtgatgaagaactggaaggagatcgtggagagctgtgacctgaagaactggagggaggccctggccgctgtgctgacctacgccaagccagatgagttcagcgccctgtgtgacctgctgggcacccggctggagaatgaaggagacagcctgctgcagacccaggcctgcctgtgctacatctgtgctggaaatgtggagaagctggtggcctgctggaccaaggcccaggacggcagccaccccctgagcctgcaggacctgattgagaaggtggtgatcctgaggaaggctgtgcagctgacccaggccatggacaccagcacagtgggcgtgctgctggccgccaagatgagccagtatgccaacctgctggccgcccagggcagcattgctgctgccctggccttcctgcctgacaacaccaaccagcccaacatcatgcagctgcgggaccggctgtgccgggcccagggcgagcctgtggccggccacgagagccccaagatcccctatgagaagcagcagctgcccaagggccggcccggccctgtggccggccaccaccagatgccccgggtgcagacccagcagtactacccccacggggagaaccccccacctcctggcttcatcatgcacggcaatgtgaaccccaatgctgctggccagctgcccaccagccctggccacatgcacacccaggtgcccccctacccccagccccagaggccccagaatggctggaatgaccccccagccctgaacagagtgcccaagaagaagaagatgcctgagaacttcatgcctcctgtgcccatcaccagccccatcatgaaccccctgggggacccccagagccagatgctgcagcagcagcccagcgcccctgtgcccctgagcagccagagcagcttcccccagccccacctgcccggcggccagcccttccacggcgtgcagcagcccctgggccagacaggcatgccacccagcttcagcaagcccaacatcgagggcgcccctggggcccccatcggcaacaccttccagcacgtgcagagcctgcccaccaagaagatcaccaagaagcccatcccagatgagcacctgatcctgaagaccacctttgaggacctgatccagcgctgcctgagcagcgccacagacccccagaccaagaggaagctggatgatgccagcaagaggctggagttcctgtatgacaagctgcgggagcagaccctgagccccaccatcaccagcggcctgcacaacatcgcccggagcattgagaccaggaactacagcgagggcctgaccatgcacacccacatcgtgtccaccagcaacttcagcgagaccagcgccttcatgcctgtgctgaaggtggtgctgacccaggccaacaagctgggcgtgtag

SEQ ID NO: 34773 - DNA, 3321 bp, Artificial Sequence
  derived and/or modified sequence
atgaagctgaaggaggtggaccggaccgccatgcaggcctggagcccggcccagaaccatccaatttacttagctacaggtacatccgctcaacagttggatgcaaccttttccaccaatgcttcgctcgaaatattcgagctcgatctgtctgatccttccctggacatgaagagttgcgctacctttagttccagccatcggtaccacaaattaatctgggggccatataagatggacagcaagggcgatgtctccggcgtgctcatcgccggcggtgaaaacggaaatataatcctgtatgaccctagcaaaattatagctggcgacaaagaagtcgtcatcgcacagaacgataagcacacaggtcccgtgcgtgcgctggatgtaaatatcttccagacaaacctggtcgcgagcggggccaacgaatccgagatctatatctgggacttgaacaacttcgccacacctatgacccccggggcgaaaacacagccaccagaagacatctcatgtatcgcttggaaccggcaggtgcagcacatccttgcctctgcatcaccttccgggcgagccactgtgtgggacttacggaaaaacgagcctatcatcaaggtgtccgaccattccaaccggatgcactgtagtgggctggcgtggcaccctgatgtagctacacaaatggtactggctagcgaagacgacaggcttcccgtgatccagatgtgggatttacgctttgcctcttcgccgttgagggtcctggagaatcatgcgagggggatcctggccattgcatggtcgatggcagaccctgaattgctgctttcctgcggcaaggacgcaaaaatcctttgctcaaaccctaacacgggcgaggtcctttatgaactgcctaccaacacacagtggtgtttcgacatccaatggtgcccgaggaacccggccgttttgtcagctgccagctttgatggccggatcagtgtttactccattatgggtgggagtactgacgggttaagacagaaacaagtagataaactgagctccagtttcggcaacctcgatccttttggcactggccagcctctgcctccattgcaaattcctcagcagacagcccaacactcgatcgtgcttcctctcaaaaaaccacccaaatggatccgtcggcctgtgggggcctctttcagcttcggtggcaaactggtcacgtttgagaatgtccggatgccctctcaccaaggggcagaacagcagcagcagcaacatcatgtcttcatttcgcaggttgttaccgagaaagaattcctctcccgaagtgatcagctgcaacaggcagtccagtcacaagggttcatcaactactgccagaagaagatcgatgcctctcaaaccgagtttgaaaagaatgtctggagttttctgaaggtgaactttgaagatgactcacgaggaaaatacctggaactgctgggttaccggaaggaagatctcgggaagaagatcgcactcgccctaaacaaggtggacggggctaacgtcgccttgaaggactcggaccaagtcgcacagtcggatggcgaggagtcaccagcggccgaagagcagctgctcggtgaacatattaaagaggagaaagaggagtcagagttcttgcccagtagcggtgggacatttaacattagtgtgtccggcgacatagacggccttatcacgcaggcattgctgactggaaacttcgagagcgccgtggatctgtgcctacatgacaatagaatggcagatgccataattctcgccattgccggcgggcaggaactcctggccagaacccagaagaaatacttcgcaaagtcacagagcaagatcacccgcttgatcacagccgtggtcatgaagaattggaaggaaatcgtggagtcttgcgacctgaagaactggagagaagcgcttgccgcggttctgacatacgcaaagcctgacgaattcagcgccctctgcgacctgctagggacaaggctggagaatgagggtgactctcttcttcagacgcaggcatgtctgtgttacatctgcgcgggaaacgtagagaaactggttgcctgctggactaaagcacaggacgggagccacccccttagtctgcaggacctgattgagaaggtcgtcattcttcggaaggccgtgcagttaacgcaggccatggatacttccactgtgggcgtcttactggctgccaagatgagtcagtacgcaaacctacttgccgcacagggtagcatcgctgccgccctggcgtttctccccgacaacaccaaccagcctaatataatgcagttgcgagacaggctttgcagagcccagggagagccagtggccggccacgaatcaccaaaaatcccgtatgaaaaacagcagctgcctaaaggcaggccaggacccgtcgctgggcaccaccagatgccgagagtacagacccaacagtattatccccacggggagaacccccctccacccgggttcataatgcacggaaatgtgaatcctaatgccgcaggacaactacccacttcacctggtcacatgcacacccaggtccctccatatccccagcctcagcggccgcagaatgggtggaacgacccccctgcccttaaccgagtacctaagaaaaagaaaatgccagagaatttcatgccccctgtgcccattacctccccaatcatgaaccccctgggggacccccaatcacagatgctacagcagcagccctcagcccctgttccactcagcagccagtcctcctttcctcagcctcatctgcctggcggccagccattccacggggtgcaacagcctctgggacaaacagggatgcctccatcattttcaaagcccaacattgaaggagcccccggcgctcccatcggaaacaccttccaacatgttcagtctttgcccactaagaaaatcaccaagaaacctatacccgatgagcaccttatcctgaaaactacattcgaggacctgattcagaggtgtctcagcagcgctacagacccccagaccaaaaggaagctggatgacgcctccaagcgcctggagttcctctatgataaactgcgcgaacagactctgagccctacaataacatcggggctgcacaatatcgcaagatcaatcgagactaggaattatagcgaagggttgactatgcacacgcacatagttagcacaagtaatttcagtgagacatccgctttcatgccggtactgaaagtggtactcacgcaagcaaataagttgggggtctag

SEQ ID NO: 34774 - DNA, 3321 bp, Artificial Sequence
  derived and/or modified sequence
atgaagctgaaggaggtggaccggaccgccatgcaggcctggagcccagcacagaaccatcccatctatcttgctactggaaccagcgcccaacagttggacgccaccttttccactaacgcgagcctggagatcttcgaattggatctgtcagaccccagtttggatatgaagtcttgcgcaacattctcgtcctctcacaggtaccataaactcatctgggggccttacaaaatggactccaagggcgatgtcagtggcgtcctgatcgctggaggcgagaacggcaatataattctgtacgatccatcaaagatcattgctggcgacaaggaagtggttattgcccaaaatgataaacacaccggtccggtcagggccctcgacgtcaatatctttcaaacgaatctcgtggcatctggggcaaatgagagtgagatttatatatgggacctgaataacttcgctaccccaatgacgcccggggcaaaaacacagcctccagaagacatcagctgcatcgcctggaaccgacaagtccaacacattttggcctctgccagtccttcaggacgagccacagtgtgggatctgaggaagaacgagccgattatcaaagtgtccgatcatagcaatcgaatgcactgtagtggtctcgcatggcatcccgacgtcgccacgcagatggttctggctagtgaggacgaccgcctcccggtgattcagatgtgggacctgcgcttcgcatcaagtccgttacgcgttctcgaaaaccatgctcgcggaatcctagctatcgcctggagcatggccgatcccgagcttctcctctcctgcggaaaagacgctaaaatattgtgcagtaatcctaacaccggcgaagtcctttatgagctccctaccaacactcagtggtgttttgacattcagtggtgtcctaggaaccccgcagtgttatctgccgcaagtttcgacggcaggatttcagtatattccatcatgggcggctccacggatgggctccggcagaagcaggttgacaagctgagctcttccttcggaaatctggatccatttgggacagggcagcccctgccacccctacaaatcccgcaacagactgcgcagcactccatcgtcctgcccttaaagaaaccacccaagtggatccgcagacctgtcggcgcgtctttttccttcggaggcaaactcgtgactttcgaaaatgtgcggatgccatctcaccaaggcgccgagcagcagcagcagcagcatcacgtattcattagtcaagtggttaccgaaaaagagttcctgtccagatccgatcagctccagcaggccgtccagtctcagggatttatcaattactgtcagaagaaaatcgacgcatcacagaccgaattcgaaaaaaatgtctggagcttcttgaaggtcaatttcgaggacgattctagaggcaagtacctcgagctgcttgggtatcggaaggaagatctgggaaagaaaattgctttggctctgaataaagtggatggtgctaatgtcgcgcttaaggactctgaccaagtggcacagtctgacggtgaagaatcacccgcggcggaggagcagttgttgggcgaacacatcaaggaagaaaaagaagagtctgagttcctgccatctagtggcgggaccttcaatatctcagttagcggagacatcgacgggcttattacacaggctcttcttacaggcaacttcgaatccgctgttgacctgtgtctccacgacaatcgcatggcagatgccattatactggctatcgcaggcggtcaggaactgctcgcgcggacccagaaaaagtactttgctaaatcccaatcgaagatcactcggctgatcacggccgttgtcatgaagaattggaaggagatcgttgaatcctgtgaccttaagaattggagggaggcactggccgccgtcctcacttacgcgaaacccgacgaatttagcgctctctgtgacctgttgggaaccaggctagagaatgagggcgattcactgctgcaaactcaggcttgcctctgctacatctgtgcaggaaatgtcgagaaactggtggcttgctggaccaaagcccaagatggaagccaccccttaagcctgcaagatttaatcgaaaaagtggttattttgcgcaaagcggtacagctgacccaggccatggatacatctaccgtgggagttcttttggctgccaagatgtcacagtacgcaaacctgctggcagcccaaggaagcattgctgctgctctcgctttcctgcctgacaatacaaaccagcccaatataatgcagcttagggaccggttgtgccgcgctcagggggagcctgttgctgggcacgaaagtcctaaaatcccctatgagaagcagcaacttccaaaaggtcggccagggcctgtggcgggacatcaccaaatgcctcgagtccaaactcaacaatactaccctcatggtgaaaatcccccaccacccggattcataatgcatggaaacgtgaacccgaacgctgctgggcagctccccacttcacctgggcacatgcatacacaagtcccaccctatccacagcctcagagacctcaaaatggttggaatgacccccctgcattgaatagagtacctaaaaagaagaaaatgcctgagaactttatgccccccgtgcccattacatcccccatcatgaacccgctgggggacccacaatcacaaatgttacaacaacagccatcggccccagtgcccctcagtagccagagtagcttcccccagcctcatctgccgggaggtcagcccttccatggtgttcagcagccactcgggcaaaccggaatgcccccctcttttagcaagcccaacatagaaggtgccccaggggcccccatcggaaacacctttcagcatgtgcagagcctgcccaccaagaagattacgaaaaagcccattccagacgagcacttgatcctcaagaccaccttcgaagacttaattcagcgttgcctgagtagcgccaccgatccacagacaaaaaggaaactggatgatgccagtaaacgcctggaattcctctatgacaagttgcgggagcaaaccctgtcccccaccattacttctggtcttcataacatcgcgcgcagtatcgaaacacgcaactattcagaagggttaactatgcacacccacatcgtgagcacttccaacttctctgaaacttccgcctttatgccagtgttgaaagttgttctgacgcaagctaataaattgggggtctag

SEQ ID NO: 34775 - DNA, 3321 bp, Artificial Sequence
  derived and/or modified sequence
atgaaactaaaggaggtggacagaaccgctatgcaagcttggagcccggctcagaatcatcccatatacctggctacagggaccagcgcacagcagctcgacgcaactttttccactaatgcctccttggaaattttcgagctggatttgagcgacccatcacttgacatgaagtcttgcgccaccttctctagctcacatcgctatcacaagctcatttggggtccatataaaatggatagcaagggtgatgtatctggtgtgttgatcgctggaggggagaacgggaacattattctttatgatccttccaaaattatcgccggtgataaggaggttgtaatcgcccagaatgataaacatactggacccgtgcgcgctctcgatgtgaacatttttcaaaccaaccttgttgcatccggagccaacgagagcgaaatctatatttgggacctcaataacttcgcgacccccatgaccccaggagcaaagacacaaccccctgaagatatctcatgtatcgcctggaacagacaggttcagcacattctggcttcagcttcaccctccggcagagcaactgtgtgggatcttagaaagaatgagcctataatcaaggtgtccgatcatagtaacaggatgcactgttctggattagcttggcatcccgatgtggctactcagatggttctggcttcggaggacgatcgtctgcccgtgattcagatgtgggacttgagattcgccagtagccctctgcgtgtgcttgagaatcacgctcgtggcattctcgccattgcctggtctatggctgacccggagctccttctctcctgcggtaaagatgccaagatcctttgctctaaccctaataccggcgaggttctctacgagctcccaaccaacacccagtggtgctttgacatccagtggtgtccccgaaatcccgctgttctgtctgcggcttccttcgacgggaggatttctgtgtacagtattatgggtggaagcaccgatggactgaggcagaaacaggtcgacaagttgagctcatccttcggaaatctagacccattcggcacgggacaacccctgcctccactccagatccctcagcagactgcccaacacagtatcgtgcttcccctgaagaagcccccaaaatggatcagaaggccagtcggggcatcattcagcttcggcggtaaactcgtcacattcgagaacgtgaggatgccttcacaccagggggctgagcagcagcagcagcagcaccacgtattcatttcccaagtggttaccgagaaagagtttctgtcgaggagcgaccaactgcagcaggcagttcagtcgcaagggtttatcaattactgtcagaagaagatcgacgccagtcagactgagtttgagaaaaatgtctggagtttcttgaaggttaacttcgaggacgattccagaggtaaatatctggagcttcttggctatagaaaggaggatctcggaaagaagatagcattggccctgaataaggttgacggcgcaaacgtggccctgaaagattctgatcaggtggcacaatcagatggcgaggaatcgcctgcagccgaggagcagctgcttggtgagcacatcaaggaagagaaggaggagtccgaatttttaccgtcctcaggcggaaccttcaacatatctgtgtctggcgatatcgacggtcttatcacacaggctcttctcactggaaattttgaatcagctgtcgatctatgccttcatgacaacagaatggcagacgccatcattcttgccatcgctggcggacaagaactgttggcacgaacacagaagaaatattttgcaaaatcacagtctaaaatcacacgcctaatcacagctgtggtcatgaagaattggaaggaaatcgtcgagagttgcgatcttaagaattggcgtgaagcgctggcggcagtcctgacatatgctaaacccgatgagttctccgccctttgtgacctgctgggtactcgcctggagaatgaaggtgatagtctcctgcaaacacaggcttgcctgtgctacatatgcgcagggaacgttgaaaagcttgtggcttgttggaccaaagcgcaagacggttcccatcctctgagtctccaggacctgatcgagaaagtggtgattctgcgaaaggcggttcagctgacacaagcaatggataccagtacagtgggagtactgcttgccgcaaaaatgagccagtatgcgaacttgctggcggcacagggctccattgccgctgccctggcattcctgcccgacaacacaaaccagccgaacatcatgcagttgcgcgatagactgtgccgggcacaaggggaaccagttgcgggtcatgagagccccaagatcccttacgaaaaacagcagttgcccaaaggcagacctggtcccgtcgccggtcatcaccagatgccacgggtgcagacgcagcagtattacccgcacggggaaaatcctcctccaccgggtttcatcatgcatggcaatgtcaatcccaacgccgctggtcagctgccaacttcccccggtcacatgcatacccaggtccctccctatccccagccccagaggccccagaacggttggaacgatccgccagctctgaatagggtccctaaaaagaagaagatgcccgagaactttatgcctccagtgccaataacatcccctattatgaacccactgggagaccctcagtctcagatgctacagcaacagccaagtgcgcctgtaccactctcatcacaaagtagcttccctcagccccaccttcctggcggtcagcccttccatggtgtccagcagccattaggccagactgggatgccaccttctttctcaaagccaaatatcgagggcgctcccggagcacctataggaaacacattccagcacgtgcaaagtctgcctaccaagaagattactaagaagcctatccccgacgagcatctcatcctcaagaccactttcgaagacctgattcagcggtgcctgtccagtgccaccgaccctcagaccaagagaaaactcgacgacgcttccaagcgcctcgaattcctctacgacaagcttagagagcaaactctgagccccaccatcacaagtgggcttcacaacatagcgagaagcattgagacacgaaactattcagaaggcttgacaatgcacactcatattgtcagcacgagtaatttctccgagacctccgcttttatgccggtgctgaaggtagttcttacacaagcgaataaactgggagtgtag

SEQ ID NO: 34776 - DNA, 3321 bp, Artificial Sequence
  derived and/or modified sequence
atgaagctgaaagaggttgatcggacagcgatgcaggcctggtcaccagctcagaaccatcctatctacttggcaaccgggacctcagcccaacagctggacgccacgttcagcacaaacgcttctctggaaatttttgagctcgacttatcagacccatccctcgatatgaagtcctgtgcaacgttctcaagttcccacagataccataagctgatttggggtccatacaagatggacagcaagggggatgtgtccggagttctgattgccggtggcgagaacggcaacatcatattatacgatccctctaagatcatcgcaggcgataaagaggtggtcattgcccagaacgacaagcataccggtcccgtgagggcgctggatgtcaacatattccagaccaacctggtggcaagcggtgccaatgagagtgagatctatatttgggatcttaataacttcgccacacccatgacaccaggcgcaaagacccagcccccagaagatatctcgtgcatagcttggaatcgtcaggtccagcacattctggcttctgcatccccctccggtagagccacggtgtgggacctccgcaagaacgaacccatcatcaaagtaagcgaccattccaacagaatgcattgcagtggcctcgcttggcatcccgacgtcgccacgcagatggtgctagcctctgaagacgatcgactgcccgtcatccagatgtgggacctacgcttcgctagttctccgctacgagtgctggaaaatcacgcaagaggaattttagcaatcgcctggagtatggctgaccctgagctcttgctgagctgcggcaaagacgcgaaaattctttgctccaatccaaacaccggcgaggtgttgtacgaactacccaccaatactcagtggtgtttcgacatccaatggtgcccacgtaatcccgcagtcctgagtgccgcatcattcgacggtcggatttctgtctactccattatggggggttccacagacggcctaagacagaagcaggtggataagctatcaagcagtttcggcaatctggatccattcgggactgggcagcccttacctcctctgcaaattccacagcagacagctcaacatagcatagtactacctttaaaaaaaccgccaaagtggattcggaggcccgttggagcaagtttttcattcgggggtaagctggtcactttcgaaaatgtaagaatgccgtcccatcagggagccgagcaacagcagcaacagcaccacgttttcatctctcaggtggttaccgagaaggagtttctgagtcgctccgaccaactgcagcaggcagtacagagccagggtttcatcaattactgccagaaaaaaatcgatgcatcccaaacggagttcgaaaagaatgtgtggtcttttcttaaggtgaatttcgaagacgatagccgcggtaagtaccttgagctgctcggctaccgcaaagaggatctaggaaaaaagatagccttggctttgaataaggtagacggtgctaacgttgcccttaaagattctgaccaggtggcccaatcagacggagaggaaagtcctgcagcagaagaacagctgctgggtgagcacattaaggaagaaaaggaagagtcagagttcctcccgtccagcggaggtacgttcaatatatccgtatctggggatatcgacggacttataacccaagcccttttaaccgggaacttcgagtctgccgtggatctgtgtctgcacgataaccggatggccgatgcaattatcctggctatcgcagggggacaagagctgctggccaggacacagaagaagtactttgctaagagccagtcaaagatcaccagactgatcacagctgtggtcatgaaaaattggaaagaaattgtggagtcttgtgatctgaagaattggagggaagctctggctgctgttcttacttacgccaagcctgatgaattttccgctctgtgcgacctgctcggcacccggctggaaaacgagggggacagcctactgcaaacccaggcatgcctctgctacatatgcgccggtaatgtggaaaagctggtggcttgttggacaaaggcccaggatggatcccaccccctgtctcttcaggacctgatcgaaaaggtggtgatcctcaggaaggctgtgcagctgactcaagctatggatacctctacagtgggtgttctgctggccgctaagatgtcccagtatgcaaacctgctggcagctcagggcagtatcgcggctgccctggctttcctcccagacaatactaatcagcccaacattatgcaactgcgcgaccgtctatgtagagcacaaggcgagcccgtagcgggacatgagtcacccaaaataccatacgagaagcaacagctccctaaaggcagacctggacctgtcgcaggacaccatcagatgcccagggttcagacacagcagtattaccctcatggcgagaacccccctcctcctggcttcatcatgcacggtaatgttaatcccaatgctgcaggccagctgcccacatctcctgggcacatgcatacccaggtccctccataccctcaaccccagaggccccagaatggatggaacgaccctcccgctctgaacagggtgccaaagaagaaaaagatgcccgaaaatttcatgccccctgtgccaataacctcgcctatcatgaatcctctgggcgaccctcaatctcagatgctgcagcaacaaccaagcgccccagttcccctgtcgtcccagtcctccttcccacagcctcacctcccgggtggacagccgttccacggcgttcagcagccccttggtcaaaccggcatgcctccaagcttctccaagccaaatattgagggggcacctggagcccctataggtaatacattccagcacgtgcaatctctgcccaccaaaaaaataactaagaaaccaattcccgatgagcacctgatactgaaaacaacttttgaggatctgatacagcggtgtctgagttcagcaaccgaccctcagaccaaacggaagctcgatgatgcaagcaagaggctggaattcttatacgataagttgcgggagcaaacgctcagtccaacaataacctcaggcctgcacaacatcgctaggtccatcgaaacaaggaattactccgagggcctgactatgcacacgcatattgtcagcacaagcaatttctctgagacctctgctttcatgccagtgttaaaggtggtactcactcaagccaacaaacttggcgtctag

SEQ ID NO: 34777 - DNA, 3897 bp, Artificial Sequence
  derived and/or modified sequence
cggaagtgttgggcgcagggcgtggctgcggctgcggctgccacgttggaacggaacgtggaggtggccctggccggggaggaggggcggcggcgaatgctgggagagtccgacgagcgctgcactaacgcaggatccggctgccgaaggtcctcgccagcaggatgaagttaaaggaagtagatcgtacagccatgcaggcatggagccctgcccagaatcaccccatttacctagcaacaggaacatctgctcagcaattggatgcaacatttagtacgaatgcttcccttgagatatttgaattagacctctctgatccatccttggatatgaaatcttgtgccacattctcctcttctcacaggtaccacaagttgatttgggggccttataaaatggattccaaaggagatgtctctggagttctgattgcaggtggtgaaaatggaaatattattctctatgatccttctaaaattatagctggagacaaggaagttgtgattgcccagaatgacaagcatactggcccagtgagagccttggatgtgaacattttccagactaatctggtagcttctggtgctaatgaatctgaaatctacatatgggatctaaataattttgcaaccccaatgacaccaggagccaaaacacagccgccagaagatatcagctgcattgcatggaacagacaagttcagcatattttagcatcagccagtcccagtggccgggccactgtatgggatcttagaaaaaatgagccaatcatcaaagtcagtgaccatagtaacagaatgcattgttctgggttggcatggcatcctgatgttgctactcagatggtccttgcctccgaggatgaccggttaccagtgatccagatgtgggatcttcgatttgcttcctctccacttcgtgtcctggaaaaccatgccagggggattttggcaattgcttggagcatggcagatcctgaattgttactgagctgtggaaaagatgctaagattctctgctccaatccaaacacaggagaggtgttatatgaacttcccaccaacacacagtggtgcttcgatattcagtggtgtccccgaaatcctgctgtcttatcagctgcttcgtttgatgggcgtatcagtgtttattctatcatgggaggtagcacagatggtttaagacagaaacaagttgacaagctttcatcatcttttgggaatcttgatccctttggcacaggacagccccttcctccgttacaaattccacagcagactgctcagcatagtatagtgctgcctctgaagaagccgcccaagtggattcgaaggcctgttggtgcttctttttcatttggaggcaaactggttacgtttgagaatgtcagaatgccttctcatcagggagctgagcagcagcagcagcagcaccatgtgttcattagtcaggttgtaacagaaaaggagttcctcagccgatcagaccaacttcagcaggctgtgcagtcacaaggatttatcaattattgccaaaaaaaaattgatgcttctcagactgaatttgagaaaaatgtgtggtcctttttgaaggtaaactttgaggatgattctcgtggaaaataccttgaacttctaggatacagaaaagaagatctaggaaagaagattgctttggccttgaacaaagtggatggagccaatgtggctcttaaagactctgaccaagtagcacagagtgatggggaggagagccctgctgctgaagagcagctcttgggagagcacattaaagaggaaaaagaagaatctgaatttctaccctcatctggaggaacatttaatatctctgtcagtggggacattgatggtttaattactcaggctttgctgacgggcaattttgagagtgctgttgacctttgtttacatgataaccgcatggccgatgccattatattggccatagcaggtggacaagaactcttggctcgaacccagaaaaaatacttcgcaaaatcccaaagcaaaattaccaggctcatcactgcagtggtgatgaagaactggaaagagattgttgagtcttgtgatcttaaaaattggagagaggctttagctgcagtattgacttatgcaaagccggatgaattttcagccctttgtgatcttttgggaaccaggcttgaaaatgaaggagatagcctcctgcagactcaagcatgtctctgctatatttgtgcagggaatgtagagaaattagttgcatgttggactaaagctcaagatggaagccaccctttgtcacttcaggatctgattgagaaagttgtcatcctgcgaaaagctgtgcaactcactcaagccatggacactagtactgtaggagttctcttggctgcgaagatgagtcagtatgccaatttgttggcagctcagggcagtattgctgcagccttggcttttcttcctgacaacaccaaccagccaaatatcatgcagcttcgtgacagactttgtagagcacaaggagagcctgtagcaggacatgaatcacctaaaattccgtacgagaaacagcagctccccaagggcaggcctggaccagttgctggccaccaccagatgccaagagttcaaactcaacaatattatccccatggagaaaatcctccacctccgggtttcataatgcatggaaatgttaatccaaatgctgctggtcagcttcccacatctccaggtcatatgcacacccaggtaccaccttatccacagccacagcgtcctcagaatggttggaatgaccctccagctttgaacagagtacccaaaaagaagaagatgcctgaaaacttcatgcctcctgttcccatcacatcaccaatcatgaacccgttgggtgacccccagtcacaaatgctgcagcaacagccttcagctccagtaccactgtcaagccagtcttcattcccacagccacatcttccaggtggccagcccttccatggcgtacagcaacctcttggtcaaacaggcatgccaccatctttttcaaagcccaatattgaaggtgccccaggggctcctattggaaataccttccagcatgtgcagtctttgccaacaaaaaaaattaccaagaaacctattccagatgagcacctcattctaaagaccacatttgaggatcttattcagcgctgcctttcttcagcaacagaccctcaaaccaagaggaagctagatgatgccagcaaacgtttggagtttctgtatgataaacttagggaacagacactttcaccaacaatcaccagtggtttacacaacattgcaaggagcattgaaactcgaaactactcagaaggattgaccatgcatacccacatagttagcaccagcaacttcagtgagacctctgctttcatgccagttctcaaagttgttctcacccaggccaataagctgggtgtctaaaaggacagcttctcttccactcaatattgccatttttccaaagaaacatgttaaaaaaaaaaattataagacatggactagtcctcattagcatgtttgcatagcaaccagtcaagagcatttacactatttctgctgatatactcaccttagaactgctcagaaccctggtgctttatttttgttttaatcttttgttgccagtgatgattttcctattctgcaaatagtgtatttcctggattacacatagtatggtttcctgaagtattctgataaatgtgttttttaaaacctcaatatactttttagaaaaggagcatctggttatgcataaagcagagctaaaactaaatttctttcatgtcctccctacttcctcagtgtcaatcagattaaagtgtgtaatcct

SEQ ID NO: 34778 - DNA, 3861 bp, Artificial Sequence
  derived and/or modified sequence
gcggctgccacgttggaacggaacgtggaggtggccctggccggggaggaggggcggcggcgaatgctgggagagtccgacgagcgctgcactaacgcaggatccggctgccgaaggtcctcgccaggatgaagttaaaggaagtagatcgtacagccatgcaggcatggagccctgcccagaatcaccccatttacctagcaacaggaacatctgctcagcaattggatgcaacatttagtacgaatgcttcccttgagatatttgaattagacctctctgatccatccttggatatgaaatcttgtgccacattctcctcttctcacaggtaccacaagttgatttgggggccttataaaatggattccaaaggagatgtctctggagttctgattgcaggtggtgaaaatggaaatattattctctatgatccttctaaaattatagctggagacaaggaagttgtgattgcccagaatgacaagcatactggcccagtgagagccttggatgtgaacattttccagactaatctggtagcttctggtgctaatgaatctgaaatctacatatgggatctaaataattttgcaaccccaatgacaccaggagccaaaacacagccgccagaagatatcagctgcattgcatggaacagacaagttcagcatattttagcatcagccagtcccagtggccgggccactgtatgggatcttagaaaaaatgagccaatcatcaaagtcagtgaccatagtaacagaatgcattgttctgggttggcatggcatcctgatgttgctactcagatggtccttgcctccgaggatgaccggttaccagtgatccagatgtgggatcttcgatttgcttcctctccacttcgtgtcctggaaaaccatgccagggggattttggcaattgcttggagcatggcagatcctgaattgttactgagctgtggaaaagatgctaagattctctgctccaatccaaacacaggagaggtgttatatgaacttcccaccaacacacagtggtgcttcgatattcagtggtgtccccgaaatcctgctgtcttatcagctgcttcgtttgatgggcgtatcagtgtttattctatcatgggaggtagcacagatggtttaagacagaaacaagttgacaagctttcatcatcttttgggaatcttgatccctttggcacaggacagccccttcctccgttacaaattccacagcagactgctcagcatagtatagtgctgcctctgaagaagccgcccaagtggattcgaaggcctgttggtgcttctttttcatttggaggcaaactggttacgtttgagaatgtcagaatgccttctcatcagggagctgagcagcagcagcagcagcaccatgtgttcattagtcaggttgtaacagaaaaggagttcctcagccgatcagaccaacttcagcaggctgtgcagtcacaaggatttatcaattattgccaaaaaaaaattgatgcttctcagactgaatttgagaaaaatgtgtggtcctttttgaaggtaaactttgaggatgattctcgtggaaaataccttgaacttctaggatacagaaaagaagatctaggaaagaagattgctttggccttgaacaaagtggatggagccaatgtggctcttaaagactctgaccaagtagcacagagtgatggggaggagagccctgctgctgaagagcagctcttgggagagcacattaaagaggaaaaagaagaatctgaatttctaccctcatctggaggaacatttaatatctctgtcagtggggacattgatggtttaattactcaggctttgctgacgggcaattttgagagtgctgttgacctttgtttacatgataaccgcatggccgatgccattatattggccatagcaggtggacaagaactcttggctcgaacccagaaaaaatacttcgcaaaatcccaaagcaaaattaccaggctcatcactgcagtggtgatgaagaactggaaagagattgttgagtcttgtgatcttaaaaattggagagaggctttagctgcagtattgacttatgcaaagccggatgaattttcagccctttgtgatcttttgggaaccaggcttgaaaatgaaggagatagcctcctgcagactcaagcatgtctctgctatatttgtgcagggaatgtagagaaattagttgcatgttggactaaagctcaagatggaagccaccctttgtcacttcaggatctgattgagaaagttgtcatcctgcgaaaagctgtgcaactcactcaagccatggacactagtactgtaggagttctcttggctgcgaagatgagtcagtatgccaatttgttggcagctcagggcagtattgctgcagccttggcttttcttcctgacaacaccaaccagccaaatatcatgcagcttcgtgacagactttgtagagcacaaggagagcctgtagcaggacatgaatcacctaaaattccgtacgagaaacagcagctccccaagggcaggcctggaccagttgctggccaccaccagatgccaagagttcaaactcaacaatattatccccatggagaaaatcctccacctccgggtttcataatgcatggaaatgttaatccaaatgctgctggtcagcttcccacatctccaggtcatatgcacacccaggtaccaccttatccacagccacagcgtcctcagaatggttggaatgaccctccagctttgaacagagtacccaaaaagaagaagatgcctgaaaacttcatgcctcctgttcccatcacatcaccaatcatgaacccgttgggtgacccccagtcacaaatgctgcagcaacagccttcagctccagtaccactgtcaagccagtcttcattcccacagccacatcttccaggtggccagcccttccatggcgtacagcaacctcttggtcaaacaggcatgccaccatctttttcaaagcccaatattgaaggtgccccaggggctcctattggaaataccttccagcatgtgcagtctttgccaacaaaaaaaattaccaagaaacctattccagatgagcacctcattctaaagaccacatttgaggatcttattcagcgctgcctttcttcagcaacagaccctcaaaccaagaggaagctagatgatgccagcaaacgtttggagtttctgtatgataaacttagggaacagacactttcaccaacaatcaccagtggtttacacaacattgcaaggagcattgaaactcgaaactactcagaaggattgaccatgcatacccacatagttagcaccagcaacttcagtgagacctctgctttcatgccagttctcaaagttgttctcacccaggccaataagctgggtgtctaaaaggacagcttctcttccactcaatattgccatttttccaaagaaacatgttaaaaaaaaaaattataagacatggactagtcctcattagcatgtttgcatagcaaccagtcaagagcatttacactatttctgctgatatactcaccttagaactgctcagaaccctggtgctttatttttgttttaatcttttgttgccagtgatgattttcctattctgcaaatagtgtatttcctggattacacatagtatggtttcctgaagtattctgataaatgtgttttttaaaacctcaatatactttttagaaaaggagcatctggttatgcataaagcagagctaaaactaaatttctttcatgtcctccctacttcctcagtgtcaatcagattaaagtgtgtaatcct

SEQ ID NO: 34779 - protein, 510 aa, Artificial Sequence
  derived and/or modified sequence
MAAAVAAALARLLAAFLLLAAQVACEYGMVHVVSQAGGPEGKDYCILYNPQWAHLPHDLSKASFLQLRNWTASLLCSAADLPARGFSNQIPLVARGNCTFYEKVRLAQGSGARGLLIVSRERLVPPGGNKTQYDEIGIPVALLSYKDMLDIFTRFGRTVRAALYAPKEPVLDYNMVIIFIMAVGTVAIGGYWAGSRDVKKRYMKHKRDDGPEKQEDEAVDVTPVMTCVFVVMCCSMLVLLYYFYDLLVYVVIGIFCLASATGLYSCLAPCVRRLFGKCRIPNNSLPYFHKRPQARMLLLALFCVAVSVVWGVFRNEDQWAWVLQDALGIAFCLYMLKTIRLPTFKACTLLLLVLFLYDIFFVFITPFLTKSGSSIMVEVATGPSDSATREKLPMVLKVPRLNSSPLALCDRPFSLLGFGDILVPGLLVAYCHRFDIQVQSSRVYFVACTIAYGVGLLVTFVALALMQRGQPALLYLVPCTLVTSCAVALWRRELGVFWTGSGFAVNTSLL

SEQ ID NO: 34780 - DNA, 924 bp, Artificial Sequence
  derived and/or modified sequence
atggccgccgccgtggccgccgccctggccagactgctggccgccttcctgctgctggccgcccaggtggcctgcgagtacggcatggtgcacgtggtgagccaggccggcggccccgagggcaaggactactgcatcctgtacaacccccagtgggcccacctgccccacgacctgagcaaggccagcttcctgcagctgagaaactggaccgccagcctgctgtgcagcgccgccgacctgcccgccagaggcttcagcaaccagatccccctggtggccagaggcaactgcaccttctacgagaaggtgagactggcccagggcagcggcgccagaggcctgctgatcgtgagcagagagagactggtgccccccggcggcaacaagacccagtacgacgagatcggcatccccgtggccctgctgagctacaaggacatgctggacatcttcaccagattcggcagaaccgtgagagccgccctgtacgcccccaaggagcccgtgctggactacaacatggtgatcatcttcatcatggccgtgggcaccgtggccatcggcggctactgggccggcagcagagacgtgaagaagagatacatgaagcacaagagagacgacggccccgagaagcaggaggacgaggccgtggacgtgacccccgtgatgacctgcgtgttcgtggtgatgtgctgcagcatgctggtgctgctgtactacttctacgacctgctggtgtacgtggtgatcggcatcttctgcctggccagcgccaccggcctgtacagctgcctggccccctgcgtgagaagactgcccagcggcaagaagagaccccaggccagaatgctgctgctggccctgttctgcgtggccgtgagcgtggtgtggggcgtgttcagaaacgaggaccagtag

SEQ ID NO: 34781 - DNA, 1533 bp, Artificial Sequence
  derived and/or modified sequence
atggccgccgccgtggccgccgccctggccagactgctggccgccttcctgctgctggccgcccaggtggcctgcgagtacggcatggtgcacgtggtgagccaggccggcggccccgagggcaaggactactgcatcctgtacaacccccagtgggcccacctgccccacgacctgagcaaggccagcttcctgcagctgagaaactggaccgccagcctgctgtgcagcgccgccgacctgcccgccagaggcttcagcaaccagatccccctggtggccagaggcaactgcaccttctacgagaaggtgagactggcccagggcagcggcgccagaggcctgctgatcgtgagcagagagagactggtgccccccggcggcaacaagacccagtacgacgagatcggcatccccgtggccctgctgagctacaaggacatgctggacatcttcaccagattcggcagaaccgtgagagccgccctgtacgcccccaaggagcccgtgctggactacaacatggtgatcatcttcatcatggccgtgggcaccgtggccatcggcggctactgggccggcagcagagacgtgaagaagagatacatgaagcacaagagagacgacggccccgagaagcaggaggacgaggccgtggacgtgacccccgtgatgacctgcgtgttcgtggtgatgtgctgcagcatgctggtgctgctgtactacttctacgacctgctggtgtacgtggtgatcggcatcttctgcctggccagcgccaccggcctgtacagctgcctggccccctgcgtgagaagactgttcggcaagtgcagaatccccaacaacagcctgccctacttccacaagagaccccaggccagaatgctgctgctggccctgttctgcgtggccgtgagcgtggtgtggggcgtgttcagaaacgaggaccagtgggcctgggtgctgcaggacgccctgggcatcgccttctgcctgtacatgctgaagaccatcagactgcccaccttcaaggcctgcaccctgctgctgctggtgctgttcctgtacgacatcttcttcgtgttcatcacccccttcctgaccaagagcggcagcagcatcatggtggaggtggccaccggccccagcgacagcgccaccagagagaagctgcccatggtgctgaaggtgcccagactgaacagcagccccctggccctgtgcgacagacccttcagcctgctgggcttcggcgacatcctggtgcccggcctgctggtggcctactgccacagattcgacatccaggtgcagagcagcagagtgtacttcgtggcctgcaccatcgcctacggcgtgggcctgctggtgaccttcgtggccctggccctgatgcagagaggccagcccgccctgctgtacctggtgccctgcaccctggtgaccagctgcgccgtggccctgtggagaagagagctgggcgtgttctggaccggcagcggcttcgccgtgaacaccagcctgctgtag

SEQ ID NO: 34782 - DNA, 924 bp, Artificial Sequence
  derived and/or modified sequence
atggctgctgctgtggcagcggccttggccaggcttctagccgccttcctgctcctggctgcccaagttgcttgcgagtatggtatggtgcatgtcgtgagtcaggcaggcgggccagagggcaaagattattgcattctgtacaaccctcagtgggcacatctccctcacgatttatcaaaagctagcttcctgcaactgaggaattggaccgcaagcctgctatgctccgcagccgatttgccggctagaggatttagcaaccagatacctctggtggcgcggggaaactgcactttctacgagaaggtgaggttggcacagggatcaggcgcgagggggctgctcatcgtgtcccgcgaacgtctagtgccacccggcggcaataagactcagtatgacgagattgggattcctgtggccctcctgagctacaaggacatgctggacattttcacccggttcggccggaccgtccgtgccgcgctttacgccccgaaggaacccgttctggactataacatggtgatcatctttatcatggctgtcggaaccgttgccatcggaggttactgggccgggtcccgcgatgttaagaaacgctatatgaagcataagcgggatgacggcccagaaaagcaggaggatgaagctgtcgacgtgacacctgtgatgacttgtgtattcgtggtcatgtgctgcagcatgctagtcctactgtactacttttatgacctgcttgtgtacgttgtgatcggcatcttctgtctggcatctgctactggattgtactcttgcctcgcaccctgtgtgcgccggctgccctccggaaaaaagaggcctcaggcacgcatgctgcttctcgccctgttttgcgtcgctgtgtccgtagtatggggggtattccgcaacgaggaccagtag

SEQ ID NO: 34783 - DNA, 1533 bp, Artificial Sequence
  derived and/or modified sequence
atggccgcagctgtggctgccgcccttgcacgcttactggccgcttttcttctgttggccgcccaggttgcctgcgagtatggaatggtccatgtggtgagccaagcgggcggcccggaagggaaggactactgtattctgtataatcctcagtgggcacatcttccccacgacttatcaaaagcctcttttctgcaacttagaaattggacagcctctctgttatgcagcgccgccgacttaccggcaaggggctttagtaaccagatacccctcgtcgctaggggcaattgtactttttacgaaaaggtgcgtctggctcagggttccggggctcgggggctcctgatcgtgagcagggagagactcgtgccacctggaggtaacaagacacagtacgacgagataggcattcctgtggccctcctgagttacaaagacatgcttgacatcttcacacggtttggtagaacggtgagggctgccctgtacgcaccaaaagagccagtgttggactacaatatggttataatatttatcatggcagtaggcacagtggctataggcggttattgggctggtagcagggacgttaagaagcggtacatgaaacataagcgagatgacggcccggaaaagcaggaagatgaggccgttgacgttacacctgtcatgacatgtgtcttcgtcgtcatgtgttgctccatgctcgtgctgctctactatttctacgacctcctcgtctacgttgtgatcgggattttctgccttgcatccgctactggactctatagttgcctagccccctgtgtgagaaggctgtttgggaagtgcaggattcccaataattcacttccatattttcacaaaagacctcaggccaggatgcttttgctcgccctgttttgcgtggctgtttctgtggtgtggggggtcttcagaaacgaggaccagtgggcttgggtactgcaggacgccctggggatcgccttttgtctgtatatgctcaaaaccattcgattgccaaccttcaaagcctgcactttgcttttgctagtcctatttttatacgatattttctttgtctttatcacgcctttcctgacaaaatcagggtcttcgatcatggtggaggtggcaactggtcccagtgactcagcaacgcgggagaagctacccatggtattgaaggtacctaggctgaactcatcgccgctcgcactgtgtgaccgccctttttcgctgctaggatttggggatatcttggtaccggggctactggtagcctactgccatcgctttgacatccaagtgcagtcatcccgagtgtatttcgttgcgtgcaccatagcatacggtgtaggcctcttagtaacctttgtcgctctagccctgatgcagaggggtcagcctgcgttgctgtatctcgtgccatgcaccctggttacttcatgtgccgtggcgttatggcggcgtgaactcggggtattctggaccggatccggcttcgccgtgaatacaagcctgctgtag

SEQ ID NO: 34784 - DNA, 924 bp, Artificial Sequence
  derived and/or modified sequence
atggctgctgctgtggccgccgccctggcccggctgctggccgccttcctgctgctggccgcccaggtggcctgtgaatatggcatggtgcacgtggtgtcccaggccggcggccctgagggcaaggactactgcatcctgtacaacccccagtgggcccacctgccccatgacctgagcaaggccagcttcctgcagctgaggaactggacagccagcctgctgtgcagcgctgctgacctgcctgcccggggcttcagcaaccagatccccctggtggcccggggcaactgcaccttctatgagaaggtgcggctggcccagggcagcggggcccggggcctgctgattgtgtcccgggagcggctggtgcccccaggcggcaacaagacccagtatgatgagatcggcatccctgtggccctgctgagctacaaggacatgctggacatcttcaccaggtttggaagaacagtgcgggccgccctgtatgcccccaaggagcctgtgctggactacaacatggtgatcatcttcatcatggctgtgggcaccgtggccatcggcggctactgggccggcagcagagatgtgaagaagcgctacatgaagcacaagagagatgatggccctgagaagcaggaggatgaggccgtggatgtgacccctgtgatgacctgtgtgtttgtggtgatgtgctgcagcatgctggtgctgctgtactacttctatgacctgctggtgtatgtggtgattggcatcttctgcctggccagcgccaccggcctgtacagctgcctggccccctgtgtgcggcggctgcccagcggcaagaagaggccccaggccaggatgctgctgctggccctcttctgtgtggccgtgtctgtggtgtggggcgtcttcagaaatgaagaccagtag

SEQ ID NO: 34785 - DNA, 1533 bp, Artificial Sequence
  derived and/or modified sequence
atggctgctgctgtggccgccgccctggcccggctgctggccgccttcctgctgctggccgcccaggtggcctgtgaatatggcatggtgcacgtggtgtcccaggccggcggccctgagggcaaggactactgcatcctgtacaacccccagtgggcccacctgccccatgacctgagcaaggccagcttcctgcagctgaggaactggacagccagcctgctgtgcagcgctgctgacctgcctgcccggggcttcagcaaccagatccccctggtggcccggggcaactgcaccttctatgagaaggtgcggctggcccagggcagcggggcccggggcctgctgattgtgtcccgggagcggctggtgcccccaggcggcaacaagacccagtatgatgagatcggcatccctgtggccctgctgagctacaaggacatgctggacatcttcaccaggtttggaagaacagtgcgggccgccctgtatgcccccaaggagcctgtgctggactacaacatggtgatcatcttcatcatggctgtgggcaccgtggccatcggcggctactgggccggcagcagagatgtgaagaagcgctacatgaagcacaagagagatgatggccctgagaagcaggaggatgaggccgtggatgtgacccctgtgatgacctgtgtgtttgtggtgatgtgctgcagcatgctggtgctgctgtactacttctatgacctgctggtgtatgtggtgattggcatcttctgcctggccagcgccaccggcctgtacagctgcctggccccctgtgtgcggcggctgtttggaaaatgtcgcatccccaacaacagcctgccctacttccacaagaggccccaggccaggatgctgctgctggccctcttctgtgtggccgtgtctgtggtgtggggcgtcttcagaaatgaagaccagtgggcctgggtgctgcaggatgccctgggcatcgccttctgcctgtacatgctgaagaccatccggctgcccaccttcaaggcctgcaccctgctgctgctggtgctcttcctgtatgacatcttctttgtgttcatcacccccttcctgaccaagagcggcagcagcatcatggtggaggtggccaccggccccagcgacagcgccacccgggagaagctgcccatggtgctgaaggtgccccggctgaacagcagccccctggccctgtgtgaccggcccttcagcctgctgggctttggagacatcctggtgcccggcctgctggtggcctactgccacagatttgacatccaggtgcagagcagccgggtgtactttgtggcctgcaccatcgcctacggcgtgggcctgctggtgacctttgtggccctggccctgatgcagaggggccagcctgccctgctgtacctggtgccctgcaccctggtgaccagctgtgctgtggccctgtggaggcgggagctgggcgtcttctggacaggcagcggctttgctgtgaacaccagcctgctgtag

SEQ ID NO: 34786 - DNA, 924 bp, Artificial Sequence
  derived and/or modified sequence
atggccgccgccgtggccgccgccctggcccggctgctggccgcctttcttttgctggcggcccaggtcgcttgtgaatatggaatggtccatgttgttagccaagctggtggacccgagggcaaggactactgcatactttataacccccagtgggcccatctaccccacgatctgagcaaggctagtttcctacagcttcgcaattggacagccagtctattatgctctgctgccgacctccctgcgaggggcttcagtaatcagatccctttagtggcacgcggcaactgcaccttttatgagaaggttcgcctggctcagggctccggagcaagggggctactcattgtcagccgagagaggctggtgcctccaggcggcaacaaaacccagtatgacgaaatcggcatccccgttgctctcctatcttacaaggatatgcttgacatcttcacacgctttggacggactgtgcgggccgccctctatgctcctaaggaacccgtgcttgattacaacatggtgataatcttcattatggcagtgggtaccgtggccatcggggggtactgggccggttcccgcgacgtgaagaagaggtacatgaaacacaagcgggatgatggacccgaaaaacaggaggatgaggccgtggatgtaacacccgtcatgacctgtgtcttcgttgtaatgtgctgctccatgcttgtgttgttgtattatttctacgatttgctggtatatgtcgtaataggcattttttgcctcgcaagcgcaacaggtctctactcctgtctggccccctgcgtccgccggctaccgagcggcaaaaagaggcctcaggcacgcatgctgttgctcgcccttttctgcgtcgcggtgtcggtagtctggggggtgtttcgcaacgaggaccaatag

SEQ ID NO: 34787 - DNA, 1533 bp, Artificial Sequence
  derived and/or modified sequence
atggccgccgccgtggccgccgccctggcccggctgctggccgccttcctcttgctcgctgcccaagtcgcctgcgagtatggaatggtgcacgtcgttagccaggccggcggccccgaggggaaagattactgcatattatataaccctcaatgggctcatctccctcatgatctgtctaaggctagctttttgcagctgcgaaattggaccgcttctctgctgtgttcagcggccgatctccctgccagaggattttctaatcagattcccctggttgcacgagggaactgcactttctatgagaaagtgcgactcgcccagggctccggcgcccgcgggctgttgattgtatccagagaaaggctagttccccccggtggtaataagacacaatacgatgagatcggcatccccgtagccctgcttagctacaaggatatgctggacattttcaccagattcgggcgaaccgtgagggcagctctctatgcaccaaaggagccggtgctcgattacaacatggtaataatttttattatggctgtgggcacagtggctattggtggatactgggctggatccagggacgtcaaaaaaaggtacatgaaacacaaacgcgatgatgggcccgagaagcaggaggacgaagcagtggatgtcaccccggtgatgacgtgcgtctttgtcgttatgtgctgctctatgctggttctcctctactacttttacgacctgctagtctatgttgtgatcggaattttctgtctggcctctgcaaccggcctgtattcatgtctcgcgccctgtgttaggagactcttcggtaaatgccggattcccaacaatagccttccatactttcacaagaggccccaagctcgcatgctgctgctggccctgttttgcgtggctgtttcggtcgtttggggcgtttttcggaatgaggaccaatgggcatgggttctccaggatgccttagggatcgctttctgcctctacatgttaaagacgatccggctgcctacattcaaagcttgcaccctcttgttgctggttctctttctctatgacattttcttcgttttcatcaccccatttctgaccaagtcaggcagttccatcatggttgaggtcgccactggcccttctgatagcgccacacgcgaaaaactaccaatggtcctcaaggtgcctcgattgaactcaagtcccttggcattgtgtgaccgaccattctccctgcttggctttggcgatattttagttccaggtctgctggttgcgtattgtcacaggttcgatatacaagtacaaagctctcgcgtctatttcgtggcttgcacaatcgcctacggagtcgggttgttagtgacattcgttgccctggccctgatgcagagaggtcagccagcccttttgtatcttgtcccgtgcaccctggtgacaagctgtgcagtggccctatggcgaagggaattaggcgtgttctggaccggcagtggctttgccgtgaacacttccctgctgtag

SEQ ID NO: 34788 - DNA, 924 bp, Artificial Sequence
  derived and/or modified sequence
atggccgctgctgtggccgctgcacttgccaggttgctggccgcattcttactcttagccgcacaggtcgcatgcgaatatggcatggtgcacgtcgtctcccaggccggtggcccagagggcaaggattattgcatattatacaatccacagtgggcgcatcttcctcacgatttatcaaaggctagtttccttcagttacggaactggacagcgtcacttttatgttctgctgcggatttaccagcacgcggtttcagtaatcagattcctctggtggccagaggcaattgcactttttatgagaaagtcaggctagcccaggggagtggtgcacgtggcctactgatcgtctcaagagagcgtctggtgccaccgggaggtaacaagacccagtatgacgagatcgggatacctgtggcactgctgagctacaaggatatgctggatattttcacacgttttggcagaaccgtgagagccgctctgtatgcacctaaagaacccgtcctggattataatatggtgataatttttattatggcagtgggaacagtggcgattggtggctactgggccggatcacgtgatgtcaagaagcggtatatgaagcacaaaagggacgatgggcctgaaaaacaagaagatgaggctgtagacgttacaccagtgatgacctgtgtgtttgtggtgatgtgctgctccatgttagtgcttttgtactacttctatgacctactcgtctatgttgtcattgggatattctgcctcgcttccgccaccgggctgtattcttgcctcgccccttgtgttcgcaggttaccgtctggaaagaaacgtccccaggcgaggatgctgctcctggcattattctgcgtcgcggtgtccgtcgtgtggggtgtgtttcgcaacgaggatcagtag

SEQ ID NO: 34789 - DNA, 1533 bp, Artificial Sequence
  derived and/or modified sequence
atggctgccgcagtggcagcagcccttgcaaggttgctggccgcatttctactattggcggctcaggtagcctgtgaatacggaatggtgcatgtggtgtcccaggcaggcggtcctgaagggaaggactactgcatactgtacaacccacagtgggcacacctgccccatgatttgtcaaaggcctctttccttcagctccgcaactggactgcctctctgctctgcagcgctgcggacctccctgccaggggcttctccaatcagatcccattggtagcccgtgggaactgtaccttctacgagaaggtcaggctcgctcagggatctggtgcacggggtctcctcatagtgagtcgtgaaaggttggttcccccaggaggcaacaagactcagtacgacgagattgggattccagtcgcacttctcagctataaagatatgctggacattttcacacgctttggtcgaaccgtccgtgccgcactatacgccccaaaagaaccagtgctggactacaatatggtgataatttttatcatggcagtcgggacagtcgccatcggtggttattgggcgggtagtagagacgttaaaaaacgctatatgaaacacaaacgcgatgacggaccagagaaacaagaggacgaggcagtggatgttactcccgtcatgacatgcgtgttcgtggtcatgtgttgctctatgttggtgcttctctactacttctacgaccttttggtgtacgtagtgatagggatattctgtctggccagcgctaccggcctctacagttgtctggctccatgtgtgaggaggctttttgggaaatgtcgcatacccaacaactccttgccatacttccacaaaaggcctcaggccaggatgttactccttgcgttattttgtgtcgcagtttcggttgtctggggcgtcttccgcaacgaggatcagtgggcctgggtgctccaggacgctttaggcattgcattttgtctttatatgctgaaaaccatacgattaccaacctttaaagcgtgtaccttgctcctccttgtgctcttcctgtacgacatcttctttgtcttcatcactccctttctaaccaagtcagggtcaagtatcatggtcgaggtggccacggggccttcagactccgctacacgggagaaactgcccatggtgctgaaggtccctcggctgaactccagcccgctagcactgtgcgacagacccttctccctgctcggtttcggtgacattctggtgccaggtctgcttgtggcctactgccatcggtttgacattcaggttcagtcctccagggtctatttcgtggcatgtacaattgcctacggcgttggcctgctagtgacattcgtagcgctggcactgatgcagcggggtcagcccgctctcctttaccttgtcccctgcaccctagttacctcttgtgccgtcgccctgtggaggcgcgagctcggggttttctggaccggcagtggatttgcagtgaatacatcgctcctgtag

SEQ ID NO: 34790 - protein, 884 aa, Artificial Sequence
  derived and/or modified sequence
MRIISRQIVLLFSGFWGLAMGAFPSSVQIGGLFIRNTDQEYTAFRLAIFLHNTSPNASEAPFNLVPHVDNIETANSFAVTNAFCSQYSRGVFAIFGLYDKRSVHTLTSFCSALHISLITPSFPTEGESQFVLQLRPSLRGALLSLLDHYEWNCFVFLYDTDRGYSILQAIMEKAGQNGWHVSAICVENFNDVSYRQLLEELDRRQEKKFVIDCEIERLQNILEQIVSVGKHVKGYHYIIANLGFKDISLERFIHGGANVTGFQLVDFNTPMVIKLMDRWKKLDQREYPGSETPPKYTSALTYDGVLVMAETFRSLRRQKIDISRRGNAGDCLANPAAPWGQGIDMERTLKQVRIQGLTGNVQFDHYGRRVNYTMDVFELKSTGPRKVGYWNDMDKLVLIQDVPTLGNDTAAIENRTVVVTTIMESPYVMYKKNHEMFEGNDKYEGYCVDLASEIAKHIGIKYKIAIVPDGKYGARDADTKIWNGMVGELVYGKAEIAIAPLTITLVREEVIDFSKPFMSLGISIMIKKPQKSKPGVFSFLDPLAYEIWMCIVFAYIGVSVVLFLVSRFSPYEWHTEEPEDGKEGPSDQPPNEFGIFNSLWFSLGAFMQQGCDISPRSLSGRIVGGVWWFFTLIIISSYTANLAAFLTVERMVSPIESAEDLAKQTEIAYGTLDSGSTKEFFRRSKIAVYEKMWTYMRSAEPSVFTRTTAEGVARVRKSKGKFAFLLESTMNEYIEQRKPCDTMKVGGNLDSKGYGVATPKGSSLRNAVNLAVLKLNEQGLLDKLKNKWWYDKGECGSGGGDSKDKTSALSLSNVAGVFYILVGGLGLAMLVALIEFCYKSRAEAKRMKVAKSAQTFNPTSSQNTQNLATYREGYNVYGTESIKI

SEQ ID NO: 34791 - DNA, 2655 bp, Artificial Sequence
  derived and/or modified sequence
atgaggatcatctcccgacagattgtgctactgttttcgggcttctgggggttggccatgggtgccttcccctcttccgtgcaaatcggaggactgttcattaggaatacagatcaggagtacactgcattccggctagcgatcttcctacacaacaccagtcccaatgcatccgaggccccctttaacctggtgcctcacgttgataacatagaaaccgcaaactcttttgcagtcacaaacgcattttgctcacagtactcacgcggcgtgttcgccatcttcggactgtatgacaaaaggtccgttcacaccctgacatctttttgtagtgcattacacatcagcttgattaccccctccttcccaaccgaaggagagagtcaatttgtcctccagttgcggccgtcccttcggggggctctgctctctcttttagaccattacgagtggaattgcttcgtctttttgtacgataccgacagaggctattctatcctgcaagccatcatggagaaggccggtcagaacggctggcacgtgtccgcaatttgtgtggagaactttaatgatgtttcttaccgtcagctcttagaggaactcgataggcggcaggagaaaaagttcgtgatcgactgtgaaattgagcgtcttcagaacatcctggagcagatcgtctccgttggcaaacatgtgaaaggataccattacatcatcgcgaatctgggcttcaaagacatctctctggaacgtttcatccacggcggtgccaacgtgactggctttcaactggtggacttcaacactcccatggtcataaagttgatggacaggtggaagaagctggaccagcgcgaataccctggatctgaaacaccaccaaaatatacaagtgcactgacctacgacggcgtcctggttatggctgagactttccggtccctaagaaggcagaagattgacatctcaagacggggcaacgcaggcgattgcctggcgaacccagccgcaccttggggccaaggtatcgacatggaacgtactctgaagcaggtgagaatccagggcttgaccggcaatgtgcaattcgatcattacggtcgacgggtcaactatacaatggacgtgttcgagctgaagtcaacgggcccccggaaggtcggatattggaatgacatggacaaacttgtactgatacaggacgtgcctactctgggaaatgatacggcagcgattgaaaacagaacggtagtagtgacaaccatcatggagagcccttatgtcatgtataagaagaatcatgagatgtttgagggtaacgataaatacgagggatactgcgtggacttggcatcagagatagcaaaacacatcggcatcaagtacaagatcgcaattgtgccagatggcaagtacggtgcacgggacgccgacacaaagatctggaatggcatggtgggggagttggtgtatgggaaggccgaaattgccatcgcccccctgaccattacgttggtcagggaggaggtgatcgacttcagcaaacccttcatgtctctgggaatcagtattatgatcaaaaagccccagaagtctaaacccggggttttctccttccttgacccgttggcctacgaaatctggatgtgtatcgttttcgcatacatcggggtgtcggttgtactgttcttagtcagtaggttttcaccgtatgagtggcatactgaagaaccggaagatggaaaagagggccccagcgaccagcctcctaatgaatttgggatattcaattccctttggtttagtctcggagctttcatgcagcagggctgtgatatctccccccggtcactttcagggcgaatcgtcgggggcgtttggtggtttttcacgctcataatcatttcaagctatactgctaaccttgccgcctttctcacggtggaaaggatggtgtccccaatagaatcggccgaggacttggctaagcagactgagatagcatatggtacactggatagcggttccacaaaggaattttttcggcggagtaaaatcgccgtctacgaaaagatgtggacatacatgcgtagcgcggaacctagtgtgtttacacgaaccaccgcagagggagtggcgagagtgagaaagtcaaaagggaaattcgcctttctgctcgaatctaccatgaatgagtacatcgagcaacggaagccgtgcgatactatgaaggtcgggggcaacctcgacagcaagggttacggcgtcgcaactcctaaaggtagttctctgcggaacgccgtgaacctggctgtgctgaaattaaacgaacaaggactgttggacaagctgaaaaacaaatggtggtacgataagggcgagtgtgggtcaggcgggggtgattcaaaggataaaacatccgctttatcgctgagtaacgtggctggagtattttatattctggtgggggggctgggcttagccatgctggtggctttgatcgagttctgttacaaatcccgggcagaagctaagagaatgaaagttgctaaatctgcacagacatttaaccctacgtctagccaaaatacccaaaacctggcaacttaccgcgaaggttataatgtgtatggaactgaatctatcaaaatatag

SEQ ID NO: 34792 - DNA, 2655 bp, Artificial Sequence
  derived and/or modified sequence
atgcgcatcatatcgaggcagatcgtcctcttattctccgggttttggggcttggccatgggagcttttccatcttcagtgcagatcggcggactgtttatacgaaatactgaccaggagtacacagccttcaggcttgctatctttttgcacaacacatcccccaacgctagtgaggccccgttcaatctcgtgcctcatgttgataacatcgagacggccaactctttcgcagtgactaatgccttttgctctcagtactcccgtggggttttcgccatctttggcttgtacgacaagaggtccgtccatacactgactagtttttgtagtgctctgcacatctccctcataacgcctagttttcctaccgagggtgaatctcagtttgtcctccagttgaggcccagcctgagaggcgctttattgtcccttctggatcactacgagtggaactgcttcgtgttcctctatgatactgataggggctattcaatcctgcaggcaattatggagaaggccggccagaacgggtggcacgtgagtgctatctgcgtcgaaaacttcaacgatgtgtcctacagacagctgctggaagagctggatcggaggcaggagaaaaagtttgttattgactgcgagatcgagagactgcaaaacattctggagcagattgtctctgtagggaagcacgttaagggctaccattatattatcgctaaccttggcttcaaagacatctccctggaacgattcattcacggcggtgctaatgtcacggggtttcaactggtcgacttcaatacgcccatggtcattaagcttatggataggtggaaaaaattggaccagagggagtacccaggcagcgaaacgccacccaagtacacttcagcccttacctacgatggagtgttagtgatggcagagacctttagatcactacgacgtcagaagattgatatcagccgtcgcgggaacgctggggattgcctggcaaatccagccgcgccctggggtcagggtattgacatggagcgcactctgaagcaagtgcgcattcagggactgaccggtaacgtgcagttcgaccactatggacggcgtgttaactacaccatggatgtgttcgagctaaaaagcacaggtcccaggaaggtaggatactggaacgatatggacaagctagtgttaatccaggatgtccccaccctgggtaatgatactgccgctatagagaatcgcaccgtcgtcgtgacaacaattatggaatctccatacgtgatgtacaagaaaaaccacgaaatgtttgagggcaacgacaagtatgagggctactgtgtcgacctagcatctgagattgctaagcacattggtatcaagtacaagatcgctattgtgcccgatggcaaatacggcgctagggacgcggacaccaagatctggaacggcatggtgggtgagctagtgtatggcaaggcagagatcgccatagccccgctcacaattaccctggtcagggaggaggtgatcgatttttcaaagccgttcatgagtctcgggatctccattatgatcaagaagccccagaaatctaaacccggcgtcttctctttcctggaccccctcgcttacgagatatggatgtgcattgttttcgcatatattggtgtttccgtcgtgttgtttctagtgtcaaggttcagcccatatgagtggcacacagaggagcctgaagacgggaaagaaggcccctctgatcagccccccaatgagtttggaatattcaactctctgtggttctctctcggagccttcatgcagcagggctgtgatattagccctcggtccctgagtgggcgtatagttgggggcgtgtggtggttctttaccctgatcatcatttcaagttacactgcaaacctggctgccttcctgacggtggaaaggatggtctccccaatcgagtccgctgaggacctcgctaagcagactgagattgcctacggcaccctggactccggaagcaccaaggagtttttcaggcgcagcaagatcgccgtctacgaaaagatgtggacctacatgcggagcgccgagccatccgtgtttacccgcaccactgcagagggggtggcccgagtcagaaagtccaagggaaagtttgccttcctgttagaaagcaccatgaacgagtacattgagcagcggaaaccttgcgacactatgaaggtcggcggcaacctcgatagtaagggttacggcgtggctactccaaagggctctagcctgaggaacgctgtcaacctagctgtcctgaaactcaacgaacaaggcttgctggacaaactgaagaacaaatggtggtacgacaaaggcgagtgcgggagtgggggaggtgacagcaaggataaaacaagtgctctttcgctgagcaatgtggccggggtcttctatatcctcgtcggagggttaggactggccatgctggttgccctcatcgaattctgctacaagagtcgcgccgaagctaagcggatgaaagtggccaaaagtgcccaaacatttaatccgaccagctctcagaacacccagaacctagccacgtatcgagaagggtacaacgtatacggtaccgagtccatcaagatatag

SEQ ID NO: 34793 - DNA, 5621 bp, Artificial Sequence
  derived and/or modified sequence
agtggcagaagagggctaggctgagagggaagccaggactgtaggagagggaggcagcccgtcctcctcacgaacctgcaaggatgcggcaggggcctgggggcatggggaggtactaaccccccggagcccccgattggggcttgcagacctggcccgtgggcggattttctgcctagcgcagccgagaagcagaggtgccaggaaaaccaagagaggggcgctgggggtgcccatccccagagtcggtccctctgcgaaccgaggaagaaaagaggagggagtcagcgagtggtcagaagggaaaacctgacaccagactggctccggagcgtccgggagactggggcgctccgcgccatcgtcttcaatgcttctctgaacagcctttaggaagagtgcgagagaaagagagagagcgcgcgccagggagaggagaaaagaagatgaggattatttccagacagattgtcttgttattttctggattttggggactcgccatgggagcctttccgagcagcgtgcaaataggtggtctcttcatccgaaacacagatcaggaatacactgcttttcgattagcaatttttcttcataacaccagccccaatgcgtcggaagctccttttaatttggtacctcatgtggacaacattgagacagccaacagttttgctgtaacaaacgccttctgttcccagtattctagaggagtatttgccatttttggactctatgataagaggtcggtacataccttgacctcattctgcagcgccttacatatctccctcatcacaccaagtttccctactgagggggagagccagtttgtgctgcaactaagaccttcgttacgaggagcactcttgagtttgctggatcactacgaatggaactgttttgtcttcctgtatgacacagacaggggatactcgatactccaagctattatggaaaaagcaggacaaaatggttggcatgtcagcgctatatgtgtggaaaattttaatgatgtcagctataggcaacttctagaagaacttgacagaagacaagagaagaagtttgtaatagactgtgagatagagagacttcaaaacatattagaacagattgtaagtgttggaaagcatgttaaaggctaccattatatcattgcaaacttgggattcaaggatatttctcttgagaggtttatacatggtggagccaatgttactggattccagttggtggattttaatacacctatggtaatcaaactaatggatcgctggaagaaactagatcagagagagtatccaggatctgagactcctccaaagtacacctctgctctgacttatgatggagtccttgtgatggctgaaactttccgaagtcttaggaggcagaaaattgatatctcaaggagaggaaatgctggggattgtctggcaaatcctgctgctccatggggccagggaattgacatggagaggacactcaaacaggttcgaattcaagggctgacagggaatgttcagtttgaccactatggacgtagagtcaattacacaatggatgtgtttgagctgaaaagcacaggacctagaaaggttggttactggaatgatatggataagttagtcttgattcaagatgtaccaactcttggcaatgacacagctgctattgagaacagaacagtggttgtaaccacaattatggaatccccatatgttatgtacaagaaaaatcatgaaatgtttgaaggaaatgacaagtatgaaggatactgtgtagatttggcatctgaaattgcaaaacatattggtatcaagtataaaattgccattgtccctgatggaaaatatggagcaagggatgcagacacaaaaatctggaatgggatggtaggagaacttgtttatgggaaagcagagattgctattgcccctctgacaatcactttggtacgagaggaggtcattgacttttctaagcccttcatgagtttgggcatatctatcatgatcaaaaagcctcagaaatccaaaccaggagtgttttccttcttggatcctctggcctatgagatttggatgtgcatagtctttgcctacattggtgtcagcgtggtcttattcctagttagtagatttagtccatatgagtggcacacagaagagccagaggacggaaaggaaggacccagcgaccagcctcccaatgagtttggcatctttaacagcctctggttttccctgggtgcttttatgcagcaaggatgtgacatttcacccagatccctctcaggtcgaattgttggaggtgtttggtggttctttacactcatcattatatcatcttatactgctaacctcgctgctttcctgacggttgagcgaatggtctctcccatagaaagtgcagaagacctggccaaacaaacagaaattgcctatggaacactggattcaggatcaacaaaagaattcttcagaagatcaaaaatagcagtgtatgaaaagatgtggacctacatgcgatcagcagagccatcagtattcactaggactacagctgagggagtagctcgtgtccgcaaatccaagggcaaatttgcctttctcctggagtccactatgaatgaatacattgagcagcgaaagccatgtgacacgatgaaagtgggaggaaatctggattccaaaggctatggagtagcaacgcccaagggttcctcattaagaaatgctgttaacctcgcagttttaaaactgaatgaacaaggcctcttggacaaattgaaaaacaaatggtggtacgacaaaggagaatgtggcagcgggggaggtgactccaaggacaagacgagtgccttgagcctgagcaatgtagcaggcgtcttctacattctggttggcggcttgggcttggcaatgctggtggctttgatagagttctgttacaagtccagggcagaagcgaagagaatgaaggtggcaaagagtgcacagacttttaacccaacttcctcgcagaatacccagaatttagcaacctatagagaaggttacaacgtatatggaaccgaaagtattaaaatttagggctgaccttttctgaagccataagaaacaaagccagattatccatcactgggagtgtgggagagaatggccgcgtcttgacgcctgactgcccaaaggctgtacacactggaactgcaatcagacaaagttcaggattggctgtcattgcatcggacctaccataaaaaccaaaaaaataattgagtgccttaattaaactgttggtgactggtggaaacgcagccctgagggacacgccacgcgcgggtctttgctaaaccaatcctttggctgagagcgggaagtccgtcctaacgcgctggccggacatcagcagcagcaacgtgtgcatgagctcagctcggaaacccaaactcagattttatatcaggaaaactcacaattgaggtttttttcggggagtgggtgggggagggatctgggatgggtgtattaacagcaacaaatttcattcgagtggactcaaaaactaatcagacttatgagttagcgcattaaactgtgaagttcttgctcagaaaggcctttgtcttcaccggaaaggataaaatagttgtagaagtccgtgaacatgctaacctgtgtctccagaacatccatatagtccatggaagaaaatccagctgagaaaacaaatcactaaactgtgataagaaaataatgaacaaacatgtaaaacctgtgggaaaaaaaaataaaggaagtatgtacacttactttggagaaaacaaatactgaaacatgcttgctttttaactgacgtaaattcagtagaggacaacacaattcttttttctaaccatcttagggaacaatacattgcaataattgatataaatgccatcactgtaataaactttagagacttttttttataaaagttgttggtcatcttcttgtttgctgtaaccttcactatgtcacatgagtcgattcaccgattgcatttgtctcacaaccaggaagaaaagcaaaaggaagaaaacgtttaggttcaatcatcagtctgcggtgtagactcgaaagagatgacaggtcactcatgttaatggtattatttataatctcattctgtgtacaacattgtggtttttgtacccaccaaaaagaataaaacagcagatgttcttacaatatctacagagcttaaaagttttttcttatcgttataaaagttatttgagaaattataagactataagagagattgtattagtggtgggccatagtggaaaatgtagctagccctcattattttttgcatactaagctacccctccttttcagatctttgactcattaacagattaaactgtcaaagatggagtctttgagttggggaatgaatcactgtcctaacaacaacataccttgtaattgtgtgttgaaattttacttgactgtattttgctgcataaaattatgtgtctcttgggcttcttcccttattcctattgttccctttaaatcatatgaaggcattcataatagcttggggtagataacaaatgaagaattagtctttgttttcaactggaaattgtaaagaaaattatactcatgtttatttataaaaatcaccttatgtatgaattaaactaacatggttcaaaagaaggtttggttcatttgaaataataaataagtactctaatacagataaaaatcatgtacttagggtattggcagaaagcacaagttaggatgatttcagaagtctggccttgaaggatgagttgagttttaacaggaggagaaggtgttaagagccatatgagtgagcagtggcccaaagccatgcacatcagtggctcatttaaggaatgaatgccattagatgggctactgagagtacagggatattatggaagataaagttggaaaagctgaaggattgattttcttccatcaactctcaagatcccattcgccattcaatctctgtgctgcagtaagagcaatcttaaacagtataaatcacacacacacacacacacacacacacacacacacacaagtccctcaggaaaaattccaagctcttgagaagatcacatgagccccttcatgacctggcgcttgcttatttcttccaggacttctctcacttctatccagctattcccgtcagcaaatgaacctccaaagcagcacatggagcactgcatagactatttcctcagtgcgtaactcctccctgtctcctctttacctgagtaacttgtactcatccttcaatactccaactgaattttacttaccctgaaaagatttccatggctatccaccacccccctgcctgtgagactgagttaggtgccctttttcatgtctttcccccatcacggcacttaccatactgcgttgtaattgcctgtgtactcgtctgtataactactagactgtaagctccttgagggcagggactgtgtctatcttgttcacagttgtatccccagcacccagcacagtgcctggcatattgtaggtgcttaataaatatttgttgaatgaatg

SEQ ID NO: 34794 - DNA, 2822 bp, Artificial Sequence
  derived and/or modified sequence
atgaggattatttccagacagattgtcttgttattttctggattttggggactcgccatgggagcctttccgagcagcgtgcaaataggtggtctcttcatccgaaacacagatcaggaatacactgcttttcgattagcaatttttcttcataacaccagccccaatgcgtcggaagctccttttaatttggtacctcatgtggacaacattgagacagccaacagttttgctgtaacaaacgccttctgttcccagtattctagaggagtatttgccatttttggactctatgataagaggtcggtacataccttgacctcattctgcagcgccttacatatctccctcatcacaccaagtttccctactgagggggagagccagtttgtgctgcaactaagaccttcgttacgaggagcactcttgagtttgctggatcactacgaatggaactgttttgtcttcctgtatgacacagacaggggatactcgatactccaagctattatggaaaaagcaggacaaaatggttggcatgtcagcgctatatgtgtggaaaattttaatgatgtcagctataggcaacttctagaagaacttgacagaagacaagagaagaagtttgtaatagactgtgagatagagagacttcaaaacatattagaacagattgtaagtgttggaaagcatgttaaaggctaccattatatcattgcaaacttgggattcaaggatatttctcttgagaggtttatacatggtggagccaatgttactggattccagttggtggattttaatacacctatggtaatcaaactaatggatcgctggaagaaactagatcagagagagtatccaggatctgagactcctccaaagtacacctctgctctgacttatgatggagtccttgtgatggctgaaactttccgaagtcttaggaggcagaaaattgatatctcaaggagaggaaatgctggggattgtctggcaaatcctgctgctccatggggccagggaattgacatggagaggacactcaaacaggttcgaattcaagggctgacagggaatgttcagtttgaccactatggacgtagagtcaattacacaatggatgtgtttgagctgaaaagcacaggacctagaaaggttggttactggaatgatatggataagttagtcttgattcaagatgtaccaactcttggcaatgacacagctgctattgagaacagaacagtggttgtaaccacaattatggaatccccatatgttatgtacaagaaaaatcatgaaatgtttgaaggaaatgacaagtatgaaggatactgtgtagatttggcatctgaaattgcaaaacatattggtatcaagtataaaattgccattgtccctgatggaaaatatggagcaagggatgcagacacaaaaatctggaatgggatggtaggagaacttgtttatgggaaagcagagattgctattgcccctctgacaatcactttggtacgagaggaggtcattgacttttctaagcccttcatgagtttgggcatatctatcatgatcaaaaagcctcagaaatccaaaccaggagtgttttccttcttggatcctctggcctatgagatttggatgtgcatagtctttgcctacattggtgtcagcgtggtcttattcctagttagtagatttagtccatatgagtggcacacagaagagccagaggacggaaaggaaggacccagcgaccagcctcccaatgagtttggcatctttaacagcctctggttttccctgggtgcttttatgcagcaaggatgtgacatttcacccagatccctctcaggtcgaattgttggaggtgtttggtggttctttacactcatcattatatcatcttatactgctaacctcgctgctttcctgacggttgagcgaatggtctctcccatagaaagtgcagaagacctggccaaacaaacagaaattgcctatggaacactggattcaggatcaacaaaagaattcttcagaagatcaaaaatagcagtgtatgaaaagatgtggacctacatgcgatcagcagagccatcagtattcactaggactacagctgagggagtagctcgtgtccgcaaatccaagggcaaatttgcctttctcctggagtccactatgaatgaatacattgagcagcgaaagccatgtgacacgatgaaagtgggaggaaatctggattccaaaggctatggagtagcaacgcccaagggttcctcattaagaaatgctgttaacctcgcagttttaaaactgaatgaacaaggcctcttggacaaattgaaaaacaaatggtggtacgacaaaggagaatgtggcagcgggggaggtgactccaaggacaagacgagtgccttgagcctgagcaatgtagcaggcgtcttctacattctggttggcggcttgggcttggcaatgctggtggctttgatagagttctgttacaagtccagggcagaagcgaagagaatgaaggtggcaaagagtgcacagacttttaacccaacttcctcgcagaatacccagaatttagcaacctatagagaaggttacaacgtatatggaaccgaaagtattaaaatttagggctgaccttttctgaagccataagaaacaaagccagattatccatcactgggagtgtgggagagaatggccgcgtcttgacgcctgactgcccaaaggctgtacacactggaactgcaatcagacaaagttcaggattggctgtcattgcatcggacctaccataa

SEQ ID NO: 34795 - DNA, 2655 bp, Artificial Sequence
  derived and/or modified sequence
atgaggatcatcagccggcagatcgtgctgctcttcagcggcttctggggcctggccatgggcgccttccccagctctgtgcagattggaggcctcttcatccggaacacagaccaggagtacacagccttccggctggccatcttcctgcacaacaccagccccaatgccagcgaggcccccttcaacctggtgccccacgtggacaacattgaaacagccaacagctttgctgtgaccaatgccttctgcagccagtacagccggggcgtgtttgccatcttcggcctgtatgacaagaggtctgtgcacaccctgaccagcttctgcagcgccctgcacatcagcctcatcacccccagcttccccacagaaggagagagccagtttgtgctgcagctgcggcccagcctgcggggggccctgctgagcctgctggaccactatgagtggaactgctttgtgttcctgtatgacacagaccggggctacagcatcctgcaggccatcatggagaaggccggccagaatggctggcacgtgtctgccatctgtgtggagaacttcaatgatgtgtcctaccggcagctgctggaggagctggaccggcggcaggagaagaagtttgtgattgactgtgaaattgagcggctgcagaacatcctggagcagatcgtgtctgtgggcaagcacgtgaagggctaccactacatcatcgccaacctgggcttcaaggacatcagcctggagcgcttcatccacggcggggccaacgtgacaggcttccagctggtggacttcaacacccccatggtgatcaagctgatggaccgctggaagaagctggaccagcgggagtacccaggcagcgagaccccacccaagtacaccagcgccctgacctatgatggagtgctggtgatggccgagaccttccgcagcctgcggcggcagaagattgacatcagcagaagaggaaatgctggggactgcctggccaacccagctgccccctggggccagggcatcgacatggagaggaccctgaagcaggtgcgcatccagggcctgactggaaatgtgcagtttgaccactacggccggcgggtgaactacaccatggatgtgtttgagctgaagagcacaggccccaggaaggtgggctactggaatgacatggacaagctggtgctgatccaggatgtgcccaccctgggcaatgacacagctgccattgaaaatagaacagtggtggtgaccaccatcatggagagcccctacgtgatgtacaagaagaaccacgagatgtttgagggcaatgacaagtatgagggctactgtgtggacctggccagcgagatcgccaagcacatcggcatcaagtacaagatcgccatcgtgcctgatggcaagtacggggccagagatgctgacaccaagatctggaatggcatggtgggggagctggtgtatggcaaggccgagatcgccatcgcccccctgaccatcaccctggtgcgggaggaggtgattgacttcagcaagcccttcatgagcctgggcatcagcatcatgatcaagaagccccagaagagcaagccaggagtcttctccttcctggaccccctggcctatgagatctggatgtgcatcgtgtttgcctacatcggcgtgtctgtggtgctcttcctggtgagccgcttcagcccctatgagtggcacacagaggagccagaagatggcaaggagggccccagcgaccagcccccaaatgaatttggcatcttcaacagcctgtggttcagcctgggcgccttcatgcagcagggctgtgacatcagccccaggagcctgagcggccgcatcgtgggcggcgtgtggtggttcttcaccctcatcatcatcagcagctacacagccaacctggccgccttcctgactgtggagaggatggtgagccccattgaatctgctgaggacctggccaagcagacagaaattgcctacggcaccctggacagcggcagcaccaaggagttcttccgccgcagcaagattgctgtgtatgagaagatgtggacctacatgaggtctgctgagcccagcgtcttcaccaggaccacagctgagggcgtggcccgggtgaggaagagcaagggcaagtttgccttcctgctggagagcaccatgaatgagtacatcgagcagaggaagccctgtgacaccatgaaggtgggcggcaacctggacagcaagggctacggcgtggccacccccaagggcagcagcctgagaaatgctgtgaacctggccgtgctgaagctgaatgagcagggcctgctggacaagctgaagaacaagtggtggtatgacaagggggagtgtggcagcggcggcggggacagcaaggacaagaccagcgccctgagcctgagcaatgtggccggggtcttctacatcctggtgggcggcctgggcctggccatgctggtggccctgattgagttctgctacaagagcagagctgaggccaagaggatgaaggtggccaagagcgcccagaccttcaaccccaccagcagccagaacacccagaacctggccacctaccgggagggctacaacgtgtatggaacagagagcatcaagatctag

SEQ ID NO: 34796 - DNA, 2655 bp, Artificial Sequence
  derived and/or modified sequence
atgcggatcatcagccggcagatcgtgctgctgttcagcggcttctggggcctcgccatgggggcatttccctcctctgtgcagatcggcggcctgtttattcgcaatactgaccaggaatacaccgcatttcggctggcaatctttctccataatacaagtcctaacgcgtccgaggcccccttcaacttggtgccccacgtcgataacattgaaaccgctaactctttcgccgtcactaatgctttttgttctcagtactctcgcggcgtatttgcaatatttggcctctacgacaaaaggtcagtccacacacttacctctttctgcagcgctcttcacatcagcctgattacaccgtcctttcctaccgagggtgaatcccagtttgtgcttcagctgaggccttccctcaggggagctttgctttcactgttggaccactatgaatggaattgctttgtattcctctacgataccgacagaggttactccatcctacaggccatcatggagaaggcaggacagaacggatggcatgtcagtgccatctgcgttgaaaactttaatgatgttagctacagacagctgcttgaagaactggatcgacgacaggaaaagaagtttgttatcgattgtgagattgaacgccttcagaacatccttgaacagatcgtctctgtggggaagcatgtgaaaggctaccactatatcattgctaatctcggatttaaggacatcagcctggagcgatttattcatgggggcgccaatgttaccggcttccaactcgtggattttaacacaccgatggtcatcaagctgatggatcgatggaaaaagcttgaccagcgtgagtatccggggagcgagacccctcccaagtatacctctgcgcttacatatgacggtgtcctcgttatggccgaaacatttcggtctcttcggcgccagaagattgatatcagtcgaaggggaaacgctggagattgcctggctaatccagctgctccttggggtcagggcattgacatggagaggactttgaagcaggtgcggatacagggcctcacaggcaacgtccagttcgatcattacggtcgccgggtcaactatacaatggatgtctttgaattgaagagcacaggacctagaaaggtgggttactggaacgatatggacaagctggtgctgattcaggacgtccctacccttggcaacgataccgccgctatcgaaaacagaaccgtcgtggtaaccactatcatggaaagcccatatgtcatgtataaaaagaatcatgagatgttcgagggcaacgataagtatgagggctactgtgtcgacctggctagcgagatcgctaagcacattggtatcaagtacaagatcgccatagtccccgacggcaaatacggcgcgcgcgatgccgacaccaagatctggaatggtatggtgggcgagctggtatacggcaaggctgaaatcgctatagcacccttaaccataacactggtgagggaagaggtaatcgatttttcaaagcctttcatgtctctggggatcagtataatgattaagaagccgcagaagtctaaaccaggcgtattcagctttttggaccctctcgcatatgaaatctggatgtgtattgtctttgcatacatcggggtaagcgttgtcctttttttggtgtccaggttctctccttacgagtggcacacagaagagccagaggacggcaaggagggaccctctgatcagccacctaacgagttcggtatcttcaatagcctgtggttcagcttgggcgccttcatgcagcagggatgtgatatcagtcccaggagcctgtcagggcgaatcgtggggggagtgtggtggttttttaccctgattattattagttcgtacacagctaatttagctgcatttctaacagtagagcgaatggtctcccccatcgaaagtgccgaggacctggcgaagcagactgagattgcctacggaacactggactccggcagtacgaaagagttctttcgcaggagcaaaattgccgtgtatgaaaagatgtggacctacatgcgcagtgccgaaccctctgtttttaccagaacgaccgccgaaggcgtagccagggtacgcaaatccaaaggcaaatttgcctttctgctggaaagcactatgaatgagtacattgagcaacggaaaccttgcgacacgatgaaagtagggggcaatctggatagcaagggctatggagtcgctaccccgaaaggctcaagcctgagaaatgctgtcaatctcgcggtgttgaagctgaacgagcaagggcttttggataagctgaaaaacaaatggtggtacgacaagggtgaatgtgggtccgggggcggggactccaaggataagacctctgcactgtcactctctaatgttgcaggcgtgttttacattcttgtgggcgggcttggcctggccatgctggttgccttaattgagttctgctataaaagccgagcagaggccaagagaatgaaggtggccaagagcgctcaaacattcaatcctaccagcagtcaaaacacacagaacctggcaacatatcgcgaaggctacaatgtctacggcactgaatctatcaaaatttag

SEQ ID NO: 34797 - DNA, 2655 bp, Artificial Sequence
  derived and/or modified sequence
atgcggatcatcagccggcagatcgtgctgctgttcagcggcttctggggtctggcaatgggcgccttcccttcatctgtgcagatcggaggactgttcatacgcaacacagaccaggagtacacagccttcaggctcgctatcttcctacataacacctctccaaacgcgagcgaagctccttttaatttagtgccgcacgtcgacaacattgagacagcgaactccttcgctgtaaccaatgccttttgcagccaatactcccgaggcgtcttcgcaatcttcggcctgtacgacaaacggtccgtccacaccctcactagtttctgtagtgctttgcacatttcattaatcacaccctcttttccgacagagggcgagtcccagttcgtactccagttgcgcccgtcactacggggtgcgctgctgtctctgctggaccactatgagtggaattgctttgtctttctgtacgatacagaccgggggtactctatccttcaagctatcatggagaaagcgggccagaatggatggcatgtctcggccatttgtgtggagaactttaatgatgtgagctacagacaactattagaagaattggatcgccgtcaggagaaaaagtttgtgatcgactgcgagatcgagcgcctgcaaaatatactggagcagatcgtttccgttggcaaacacgtgaaaggctatcactacataatcgccaatctagggttcaaagatataagtctggaacggtttattcacgggggggctaatgtaactggatttcaactcgtggactttaacactcccatggtcattaagctgatggaccggtggaagaaactagatcagcgggagtatcctggctctgaaacaccccctaagtatacgtcagcgctgacctacgacggggttttggtcatggccgaaaccttcagatcattgagacgacagaaaattgacatttctcggcgcggaaatgcgggcgactgtctggcgaacccagctgccccatggggacaggggattgacatggagaggactctgaagcaggtgagaatccagggactgaccggtaacgtgcaattcgatcattacggaaggcgagtgaactatactatggacgtcttcgagctcaaatctacgggccctcgcaaagtcggctattggaatgacatggacaagcttgtgcttatccaagacgtcccaactcttgggaatgatacggccgcaatcgaaaacaggactgtggtcgtgacaaccattatggaatcaccctatgtgatgtataagaagaatcacgaaatgttcgaagggaacgacaagtatgaggggtactgcgtcgatctggcgtctgagatcgccaagcacatcggaatcaaatataagattgcgattgtcccagatggcaaatacggagcacgcgatgctgacaccaagatctggaatggcatggtgggtgagctcgtgtacggcaaggcggaaatagccatcgcgcctctcactataaccctggtgcgcgaagaggtgatcgatttttcaaagccattcatgagcctcgggatcagcataatgatcaagaagcctcagaaatctaagcctggggttttttccttcctggatccactcgcttacgagatatggatgtgcatcgtattcgcgtacattggggtttctgtggtactgttcctggtaagtcgcttttcaccatacgagtggcacaccgaggaaccggaggacggaaaagagggccctagcgatcagccgcccaatgaatttggcattttcaactcactgtggttctcactcggcgctttcatgcagcaagggtgcgacattagcccgagaagccttagtggtagaattgttggcggggtgtggtggttctttactttgatcatcatttccagctacacagctaacttagcagcctttttgaccgtggagaggatggtatctccaattgagagcgccgaggacctcgccaagcagacagagatcgcttatgggacactggactctggcagcacgaaggagttttttaggaggtcgaaaatcgctgtgtatgaaaaaatgtggacctatatgagaagtgcagagccatctgtctttacaagaactaccgccgagggggtggctcgggtccgcaagagcaaaggcaaatttgcgtttctcctggagagtactatgaacgaatacatcgagcagcggaagccttgcgatactatgaaagtcggcggaaatctggattctaagggttacggcgttgctacgcccaagggttcaagcctgagaaacgccgttaatctggccgtgctaaagttaaatgagcaaggccttctggataaactgaagaataaatggtggtatgataaaggcgaatgtggatcaggcggtggtgactccaaggataagacttctgcattatccctctctaacgtggccggcgtcttctatattctagttggaggcctcggcctcgctatgctcgtggctttgatagaattttgctataagagccgcgctgaagccaaaagaatgaaggttgcgaagtcagcccagacttttaatccgacatctagccaaaacactcagaatctggcgacatacagagaaggatacaacgtttacgggactgagtctatcaagatctag

SEQ ID NO: 34798 - DNA, 2655 bp, Artificial Sequence
  derived and/or modified sequence
atgcgcattatctcgcgtcagatcgtgctgttatttagcggcttctggggcctggctatgggagccttcccctcaagcgtgcagatcggaggattgtttattagaaacactgaccaggagtacacagcctttaggctcgcaatcttcttgcataacacatcgcccaacgcgagcgaagcacccttcaacctggtgcctcacgtagataatatagagaccgccaattcgttcgcggtgaccaatgcattctgttcccagtactctagaggagtgttcgccatctttggactctatgataagcgttcagtacacacactgaccagtttctgtagtgctttgcacatttccctcattactcctagcttccccacggagggagagagtcagttcgtcttgcagttgcgaccaagcttgcggggagccctgctgtccctgcttgaccattatgaatggaactgttttgtgttcctgtatgataccgacagaggatattccatactgcaagccatcatggagaaggccggtcagaatggatggcacgtgagtgccatttgcgttgaaaacttcaatgatgtttcttatcggcaactgctggaggagcttgacagacgacaagagaagaaattcgttatagactgtgagatagagagactgcagaacatcctcgagcagatcgtgtccgtcggaaagcatgttaagggctatcactatatcatagcaaacctgggctttaaagacatcagcctggaaaggtttatccacggcggtgccaatgtgacagggtttcagctagtggatttcaacacacctatggtcattaagctgatggaccggtggaagaagctcgatcagcgtgagtacccaggctccgaaacaccacccaaatacacttcggccttgacatacgacggcgttctggtgatggccgaaacctttcggtcactgaggagacagaaaatcgatatctcaagacgcggaaatgccggagactgtttggccaatcccgctgctccctggggccagggcatcgatatggagaggacactgaagcaggtgaggattcaggggctcactggaaatgtgcagttcgaccactatgggagaagggtaaattacactatggacgtattcgagttaaaatctaccggcccacgcaaagtggggtactggaacgacatggataagcttgtgctgatccaggatgtgccaacattgggaaatgacaccgcagccattgaaaatcggaccgtagtggtcaccactattatggaatcaccatacgtcatgtacaagaaaaatcacgaaatgttcgagggcaatgacaagtatgaaggttactgtgtagatttggcatccgagatcgcgaagcacattgggatcaaatataagattgctatcgttcccgatggaaaatacggcgctcgcgatgccgataccaagatttggaacgggatggtcggagaattggtctacggcaaagctgagattgcaatagcccctctgacgatcacattggtgcgtgaggaagtcattgactttagtaaaccgttcatgtctctggggatatctatcatgattaaaaagccacagaaaagtaagccaggtgtattctcatttttagaccctctagcttatgagatttggatgtgcatcgtcttcgcttacatcggagtgtcagtagttctgttcctggtcagcagatttagtccgtatgaatggcatacagaggagccagaggatggcaaagaaggcccatctgatcagccccctaacgaattcggcattttcaattccctgtggttctccctgggagcttttatgcagcagggatgcgatatttcccccagaagcctcagtggacggatcgtcggcggagtctggtggttcttcaccctcattattatcagttcatatacggcaaacctggccgctttcctaactgtggaacgtatggtgtcaccaattgagtccgcagaagatctcgcgaagcagaccgagatcgcatacggaaccctcgacagcggctctacaaaagagttttttcggagaagcaagatcgccgtatatgagaagatgtggacctatatgagatctgctgaaccatcggtgttcaccagaactactgcagaaggcgtggcgcgagtgcggaagtccaagggaaaatttgcatttctgttggaatccaccatgaacgagtatattgaacagagaaagccgtgcgataccatgaaggtcggcggtaatttggacagcaaagggtatggagtggccacacctaaaggaagcagcctccggaacgctgtgaacctagctgtgctcaagctcaatgaacaaggcttacttgataaacttaaaaacaaatggtggtatgataagggcgaatgtggaagtggaggtggtgattccaaagacaaaacatccgccctgtccctgagcaacgtggccggagtcttttacatcctggtaggcggactggggttggctatgctggtggccctgatcgaattctgctataaatctcgggctgaggccaaacgcatgaaagtcgcaaagtccgcccagacgttcaatccgactagctcacagaatacccagaacctggcgacctacagggaagggtacaacgtctacggaaccgagtccattaagatctag

SEQ ID NO: 34799 - DNA, 2655 bp, Artificial Sequence
  derived and/or modified sequence
atgaggattattagccgtcaaatagttttgttattttcagggttctggggtctggccatgggcgcatttccctcatcagtgcagattggcggtctttttatccgaaacaccgatcaggaatatacggcatttagactcgcaattttcttacataatacatcacccaacgcgagcgaggctccctttaatctcgtgccccacgtggacaacattgagacagcaaatagctttgcagttaccaatgctttttgtagccagtattcccgcggtgtgtttgcaatctttggattgtacgataaacgctccgtgcacacgctcacctctttctgctctgcactccacatctctcttattaccccttcgttcccgaccgagggggagtcccaattcgtgttgcagttaagaccctctctaaggggggcactcttatctctgctggaccattatgagtggaattgcttcgttttcctgtacgataccgatcggggatactctatccttcaagccatcatggaaaaagctggccagaatggatggcacgtcagcgccatttgcgtagagaattttaatgatgtcagttacagacagctgcttgaagaactggataggaggcaggaaaaaaaatttgtaattgattgcgagatagagagattgcagaacatcctggaacagatagtcagcgtgggaaagcacgtgaaaggctaccactatattatcgcaaaccttgggtttaaagacatctctctcgaaaggttcattcacggaggagcaaatgtgacaggattccagctcgtggatttcaacactccaatggtaattaaactgatggacagatggaagaagctcgatcagcgcgagtatccgggttcagaaacgccacctaagtatacctctgctctgacctacgatggcgtactcgtgatggctgagacttttcggagcttgagaaggcagaagattgacatcagcaggcgtgggaatgcaggagactgcctggctaatccagctgccccttggggccagggcattgatatggaacgcacactcaagcaagtgcggatccaggggcttaccggcaacgtccaatttgaccactatggaaggcgggttaactatacgatggatgtttttgagctgaagtccactggtcctcgcaaggtcggctactggaatgatatggacaagctagtgctcatacaggacgttcccacactggggaatgatactgcagcaatcgagaaccgaacagtggtagtgaccactatcatggaatctccttacgttatgtataaaaagaatcacgagatgttcgaagggaacgacaagtacgaggggtactgcgtggacctcgcgtcagaaattgccaagcatatcggaatcaagtataagatagcgattgtgccggatggaaagtacggcgcacgggacgccgataccaagatatggaatgggatggtgggcgagttagtctacggaaaagcagagattgcaatcgctcccctcacgatcaccctggtcagagaggaagtaatcgacttttcaaagccatttatgtccctcggtatttccattatgattaagaagccacaaaaaagtaaacccggagtgttcagcttccttgatccactggcttatgagatatggatgtgtatagtgttcgcatacattggggtgtcagtggtgctgtttctggtgtcccgattcagcccatacgagtggcacacagaagagccggaagacggaaaggaaggcccttctgaccagcctcccaacgagttcgggattttcaatagtttatggttctccctgggggcttttatgcaacaggggtgcgatatatcaccccgttctctgagcggcaggatcgttggcggagtgtggtggttttttacacttatcatcatctctagctatacagctaatctcgctgccttcttaaccgtggaacgaatggtgagtccaatcgagtccgcagaggatctggcgaagcagacagagatcgcttatggcaccttagattccggaagcaccaaggaattcttcaggcgaagtaagatagccgtgtacgaaaaaatgtggacttacatgagatctgctgagccctctgtctttacacgaacaaccgcagaaggcgtggcgagggtacggaaatcgaagggtaagttcgctttcttgcttgagagtaccatgaacgagtacattgaacagcgcaagccctgcgatactatgaaggtgggcggaaatctcgatagtaaaggttacggcgtcgcaactccaaaagggtcaagccttaggaacgcggtgaatctggccgtgttgaagctgaacgagcaaggcctgttggacaaactaaagaacaaatggtggtatgacaagggcgagtgtgggagcggaggcggtgattctaaggataagacttcagccctttctctgtctaatgtggccggagtcttttacatcctggtgggcggtctcggcctggcaatgctcgtggcgttgatagagttctgttacaagtcacgggctgaagccaaacggatgaaagttgcaaaaagcgctcagacctttaatcctactagctctcagaatacccagaacttggctacataccgcgagggctataatgtgtatgggacagagtcaattaagatttag

SEQ ID NO: 34800 - DNA, 2655 bp, Artificial Sequence
  derived and/or modified sequence
atgagaatcatcagcagacagatcgtgctgctgttcagcggcttctggggcctggccatgggcgccttccccagcagcgtgcagatcggcggcctgttcatcagaaacaccgaccaggagtacaccgccttcagactggccatcttcctgcacaacaccagccccaacgccagcgaggcccccttcaacctggtgccccacgtggacaacatcgagaccgccaacagcttcgccgtgaccaacgccttctgcagccagtacagcagaggcgtgttcgccatcttcggcctgtacgacaagagaagcgtgcacaccctgaccagcttctgcagcgccctgcacatcagcctgatcacccccagcttccccaccgagggcgagagccagttcgtgctgcagctgagacccagcctgagaggcgccctgctgagcctgctggaccactacgagtggaactgcttcgtgttcctgtacgacaccgacagaggctacagcatcctgcaggccatcatggagaaggccggccagaacggctggcacgtgagcgccatctgcgtggagaacttcaacgacgtgagctacagacagctgctggaggagctggacagaagacaggagaagaagttcgtgatcgactgcgagatcgagagactgcagaacatcctggagcagatcgtgagcgtgggcaagcacgtgaagggctaccactacatcatcgccaacctgggcttcaaggacatcagcctggagagattcatccacggcggcgccaacgtgaccggcttccagctggtggacttcaacacccccatggtgatcaagctgatggacagatggaagaagctggaccagagagagtaccccggcagcgagaccccccccaagtacaccagcgccctgacctacgacggcgtgctggtgatggccgagaccttcagaagcctgagaagacagaagatcgacatcagcagaagaggcaacgccggcgactgcctggccaaccccgccgccccctggggccagggcatcgacatggagagaaccctgaagcaggtgagaatccagggcctgaccggcaacgtgcagttcgaccactacggcagaagagtgaactacaccatggacgtgttcgagctgaagagcaccggccccagaaaggtgggctactggaacgacatggacaagctggtgctgatccaggacgtgcccaccctgggcaacgacaccgccgccatcgagaacagaaccgtggtggtgaccaccatcatggagagcccctacgtgatgtacaagaagaaccacgagatgttcgagggcaacgacaagtacgagggctactgcgtggacctggccagcgagatcgccaagcacatcggcatcaagtacaagatcgccatcgtgcccgacggcaagtacggcgccagagacgccgacaccaagatctggaacggcatggtgggcgagctggtgtacggcaaggccgagatcgccatcgcccccctgaccatcaccctggtgagagaggaggtgatcgacttcagcaagcccttcatgagcctgggcatcagcatcatgatcaagaagccccagaagagcaagcccggcgtgttcagcttcctggaccccctggcctacgagatctggatgtgcatcgtgttcgcctacatcggcgtgagcgtggtgctgttcctggtgagcagattcagcccctacgagtggcacaccgaggagcccgaggacggcaaggagggccccagcgaccagccccccaacgagttcggcatcttcaacagcctgtggttcagcctgggcgccttcatgcagcagggctgcgacatcagccccagaagcctgagcggcagaatcgtgggcggcgtgtggtggttcttcaccctgatcatcatcagcagctacaccgccaacctggccgccttcctgaccgtggagagaatggtgagccccatcgagagcgccgaggacctggccaagcagaccgagatcgcctacggcaccctggacagcggcagcaccaaggagttcttcagaagaagcaagatcgccgtgtacgagaagatgtggacctacatgagaagcgccgagcccagcgtgttcaccagaaccaccgccgagggcgtggccagagtgagaaagagcaagggcaagttcgccttcctgctggagagcaccatgaacgagtacatcgagcagagaaagccctgcgacaccatgaaggtgggcggcaacctggacagcaagggctacggcgtggccacccccaagggcagcagcctgagaaacgccgtgaacctggccgtgctgaagctgaacgagcagggcctgctggacaagctgaagaacaagtggtggtacgacaagggcgagtgcggcagcggcggcggcgacagcaaggacaagaccagcgccctgagcctgagcaacgtggccggcgtgttctacatcctggtgggcggcctgggcctggccatgctggtggccctgatcgagttctgctacaagagcagagccgaggccaagagaatgaaggtggccaagagcgcccagaccttcaaccccaccagcagccagaacacccagaacctggccacctacagagagggctacaacgtgtacggcaccgagagcatcaagatctag

SEQ ID NO: 34801 - protein, 2459 aa, Artificial Sequence
  derived and/or modified sequence
MSGSTQPVAQTWRATEPRYPPHSLSYPVQIARTHTDVGLLEYQHHSRDYASHLSPGSIIQPQRRRPSLLSEFQPGNERSQELHLRPESHSYLPELGKSEMEFIESKRPRLELLPDPLLRPSPLLATGQPAGSEDLTKDRSLTGKLEPVSPPSPPHTDPELELVPPRLSKEELIQNMDRVDREITMVEQQISKLKKKQQQLEEEAAKPPEPEKPVSPPPIESKHRSLVQIIYDENRKKAEAAHRILEGLGPQVELPLYNQPSDTRQYHENIKINQAMRKKLILYFKRRNHARKQWEQKFCQRYDQLMEAWEKKVERIENNPRRRAKESKVREYYEKQFPEIRKQRELQERMQSRVGQRGSGLSMSAARSEHEVSEIIDGLSEQENLEKQMRQLAVIPPMLYDADQQRIKFINMNGLMADPMKVYKDRQVMNMWSEQEKETFREKFMQHPKNFGLIASFLERKTVAECVLYYYLTKKNENYKSLVRRSYRRRGKSQQQQQQQQQQQQQQQQQPMPRSSQEEKDEKEKEKEAEKEEEKPEVENDKEDLLKEKTDDTSGEDNDEKEAVASKGRKTANSQGRRKGRITRSMANEANSEEAITPQQSAELASMELNESSRWTEEEMETAKKGLLEHGRNWSAIARMVGSKTVSQCKNFYFNYKKRQNLDEILQQHKLKMEKERNARRKKKKAPAAASEEAAFPPVVEDEEMEASGVSGNEEEMVEEAEATVNNSSDTESIPSPHTEAAKDTGQNGPKPPATLGADGPPPGPPTPPPEDIPAPTEPTPASEATGAPTPPPAPPSPSAPPPVVPKEEKEEETAAAPPVEEGEEQKPPAAEELAVDTGKAEEPVKSECTEEAEEGPAKGKDAEAAEATAEGALKAEKKEGGSGRATTAKSSGAPQDSDSSATCSADEVDEAEGGDKNRLLSPRPSLLTPTGDPRANASPQKPLDLKQLKQRAAAIPPIQVTKVHEPPREDAAPTKPAPPAPPPPQNLQPESDAPQQPGSSPRGKSRSPAPPADKEAEKPVFFPAFAAEAQKLPGDPPCWTSGLPFPVPPREVIKASPHAPDPSAFSYAPPGHPLPLGLHDTARPVLPRPPTISNPPPLISSAKHPSVLERQIGAISQGMSVQLHVPYSEHAKAPVGPVTMGLPLPMDPKKLAPFSGVKQEQLSPRGQAGPPESLGVPTAQEASVLRGTALGSVPGGSITKGIPSTRVPSDSAITYRGSITHGTPADVLYKGTITRIIGEDSPSRLDRGREDSLPKGHVIYEGKKGHVLSYEGGMSVTQCSKEDGRSSSGPPHETAAPKRTYDMMEGRVGRAISSASIEGLMGRAIPPERHSPHHLKEQHHIRGSITQGIPRSYVEAQEDYLRREAKLLKREGTPPPPPPSRDLTEAYKTQALGPLKLKPAHEGLVATVKEAGRSIHEIPREELRHTPELPLAPRPLKEGSITQGTPLKYDTGASTTGSKKHDVRSLIGSPGRTFPPVHPLDVMADARALERACYEESLKSRPGTASSSGGSIARGAPVIVPELGKPRQSPLTYEDHGAPFAGHLPRGSPVTTREPTPRLQEGSLSSSKASQDRKLTSTPREIAKSPHSTVPEHHPHPISPYEHLLRGVSGVDLYRSHIPLAFDPTSIPRGIPLDAAAAYYLPRHLAPNPTYPHLYPPYLIRGYPDTAALENRQTIINDYITSQQMHHNAATAMAQRADMLRGLSPRESSLALNYAAGPRGIIDLSQVPHLPVLVPPTPGTPATAMDRLAYLPTAPQPFSSRHSSSPLSPGGPTHLTKPTTTSSSERERDRDRERDRDREREKSILTSTTTVEHAPIWRPGTEQSSGSSGGGGGSSSRPASHSHAHQHSPISPRTQDALQQRPSVLHNTGMKGIITAVEPSTPTVLRSTSTSSPVRPAATFPPATHCPLGGTLDGVYPTLMEPVLLPKEAPRVARPERPRADTGHAFLAKPPARSGLEPASSPSKGSEPRPLVPPVSGHATIARTPAKNLAPHHASPDPPAPPASASDPHREKTQSKPFSIQELELRSLGYHGSSYSPEGVEPVSPVSSPSLTHDKGLPKHLEELDKSHLEGELRPKQPGPVKLGGEAAHLPHLRPLPESQPSSSPLLQTAPGVKGHQRVVTLAQHISEVITQDYTRHHPQQLSAPLPAPLYSFPGASCPVLDLRRPPSDLYLPPPDHGAPARGSPHSEGGKRSPEPNKTSVLGGGEDGIEPVSPPEGMTEPGHSRSAVYPLLYRDGEQTEPSRMGSKSPGNTSQPPAFFSKLTESNSAMVKSKKQEINKKLNTHNRNEPEYNISQPGTEIFNMPAITGTGLMTYRSQAVQEHASTNMGLEAIIRKALMGGGGKAKVSGRPSSRKAKSPAPGLASGDRPPSVSSVHSEGDCNRRTPLTNRVWEDRPSSAGSTPFPYNPLIMRLQAGVMASPPPPGLPAGSGPLAGPHHAWDEEPKPLLCSQYETLSDSE

SEQ ID NO: 34802 - protein, 2458 aa, Artificial Sequence
  derived and/or modified sequence
MSGSTQPVAQTWRATEPRYPPHSLSYPVQIARTHTDVGLLEYQHHSRDYASHLSPGSIIQPQRRRPSLLSEFQPGNERSQELHLRPESHSYLPELGKSEMEFIESKRPRLELLPDPLLRPSPLLATGQPAGSEDLTKDRSLTGKLEPVSPPSPPHTDPELELVPPRLSKEELIQNMDRVDREITMVEQQISKLKKKQQQLEEEAAKPPEPEKPVSPPPIESKHRSLVQIIYDENRKKAEAAHRILEGLGPQVELPLYNQPSDTRQYHENIKINQAMRKKLILYFKRRNHARKQWEQKFCQRYDQLMEAWEKKVERIENNPRRRAKESKVREYYEKQFPEIRKQRELQERMQRVGQRGSGLSMSAARSEHEVSEIIDGLSEQENLEKQMRQLAVIPPMLYDADQQRIKFINMNGLMADPMKVYKDRQVMNMWSEQEKETFREKFMQHPKNFGLIASFLERKTVAECVLYYYLTKKNENYKSLVRRSYRRRGKSQQQQQQQQQQQQQQQQQPMPRSSQEEKDEKEKEKEAEKEEEKPEVENDKEDLLKEKTDDTSGEDNDEKEAVASKGRKTANSQGRRKGRITRSMANEANSEEAITPQQSAELASMELNESSRWTEEEMETAKKGLLEHGRNWSAIARMVGSKTVSQCKNFYFNYKKRQNLDEILQQHKLKMEKERNARRKKKKAPAAASEEAAFPPVVEDEEMEASGVSGNEEEMVEEAEATVNNSSDTESIPSPHTEAAKDTGQNGPKPPATLGADGPPPGPPTPPPEDIPAPTEPTPASEATGAPTPPPAPPSPSAPPPVVPKEEKEEETAAAPPVEEGEEQKPPAAEELAVDTGKAEEPVKSECTEEAEEGPAKGKDAEAAEATAEGALKAEKKEGGSGRATTAKSSGAPQDSDSSATCSADEVDEAEGGDKNRLLSPRPSLLTPTGDPRANASPQKPLDLKQLKQRAAAIPPIQVTKVHEPPREDAAPTKPAPPAPPPPQNLQPESDAPQQPGSSPRGKSRSPAPPADKEAEKPVFFPAFAAEAQKLPGDPPCWTSGLPFPVPPREVIKASPHAPDPSAFSYAPPGHPLPLGLHDTARPVLPRPPTISNPPPLISSAKHPSVLERQIGAISQGMSVQLHVPYSEHAKAPVGPVTMGLPLPMDPKKLAPFSGVKQEQLSPRGQAGPPESLGVPTAQEASVLRGTALGSVPGGSITKGIPSTRVPSDSAITYRGSITHGTPADVLYKGTITRIIGEDSPSRLDRGREDSLPKGHVIYEGKKGHVLSYEGGMSVTQCSKEDGRSSSGPPHETAAPKRTYDMMEGRVGRAISSASIEGLMGRAIPPERHSPHHLKEQHHIRGSITQGIPRSYVEAQEDYLRREAKLLKREGTPPPPPPSRDLTEAYKTQALGPLKLKPAHEGLVATVKEAGRSIHEIPREELRHTPELPLAPRPLKEGSITQGTPLKYDTGASTTGSKKHDVRSLIGSPGRTFPPVHPLDVMADARALERACYEESLKSRPGTASSSGGSIARGAPVIVPELGKPRQSPLTYEDHGAPFAGHLPRGSPVTTREPTPRLQEGSLSSSKASQDRKLTSTPREIAKSPHSTVPEHHPHPISPYEHLLRGVSGVDLYRSHIPLAFDPTSIPRGIPLDAAAAYYLPRHLAPNPTYPHLYPPYLIRGYPDTAALENRQTIINDYITSQQMHHNAATAMAQRADMLRGLSPRESSLALNYAAGPRGIIDLSQVPHLPVLVPPTPGTPATAMDRLAYLPTAPQPFSSRHSSSPLSPGGPTHLTKPTTTSSSERERDRDRERDRDREREKSILTSTTTVEHAPIWRPGTEQSSGSSGGGGGSSSRPASHSHAHQHSPISPRTQDALQQRPSVLHNTGMKGIITAVEPSTPTVLRSTSTSSPVRPAATFPPATHCPLGGTLDGVYPTLMEPVLLPKEAPRVARPERPRADTGHAFLAKPPARSGLEPASSPSKGSEPRPLVPPVSGHATIARTPAKNLAPHHASPDPPAPPASASDPHREKTQSKPFSIQELELRSLGYHGSSYSPEGVEPVSPVSSPSLTHDKGLPKHLEELDKSHLEGELRPKQPGPVKLGGEAAHLPHLRPLPESQPSSSPLLQTAPGVKGHQRVVTLAQHISEVITQDYTRHHPQQLSAPLPAPLYSFPGASCPVLDLRRPPSDLYLPPPDHGAPARGSPHSEGGKRSPEPNKTSVLGGGEDGIEPVSPPEGMTEPGHSRSAVYPLLYRDGEQTEPSRMGSKSPGNTSQPPAFFSKLTESNSAMVKSKKQEINKKLNTHNRNEPEYNISQPGTEIFNMPAITGTGLMTYRSQAVQEHASTNMGLEAIIRKALMGGGGKAKVSGRPSSRKAKSPAPGLASGDRPPSVSSVHSEGDCNRRTPLTNRVWEDRPSSAGSTPFPYNPLIMRLQAGVMASPPPPGLPAGSGPLAGPHHAWDEEPKPLLCSQYETLSDSE

SEQ ID NO: 34803 - DNA, 7380 bp, Artificial Sequence
  derived and/or modified sequence
atgagcggctccacacagcctgtggctcagacttggagggctacggaacccagataccctccccactccctttcatatcctgtgcagatcgctcggacccataccgatgtgggtctgctcgagtaccagcaccacagcagggactatgcaagccacttgagcccaggctctatcatacagccccagaggaggcgtccctccctcctgagtgaattccagcccgggaatgagcggtctcaggaattgcatctgaggccagaatcccacagctatcttccggaactcgggaaatccgagatggagtttattgagtccaagaggccccgtttagagctgctgccagaccctttgcttcgccccagtccccttctggccaccggccaacctgccgggagtgaagacttaacaaaagataggtcattaacaggcaagctggagcctgtgtcacctcccagccctccccacaccgatcccgagctggagctggtaccacctcggttgtccaaagaggaactaatccagaacatggatcgcgtggatcgggaaataacaatggttgagcaacaaatttccaagctgaagaagaaacaacagcagctggaggaggaagccgcgaagccacctgaacccgagaagccggtaagcccacccccaattgaaagtaaacatcgctccctggtgcagatcatttacgacgagaaccggaaaaaagcggaagccgctcataggatccttgaaggattaggcccccaggtcgagctcccactttataaccagcccagcgacacccgccaatatcacgagaatatcaagattaatcaggccatgcggaaaaagctcatcctgtactttaaaaggaggaatcatgcacgaaagcagtgggaacagaagttctgtcagcgctatgatcagctgatggaagcgtgggagaaaaaggtggaaaggatcgaaaataacccaaggagaagagccaaagaatcaaaggttagggaatactatgaaaaacagttcccagagattcggaaacagcgtgagctgcaggagagaatgcaatctcgggtggggcaacgcgggtctggtttgtctatgtctgctgccaggtctgaacacgaggtatcggagattatcgatgggttgtccgagcaggaaaacttagagaaacagatgcggcagctagctgtgattccaccaatgttatacgatgccgatcaacaacggatcaaattcattaacatgaacgggttaatggcagacccgatgaaagtgtacaaagatcgacaggtgatgaatatgtggtctgaacaggagaaagagacatttcgcgagaagtttatgcagcatccgaagaatttcggccttatagcaagctttctggagaggaagacagtggccgagtgcgtgttgtactattacttaacaaagaaaaacgagaactacaaaagcctggtacgcagatcctatcggcgccgcggaaaaagccagcaacaacagcagcagcagcagcagcagcagcagcagcagcagcagcagcctatgccacgctcctcacaagaggagaaggatgaaaaggaaaaggagaaggaggcagagaaagaagaggagaagccggaagttgagaacgataaagaggatttacttaaggaaaaaaccgatgatacgagcggtgaagataacgacgagaaagaggctgtcgcaagcaagggtaggaaaactgctaacagccagggccggagaaaagggcggattacacgttctatggcgaacgaagctaatagtgaggaagctatcacaccccagcaaagcgccgaactggcaagtatggaacttaacgaatcctcccggtggacagaggaagagatggaaactgccaaaaagggcctgctggaacacggtaggaattggtccgccatcgcccgcatggtgggcagcaaaactgtcagccaatgcaagaatttttattttaactataaaaaaaggcaaaatttagatgagatcttgcagcaacacaagttaaagatggaaaaggagcgtaatgctcggaggaagaagaaaaaggcacctgcggcagcttcggaggaagctgccttcccccccgttgtggaagatgaggaaatggaggcatccggcgtgtctggaaatgaggaggaaatggtagaggaggccgaggccacagtgaacaacagcagcgacacagaaagcattccctcaccacacaccgaagcggctaaggatacaggacagaacggacccaagcctcccgctaccttaggggccgacgggcctccgccagggccacctacgcctccacctgaagacattcctgcccctaccgagccaactcctgcgtcagaagcaaccggtgctccaacgccaccgccagctcccccctcaccttccgctccaccacctgtcgtgccaaaggaggagaaggaagaagaaacggcagctgcccctcctgtggaagagggcgaagagcaaaaaccgcctgcggccgaagaattggcagtagacaccggaaaggccgaagagcctgtgaagagtgagtgcactgaggaagctgaagagggaccagctaaaggtaaggatgcagaggccgctgaggctacggctgaaggtgctctgaaggcggagaagaaggaaggaggctcaggacgagcgaccactgcaaaatcgtcaggcgctccgcaggactcagactcatccgctacttgttccgcagacgaagtggatgaagcagagggcggcgataagaaccgactgctgagccccagaccctccctcttgacccctactggagatccccgggcaaacgcttcacctcagaaacctctggatttgaagcagttaaagcagcgcgccgctgcaatcccgcccatccaagtgaccaaagtccatgaacccccaagagaagatgctgctcctactaaacccgccccacctgcgcccccccccccgcaaaacttacaacccgagtccgacgccccccagcaaccaggcagttccccccgtggcaagagccgctctcctgcacccccagcagacaaagaagcagaaaagccagtcttcttccccgccttcgctgcagaagcccagaaacttccaggcgaccctccttgctggaccagcggcctcccttttcccgttccaccccgggaggtcattaaagcctcaccccacgctcccgaccctagcgcatttagttacgccccacccggccacccactgcctctaggtctccacgatacggcccgtccagtgctgccccgcccacctactatatccaaccctcctcctctgatatcatcagccaaacacccatccgtcctggagcgccaaatcggagccatatctcagggaatgtccgtgcagcttcacgtcccttactccgagcatgccaaggcccccgtggggcctgtcaccatgggcctgcctctccccatggacccaaagaaactggctcctttttcaggagttaagcaggaacaactgagtcctagaggccaagctggcccccctgaaagtttaggtgttcctactgctcaggaagcatccgtgcttagaggcaccgctttgggctcagtcccaggcggctccattacaaaagggatcccgtcaacacgcgtaccatcagattccgcgatcacttataggggcagtatcactcatgggacacctgctgatgttttgtacaaaggaaccatcacgcggataattggtgaagatagtccttctcggctggacagagggagggaagactcgctccccaaagggcacgtcatttacgaaggcaaaaaagggcatgtacttagttatgagggggggatgagcgtaacccagtgcagcaaagaagatgggcgcagctctagtgggcctccccacgaaactgccgcacccaaacggacctacgacatgatggagggccgcgtcggtcgcgccatttccagtgcatccatcgaagggctgatgggtcgggcaataccaccagagagacacagcccccaccatctgaaggagcagcaccatatcagaggaagtattacacagggaattcctcgatcctacgtcgaggcacaggaggattatttgaggcgtgaggccaagttattaaagagggagggcacccccccgcccccacctcctagtagagacttgacagaggcatacaagacacaggccctcgggccgttgaaattaaagccagcccatgagggcctggtcgcaacagttaaagaggccggaagatcaatacacgagatcccaagggaggagctaaggcacacccctgaattacccttggcccccaggccactgaaggagggctccattacacaggggactccgctcaagtacgatacaggcgcctcaaccaccgggtctaaaaaacacgacgtgcgtagcctaataggaagcccaggtcgcactttccctccggtccacccactagatgtaatggccgacgctcgggcgctcgagcgggcctgttatgaggagtctctgaagtcccgcccaggcacagcttcctccagcggagggtctattgcacgcggggcccctgtgatcgtccctgagctgggcaagcctcgccagagccccctgacctacgaagatcatggagcaccctttgcaggacaccttccacgcgggagtccagtgaccactcgggagccaactcctcggcttcaagaaggatccctttctagctcaaaggccagtcaggatcgcaaactgacctcaactcctcgggaaattgcgaagtccccccattcaactgtcccagagcatcatcctcacccaatctcgccttatgaacacctcctgaggggcgtcagtggcgttgacctgtataggtctcatatccctctagcattcgatcctacctccattcccagaggcatcccgctcgacgcagccgcagcttattatctgccgaggcacctcgcaccaaaccctacgtacccacacctgtaccctccatatcttatccgggggtatcctgacactgcggctttggagaaccggcaaactatcataaacgattacattacaagtcaacagatgcatcacaacgctgccacagccatggcccagagagcggatatgttgcgaggcctcagtcctagagagtctagtctagccctaaattacgcagccgggccccgcggtattatcgatttatctcaggtccctcacctgcctgtcctggtgccaccaacccccgggacacctgccacggcaatggataggctggcatacctgccaaccgccccccaacctttctcatcccggcactctagtagtccactgtctccaggcggccctactcacttgactaaacctaccacaacaagctcgagcgagagggagagggaccgcgatcgggagcgcgacagagacagagagcgggagaagtccattctgacttccacaactaccgtggagcacgccccgatatggagaccagggacggagcagtcgtcgggaagcagcggaggcgggggcggctcctcttcccgccctgcctcccatagccatgcccaccagcacagccccatttccccccgcacacaggatgcgcttcagcagagaccttcggtcctccacaatactggcatgaaagggattatcacagctgtggaaccgtccacgcccacagtgctgcggtctaccagtacatcatctcccgtccgccctgccgccactttcccgcccgcaacacattgccctctgggggggaccctggatggcgtatatccaactctaatggaaccagtcctgttgccaaaggaggcccctagagtagcccgtcccgagcggccccgggccgataccggtcacgcatttctggccaagccgccagcccgcagcggattggaacctgcctcaagtcctagtaagggatcagaacctcgcccgcttgtgccaccagtgagcggccacgctaccattgctagaacgccagccaaaaatctggcacctcatcacgctagtccagacccccctgctcctccagcctcagcctccgaccctcacagggagaaaactcagagcaagccttttagcatccaggagctcgagcttagatctttgggctatcacgggagcagctactcccccgagggcgtggaaccagtgtctccagtctcttccccaagcctgacgcacgacaagggcctgcccaaacatcttgaggaacttgataaaagccacctcgaaggggaactcaggcctaagcaacccggccccgtcaagctcgggggggaagctgcccaccttcctcatttaaggccgctgccagagtcgcagccctcttcctcacccttactgcaaaccgctcccggagtgaagggtcatcagcgagtggtgacattggcccagcacatttccgaagtcattactcaggattacacccggcatcacccacagcagctctcagcacctttgcccgcaccactctatagctttcctggtgcctcttgccctgtactggatttaagaagaccaccgagcgacttgtatttaccaccgccagaccacggggccccagcaagaggaagcccccactcagagggcggtaagagatctccagagccaaataagacgtccgttctggggggcggtgaagacggcatcgagcctgtctccccacccgagggcatgaccgaacccggacactctcggagtgccgtatatcctctgttgtatcgcgacggcgagcaaaccgagccaagccggatgggtagcaagtcaccaggcaataccagtcagcctcctgctttcttctcaaagctgaccgaatctaactccgccatggtgaagagtaagaaacaagagataaacaaaaagctgaatacccataaccgtaatgagccagaatacaacatcagtcagcccggaaccgagatattcaacatgcccgcaattacgggcacaggccttatgacttacaggagccaagccgtgcaagaacacgcaagcacaaatatggggctcgaggccattatcagaaaggctctgatggggggcggaggaaaagccaaagtgagtgggaggccaagctctcggaaggcaaaaagcccagcacccggtctggcctccggggaccggccaccatccgtgtcctccgtgcacagtgaaggcgactgcaacaggagaaccccccttacaaaccgagtgtgggaagacagaccatcgtccgctggttccacccccttcccgtataatccacttataatgaggctccaagccggagtcatggcctcgcctccacctcccggcttgcctgccggatcaggcccccttgccgggcctcaccatgcgtgggatgaggagccaaaaccactgttgtgctcccaatatgagacactgtccgacagtgaatag

SEQ ID NO: 34804 - DNA, 7377 bp, Artificial Sequence
  derived and/or modified sequence
atgtcggggagcactcaacccgtggcccagacctggcgggcaaccgagccccggtatccaccacacagcctgtcatatcccgtgcaaatcgctaggacacatactgatgtgggactgctggaatatcagcaccactcccgcgattatgcttcgcatctttccccgggcagtattattcagccacagcggcggcggccttcattgctcagcgaattccagcctggcaacgagcgctcacaagagctacatctgaggcccgaaagccatagttacctaccagagttgggcaagagcgaaatggaattcattgagagcaagaggccccgtctcgagctactgcctgatcccctgcttcgtccctctccactgctggcaacgggccagcctgccggtagtgaagatctaactaaggaccggtcactgacaggaaaattggagcctgtgtcacccccctccccaccacatactgacccagagctggaacttgtacctcctcggctgagtaaagaagagttaattcagaacatggaccgggtggatagagagataaccatggttgagcagcagatcagcaaactcaaaaaaaaacagcagcagttggaagaagaggctgcgaagcccccagagcccgagaagcctgtttcgccccccccgattgagtccaagcatcgctccctagttcaaatcatttatgatgaaaatagaaaaaaagccgaagctgcccatcggatactggagggtctgggtccgcaagttgagttaccactgtacaaccagccgagtgataccagacagtaccatgagaatattaagatcaaccaagctatgcggaagaaacttatcttatactttaaacggcggaaccacgctaggaaacagtgggagcagaagttctgtcaaaggtatgatcagctcatggaggcatgggaaaagaaggtggaacgaatagagaacaatcccaggagaagagcgaaggaatctaaggtaagggagtactacgaaaaacaatttccagaaatcagaaagcagcgggaactgcaagaacgaatgcaaagggttggtcagcggggtagcggtctgagcatgtccgctgccagatcggagcacgaagtatctgaaattatcgatggactcagcgaacaggagaacctagagaaacagatgcgccagctggcagtgattccacctatgttgtacgacgccgatcagcagagaatcaaatttattaacatgaacggtctcatggcagacccaatgaaggtctacaaggacagacaagtgatgaacatgtggagtgaacaggagaaggaaacctttagggaaaagtttatgcaacatcctaagaattttggacttatcgctagttttctagagagaaagaccgttgcggaatgcgtgctgtactactatctaacaaagaaaaacgaaaactacaagagcctggtgaggagaagctacaggcgccggggtaaatcccagcagcagcagcagcagcagcagcaacagcagcagcaacagcaacagcaacctatgccccggtcgagccaagaggaaaaagatgaaaaggagaaggaaaaagaagccgagaaggaggaagaaaaacctgaggtcgagaacgataaggaggatctgttgaaagagaaaacagacgataccagtggcgaggacaacgacgagaaagaagccgtggcttccaagggtcgtaaaacagccaatagccaaggccggcgcaaaggccgtatcactcgctccatggccaacgaagccaatagcgaagaagctataacaccgcagcaaagcgccgaactggccagtatggagttaaacgaatcctcaagatggacagaagaagaaatggagacagctaaaaaaggcttgcttgagcatggacgtaactggagcgccatcgcgcgaatggtcggctccaagaccgtttctcaatgcaagaacttctacttcaattataagaaaaggcagaatctggacgaaatcttacagcagcacaagctgaagatggaaaaagagcgaaacgcgagacgaaagaagaagaaggctcccgccgcagccagcgaggaagccgccttccccccagtcgtagaggatgaagaaatggaagccagcggggtgagtggaaatgaggaagaaatggtcgaggaggctgaggcaaccgtaaacaacagcagcgatacagagtctattccttccccacacactgaggccgcaaaagataccgggcaaaatgggcccaaaccaccggccaccctcggcgctgatggtcctcccccggggccgcccacacccccacctgaggacattcctgcaccgacagagccaacgccagcttctgaggccacgggggcccctacaccaccgccagctcccccaagtccttccgcaccgccccccgtggtgcccaaagaggagaaagaggaagaaaccgccgcagcccctccggtggaagaaggcgaggagcagaaaccaccggctgctgaggagctagccgtggacaccggcaaagcagaagagcctgttaaatccgagtgcaccgaagaagccgaggaaggtccagctaaggggaaagatgccgaagctgcggaggccacagcagagggagccctgaaggctgagaaaaaggaaggtggatccgggcgcgccacaaccgctaaatcatctggggccccccaagattccgatagttcagctacctgcagcgccgatgaagtggatgaagctgaaggcggcgataaaaatagattactgtctcctcgtccttctctcctcacacctacaggagacccccgggccaatgcaagcccccaaaagcctctcgacctgaaacagcttaagcagcgggccgccgccatcccaccaatccaggtcactaaggtgcatgagccacctagagaagacgccgcccctaccaaacccgcaccaccagcgcctccccctccccagaacctgcagccagagtccgatgcaccccagcagcctggcagctcacctcggggcaaatctaggtccccagccccgcctgcagataaggaggctgagaaacctgttttcttccccgcgttcgccgcagaagctcagaagctgcccggcgatccaccttgttggacctcgggcctgccgttccccgtgccccctcgggaagtaatcaaagcttcacctcatgcgcccgatccctcagctttcagctatgctcctcccggccaccccctgccactgggactccatgacactgcacgacccgtcctacctcggccccccacaatcagcaatcctccccccctgatttctagcgcaaaacatccatccgtgttggagagacaaattggcgccatatctcagggcatgtcagtgcagttacatgtgccatacagcgagcacgcgaaggccccagtgggtccagtcaccatggggctgcccctgcctatggacccgaagaaactggctcccttttctggtgtgaaacaagagcaactctcgccaaggggccaagcaggaccaccggagtctttgggtgtccctacagctcaggaagcatcagtcctgcggggaactgccctgggtagtgttccaggagggtcaataactaaggggattccaagtactagagtgccctcggactctgcgatcacatacagagggtctattacacatggaacgccagcagacgtgttgtacaaaggaacaattaccagaatcataggagaagattcccctagtcgcctggatcgcggacgcgaagattcactgccaaaaggacatgtgatttatgaaggcaagaagggtcacgttctgtcgtatgagggagggatgagcgtaacgcagtgctctaaagaagacggaaggagtagctctggacccccgcacgaaactgcagctccaaagaggacctacgacatgatggaaggtcgagtgggccgggctatttcatcggcgagtattgaagggttgatggggagggccatcccacccgagcgccactcaccgcaccacttgaaagagcaacaccatattaggggatcaattacccagggcattcctcgatcatacgtagaagcacaagaagactacctgcgaagagaggcaaaactcctaaaacgggagggcaccccacccccacccccaccttcccgggacttaaccgaagcgtataagactcaggctctagggcctcttaaacttaagcctgcccatgagggcctggtcgctacagtgaaagaggccgggcgcagtatccacgagattccaagggaggagctaaggcatactcccgagttaccacttgcaccccgtccactgaaggaaggctcaatcactcagggcactcccctgaaatatgatactggggcctctaccaccggaagtaagaaacatgatgtgagatccctcattggcagccctggccgaacctttcctcctgtgcacccgcttgatgtgatggccgacgccagggctctggagcgcgcctgctacgaggagtccctcaagtcacgccctggcaccgcctctagctccggagggagtatcgctaggggcgccccagtgatcgtcccagaactagggaaaccaagacagtcgcccctcacttacgaggaccacggggcacccttcgccggacatttaccccgtggatccccagttaccacaagagaaccgaccccgcgactccaggaaggatctctcagcagctcgaaagcatctcaggatcgaaagctcaccagcactccacgggaaatcgctaagtctcctcattccaccgtccctgaacaccacccacaccccattagtccttatgagcatctgttgaggggtgtcagtggagtggacctctaccggtcacatataccattagcgttcgatcccaccagtatcccccgcggcatcccactagacgccgccgcagcctactaccttccacggcaccttgcccctaaccccacttacccccatctttaccctccttatctgattcgcggctaccccgataccgctgcactcgagaatcggcagaccatcattaacgactacattacaagtcagcagatgcatcataatgcagctacagctatggcccagagggccgatatgttgcgcgggcttagtcctcgagaatctagcctggccctgaattatgctgcaggccctagggggattatcgacctttcgcaggtgccccatctgcctgtgctggtccctcccactccgggcactcccgccaccgcaatggacagactggcctatctgcctactgcccctcaaccgttttcctctagacactcgtctagccccttgtcacctggaggacccacccacttgactaagcccactacgacctcatcttccgaaagagaacgcgaccgggaccgggaacgcgacagggatagggaaagagaaaagtccatcctgacctcaaccaccacagttgagcatgctccaatctggagaccggggacagagcagtcaagcggttccagcggagggggtgggggctcgtcatcgcggccagccagccacagccatgctcatcagcacagccccatctcaccaaggactcaggatgccttgcaacagagacccagtgtgctacataacacaggaatgaagggcataatcacagccgtagaaccctctacacctactgtcctgcgctccacatccacctcctctccagtgcggcctgcagcaacctttcctcccgccacacactgcccactgggtgggaccctggacggcgtataccccacactgatggaaccagtccttctgcccaaagaggccccccgcgtggcccggcccgaaagacctagagcggacactggccacgcctttttggctaaaccaccggcgcggagtggtctggagccagcctcgagccccagcaaaggaagtgagcctcgccctctggtgccccctgtgtctggacatgcaacgatcgcaaggacacctgccaagaatttggctccacaccatgcgtcgcccgatcctccagccccgccagctagcgcgtccgacccccacagagaaaaaacgcagtctaaaccattttccatccaggagctcgagttgcggtctctgggctatcacggtagctcttatagccccgaaggtgtcgagccagtttctcccgtgtcatctcccagtctgacccacgataaaggactccctaaacatttggaagagctcgataagagccatctggagggcgagctgcggccgaagcagcctgggcccgtgaaactgggaggagaggcggctcacctgccccacttgcgcccgctaccggaaagccagccctccagctcgcccctgctgcagactgccccaggggttaaggggcatcagcgggtcgtaaccctagcccagcacatttcagaggtgataacgcaggattacaccagacatcacccccaacagctttctgcaccactgcccgctcctctgtattctttccctggcgcctcctgcccggttcttgacctgagacgacctcctagcgatctctacctaccaccacccgatcatggagccccagctcgagggtccccgcactctgaaggcggcaagagatcacctgaaccgaacaaaaccagcgtgttaggaggaggagaagatggcatcgaaccagtatctccccccgagggaatgacagagccaggccattcgcggtccgctgtatacccactcctttatagggacggcgagcagactgagcctagtcggatgggtagcaagtctccaggtaacacaagccagccccccgcgttttttagcaagctaacagaaagtaatagcgccatggttaaaagtaagaagcaggagattaataagaaactgaacacacataataggaacgaaccggagtataacatctctcagcccggtaccgaaatctttaacatgcctgctattacaggaacaggactgatgacctatcgcagtcaagccgtccaagagcacgcatccaccaatatgggactcgaagcaataatacgcaaggcattgatggggggcggaggcaaggctaaggtgtcaggacgtccctctagccgcaaggctaagtcccccgctccaggcttggccagcggggaccgccctccctctgtgagttctgtccactctgaaggggactgtaatcgcagaactccacttactaaccgcgtgtgggaggaccggcctagttccgctggcagcacacccttcccgtataaccctctgattatgcggttgcaagcgggcgtgatggcatctcctccgcctcccggtctccctgccggaagcgggcctctggcgggccctcaccacgcttgggatgaggagccgaagcctcttctctgttctcagtacgagacactgtcagattccgagtag

SEQ ID NO: 34805 - DNA, 7380 bp, Artificial Sequence
  derived and/or modified sequence
atgagcggcagcacccagcctgtggcccagacctggagggccacagagccccgctacccaccccacagcctgagctaccctgtgcagatcgcccggacccacacagatgtgggcctgctggagtaccagcaccacagccgggactatgccagccacctgagccctggcagcatcatccagccccagaggcggcggcccagcctgctgtctgagttccagcctggaaatgaaagaagccaggagctgcacctgcggcctgagagccacagctacctgcctgagctgggcaagtctgagatggagttcatcgagagcaagaggccccggctggagctgctgcctgaccccctgctgcggcccagccccctgctggccaccggccagcctgctggcagcgaggacctgaccaaggacaggagcctgaccgggaagctggagcctgtgagcccccccagccccccccacacagatcctgagctggagctggtgcccccccggctgagcaaggaggagctgatccagaacatggacagagtggaccgggagatcaccatggtggagcagcagatcagcaagctgaagaagaagcagcagcagctggaggaggaggccgccaagcccccagagcctgagaagcctgtgagccccccacccatcgagagcaagcacaggagcctggtgcagatcatctatgatgaaaataggaagaaggccgaggccgcccaccgcatcctggagggcctgggcccccaggtggagctgcccctgtacaaccagcccagcgacacccggcagtaccacgagaacatcaagatcaaccaggccatgaggaagaagctgatcctgtacttcaagagaagaaatcatgccaggaagcagtgggagcagaagttctgccagagatatgaccagctgatggaggcctgggagaagaaggtggagagaattgagaacaacccccggcggcgggccaaggagagcaaggtgcgggagtactatgagaagcagtttcctgagatcaggaagcagcgggagctgcaggagaggatgcagagccgggtgggccagaggggcagcggcctgtccatgtctgctgcccggtctgagcacgaggtgtctgagatcattgatggcctgtctgagcaggagaacctggagaagcagatgaggcagctggccgtcatcccccccatgctgtatgatgctgaccagcagaggatcaagttcatcaacatgaatggcctgatggctgaccccatgaaggtgtacaaggaccggcaggtgatgaacatgtggagcgagcaggagaaggagaccttccgggagaagttcatgcagcaccccaagaactttggcctcatcgccagcttcctggagaggaagacagtggctgaatgtgtgctgtactactacctgaccaagaagaatgaaaactacaagagcctggtgcggcgcagctacagaagaagaggcaagagccagcagcagcagcagcagcagcagcagcagcagcagcagcagcagcagcagcccatgcccaggagcagccaggaggagaaggatgagaaggagaaggagaaggaggccgagaaggaggaggagaagccagaggtggagaatgacaaggaggacctgctgaaggagaagacagatgacaccagcggggaggacaatgatgagaaggaggccgtggccagcaaaggaaggaagacagccaacagccagggccgcaggaagggccgcatcaccaggtccatggccaatgaggccaacagcgaggaggccatcaccccccagcagagcgctgagctggcctccatggagctgaatgaaagcagccgctggacagaggaggagatggagacagccaagaagggcctgctggagcacggcaggaactggagcgccatcgccaggatggtgggcagcaagacagtgtcccagtgcaagaacttctacttcaactacaagaagaggcagaacctggatgagatcctgcagcagcacaagctgaagatggagaaggagagaaatgcccggaggaagaagaagaaggccccagctgctgccagcgaggaggccgccttcccccctgtggtggaggatgaggagatggaggccagcggcgtgtctggaaatgaggaggagatggtggaggaggccgaggccaccgtgaacaacagcagtgacacagagagcatccccagcccccacacagaagctgccaaggacaccggccagaatggccccaagcccccagccaccctgggcgcagatggccccccacctggcccccccaccccacctcctgaggacatcccagcccccacagagcccaccccagccagcgaggccaccggggcccccaccccacctccagccccacccagccccagcgcccctcctcctgtggtgcccaaggaggagaaggaggaggagacagctgctgcccctcctgtggaggagggggaggagcagaagcccccagctgctgaggagctggccgtggacaccgggaaggccgaggagcctgtgaagtctgagtgcacagaggaggccgaggagggccctgccaagggcaaggatgctgaggccgctgaggccacagctgagggcgccctgaaggccgagaagaaggagggcggcagcggccgggccaccacagccaagagcagcggggccccccaggacagcgacagcagcgccacctgcagcgcagatgaggtggatgaggccgagggcggggacaagaaccggctgctgagcccccggcccagcctgctgacccccactggagacccccgggccaatgccagcccccagaagcccctggacctgaagcagctgaagcagagagctgctgccatcccccccatccaggtgaccaaggtgcatgagcccccccgggaggatgctgcccccaccaagccagcccccccagcccctcctccaccccagaacctgcagcctgagagtgatgccccccagcagcccggcagcagcccccggggcaagagccgcagccctgcccctcctgctgacaaggaggccgagaagcctgtgttcttccctgcctttgctgctgaggcccagaagctgcccggggaccccccctgctggaccagcggcctgcccttccctgtgcccccccgggaggtgatcaaggccagcccccacgccccagaccccagcgccttctcctatgcccctcctggccaccccctgcccctgggcctgcatgacacagcccggcctgtgctgccccggccccccaccatcagcaaccccccacccctcatcagcagcgccaagcaccccagcgtgctggagcggcagattggagccatcagccagggcatgtctgtgcagctgcacgtgccctacagcgagcacgccaaggcccctgtgggccctgtgaccatgggcctgcccctgcccatggaccccaagaagctggcccccttcagcggcgtgaagcaggagcagctgagcccccggggccaggccggccccccagagagcctgggcgtgcccacagcccaggaggcctctgtgctgcggggcacagccctgggctctgtgcctgggggcagcatcaccaagggcatccccagcaccagggtgcccagcgacagcgccatcacctaccggggcagcatcacccacggcaccccagcagatgtgctgtacaagggcaccatcacccgcatcatcggggaggacagccccagccggctggaccggggccgggaggacagcctgcccaagggccacgtgatctatgagggcaagaagggccacgtgctgtcctatgaaggaggcatgtctgtgacccagtgcagcaaagaagatggccgcagcagcagcggcccccctcatgaaacagctgcccccaagaggacctatgacatgatggagggccgggtgggccgggccatcagcagcgccagcattgagggcctgatgggccgggccatccccccagagcggcacagcccccaccacctgaaggagcagcaccacatccggggcagcatcacccagggcatccccaggagctatgtggaggcccaggaggactacctgcggcgggaggccaagctgctgaagcgggagggcaccccacctcctcctccacccagccgggacctgacagaggcctacaagacccaggccctgggccccctgaagctgaagccagcccacgagggcctggtggccaccgtgaaggaggccggccgcagcatccacgagatcccccgggaggagctgcggcacaccccagagctgcccctggccccccggcccctgaaggagggcagcatcacccagggcacccccctgaagtatgacaccggggccagcaccaccggcagcaagaagcatgatgtgcgcagcctcatcggcagccctggccgcaccttcccccctgtgcaccccctggatgtgatggctgatgcccgggccctggagcgggcctgctatgaggagagcctgaagagcaggcctggaacagccagcagcagcggcggcagcatcgcccggggggcccctgtgattgtgcctgagctgggcaagccccggcagagccccctgacctatgaagatcatggagccccctttgctggccacctgccccggggcagccctgtgaccacccgggagcccaccccccggctgcaggagggcagcctgagcagcagcaaggccagccaggacaggaagctgaccagcaccccccgggagatcgccaagagcccccacagcacagtgcctgagcaccacccccaccccatcagcccctatgagcacctgctgcggggcgtgtctggagtggacctgtaccgcagccacatccccctggcctttgaccccaccagcatcccccggggcatccccctggatgctgctgctgcctactacctgcccaggcacctggcccccaaccccacctacccccacctgtacccaccctacctgatccggggctacccagacacagctgccctggagaaccggcagaccatcatcaatgactacatcaccagccagcagatgcaccacaatgctgccacagccatggcccagagagctgacatgctgcggggcctgagcccccgggagagcagcctggccctgaactatgctgctggcccccggggcatcatcgacctgagccaggtgccccacctgcctgtgctggtgccccccaccccaggcaccccagccacagccatggaccggctggcctacctgcccacagccccccagcccttcagcagccgccacagcagcagccccctgagccctgggggccccacccacctgaccaagcccaccaccaccagcagcagcgagcgggagcgggaccgggaccgggagcgggaccgggaccgggagcgggagaagagcatcctgaccagcaccaccaccgtggagcacgcccccatctggaggcctggaacagagcagagcagcggcagcagcggcggcggcggcggcagcagcagcaggcctgccagccacagccacgcccaccagcacagccccatcagccccaggacccaggatgccctgcagcagaggcccagcgtgctgcacaacacaggcatgaagggcatcatcacagctgtggagcccagcacccccaccgtgctgcggagcaccagcaccagcagccctgtgcggcctgctgccaccttccccccagccacccactgccccctgggcggcaccctggatggagtgtaccccaccctgatggagcctgtgctgctgcccaaggaggccccccgggtggcccggcctgagcggcccagggctgacaccggccacgccttcctggccaagcccccagcccggagcggcctggagcccgccagcagccccagcaaaggaagtgagccccggcccctggtgccccctgtgtctggccacgccaccatcgcccggaccccagccaagaacctggccccccaccacgccagcccagaccccccagcccccccagccagcgccagtgacccccaccgggagaagacccagagcaagcccttcagcatccaggagctggagctgcggagcctgggctaccacggcagcagctacagccctgagggcgtggagcctgtgtcccctgtgagcagccccagcctgacccatgacaagggcctgcccaagcacctggaggagctggacaagagccacctggagggggagctgcggcccaagcagcccggccctgtgaagctgggcggggaggccgcccacctgccccacctgcggcccctgcctgagagccagcccagcagcagccccctgctgcagacagcccctggggtgaagggccaccagagggtggtgaccctggcccagcacatcagcgaggtgatcacccaggactacaccaggcaccacccccagcagctgagcgcccccctgcctgcccccctgtacagcttccctggggccagctgccctgtgctggacctgcggcggcccccaagtgacctgtacctgcccccaccagaccacggggccccagcccggggcagcccccacagcgagggcggcaagaggagccctgagcccaacaagacctctgtgctgggcggcggagaagatggcatcgagcctgtgtccccacctgagggcatgacagagcccggccacagccgctctgctgtgtaccccctgctgtacagagatggagagcagacagagcccagcaggatgggcagcaagagccctggcaacaccagccagcccccagccttcttcagcaagctgacagagagcaacagcgccatggtgaagagcaagaagcaggagatcaacaagaagctgaacacccacaacagaaatgaacctgagtacaacatcagccagcctggaacagagatcttcaacatgcctgccatcaccggcaccggcctgatgacctaccgcagccaggccgtgcaggagcacgccagcaccaacatgggcctggaggccatcatcaggaaggccctgatgggcggcggcggcaaggccaaggtgtctggccggcccagcagcaggaaggccaagagccctgcccctggcctggccagcggggacaggcctccttctgtgtcctctgtgcacagcgagggggactgcaacagaaggacccccctgaccaacagagtgtgggaggaccggcccagcagcgctggcagcacccccttcccctacaaccccctcatcatgaggctgcaggccggcgtgatggccagccccccacctcctggcctgcctgctggcagcggccccctggccggcccccaccacgcctgggatgaggagcccaagcccctgctgtgcagccagtatgagaccctgagtgacagcgagtag

SEQ ID NO: 34806 - DNA, 7377 bp, Artificial Sequence
  derived and/or modified sequence
atgagcggcagcacccagcctgtggcccagacctggagggccacagagccccgctacccaccccacagcctgagctaccctgtgcagatcgcccggacccacacagatgtgggcctgctggagtaccagcaccacagccgggactatgccagccacctgagccctggcagcatcatccagccccagaggcggcggcccagcctgctgtctgagttccagcctggaaatgaaagaagccaggagctgcacctgcggcctgagagccacagctacctgcctgagctgggcaagtctgagatggagttcatcgagagcaagaggccccggctggagctgctgcctgaccccctgctgcggcccagccccctgctggccaccggccagcctgctggcagcgaggacctgaccaaggacaggagcctgaccgggaagctggagcctgtgagcccccccagccccccccacacagatcctgagctggagctggtgcccccccggctgagcaaggaggagctgatccagaacatggacagagtggaccgggagatcaccatggtggagcagcagatcagcaagctgaagaagaagcagcagcagctggaggaggaggccgccaagcccccagagcctgagaagcctgtgagccccccacccatcgagagcaagcacaggagcctggtgcagatcatctatgatgaaaataggaagaaggccgaggccgcccaccgcatcctggagggcctgggcccccaggtggagctgcccctgtacaaccagcccagcgacacccggcagtaccacgagaacatcaagatcaaccaggccatgaggaagaagctgatcctgtacttcaagagaagaaatcatgccaggaagcagtgggagcagaagttctgccagagatatgaccagctgatggaggcctgggagaagaaggtggagagaattgagaacaacccccggcggcgggccaaggagagcaaggtgcgggagtactatgagaagcagtttcctgagatcaggaagcagcgggagctgcaggagaggatgcagagggtgggccagaggggcagcggcctgtccatgtctgctgcccggagtgaacatgaggtgtctgagatcattgatggcctgtctgagcaggagaacctggagaagcagatgaggcagctggccgtcatcccccccatgctgtatgatgctgaccagcagaggatcaagttcatcaacatgaatggcctgatggctgaccccatgaaggtgtacaaggaccggcaggtgatgaacatgtggagcgagcaggagaaggagaccttccgggagaagttcatgcagcaccccaagaactttggcctgattgccagcttcctggagaggaagacagtggccgagtgtgtgctgtactactacctgaccaagaagaatgaaaactacaagagcctggtgagaagaagctacagaagaagaggcaagagccagcagcagcagcagcagcagcagcagcagcagcagcagcagcagcagcagcccatgcccaggagcagccaggaggagaaggatgagaaggagaaggagaaggaggccgagaaggaggaggagaagccagaggtggagaatgacaaggaggacctgctgaaggagaagacagatgacaccagcggagaagataatgatgagaaggaggccgtggccagcaagggcaggaagacagccaacagccagggccgcaggaagggccgcatcaccaggtccatggccaatgaggccaacagcgaggaggccatcaccccccagcagagcgctgagctggcctccatggagctgaatgaaagcagccgctggacagaggaggagatggagacagccaagaagggcctgctggagcacggcaggaactggagcgccatcgccaggatggtgggcagcaagacagtgtcccagtgcaagaacttctacttcaactacaagaagaggcagaacctggatgagatcctgcagcagcacaagctgaagatggagaaggagagaaatgcccggaggaagaagaagaaggccccagctgctgccagcgaggaggccgccttcccccctgtggtggaggatgaggagatggaggccagcggcgtgtctggaaatgaggaggagatggtggaggaggccgaggccaccgtgaacaacagcagtgacacagagagcatccccagcccccacacagaggccgccaaggacaccggccagaatggccccaagcccccagccaccctgggcgcagatggccccccacctggcccccccaccccacctcctgaggacatcccagcccccacagagcccaccccagccagcgaggccactggagcccccaccccacctccagccccacccagccccagcgcccctcctcctgtggtgcccaaggaggagaaggaggaggagacagctgctgcccctcctgtggaggagggggaggagcagaagcccccagctgctgaggagctggccgtggacaccgggaaggccgaggagcctgtgaagtcagaatgtacagaggaggccgaggagggccctgccaagggcaaggatgctgaggccgctgaggccacagctgagggcgccctgaaggccgagaagaaggagggcggcagcggccgggccaccacagccaagagcagcggggccccccaggacagcgacagcagcgccacctgcagcgcagatgaggtggatgaagctgagggcggggacaagaaccggctgctgagcccccggcccagcctgctgacccccaccggggacccccgggccaatgccagcccccagaagcccctggacctgaagcagctgaagcagagagctgctgccatcccccccatccaggtgaccaaggtgcatgagcccccaagagaagatgctgcccccaccaagccagcccccccagcccctcctccaccccagaacctgcagcctgagagtgatgccccccagcagcccggcagcagcccccggggcaagagccgcagccctgcccccccagctgacaaggaggccgagaagcctgtgttcttccctgcctttgctgctgaggcccagaagctgcccggggaccccccctgctggaccagcggcctgcccttccctgtgcccccccgggaggtgatcaaggccagcccccacgccccagaccccagcgccttctcctatgcccctcctggccaccccctgcccctgggcctgcatgacacagcccggcctgtgctgcccaggcctcccaccatcagcaaccccccacccctcatcagcagcgccaagcaccccagcgtgctggagcggcagatcggggccatcagccagggcatgtctgtgcagctgcacgtgccctacagcgagcacgccaaggcccctgtgggccctgtgaccatgggcctgcccctgcccatggaccccaagaagctggcccccttctctggagtgaagcaggagcagctgagcccccggggccaggccggccccccagagagcctgggcgtgcccacagcccaggaggcctctgtgctgcggggcacagccctgggctctgtgcctgggggcagcatcaccaagggcatccccagcaccagggtgcccagcgacagcgccatcacctaccggggcagcatcacccacggcaccccagcagatgtgctgtacaagggcaccatcacccgcatcattggagaggacagccccagccggctggaccggggccgggaggacagcctgcccaagggccacgtgatctatgagggcaagaagggccacgtgctgtcctatgagggcggcatgtctgtgacccagtgcagcaaggaggatggccgcagcagcagcggcccccctcatgaaacagctgcccccaagaggacctatgacatgatggagggccgggtgggccgggccatcagcagcgccagcattgagggcctgatgggccgggccatccccccagagcggcacagcccccaccacctgaaggagcagcaccacatccggggcagcatcacccagggcatccccaggagctatgtggaggcccaggaggactacctgcggcgggaggccaagctgctgaagcgggagggcaccccacctcctcctccacccagccgggacctgacagaggcctacaagacccaggccctgggccccctgaagctgaagccagcccacgagggcctggtggccaccgtgaaggaggccggccgcagcatccacgagatcccccgggaggagctgcggcacaccccagagctgcccctggccccccggcccctgaaggagggcagcatcacccagggcacccccctgaagtatgacacaggagccagcaccaccggcagcaagaagcatgatgtgcgcagcctgattggcagccctggccgcaccttcccccctgtgcaccccctggatgtgatggctgatgcccgggccctggagcgggcctgctatgaggagagcctgaagagccggcccggcacagccagcagcagcggcggcagcatcgcccggggggcccctgtgattgtgcctgagctgggcaagccccggcagagccccctgacctatgaggaccacggggccccctttgctggccacctgccccggggcagccctgtgaccacccgggagcccaccccccggctgcaggagggcagcctgagcagcagcaaggccagccaggacaggaagctgaccagcaccccccgggagatcgccaagagcccccacagcacagtgcctgagcaccacccccaccccatcagcccctatgagcacctgctgcggggcgtgtctggagtggacctgtaccgcagccacatccccctggcctttgaccccaccagcatcccccggggcatccccctggatgctgctgctgcctactacctgcccaggcacctggcccccaaccccacctacccccacctgtacccaccctacctgatccggggctacccagacacagctgccctggagaaccggcagaccatcatcaatgactacatcaccagccagcagatgcaccacaatgctgccacagccatggcccagagagctgacatgctgcggggcctgagcccccgggagagcagcctggccctgaactatgctgctggcccccggggcatcatcgacctgagccaggtgccccacctgcctgtgctggtgccccccaccccaggcaccccagccacagccatggaccggctggcctacctgcccacagccccccagcccttcagcagccgccacagcagcagccccctgagccctgggggccccacccacctgaccaagcccaccaccaccagcagcagcgagcgggagcgggaccgggaccgggagcgggaccgggaccgggagcgggagaagagcatcctgaccagcaccaccaccgtggagcacgcccccatctggaggcctggaacagagcagagcagcggcagcagcggcggcggcggcggcagcagcagcaggcctgccagccacagccacgcccaccagcacagccccatcagccccaggacccaggatgccctgcagcagaggccttctgtgctgcacaacacaggcatgaagggcatcatcacagctgtggagcccagcacccccaccgtgctgcggagcaccagcaccagcagccctgtgcggcctgctgccaccttccccccagccacccactgccccctgggcggcaccctggatggagtgtaccccaccctgatggagcctgtgctgctgcccaaggaggccccccgggtggcccggcctgagcggcccagggctgacaccggccacgccttcctggccaagcccccagcccggagcggcctggagcccgccagcagccccagcaagggcagcgagccccggcccctggtgccccctgtgtctggccacgccaccatcgcccggaccccagccaagaacctggccccccaccacgccagcccagaccccccagcccccccagccagcgccagtgacccccaccgggagaagacccagagcaagcccttcagcatccaggagctggagctgcggagcctgggctaccacggcagcagctacagccctgagggcgtggagcctgtgtcccctgtgagcagccccagcctgacccatgacaagggcctgcccaagcacctggaggagctggacaagagccacctggagggggagctgcggcccaagcagcccggccctgtgaagctgggcggggaggccgcccacctgccccacctgcggcccctgcctgagagccagcccagcagcagccccctgctgcagacagcccctggggtgaagggccaccagagggtggtgaccctggcccagcacatcagcgaggtgatcacccaggactacaccaggcaccacccccagcagctgagcgcccccctgcctgcccccctgtacagcttccctggggccagctgccctgtgctggacctgcggcggccccccagcgacctgtacctgcccccaccagaccatggagccccagcccggggcagcccccacagcgagggcggcaagaggagccctgagcccaacaagacctctgtgctgggcggcggggaggatggcatcgagcctgtgagccccccagagggcatgacagagcccggccacagccgctctgctgtgtaccccctgctgtacagagatggagagcagacagagcccagcaggatgggcagcaagagccctggcaacaccagccagcccccagccttcttcagcaagctgacagagagcaacagcgccatggtgaagagcaagaagcaggagatcaacaagaagctgaacacccacaacagaaatgaacctgagtacaacatcagccagcccggcacagagatcttcaacatgcctgccatcactggaacaggcctgatgacctaccgcagccaggccgtgcaggagcacgccagcaccaacatgggcctggaggccatcatcaggaaggccctgatgggcggcggcggcaaggccaaggtgtctggccggcccagcagcaggaaggccaagagccctgcccctggcctggccagcggggaccggccccccagcgtgtcctctgtgcacagcgagggggactgcaacagaaggacccccctgaccaacagagtgtgggaggaccggcccagcagcgctggcagcacccccttcccctacaaccccctcatcatgaggctgcaggccggcgtgatggccagccccccacctcctggcctgcctgctggcagcggccccctggccggcccccaccacgcctgggatgaggagcccaagcccctgctgtgcagccagtatgagaccctgagtgacagcgagtag

SEQ ID NO: 34807 - DNA, 7380 bp, Artificial Sequence
  derived and/or modified sequence
atgagcggcagcacccagcccgtggcccagacctggcgggccaccgagccccggtatccgccacatagtctgagctaccccgtgcagattgccagaacacacaccgatgtgggcctgctcgagtatcagcaccatagtagagattatgcttcccacctttccccaggatctatcattcagccccagcgaaggaggccttctttgctttccgaatttcagcctggaaacgagcggtcccaggaactacatctgagacctgagagtcactcttacctaccagaactgggtaagtcagagatggaatttatcgaatccaaaagacccaggctcgaattacttcccgatcccttgctgcgacccagtccacttcttgcaacgggccagccggctggttcagaagacctaacaaaagacaggagccttacgggtaagttggaacctgttagccccccttctcctccgcataccgacccagaactcgagctggtgcccccaagactgtccaaggaggagcttattcaaaatatggaccgcgtagacagagaaattacgatggttgagcagcagatatctaagttaaaaaagaaacaacagcagctggaagaggaagccgctaagccccccgagcctgagaagcctgtatccccgccacccatcgaatccaagcaccgaagcctagtgcagattatttatgacgagaataggaagaaggccgaagctgcacaccggatcctcgaaggcctggggcctcaagtggaactccccctgtacaaccagcccagcgatacccgccagtaccacgagaatattaaaattaatcaggccatgagaaagaagttgattttatattttaagagaagaaatcatgcccgaaaacagtgggagcagaaattctgtcaacgttatgaccagctgatggaagcctgggagaagaaggtggagcgaattgagaataacccaaggcgccgagcaaaagagagtaaagttcgtgaatactatgagaagcagttcccggagatccgaaagcagcgagagttacaagagcgcatgcagtcccgggttgggcagcgtggttctggcctcagcatgtcagccgccagatcagagcatgaagtgtccgaaatcatagatggactgtccgaacaggagaatctggaaaagcaaatgcggcagttggccgtgataccacccatgctctatgacgcagaccagcagcgcatcaaatttataaatatgaacggactgatggcagatcccatgaaagtctacaaggacagacaggtcatgaacatgtggtcggagcaggaaaaggagacatttcgcgagaagtttatgcagcatccaaagaacttcggactcatcgcctcatttttggaaagaaaaaccgtggctgagtgtgtgctctactactacctgacaaagaagaatgagaattacaagtcactggtgcgccggtcctacagacgccggggaaaaagtcagcagcagcagcaacaacagcagcagcagcaacaacagcagcagcaacagccaatgcctcggtccagtcaggaggaaaaggacgaaaaagaaaaggagaaagaggccgagaaggaagaggaaaaaccagaggtggaaaatgataaagaagaccttctcaaagagaagaccgacgatactagcggagaagacaacgacgaaaaggaggccgtcgcgtctaaaggtcggaagacagctaactctcagggacgaaggaaaggccgaataacccggtctatggcaaatgaagctaacagcgaggaggccattaccccacagcagagcgccgagctcgcttctatggaattgaatgagtcctctagatggacagaggaggaaatggaaacagccaaaaaaggtctgctcgagcatggccgaaactggagtgctattgcaaggatggtgggcagtaaaactgtcagccagtgcaagaacttctactttaattataagaagagacagaatctcgacgaaatactgcagcagcacaagctgaagatggagaaagagagaaatgcaagaaggaaaaagaagaaggccccggccgccgcgtctgaggaggccgccttcccacccgttgtagaggatgaggagatggaggccagcggcgttagcgggaacgaggaggagatggtagaggaagctgaggccacggtcaacaatagctctgacacagaatccattcctagtccccatacggaggccgctaaagacacaggccagaatggcccaaagcccccagccaccctcggggccgacgggccaccccccgggccacccaccccgcccccagaagatattccagcccctacagagccaacccccgcttctgaggccaccggggccccaacacctccccctgccccaccatccccttcggctccaccgccagtggtgcctaaagaggaaaaggaagaggagaccgctgcagcccctccggtggaagagggtgaggagcagaagcctcctgcagccgaggaacttgccgtggacacaggtaaggcagaagagcctgtgaaatcagagtgcaccgaggaagctgaggagggccccgccaaaggcaaggatgcggaagctgccgaggctacggccgagggcgctctcaaggctgaaaagaaggaaggggggagtggaagagcgactaccgccaaaagttctggcgcaccacaggacagcgacagctccgcgacttgcagcgcagacgaggttgacgaggccgagggcggggataagaaccgtctgctttccccacggccaagtctcttgactcctactggcgatcctagggctaacgcgagcccccagaagccactggatttaaagcaactgaaacagcgcgccgctgccatcccacccatccaggttaccaaggtacacgagcccccaagggaggatgcggccccaaccaagcctgccccgcctgcccctcctccgccccagaatttgcaaccggaaagtgatgctccacagcagcctgggagctccccccgggggaagtcaaggagccccgcccccccagcggacaaagaagcagaaaagcccgtcttcttcccggccttcgccgctgaggctcagaagctgcctggtgaccccccctgctggacatcaggcttgcccttcccagtcccaccccgcgaagtcattaaggcgtctccacacgcgcccgaccctagcgctttcagttatgcacccccagggcaccctttgcctctgggcctgcacgacaccgctaggcccgtgctccctcgaccgcctaccataagcaatccccctccactcatctccagtgctaagcacccatctgttctggagaggcagataggggctatatcccagggaatgagcgtccaactgcacgtcccatactccgagcatgctaaagcacccgtcggccctgttacaatggggctgccgctgcctatggaccccaaaaagttggctccattcagcggcgtcaagcaagagcagcttagtccacgtggacaggccggcccacccgaatccctcggggtgcctactgctcaggaagcctccgtgctccggggcaccgctttaggcagtgtgcccggtggatcaataacaaagggtatcccctctactcgcgtgccatctgattctgcaattacttaccggggatccatcacgcatggcaccccagccgatgttttatacaagggcacaatcacccggatcattggagaggactctcctagtcgtctggatcgaggtcgcgaggactctctgccaaaggggcacgtgatctatgaagggaaaaagggccatgtgctatcctatgaggggggcatgagcgtgacccagtgcagcaaggaggacggaaggtcctcctccgggccaccccacgagaccgctgccccaaaacggacttacgacatgatggaaggaagggttggccgtgccatctctagcgccagtattgaggggctgatgggcagggcaattccacccgagcgacactctccacatcatcttaaagagcagcatcatattcggggaagcataacgcagggaatccctaggtcgtacgttgaggctcaggaagattacctcagacgcgaagcaaaattactcaaaagagagggaaccccgccaccaccccctcccagccgtgatttaacagaagcctacaagacccaggctctgggccctctcaaattgaaaccagcccacgaaggtcttgtcgccaccgtgaaggaggccggccgctcgattcatgagatcccaagagaagagttgagacatacaccagaacttcctcttgcacctcggcctttaaaagaaggttctatcactcaggggacccctctgaagtatgacaccggggccagcaccactggctcaaaaaaacacgacgtacgatccctcattggctccccagggagaacctttccgccggtccacccactggacgtgatggcagatgcccgcgctttggagcgtgcctgctacgaagaaagcctcaagtcccggccagggaccgctagttcttcaggagggagtatcgctagaggcgccccagtcattgttcctgaactgggaaagccccgccagagtcccctgacttacgaggaccacggtgcccctttcgctgggcaccttccaaggggcagtccagtgaccacacgggagccaaccccgcggctccaggagggatctttatccagcagcaaggccagccaggaccgtaagctgaccagcacaccgcgcgagattgctaaatccccgcactctacagtccccgagcaccaccctcatccaatctctccgtacgagcatctgttgagaggtgttagtggcgttgatctgtatagatcccacatccccttggcctttgaccccacaagcatccccaggggaatcccactggatgccgcagccgcctactatctccccaggcacctcgctcccaaccccacatacccacacttgtatcccccatatctgattcgtggctaccccgacaccgccgccttggagaatcggcaaacaatcataaacgactatatcacgtcccagcagatgcaccacaatgccgccacagccatggctcaacgcgcggacatgctaaggggactctccccacgagagtccagtctagccttgaactacgccgcaggcccacgcgggatcatagatctgagtcaagtgccgcacctgccggtactggttccacccacaccgggcacaccagcgactgctatggaccgattagcttatctgcccaccgcaccgcagccctttagttcccggcactcgagtagccctctgtcccctggaggccccacacacctgacaaagcccaccactacgagtagttcagaacgggaacgggatagagaccgggagagagatcgcgacagggaaagggagaagtcaatcttaacttcaaccacaacggtcgaacatgcgccaatctggaggcctggaactgaacagtcttccggttcctcgggtggtggaggcggatcaagttctcgccccgcatcacactcgcacgctcaccagcactctcctatcagcccccgcacccaggacgccttgcagcaacgacctagtgtgctgcacaacacggggatgaaaggaatcataactgccgtcgaaccctcaactcctaccgtgctaagaagcactagcacctcatcccctgtcagaccagccgctacctttcctcctgccacacattgcccgcttggggggaccttagatggcgtttatcccaccttaatggagccagtgctactccccaaagaggccccacgcgttgcccgccctgaacggccgagggctgataccggacatgctttcctggcaaaaccaccagcgcggtccggactggagcctgcttcctcccccagcaaaggcagtgagcctaggcctctcgtgcctccagtgtccggacatgctaccatcgctcggacacctgctaaaaatctggctccgcaccacgcctctcccgatccccccgcgccaccagcttcagccagtgatcctcatagagaaaaaacccagtccaagccattctctatccaagagctggaactgaggtcactggggtaccatggctccagttacagtccagaaggagtggagccagtctcacctgtctctagtccttccctgacccacgacaaaggactgccgaagcacttggaggagctggacaaatcacacctggaaggcgagttgcggccaaagcagccaggacctgtcaagctggggggcgaggcggcgcacctgcctcatctgcgtcctctgcctgagtcacagcccagtagttctccccttctacaaacagcgccaggcgtcaagggacatcagcgggtggtcacgctggcacagcatatctcagaagtcatcacgcaagactatacgcgccaccatccccagcagttaagtgccccactgccagcacccctctacagtttccctggcgcgtcgtgtcctgtcctagatcttagacggcccccttccgacctgtacctgcctcctccagatcacggcgcaccagcccgcggctctcctcattccgaaggaggcaagcgctctccagaacccaataaaaccagtgtcctgggggggggagaggacggtattgaaccagtgtcgcccccagaaggaatgacagaacccgggcatagtaggtccgcagtgtatcccctgttgtaccgggacggtgagcaaactgaacctagcaggatgggctctaaaagccccggaaacaccagccagcccccagccttcttctcaaaacttactgaatctaactccgccatggttaagtcaaaaaaacaggagatcaacaaaaaactcaatacgcacaatcggaacgagccagaatacaacatctctcagccaggcactgaaattttcaacatgccggctatcaccggaaccggcctcatgacttatcggtcacaagccgtccaggagcacgcgtcgaccaacatggggctggaagctatcatccgaaaagccctgatgggcggaggggggaaggctaaggtatctggccggccttcctccaggaaagccaagtctcccgctcccgggttagcgtcaggcgatcggcctccttcagtgagcagtgtgcatagcgaaggagactgcaaccggcggacgcccctgacaaatagagtgtgggaggacaggccctcctccgccgggagcaccccgttcccatataacccgctgatcatgaggctccaggcaggcgtgatggcctcacctccaccgcccggcctgcccgccgggtcagggcccctggcaggtcctcatcacgcctgggatgaagaacctaaaccactgctctgctcacagtatgaaacgctgtccgacagtgagtag

SEQ ID NO: 34808 - DNA, 7377 bp, Artificial Sequence
  derived and/or modified sequence
atgagcggcagcacccagcccgtggcccagacctggcgggccaccgagccgagatatccaccacattcactatcatacccagtgcagatcgcccgcacccacactgatgttgggctgttggagtaccagcaccatagccgggactacgcttcacacctatctcccggttcgattattcaacctcagcgaaggcgcccatctctcctgtccgagtttcaaccagggaatgagaggtcccaggagctgcacctgcgccccgaaagtcactcttatctgcctgagctaggtaaatccgaaatggaattcatagaaagcaagcggccgagactggagttactcccggatcctctgttgaggccgtcccctctcctggctacaggccagccagcaggatccgaggacttgacaaaagatagaagtctcacgggcaagctcgagcccgtgtccccaccctccccgccccataccgacccagaacttgagctggtgcccccaagactgtcgaaagaagagcttattcaaaacatggaccgcgtcgatcgtgaaataacgatggtggaacagcaaattagcaagttgaaaaagaaacaacagcagttggaggaagaggctgctaaaccccccgagccagaaaagccggtgagcccccctcctatcgaaagcaagcaccgaagtctggtccaaatcatatatgacgaaaaccgtaaaaaagcagaagctgctcatcgcatcctggaaggattggggcctcaggttgagctccccctgtataaccaaccttccgacacaaggcagtatcatgagaacatcaagatcaaccaggccatgcgcaaaaagctgatcctctatttcaagaggaggaatcacgcacgtaaacaatgggaacaaaaattctgtcagagatacgaccagctgatggaggcctgggagaaaaaggtggaacgaatcgaaaacaatccacgtcgacgagctaaggaatcgaaggttagagagtactatgaaaagcagtttcccgaaatccgcaaacagcgagagttgcaagagcggatgcagagagtcggccaaagggggtccggcttatctatgtcggcagcccggagcgagcatgaagtcagtgaaattatcgatggattgagtgaacaggagaatctggagaagcagatgaggcagcttgctgtgattccaccaatgctgtacgacgcagatcagcagcgaattaaatttattaatatgaatggactgatggctgaccccatgaaagtttataaggacaggcaagttatgaatatgtggagcgagcaggagaaggagaccttccgcgagaagtttatgcagcatcctaaaaattttggcttaatcgcctctttcctcgaaagaaaaaccgtggcagagtgtgtgttatactactatttaacgaagaagaacgaaaactataagtccctcgtgcgccgatcctatcgccgtaggggcaagagccagcagcaacagcagcaacaacagcagcaacagcaacagcagcaacaacagccaatgcccagaagctcccaagaagaaaaggacgagaaggaaaaggagaaagaagcagagaaggaggaggagaagcctgaagttgagaacgacaaggaagatctgctgaaagagaagaccgacgatacatcaggggaggataatgacgagaaggaagcggtggcctcaaaaggcagaaagacggccaactcgcaaggtcgacgcaagggtagaattactcgcagtatggcgaatgaggccaacagcgaggaagctatcaccccccaacaatccgcagagctggcatccatggagcttaatgaatcttcccgatggaccgaggaggaaatggagacagccaagaagggcctcctggagcatggccggaactggtccgccatagctcgcatggtgggaagcaaaactgtctcacagtgtaagaatttctattttaactataaaaaacgacagaatctcgacgagattctccagcagcataagctgaagatggagaaggagcggaacgccagacgcaagaagaagaaggcgccagccgctgcgtctgaggaggccgcttttccccccgtggtggaggacgaggaaatggaagccagcggagtgagcggaaacgaagaggagatggtggaagaagcagaggccactgtcaacaatagctctgacacagaatccattccctcccctcacactgaggccgcaaaggataccggccagaacgggccaaaaccacccgccacgcttggggccgacggccctcctcctgggccacccactccaccaccggaggacatccctgctcctacggaaccgacgcctgcctctgaagcaactggggcccctaccccgccaccggcccctccttcaccctcagcacccccccccgtggtgccgaaagaggagaaagaagaagaaaccgcagccgctccacctgtcgaagagggcgaagagcagaagccacctgctgcggaggagctggcagtggataccggtaaagcagaggaacctgtcaagtctgagtgtaccgaagaagccgaggaagggcccgcaaagggaaaagatgctgaagccgctgaggcaactgccgagggggccctgaaggccgagaaaaaggaggggggtagcggaagggctaccacggctaaatcctctggggcgccccaggacagcgactcctcagctacttgctccgctgatgaggtggatgaggccgaaggcggtgacaagaatcgactgctgagccctcggccttccctacttacccccaccggggatcctcgcgcaaatgcttctcctcagaaaccgttggaccttaagcagctgaaacagcgggccgcggccatcccaccaattcaggtcacaaaggttcacgaaccccccagggaggatgctgcgcctactaagcccgccccaccagcccccccaccgccacagaacttacagccagaaagtgacgcaccccaacagccggggagtagtcctaggggcaagtcccgcagccccgcacctcctgcagacaaggaggcagaaaaaccagtgttttttccggcatttgcagccgaggcacagaagctccccggggatcccccatgctggacttctggtttgcctttccctgtgccgccccgagaagtgattaaggcttctccacacgctccagatccgagcgcattcagctacgctcccccaggccaccccctgcccctgggactgcacgatactgcgcgccctgtgctccctcgacctccaactattagcaacccacctcctctgatctcctctgctaagcacccatccgtgctggagcgccagatcggtgcaatttcccagggaatgagtgtgcagctgcatgtgccttactctgaacacgccaaagcgccagtcggacccgtgactatggggcttccactgccgatggatcccaagaaactagccccattttccggagtcaaacaggagcagctttctcctagaggccaagcgggccctcctgagtctctaggcgtgcctactgcccaggaggcctccgttctgagagggactgccttgggatctgtcccgggtggatcaattaccaaaggaatcccgtccacaagagtgccctcggactctgcaatcacgtaccggggctcaattacccacgggacccccgcggacgtactgtataagggcaccattacaaggattattggggaggactctcctagtcgcctggacagggggagagaggatagcctgcctaagggacatgtaatctatgagggtaaaaaaggtcacgtcctgtcatacgagggcggcatgtcggtgacccagtgcagtaaagaagatgggcgaagtagttcagggccgcctcacgagacagcggcccctaagagaacatacgatatgatggaaggtagggtaggcagagccatttcctcagctagtattgaaggattgatgggacgcgcgataccacccgagagacatagcccccatcacttaaaagaacaacaccatattagagggagcattacccagggtattccacgatcctacgtggaggcccaagaagattacctcaggcgcgaggccaagttgctcaagagagaaggaactccccctccgcctcctccctcccgagatctaactgaggcatataaaacgcaggccttgggacccttgaagcttaaacccgcacacgagggtctggtggccactgtcaaagaagcaggccgcagcattcatgagatcccccgagaagaactaaggcacaccccagagttgcccctggcaccccgtcctctgaaggagggttcgattactcaagggaccccactgaagtatgacacaggcgcctccaccacaggatcaaagaagcacgatgtgcgatcccttatcggtagcccgggacggaccttccctccagtgcaccccctcgacgtcatggctgacgcgcgggcactggaacgagcctgttacgaggagtcactgaaatctaggccagggactgcaagtagctccgggggcagcattgccaggggcgcccccgtgatcgtgcccgaactggggaaaccacggcagtcccccctaacttatgaagatcacggggccccttttgctggccacctgccacggggcagcccagtgaccactcgggagcccactccccggctgcaggagggttcgctttcaagctcaaaagcttcacaggatcgaaaattgactagcacaccgagggagatcgccaaatccccccactcaactgtgcccgaacaccacccacatcctataagcccctacgagcaccttcttagaggtgtgtctggggtggacctatacagaagccacatcccacttgcattcgatccaacctctatccctaggggcatccccctagacgcggcagcagcgtactacttgcccaggcatctcgccccaaaccccacatatcctcacctgtaccccccatatttgatccgcggttaccccgacacagctgccctggagaatcggcaaacgataattaatgattacattaccagccaacagatgcaccataatgctgcaaccgccatggctcagagagctgacatgctgaggggtctttcaccacgggagtcctctttggcattaaactacgctgccggacccagagggatcatagacctgagtcaggtgccccatctgcccgtactcgtgccacctacccccggtacacctgccactgcaatggatcgtctggcttatctgcccactgcccctcagcctttctcgtcccgtcattctagttctcccctatcaccagggggacccacacatctgaccaagcccactacaacttcgtcctccgaaagggagcgggaccgggacagggaacgggacagggatcgagagcgggaaaaaagcatattgacttcaaccacgacagtggaacacgcacctatttggcggccaggaacggagcaatcatcaggcagctcaggtggcggtggcggttcatcatctagacccgccagtcatagccacgctcaccagcacagcccaatctctccaaggactcaagacgccctccaacagcggccatcggtgctgcacaacacagggatgaaggggattatcactgccgtcgaacctagtacccctacagtactgcgctcaacatctacgagctctccggttagacccgctgccacttttcctcccgctacgcactgtcccctgggcggaacactcgatggcgtctaccctacattaatggagccagtgctgctccctaaagaagccccccgcgtcgctcggcccgagcggccacgagcagatacagggcacgcatttctggctaagccccctgcgaggtccgggctggagcctgcctcaagcccctccaaaggttcagaacctagacctctcgttccaccagtctccggacacgccactatcgccagaactcccgccaagaacctggcaccccaccatgcgtcacctgatccccctgccccacccgcctctgcctccgacccccacagggaaaagacccagtctaagccattctccattcaggagttagagctgagaagcttaggataccatggatcctcctattcacctgaaggagtagaaccagtcagcccagtttcgtccccttcgctgacacacgacaaaggcctgccaaagcacctggaagaacttgacaagtcccacctagagggggaactgcggcctaagcaacccgggccagtgaagctgggcggggaagccgcccacctgccacatctgaggccactacccgaatcacagccttcttcaagcccccttcttcagactgctcccggcgtgaagggccaccagcgggtggttaccctcgcccagcatatcagtgaggtaataacacaggattacacccgacatcacccgcaacaactttcggcccctctgcccgctccactgtactcctttccgggcgcctcttgtcccgtgttggatctgaggcgacccccttctgacctgtatctgcctcctccggatcacggggccccggcccgagggagcccccattcagagggcggaaagcgctcacctgagcctaataaaaccagtgttttgggagggggtgaagacggaatcgaacccgtgagcccgcccgagggcatgactgagcccggacattctagatctgccgtgtatcctctgctatatcgtgacggtgaacagacggagccttcacgcatgggatccaagagtcccggaaacacgtctcagccaccagcctttttctctaaactgacagagtccaacagcgccatggtgaaaagcaaaaagcaggaaattaataaaaaattgaatactcataaccgaaatgagccagagtacaacatcagccagcctggaaccgaaatttttaacatgccagccatcaccgggactggattgatgacctacagatcccaggctgtgcaggagcatgccagcacgaatatgggcctcgaggctattatcagaaaggccctgatgggcggtggtggcaaagctaaggtatcagggcgtccttccagtagaaaggcaaaatctccagcaccaggactggcaagcggggacagacctccctctgtcagttcggttcactcagagggcgattgcaacagacgtacccccctcacgaatagagtgtgggaggacagacctagtagtgcaggaagtacaccattcccatataaccccctcattatgcgactccaggctggagttatggccagcccccccccgcccggcctccctgccggcagcggccccttggccggcccacatcacgcatgggacgaggaacctaagcccctgctctgctcccagtacgaaaccctgtccgactccgagtag

SEQ ID NO: 34809 - DNA, 8522 bp, Artificial Sequence
  derived and/or modified sequence
gagtctttgaggacacagcctcgctggaggcagtttctggtgccagtgacggggtggcccgtgagctgatgacgaggactggcttttaatccttggtggtgattaagagaaagcttattggggcctgggagcagctccccgccgacccccaccaccatgtcgggatccacacagcctgtggcacagacgtggagggccactgagccccgctacccgccccacagcctttcctacccagtgcagatcgcccggacgcacacggacgtcgggctcctggagtaccagcaccactcccgcgactatgcctcccacctgtcgcccggctccatcatccagccccagcggcggaggccctccctgctgtctgagttccagcccgggaatgaacggtcccaggagctccacctgcggccagagtcccactcatacctgcccgagctggggaagtcagagatggagttcattgaaagcaagcgccctcggctagagctgctgcctgaccccctgctgcgaccgtcacccctgctggccacgggccagcctgcgggatctgaagacctcaccaaggaccgtagcctgacgggcaagctggaaccggtgtctccccccagccccccgcacactgaccctgagctggagctggtgccgccacggctgtccaaggaggagctgatccagaacatggaccgcgtggaccgagagatcaccatggtagagcagcagatctctaagctgaagaagaagcagcaacagctggaggaggaggctgccaagccgcccgagcctgagaagcccgtgtcaccgccgcccatcgagtcgaagcaccgcagcctggtgcagatcatctacgacgagaaccggaagaaggctgaagctgcacatcggattctggaaggcctggggccccaggtggagctgccgctgtacaaccagccctccgacacccggcagtatcatgagaacatcaaaataaaccaggcgatgcggaagaagctaatcttgtacttcaagaggaggaatcacgctcggaaacaatgggagcagaagttctgccagcgctatgaccagctcatggaggcctgggagaagaaggtggagcgcatcgagaacaacccccggcggcgggccaaggagagcaaggtgcgcgagtactacgagaagcagttccctgagatccgcaagcagcgcgagctgcaggagcgcatgcagagcagggtgggccagcggggcagtgggctgtccatgtcggccgcccgcagcgagcacgaggtgtcagagatcatcgatggcctctcagagcaggagaacctggagaagcagatgcgccagctggccgtgatcccgcccatgctgtacgacgctgaccagcagcgcatcaagttcatcaacatgaacgggcttatggccgaccccatgaaggtgtacaaagaccgccaggtcatgaacatgtggagtgagcaggagaaggagaccttccgggagaagttcatgcagcatcccaagaactttggcctgatcgcatcattcctggagaggaagacagtggctgagtgcgtcctctattactacctgactaagaagaatgagaactataagagcctggtgagacggagctatcggcgccgcggcaagagccagcagcagcaacaacagcagcagcagcagcagcagcagcagcagcagcagcccatgccccgcagcagccaggaggagaaagatgagaaggagaaggaaaaggaggcggagaaggaggaggagaagccggaggtggagaacgacaaggaagacctcctcaaggagaagacagacgacacctcaggggaggacaacgacgagaaggaggctgtggcctccaaaggccgcaaaactgccaacagccagggaagacgcaaaggccgcatcacccgctcaatggctaatgaggccaacagcgaggaggccatcaccccccagcagagcgccgagctggcctccatggagctgaatgagagttctcgctggacagaagaagaaatggaaacagccaagaaaggtctcctggaacacggccgcaactggtcggccatcgcccggatggtgggctccaagactgtgtcgcagtgtaagaacttctacttcaactacaagaagaggcagaacctcgatgagatcttgcagcagcacaagctgaagatggagaaggagaggaacgcgcggaggaagaagaagaaagcgccggcggcggccagcgaggaggctgcattcccgcccgtggtggaggatgaggagatggaggcgtcgggcgtgagcggaaatgaggaggagatggtggaggaggctgaagccactgtcaacaacagctcagacaccgagagcatcccctctcctcacactgaggccgccaaggacacagggcagaatgggcccaagcccccagccaccctgggcgccgacgggccacccccagggccacccaccccaccaccggaggacatcccggcccccactgagcccaccccggcctctgaagccaccggagcccctacgcccccaccagcacccccatcgccctctgcacctcctcctgtggtccccaaggaggagaaggaggaggagaccgcagcagcgcccccagtggaggagggggaggagcagaagccccccgcggctgaggagctggcagtggacacagggaaggccgaggagcccgtcaagagcgagtgcacggaggaagccgaggaggggccggccaagggcaaggacgcggaggccgctgaggccacggccgagggggcgctcaaggcagagaagaaggagggcgggagcggcagggccaccacagccaagagctcgggcgccccccaggacagcgactccagtgctacctgcagtgcagacgaggtggatgaggccgagggcggcgacaagaaccggctgctgtccccaaggcccagcctcctcaccccgactggcgacccccgggccaatgcctcaccccagaagccactggacctgaagcagctgaagcagcgagcggctgccatcccccccatccaggtcaccaaagtccatgagcccccccgggaggacgcagctcccaccaagccagctcccccagccccaccgccaccgcaaaacctgcagccggagagcgacgcccctcagcagcctggcagcagcccccggggcaagagcaggagcccggcaccccccgccgacaaggaggcagagaagcctgtgttcttcccagccttcgcagccgaggcccagaagctgcctggggaccccccttgctggacttccggcctgcccttccccgtgcccccccgtgaggtgatcaaggcctccccgcatgccccggacccctcagccttctcctacgctccacctggtcacccactgcccctgggcctccatgacactgcccggcccgtcctgccgcgcccacccaccatctccaacccgcctcccctcatctcctctgccaagcaccccagcgtcctcgagaggcaaataggtgccatctcccaaggaatgtcggtccagctccacgtcccgtactcagagcatgccaaggccccggtgggccctgtcaccatggggctgcccctgcccatggaccccaaaaagctggcacccttcagcggagtgaagcaggagcagctgtccccacggggccaggctgggccaccggagagcctgggggtgcccacagcccaggaggcgtccgtgctgagagggacagctctgggctcagttccgggcggaagcatcaccaaaggcattcccagcacacgggtgccctcggacagcgccatcacataccgcggctccatcacccacggcacgccagctgacgtcctgtacaagggcaccatcaccaggatcatcggcgaggacagcccgagtcgcttggaccgcggccgggaggacagcctgcccaagggccacgtcatctacgaaggcaagaagggccacgtcttgtcctatgagggtggcatgtctgtgacccagtgctccaaggaggacggcagaagcagctcaggacccccccatgagacggccgcccccaagcgcacctatgacatgatggagggccgcgtgggcagagccatctcctcagccagcatcgaaggtctcatgggccgtgccatcccgccggagcgacacagcccccaccacctcaaagagcagcaccacatccgcgggtccatcacacaagggatccctcggtcctacgtggaggcacaggaggactacctgcgtcgggaggccaagctcctaaagcgggagggcacgcctccgcccccaccgccctcacgggacctgaccgaggcctacaagacgcaggccctgggccccctgaagctgaagccggcccatgagggcctggtggccacggtgaaggaggcgggccgctccatccatgagatcccgcgcgaggagctgcggcacacgcccgagctgcccctggccccgcggccgctcaaggagggctccatcacgcagggcaccccgctcaagtacgacaccggcgcgtccaccactggctccaaaaagcacgacgtacgctccctcatcggcagccccggccggacgttcccacccgtgcacccgctggatgtgatggccgacgcccgggcactggaacgtgcctgctacgaggagagcctgaagagccggccagggaccgccagcagctcggggggctccattgcgcgcggcgccccggtcattgtgcctgagctgggtaagccgcggcagagccccctgacctatgaggaccacggggcaccctttgccggccacctcccacgaggttcgcccgtgaccacgcgggagcccacgccgcgcctgcaggagggcagcctttcgtccagcaaggcatcccaggaccgaaagctgacgtcgacgcctcgtgagatcgccaagtccccgcacagcaccgtgcccgagcaccacccacaccccatctcgccctatgagcacctgcttcggggcgtgagtggcgtggacctgtatcgcagccacatccccctggccttcgaccccacctccataccccgcggcatccctctggacgcagccgctgcctactacctgccccgacacctggcccccaaccccacctacccgcacctgtacccaccctacctcatccgcggctaccccgacacggcggcgctggagaaccggcagaccatcatcaatgactacatcacctcgcagcagatgcaccacaacgcggccaccgccatggcccagcgagctgatatgctgaggggcctctcgccccgcgagtcctcgctggcactcaactacgctgcgggtccccgaggcatcatcgacctgtcccaagtgccacacctgcctgtgctcgtgcccccgacaccaggcaccccagccaccgccatggaccgccttgcctacctccccaccgcgccccagcccttcagcagccgccacagcagctccccactctccccaggaggtccaacacacttgacaaaaccaaccaccacgtcctcgtccgagcgggagcgagaccgggatcgagagcgggaccgggatcgggagcgggaaaagtccatcctcacgtccaccacgacggtggagcacgcacccatctggagacctggtacagagcagagcagcggcagcagcggcgggggtgggggcagcagcagccgccccgcctcccactcccatgcccaccagcactcgcccatctcccctcggacccaggatgccctccagcagagacccagtgtgcttcacaacacaggcatgaagggtatcatcaccgctgtggagcccagcacgcccacggtcctgaggtccacctccacctcctcacccgttcgcccggctgccacattcccacctgccacccactgcccactgggcggcaccctcgatggggtctaccctaccctcatggagcccgtcttgctgcccaaggaggccccccgggtcgcccggccagagcggccccgagcagacaccggccatgccttcctcgccaagcccccagcccgctccgggctggagcccgcctcctcccccagcaagggctcggagccccggcccctagtgcctcctgtctctggccacgccaccatcgcccgcacccctgcgaagaacctcgcacctcaccacgccagcccggacccgccggcgccacctgcctcggcctcggacccgcaccgggaaaagactcaaagtaaacccttttccatccaggaactggaactccgttctctgggttaccacggcagcagctacagccccgaaggggtggagcccgtcagccctgtgagctcacccagtctgacccacgacaaggggctccccaagcacctggaagagctcgacaagagccacctggagggggagctgcggcccaagcagccaggccccgtgaagcttggcggggaggccgcccacctcccacacctgcggccgctgcctgagagccagccctcgtccagcccgctgctccagaccgccccaggggtcaaaggtcaccagcgggtggtcaccctggcccagcacatcagtgaggtcatcacacaggactacacccggcaccacccacagcagctcagcgcacccctgcccgcccccctctactccttccctggggccagctgccccgtcctggacctccgccgcccacccagtgacctctacctcccgcccccggaccatggtgccccggcccgtggctccccccacagcgaagggggcaagaggtctccagagccaaacaagacgtcggtcttgggtggtggtgaggacggtattgaacctgtgtccccaccggagggcatgacggagccagggcactcccggagtgctgtgtacccgctgctgtaccgggatggggaacagacggagcccagcaggatgggctccaagtctccaggcaacaccagccagccgccagccttcttcagcaagctgaccgagagcaactccgccatggtcaagtccaagaagcaagagatcaacaagaagctgaacacccacaaccggaatgagcctgaatacaatatcagccagcctgggacggagatcttcaatatgcccgccatcaccggaacaggccttatgacctatagaagccaggcggtgcaggaacatgccagcaccaacatggggctggaggccataattagaaaggcactcatgggtggcggcgggaaggccaaggtctctggcagacccagcagccgaaaagccaagtccccggccccgggcctggcatctggggaccggccaccctctgtctcctcagtgcactcggagggagactgcaaccgccggacgccgctcaccaaccgcgtgtgggaggacaggccctcgtccgcaggttccacgccattcccctacaaccccctgatcatgcggctgcaggcgggtgtcatggcttccccacccccaccgggcctccccgcgggcagcgggcccctcgctggcccccaccacgcctgggacgaggagcccaagccactgctctgctcgcagtacgagacactctccgacagcgagtgactcagaacagggcgggggggggggcggtgtcaggtcccagcgagccacaggaacggccctgcaggagcagggcggctgccgactcccccaaccaaggaaggagcccctgagtccgcctgcgcctccatccatctgtccgtccagagccggcatccttgcctgtctaaagccttaactaagactcccgccccgggctggccctgtgcagaccttactcaggggatgtttacctggtgctcgggaagggaggggaaggggccggggagggggcacggcaggcgtgtggcagccacacgcaggcggccagggcggccagggacccaaagcaggatgaccacgcacctccacgccactgcctcccccgaatgcatttggaaccaaagtctaaactgagctcgcagcccccgcgccctccctccgcctcccatcccgcttagcgctctggacagatggacgcaggccctgtccagcccccagtgcgctcgttccggtccccacagactgccccagccaacgagattgctggaaaccaagtcaggccaggtgggcggacaaaagggccaggtgcggcctggggggaacggatgctccgaggactggactgtttttttcacacatcgttgccgcagcggtgggaaggaaaggcagatgtaaatgatgtgttggtttacagggtatatttttgataccttcaatgaattaattcagatgttttacgcaaggaaggacttacccagtattactgctgctgtgcttttgatctctgcttaccgttcaagaggcgtgtgcaggccgacagtcggtgaccccatcactcgcaggaccaagggggcggggactgctggctcacgccccgctgtgtcctccctccctcccttccttgggcagaatgaattcgatgcgtattctgtggccgccatctgcgcagggtggtggtattctgtcatttacacacgtcgttctaattaaaaagcgaattatactcc

SEQ ID NO: 34810 - DNA, 8520 bp, Artificial Sequence
  derived and/or modified sequence
gagtctttgaggacacagcctcgctggaggcagtttctggtgccagtgacggggtggcccgtgagctgatgacgaggactggcttttaatccttggtggtgattaagagaaagcttattggggcctgggagcagctccccgccgacccccaccaccatgtcgggatccacacagcctgtggcacagacgtggagggccactgagccccgctacccgccccacagcctttcctacccagtgcagatcgcccggacgcacacggacgtcgggctcctggagtaccagcaccactcccgcgactatgcctcccacctgtcgcccggctccatcatccagccccagcggcggaggccctccctgctgtctgagttccagcccgggaatgaacggtcccaggagctccacctgcggccagagtcccactcatacctgcccgagctggggaagtcagagatggagttcattgaaagcaagcgccctcggctagagctgctgcctgaccccctgctgcgaccgtcacccctgctggccacgggccagcctgcgggatctgaagacctcaccaaggaccgtagcctgacgggcaagctggaaccggtgtctccccccagccccccgcacactgaccctgagctggagctggtgccgccacggctgtccaaggaggagctgatccagaacatggaccgcgtggaccgagagatcaccatggtagagcagcagatctctaagctgaagaagaagcagcaacagctggaggaggaggctgccaagccgcccgagcctgagaagcccgtgtcaccgccgcccatcgagtcgaagcaccgcagcctggtgcagatcatctacgacgagaaccggaagaaggctgaagctgcacatcggattctggaaggcctggggccccaggtggagctgccgctgtacaaccagccctccgacacccggcagtatcatgagaacatcaaaataaaccaggcgatgcggaagaagctaatcttgtacttcaagaggaggaatcacgctcggaaacaatgggagcagaagttctgccagcgctatgaccagctcatggaggcctgggagaagaaggtggagcgcatcgagaacaacccccggcggcgggccaaggagagcaaggtgcgcgagtactacgagaagcagttccctgagatccgcaagcagcgcgagctgcaggagcgcatgcagagggtgggccagcggggcagtgggctgtccatgtcggccgcccgcagcgagcacgaggtgtcagagatcatcgatggcctctcagagcaggagaacctggagaagcagatgcgccagctggccgtgatcccgcccatgctgtacgacgctgaccagcagcgcatcaagttcatcaacatgaacgggcttatggccgaccccatgaaggtgtacaaagaccgccaggtcatgaacatgtggagtgagcaggagaaggagaccttccgggagaagttcatgcagcatcccaagaactttggcctgatcgcatcattcctggagaggaagacagtggctgagtgcgtcctctattactacctgactaagaagaatgagaactataagagcctggtgagacggagctatcggcgccgcggcaagagccagcagcagcaacaacagcagcagcagcagcagcagcagcagcagcagcagcccatgccccgcagcagccaggaggagaaagatgagaaggagaaggaaaaggaggcggagaaggaggaggagaagccggaggtggagaacgacaaggaagacctcctcaaggagaagacagacgacacctcaggggaggacaacgacgagaaggaggctgtggcctccaaaggccgcaaaactgccaacagccagggaagacgcaaaggccgcatcacccgctcaatggctaatgaggccaacagcgaggaggccatcaccccccagcagagcgccgagctggcctccatggagctgaatgagagttctcgctggacagaagaagaaatggaaacagccaagaaaggtctcctggaacacggccgcaactggtcggccatcgcccggatggtgggctccaagactgtgtcgcagtgtaagaacttctacttcaactacaagaagaggcagaacctcgatgagatcttgcagcagcacaagctgaagatggagaaggagaggaacgcgcggaggaagaagaagaaagcgccggcggcggccagcgaggaggctgcattcccgcccgtggtggaggatgaggagatggaggcgtcgggcgtgagcggaaatgaggaggagatggtggaggaggctgaagccactgtcaacaacagctcagacaccgagagcatcccctctcctcacactgaggccgccaaggacacagggcagaatgggcccaagcccccagccaccctgggcgccgacgggccacccccagggccacccaccccaccaccggaggacatcccggcccccactgagcccaccccggcctctgaagccaccggagcccctacgcccccaccagcacccccatcgccctctgcacctcctcctgtggtccccaaggaggagaaggaggaggagaccgcagcagcgcccccagtggaggagggggaggagcagaagccccccgcggctgaggagctggcagtggacacagggaaggccgaggagcccgtcaagagcgagtgcacggaggaagccgaggaggggccggccaagggcaaggacgcggaggccgctgaggccacggccgagggggcgctcaaggcagagaagaaggagggcgggagcggcagggccaccacagccaagagctcgggcgccccccaggacagcgactccagtgctacctgcagtgcagacgaggtggatgaggccgagggcggcgacaagaaccggctgctgtccccaaggcccagcctcctcaccccgactggcgacccccgggccaatgcctcaccccagaagccactggacctgaagcagctgaagcagcgagcggctgccatcccccccatccaggtcaccaaagtccatgagcccccccgggaggacgcagctcccaccaagccagctcccccagccccaccgccaccgcaaaacctgcagccggagagcgacgcccctcagcagcctggcagcagcccccggggcaagagcaggagcccggcaccccccgccgacaaggaggcagagaagcctgtgttcttcccagccttcgcagccgaggcccagaagctgcctggggaccccccttgctggacttccggcctgcccttccccgtgcccccccgtgaggtgatcaaggcctccccgcatgccccggacccctcagccttctcctacgctccacctggtcacccactgcccctgggcctccatgacactgcccggcccgtcctgccgcgcccacccaccatctccaacccgcctcccctcatctcctctgccaagcaccccagcgtcctcgagaggcaaataggtgccatctcccaaggaatgtcggtccagctccacgtcccgtactcagagcatgccaaggccccggtgggccctgtcaccatggggctgcccctgcccatggaccccaaaaagctggcacccttcagcggagtgaagcaggagcagctgtccccacggggccaggctgggccaccggagagcctgggggtgcccacagcccaggaggcgtccgtgctgagagggacagctctgggctcagttccgggcggaagcatcaccaaaggcattcccagcacacgggtgccctcggacagcgccatcacataccgcggctccatcacccacggcacgccagctgacgtcctgtacaagggcaccatcaccaggatcatcggcgaggacagcccgagtcgcttggaccgcggccgggaggacagcctgcccaagggccacgtcatctacgaaggcaagaagggccacgtcttgtcctatgagggtggcatgtctgtgacccagtgctccaaggaggacggcagaagcagctcaggacccccccatgagacggccgcccccaagcgcacctatgacatgatggagggccgcgtgggcagagccatctcctcagccagcatcgaaggtctcatgggccgtgccatcccgccggagcgacacagcccccaccacctcaaagagcagcaccacatccgcgggtccatcacacaagggatccctcggtcctacgtggaggcacaggaggactacctgcgtcgggaggccaagctcctaaagcgggagggcacgcctccgcccccaccgccctcacgggacctgaccgaggcctacaagacgcaggccctgggccccctgaagctgaagccggcccatgagggcctggtggccacggtgaaggaggcgggccgctccatccatgagatcccgcgcgaggagctgcggcacacgcccgagctgcccctggccccgcggccgctcaaggagggctccatcacgcagggcaccccgctcaagtacgacaccggcgcgtccaccactggctccaaaaagcacgacgtacgctccctcatcggcagccccggccggacgttcccacccgtgcacccgctggatgtgatggccgacgcccgggcactggaacgtgcctgctacgaggagagcctgaagagccggccagggaccgccagcagctcggggggctccattgcgcgcggcgccccggtcattgtgcctgagctgggtaagccgcggcagagccccctgacctatgaggaccacggggcaccctttgccggccacctcccacgaggttcgcccgtgaccacgcgggagcccacgccgcgcctgcaggagggcagcctttcgtccagcaaggcatcccaggaccgaaagctgacgtcgacgcctcgtgagatcgccaagtccccgcacagcaccgtgcccgagcaccacccacaccccatctcgccctatgagcacctgcttcggggcgtgagtggcgtggacctgtatcgcagccacatccccctggccttcgaccccacctccataccccgcggcatccctctggacgcagccgctgcctactacctgccccgacacctggcccccaaccccacctacccgcacctgtacccaccctacctcatccgcggctaccccgacacggcggcgctggagaaccggcagaccatcatcaatgactacatcacctcgcagcagatgcaccacaacgcggccaccgccatggcccagcgagctgatatgctgaggggcctctcgccccgcgagtcctcgctggcactcaactacgctgcgggtccccgaggcatcatcgacctgtcccaagtgccacacctgcctgtgctcgtgcccccgacaccaggcaccccagccaccgccatggaccgccttgcctacctccccaccgcgccccagcccttcagcagccgccacagcagctccccactctccccaggaggtccaacacacttgacaaaaccaaccaccacgtcctcgtccgagcgggagcgagaccgggatcgagagcgggaccgggatcgggagcgggaaaagtccatcctcacgtccaccacgacggtggagcacgcacccatctggagacctggtacagagcagagcagcggcagcagcggcgggggtgggggcagcagcagccgccccgcctcccactcccatgcccaccagcactcgcccatctcccctcggacccaggatgccctccagcagagacccagtgtgcttcacaacacaggcatgaagggtatcatcaccgctgtggagcccagcacgcccacggtcctgaggtccacctccacctcctcacccgttcgcccggctgccacattcccacctgccacccactgcccactgggcggcaccctcgatggggtctaccctaccctcatggagcccgtcttgctgcccaaggaggccccccgggtcgcccggccagagcggccccgagcagacaccggccatgccttcctcgccaagcccccagcccgctccgggctggagcccgcctcctcccccagcaagggctcggagccccggcccctagtgcctcctgtctctggccacgccaccatcgcccgcacccctgcgaagaacctcgcacctcaccacgccagcccggacccgccggcgccacctgcctcggcctcggacccgcaccgggaaaagactcaaagtaaacccttttccatccaggaactggaactccgttctctgggttaccacggcagcagctacagccccgaaggggtggagcccgtcagccctgtgagctcacccagtctgacccacgacaaggggctccccaagcacctggaagagctcgacaagagccacctggagggggagctgcggcccaagcagccaggccccgtgaagcttggcggggaggccgcccacctcccacacctgcggccgctgcctgagagccagccctcgtccagcccgctgctccagaccgccccaggggtcaaaggtcaccagcgggtggtcaccctggcccagcacatcagtgaggtcatcacacaggactacacccggcaccacccacagcagctcagcgcacccctgcccgcccccctctactccttccctggggccagctgccccgtcctggacctccgccgcccacccagtgacctctacctcccgcccccggaccatggtgccccggcccgtggctccccccacagcgaagggggcaagaggtctccagagccaaacaagacgtcggtcttgggtggtggtgaggacggtattgaacctgtgtccccaccggagggcatgacggagccagggcactcccggagtgctgtgtacccgctgctgtaccgggatggggaacagacggagcccagcaggatgggctccaagtctccaggcaacaccagccagccgccagccttcttcagcaagctgaccgagagcaactccgccatggtcaagtccaagaagcaagagatcaacaagaagctgaacacccacaaccggaatgagcctgaatacaatatcagccagcctgggacggagatcttcaatatgcccgccatcaccggaacaggccttatgacctatagaagccaggcggtgcaggaacatgccagcaccaacatggggctggaggccataattagaaaggcactcatgggtggcggcgggaaggccaaggtctctggcagacccagcagccgaaaagccaagtccccggccccgggcctggcatctggggaccggccaccctctgtctcctcagtgcactcggagggagactgcaaccgccggacgccgctcaccaaccgcgtgtgggaggacaggccctcgtccgcaggttccacgccattcccctacaaccccctgatcatgcggctgcaggcgggtgtcatggcttccccacccccaccgggcctccccgcgggcagcgggcccctcgctggcccccaccacgcctgggacgaggagcccaagccactgctctgctcgcagtacgagacactctccgacagcgagtgactcagaacagggcgggggggggggcggtgtcaggtcccagcgagccacaggaacggccctgcaggagcagggcggctgccgactcccccaaccaaggaaggagcccctgagtccgcctgcgcctccatccatctgtccgtccagagccggcatccttgcctgtctaaagccttaactaagactcccgccccgggctggccctgtgcagaccttactcaggggatgtttacctggtgctcgggaagggaggggaaggggccggggagggggcacggcaggcgtgtggcagccacacgcaggcggccagggcggccagggacccaaagcaggatgaccacgcacctccacgccactgcctcccccgaatgcatttggaaccaaagtctaaactgagctcgcagcccccgcgccctccctccgcctcccatcccgcttagcgctctggacagatggacgcaggccctgtccagcccccagtgcgctcgttccggtccccacagactgccccagccaacgagattgctggaaaccaagtcaggccaggtgggcggacaaaagggccaggtgcggcctggggggaacggatgctccgaggactggactgtttttttcacacatcgttgccgcagcggtgggaaggaaaggcagatgtaaatgatgtgttggtttacagggtatatttttgataccttcaatgaattaattcagatgttttacgcaaggaaggacttacccagtattactgctgctgtgcttttgatctctgcttaccgttcaagaggcgtgtgcaggccgacagtcggtgaccccatcactcgcaggaccaagggggcggggactgctggctcacgccccgctgtgtcctccctccctcccttccttgggcagaatgaattcgatgcgtattctgtggccgccatctgcgcagggtggtggtattctgtcatttacacacgtcgttctaattaaaaagcgaattatactcca

SEQ ID NO: 34811 - DNA, 7379 bp, Artificial Sequence
  derived and/or modified sequence
atgagcgggagcacacagccggtggctcagacgtggagggccacagagcctagatacccacctcattcacttagctaccctgtccagattgctaggactcacactgatgtgggactgctggagtaccagcaccacagtcgagactatgcttcacacctgtctccgggatcgatcatccagccacagaggcgtagaccatctttgctatctgagttccagcctggtaatgaacggtctcaggagctccacctccgtcctgaaagtcatagctacctgcccgagcttggaaaatcggaaatggagttcattgagagtaaacggcctcgcctggagctactcccggaccctttactgcgcccaagtcccttgttggctacgggccagccagccggaagcgaggacctgactaaggaccgcagtctaaccggcaaactcgaacccgtaagccctcccagccctccccacaccgatcccgaactagaactggtgccaccccgactgagcaaagaagagttgatccagaacatggatagagttgaccgtgaaatcactatggtcgagcaacagattagtaagcttaagaagaaacagcagcagttggaggaagaggctgcaaagccccctgaacctgaaaagccagtgagtcccccacccatagaatccaagcataggtctctggtgcagatcatttatgatgaaaatagaaaaaaggccgaggctgctcaccgcatactcgagggactgggcccacaggtggagctcccactatacaatcagccttccgacactcgccagtaccacgagaacatcaagatcaaccaggctatgcggaagaagctgatcctctacttcaagagaaggaatcatgcacgcaagcagtgggagcagaagttctgtcaacgttacgatcagctcatggaagcatgggagaaaaaggtcgagcgaatagagaacaacccaagaagacgcgcaaaggagagcaaggtccgcgaatattatgagaagcaatttcccgagatccgaaagcaaagagagttacaggaacgcatgcagagccgcgtcggacagagaggatccgggctctcaatgagcgctgcccgttctgagcatgaggtgtccgagataatagacgggctgtctgaacaggaaaacttagagaagcagatgcggcaactagctgtgatccctccaatgctgtatgacgccgaccaacagcgtattaagtttataaacatgaacgggctgatggccgatcctatgaaggtgtacaaagaccggcaggttatgaatatgtggtctgaacaagagaaggagacattccgtgagaaatttatgcagcaccctaaaaactttggactgattgcttcatttttggagcgaaaaactgtcgccgagtgcgtgctctactattatctgactaaaaagaacgagaattataaatctttagttagaagatcttacaggagaagaggcaagagccaacagcaacagcaacaacagcagcaacagcaacagcaacaacagcaacaacctatgccaagatcttcacaggaggaaaaagatgaaaaagagaaagagaaggaggcagagaaagaggaggaaaaaccggaggttgagaacgacaaggaagaccttctaaaggagaagactgacgacactagtggagaggataatgacgaaaaagaagctgtggccagcaagggcaggaagactgccaattctcagggcaggaggaaaggccgaattacccgctctatggcgaacgaggcaaatagtgaagaggcgattactccacagcagtctgccgagctcgccagcatggagctaaatgaatcctcgcgctggactgaggaggaaatggaaactgccaaaaaaggtctgttagaacacggcagaaactggtctgccatcgcccgtatggtcggttcaaaaactgtgtcccagtgtaagaacttttatttcaattataaaaaaaggcagaatctggatgagatcctgcagcagcacaaactcaagatggagaaggagagaaacgctcggagaaagaagaagaaggccccagcagccgcatccgaggaggctgcttttccaccggtggtcgaggatgaagaaatggaggcttcgggagttagcggaaacgaggaggagatggtcgaggaagctgaggccacagtgaacaactccagtgatactgagtcaattccctcaccccacaccgaggccgctaaagataccgggcagaatgggccaaagcccccagccaccctgggcgctgatggaccccctcccggtccgcctacccctcccccagaggacattcccgcacctaccgagccaacaccagcctctgaggctaccggagcccctacaccaccaccagccccaccctcaccaagcgcaccaccccctgttgtgcctaaagaagagaaagaagaggagactgccgctgccccaccagtggaagagggtgaggagcaaaagccccctgctgccgaggagctggcagtcgatactgggaaagccgaggagccagtaaagtctgagtgtaccgaagaggccgaagagggacctgctaagggcaaggacgcggaggccgctgaggctaccgctgaaggagctctgaaggccgagaagaaggagggtggaagtgggcgagcaaccaccgcaaagagttcaggagctccccaggattccgacagctcggcaacctgctcagcagacgaggtggacgaggccgagggcggtgacaagaatcgccttctgtcacccagaccctctctattgacccccaccggggatcctcgtgccaatgcaagccctcaaaagccactcgacctgaagcagctgaaacaaagagccgctgccataccacctattcaggttacaaaggtgcatgagcccccaagagaggatgcagcccctactaagccagctccacctgcaccccctccccctcagaatctccagcctgagtccgacgctccccagcagccgggatcgtccccacggggaaagagccgcagccctgcccctcccgcagataaggaagcagagaaaccagtgttctttccggcttttgccgcagaagctcagaaattgcctggggatcccccttgctggacttcagggctccctttcccagtccccccacgcgaggtcatcaaggcctcccctcatgcccctgatccgtctgccttttcttacgccccacccggacatcccctgccactgggcctgcacgacaccgccagaccggtgttgcccagaccccctacgattagcaatccgcctccccttatatcaagcgcaaaacacccttccgtgctggaacgacagattggcgctataagtcaaggtatgagcgtgcagctgcacgtgccttactcagaacatgccaaggcaccagttggtccggtgaccatgggcctgccgctgccaatggatcccaagaaactcgccccattctcaggcgtcaagcaagagcaactctcaccacgtgggcaggccggacccccagaatctctgggggtccctacagcccaggaagccagcgtgctaaggggcaccgccctgggctccgtgcctggaggctctataactaagggcatcccatcaacaagagtgccctctgacagtgctatcacgtatcgaggcagcatcacgcatgggacccctgctgacgttttgtacaagggaactatcactcgcatcataggagaagactcccctagccgactcgaccggggtcgggaggactcgctgccaaagggccatgtcatatatgagggcaaaaaagggcacgtcctttcatacgaaggcggaatgtctgtcacccagtgcagcaaggaggatgggagatcgagctccggaccgcctcacgaaaccgccgctccgaagagaacatatgacatgatggaaggacgggtaggccgagccatttcttccgcttctatcgaaggtttaatgggaagagccattcccccagaacgccattccccgcatcacctcaaagaacagcaccatatcagaggaagcatcacccaggggattccccgatcctacgttgaggcacaggaggactatttacggcgagaagccaagctcctcaaacgggagggaactcctcccccacccccaccttccagagacctgacggaggcttacaaaacgcaggccttgggccctctgaaacttaaaccagcgcatgaaggcctggtcgccacagtcaaggaagctggtcgaagcatacacgagattccacgggaagagctacgccatacgcctgagctacccctggccccacggccactgaaagaggggtctattacccagggcacgcccctcaagtacgacaccggcgcaagtacaaccggatccaaaaaacacgatgtgagatctctcatcgggtcccctggacgtacattccctccagtccacccgttggatgtgatggctgatgcacgggcactggaacgggcttgctatgaagagtctcttaagtctcgaccagggactgcatcctcatctggagggagcattgcgagaggcgcacctgtcattgtacctgagctcggcaagcccaggcagtccccactcacttacgaagatcacggcgcacctttcgccggacacctccccagaggtagtcccgtgactacacgggaacctaccccacgcctgcaggagggcagtctgagtagtagtaaggcttcacaggatagaaaactaacctctacacctagagaaatagccaaatctccacactcaacagtacccgagcatcatccgcacccaatctcaccttacgaacatctgctgcgcggagttagcggcgttgacctctatcgttcgcacattccccttgcattcgacccgaccagtattcccaggggcatcccactcgacgcagcggcagcatactacctgcctcgtcatttggcccctaaccccacttaccctcatttgtacccaccctatttgatcaggggctacccagacacggccgcactagagaacaggcagaccatcattaatgattatattactagccaacaaatgcaccacaatgcggctacagccatggctcagagggccgacatgttaaggggccttagtccaagagaatcctccctggctcttaattacgccgctgggccacgcggaatcatcgatctgagccaggttccccaccttcccgtgctcgtcccccctacccccggaacacccgctactgcgatggaccggctcgcctacctgccgacagcaccgcagccgtttagctcccgtcatagttcatccccactctcgccgggaggcccaactcatttgaccaaaccgacaactacaagctcctcagagagagagcgggaccgagatcgcgagagggaccgcgatcgggagcgagaaaagtctattctgacctcaacaacgaccgtggaacacgcacccatttggagaccgggaacagaacagagtagcggctcttcaggcggaggtggcggttcttcgagccgtcctgcttcccattcccatgcacaccagcacagtccgatcagtccgaggactcaggacgctctgcagcaacgcccttcagtcttgcataataccgggatgaaaggtattatcaccgccgtagagccgagcacacctactgtgctgcgctcaacaagtacctccagccccgttagacccgctgctacatttcctccagccactcactgccccctggggggtacgttggatggggtttaccccactctaatggaaccagtgctgctgcccaaggaggcccctagggtggcacgccctgaaaggccacgcgctgataccgggcacgccttcttggccaaaccaccggctaggagcgggctcgaacccgcatcaagcccatcaaagggctctgagcccagaccactggtcccgccagtatccgggcacgcgaccatcgctaggactcctgctaagaatctggccccacatcacgcctctcctgatccccctgcccctccggcatctgccagcgatccccatagagagaagacacagagcaagccatttagcatacaggagctcgagctcaggtcactggggtatcacggctcctcctactcacccgagggtgtagagcctgtctctccagttagctccccttcccttacacacgataaaggactccctaaacacctggaggagcttgacaagtcccatcttgagggcgagctcagaccaaagcagccaggcccagtcaagctgggcggtgaagcagctcatctgcctcatctcagaccactgcccgagtcacaaccaagctcatcacctctgctccaaacagctccaggagtcaaaggccaccaaagggtggtcacactggcgcagcatattagtgaggtcatcacacaggattacacccgccatcacccacagcaactgtctgctccattgcccgctccactctactctttcccgggagcgtcctgtcccgtcctggacctgcgaagacccccaagcgacttatacctgcctccaccagatcacggtgcgcctgccagggggagcccccattcagaaggaggcaaacggtccccagagcctaataagactagcgtgttgggagggggagaggacggcattgagcctgtctcaccccctgaaggtatgaccgagccaggccactcacggtcagccgtgtatcccctcctgtatcgggacggggaacagacggagccatcacgcatggggtctaagtcacccggtaacacctcacagccgccagccttcttttctaaactcactgagagtaacagcgcaatggtaaagtctaagaaacaggagataaataaaaaactgaacacccacaacaggaatgagccagaatacaatattagtcaacctgggaccgagatattcaacatgccagcgatcacaggaaccggcctgatgacttatagatcccaagccgttcaagagcatgcaagtactaatatgggcttggaagccattatccgaaaagcactgatgggaggaggcggtaaggccaaagtcagcggacgtccctctagtagaaaggccaaatcccctgctcctggcctggccagtggtgatagaccacccagtgtgagctcagtccacagtgagggtgattgcaaccgcaggacccccctgacaaacagagtctgggaggataggcctagttccgcagggagcacaccttttccctataacccgctgattatgcggctccaagccggtgtgatggcttcccctccacccccagggttacccgctggatccggacctctcgccggacctcaccacgcctgggatgaagaaccgaagcccctactgtgtagccaatatgagaccctctctgactctgaata

SEQ ID NO: 34812 - DNA, 7376 bp, Artificial Sequence
  derived and/or modified sequence
atgagtgggtccacccaacccgtagcccaaacctggcgggcaaccgaacctaggtatccccctcattccctgtcataccccgtacaaattgcgagaactcacacagatgtcggcctgcttgaatatcaacaccactctcgggattacgcatcacacctttcccccggaagcattatacagcctcagaggcgcaggcccagcctactgagtgagttccagccgggaaatgaacgtagtcaggagctgcacttgaggccggagtctcacagttacctgcctgagctaggcaagagcgaaatggaattcatcgagagcaagagacctcgtttggagttgctccccgatcccttgctgaggccatctcctctacttgctaccgggcagcctgccggtagcgaggacctcacaaaggacaggagcctgactggcaagctcgagcccgtgtctcctccctcccctcctcacactgaccccgaattagaactagtgcctccccgacttagcaaagaggagctgatacagaacatggacagagtcgacagagagattaccatggtagagcagcaaatcagcaagctgaagaagaagcagcagcagttagaggaagaagccgctaaacctcccgagcccgaaaaacctgtgagtccgcctccaatcgagtcaaaacacaggtcccttgtgcaaatcatctacgacgaaaacaggaaaaaagctgaggctgctcacagaatactcgaagggcttgggccacaagtcgagttacccttatacaaccagccttccgacacgcggcagtaccacgagaacatcaaaataaatcaggctatgagaaagaaattaatcctatatttcaagagaagaaaccacgctcggaaacagtgggagcaaaagttctgccagcggtatgaccagctgatggaggcttgggaaaaaaaagttgaaaggatcgagaacaatccaagacgccgagcaaaggaaagtaaagtgcgcgaatactatgaaaagcagttcccagagattaggaaacagagggaactgcaggagaggatgcaacgggtaggccagcgcggttccggattgtccatgagcgccgctagatcggaacacgaggtgtcagaaatcatcgacgggttgtccgaacaggaaaatcttgaaaagcagatgagacagctggcagttatcccccctatgctgtatgacgccgatcagcagcgtattaagtttattaacatgaatggcttaatggccgatcccatgaaggtgtataaggaccggcaggtcatgaacatgtggtctgaacaagaaaaggaaacctttagagagaaattcatgcagcacccaaagaacttcggattaattgcaagttttctcgagcgcaagacagtggcagaatgtgtgctctattattatcttaccaagaagaacgaaaactataaatctctggttaggcgctcttacagaagaagggggaagagtcaacagcagcagcaacagcagcagcagcagcagcagcagcagcagcagcagccaatgccccgttctagccaggaagagaaagatgagaaagagaaggagaaagaggctgaaaaggaggaggaaaaaccggaggttgaaaacgacaaggaggatttgctgaaggaaaaaaccgacgacacatctggggaggacaatgacgaaaaagaagctgtcgcatctaagggtagaaagaccgccaattcgcagggaagacgcaaaggcagaattaccagaagcatggcgaacgaggctaactctgaagaagcaattacacctcagcagtccgctgagttagcaagcatggaacttaacgagtcatcacgttggaccgaggaggagatggaaactgccaagaagggcctgctggagcatggtcgaaactggagcgctatagcccgtatggttggttcgaagaccgtttcccaatgcaagaacttctactttaattataagaagagacagaacttagacgaaattctgcagcagcacaagctgaaaatggaaaaggagagaaatgctcggcgtaagaaaaaaaaggccccagcagcggcttcagaagaagctgcctttccgccagtagtcgaagacgaagaaatggaggcatctggcgtatccggcaatgaggaagaaatggtggaagaggctgaagccactgtgaacaatagctccgacacagagagtatcccctctcctcacacagaagccgctaaagataccgggcaaaatgggcctaagccaccagctaccctgggggctgacggaccccctcccggtcctccaacacccccaccagaggatattcccgctcccacggagcccactccagcatcagaggctacaggggctcccactcctcctccggctcctcctagcccctccgctcccccaccagtagtgccgaaggaggagaaggaggaggagacggccgctgcccctccggttgaggaaggtgaggaacaaaaacctcccgcagcagaagagctggccgtggatacagggaaggcggaagaacccgtgaagtccgagtgcacggaagaggctgaagaaggaccggcaaaggggaaggatgcagaggcagctgaggccactgctgaaggagctctcaaggcagagaaaaaagaaggcggaagtgggagagcaaccacggctaaaagctctggagctccccaggacagtgactcctcagctacatgctcggccgatgaggtggacgaggccgaggggggtgacaagaaccggctgcttagtcctaggccgagcttgctgacaccaacgggggaccctcgggctaatgcctcgccccagaaaccgttggacttaaagcaattgaagcaacgtgctgctgcaatcccacctattcaggtgactaaagttcacgaacctcctagggaagacgccgcacctaccaaaccggctccaccagcgccacctccaccgcagaatctccaacctgaatctgatgccccacagcagcctggcagctcaccacgtgggaagagccgttccccggctcctcccgctgacaaggaagcagaaaagccagtcttcttccctgccttcgctgcggaagcccaaaagttacccggagatcctccttgttggacctcaggtctcccgtttcccgttcctcctagagaagtgataaaagcctccccacacgctccagatccaagtgccttcagttacgcccctcccggacacccccttcccctaggactccacgacactgcaaggccagtcctgccacgtccaccaactatctccaatccacctccactgatttcctcagctaagcatcccagtgtcttggaaaggcagattggagctatcagccaggggatgtctgtgcagctgcatgtcccctactccgaacacgcaaaggctccagtaggtcctgttactatgggtctgccactgccaatggatcccaagaaactcgctcctttcagcggagtaaagcaggaacagctctcccccagaggacaggcagggcctcccgagtctttgggcgtgcccaccgctcaggaggctagcgtgctgagaggaaccgctttgggatctgtgcctgggggtagcattactaagggcatcccttccacaagagttcccagcgacagcgccatcacctatagaggatccatcactcacggaacaccagctgacgtcctgtacaaaggcaccataaccagaatcatcggcgaagactctccttctaggctagacagggggcgagaggactctcttcctaagggacatgtcatctatgaggggaaaaaaggacacgttctaagttatgaaggcggaatgtctgtgacgcaatgcagcaaggaggatggcagatcctcatctggccctcctcatgagaccgcagctcccaagagaacatacgacatgatggaaggcagagtcggacgcgctatctcctccgcctctatcgagggtttgatgggtcgggctattcctcccgaaaggcattcgcctcaccacttgaaagaacaacatcacattcgtggatcaattacccagggaataccgcgttcatacgtcgaagctcaggaggactatctgaggcgggaggctaaactcctgaagcgtgaggggactcccccaccacccccaccttcccgagatctgactgaagcctacaagactcaggctctcggaccactcaaacttaaaccggctcatgaggggttggtcgctactgtgaaggaagccggtcgatcaattcacgagatacctagagaggagctgcggcacacaccggaactgccactggcgccacggcctctgaaggaaggttctatcactcagggcacaccccttaagtacgatacaggcgctagtacaaccggtagtaagaagcatgacgtgcggagtttgatcggcagccctggaaggacatttccaccagtccatcctctggatgtcatggctgacgccagagccttggaaagggcctgctacgaggaatctctcaaaagtcggcctggaacggcctcctcaagtggagggtccattgccaggggagcgcctgtcatagtgccagagctcggcaagccaaggcaatctcctcttacgtatgaggaccatggcgctcctttcgcaggccatttgcctcgcggatctcccgttaccacacgcgagcctacacctcgtttgcaggaagggagtcttagtagcagtaaagcatcgcaggacaggaagctaacctcaacaccacgggagatcgccaaaagtccccactccacggtgcccgagcatcacccccatccaatatctccatatgaacacctgctgcgaggggtgtccggcgtcgacttataccgctcacatattccactggcttttgatcctacatcaatccctagagggatccccttagatgctgcagccgcttattatctgcctagacatctggcgccaaacccgacatacccacatctatatccaccctacttaatcagaggctatcctgacactgcagccctcgaaaaccggcagacaattataaacgactatatcacatcacagcagatgcatcacaacgctgcaactgctatggcccaacgagctgacatgctgaggggattgagtcccagagaatcctccctggcattaaactatgccgctgggcctcgcggtatcatcgacctatcccaggtgccccatttaccagtactggtaccaccaacccccggaactccagccacagccatggatcgcctggcctatcttcccaccgcaccccaaccattttcttctagacatagcagttccccactatcaccgggaggacctacccacttgacaaagcctactacaacatcatcttcagaaagggagcgtgaccgcgatcgcgaaagagatagagaccgcgagagagagaaaagtattctgacgtcaacaaccactgttgaacacgcacccatttggagacccggaaccgaacagtcttcaggatcttctggaggtggcggaggctcgagtagtaggcccgcttcacactcccatgctcatcaacactcacccatttctcccaggacccaggatgcgctgcagcagagaccaagcgtactgcacaataccggcatgaagggaattatcaccgcggtggagccctcgacaccaactgtgttgcgctcaacatccacgagctccccagtgcgccctgcagccacattccccccagcaacgcattgcccactgggcggtaccctcgatggagtctaccccactctgatggagccagtcctgttgcctaaggaagcccctcgggttgcacgtcctgagagacctagagcagataccggccatgcttttctcgccaagcctccggctaggagcggacttgagccagcttctagcccatcgaaaggtagcgagcctaggcctctcgtaccaccagtgtctggacacgcaaccattgctaggacccccgctaaaaatttggcgccacaccacgcatcgccagatcccccagcccctcccgctagcgcgtcggatccacatagggaaaagactcagtccaagccattctcaatccaagagctcgagttgagaagcctgggctaccatggcagtagctattcccccgagggagtggaaccagtgtcacctgtctcctccccctctttgacacatgacaaagggctgcctaagcaccttgaggagctcgataagtctcacctggagggagaactcaggccgaaacaaccaggtcccgtaaagctgggtggtgaggctgctcacctccctcacttgagacccctgcccgagagccaaccaagctccagtcctctgctgcaaacagccccaggggtcaagggacatcagcgcgtggtaaccctagctcagcatattagcgaagtcatcacccaggattacactagacaccatccacagcagctcagcgccccactgccagcacccctatattcattccctggtgcaagctgtccagtcctggacctgcgtcggcctcctagcgatctttacctaccaccacctgaccatggagctccagctcgaggctctccccacagcgaaggaggcaaacgatccccggagccaaataaaacctcggtgctcgggggtggcgaagatgggatagagcccgtctcgccacccgaaggaatgaccgaaccagggcactcccgaagtgctgtgtatcccctgctgtatcgagacggcgagcagacggaaccgtcccggatgggcagcaaaagcccaggcaatacttcacagcctcctgcgtttttcagtaaacttactgaatcaaactcggccatggtgaagtcgaagaagcaagagatcaataagaagctcaatacgcacaataggaatgagccggagtataacatcagccaacccggaactgagatctttaatatgccagcaatcacgggcaccggtctgatgacctatagaagccaagctgtccaggaacacgcctctacaaatatgggtctcgaagccattatccgaaaggccctgatgggcggtggaggcaaagccaaggtgtcaggccgtccttcctccagaaaggctaaatcccctgcacctgggctggcctctggagaccgtcctcctagtgtatctagtgttcactctgaaggggactgcaaccgacggactcctctgactaatagggtctgggaagatcggccttccagcgctggttctactccattcccctataacccactcatcatgcgcctgcaggctggcgttatggcctctccacccccacccggactgccagcaggttctggtcctcttgcgggtcctcaccacgcatgggacgaggaacccaaaccattgctctgctcacaatacgagacgctgtctgactcagagta

SEQ ID NO: 34813 - DNA, 7380 bp, Artificial Sequence
  derived and/or modified sequence
atgagcggcagcacccagcccgtggcccagacctggagagccaccgagcccagataccccccccacagcctgagctaccccgtgcagatcgccagaacccacaccgacgtgggcctgctggagtaccagcaccacagcagagactacgccagccacctgagccccggcagcatcatccagccccagagaagaagacccagcctgctgagcgagttccagcccggcaacgagagaagccaggagctgcacctgagacccgagagccacagctacctgcccgagctgggcaagagcgagatggagttcatcgagagcaagagacccagactggagctgctgcccgaccccctgctgagacccagccccctgctggccaccggccagcccgccggcagcgaggacctgaccaaggacagaagcctgaccggcaagctggagcccgtgagcccccccagccccccccacaccgaccccgagctggagctggtgccccccagactgagcaaggaggagctgatccagaacatggacagagtggacagagagatcaccatggtggagcagcagatcagcaagctgaagaagaagcagcagcagctggaggaggaggccgccaagccccccgagcccgagaagcccgtgagccccccccccatcgagagcaagcacagaagcctggtgcagatcatctacgacgagaacagaaagaaggccgaggccgcccacagaatcctggagggcctgggcccccaggtggagctgcccctgtacaaccagcccagcgacaccagacagtaccacgagaacatcaagatcaaccaggccatgagaaagaagctgatcctgtacttcaagagaagaaaccacgccagaaagcagtgggagcagaagttctgccagagatacgaccagctgatggaggcctgggagaagaaggtggagagaatcgagaacaaccccagaagaagagccaaggagagcaaggtgagagagtactacgagaagcagttccccgagatcagaaagcagagagagctgcaggagagaatgcagagcagagtgggccagagaggcagcggcctgagcatgagcgccgccagaagcgagcacgaggtgagcgagatcatcgacggcctgagcgagcaggagaacctggagaagcagatgagacagctggccgtgatcccccccatgctgtacgacgccgaccagcagagaatcaagttcatcaacatgaacggcctgatggccgaccccatgaaggtgtacaaggacagacaggtgatgaacatgtggagcgagcaggagaaggagaccttcagagagaagttcatgcagcaccccaagaacttcggcctgatcgccagcttcctggagagaaagaccgtggccgagtgcgtgctgtactactacctgaccaagaagaacgagaactacaagagcctggtgagaagaagctacagaagaagaggcaagagccagcagcagcagcagcagcagcagcagcagcagcagcagcagcagcagcagcccatgcccagaagcagccaggaggagaaggacgagaaggagaaggagaaggaggccgagaaggaggaggagaagcccgaggtggagaacgacaaggaggacctgctgaaggagaagaccgacgacaccagcggcgaggacaacgacgagaaggaggccgtggccagcaagggcagaaagaccgccaacagccagggcagaagaaagggcagaatcaccagaagcatggccaacgaggccaacagcgaggaggccatcaccccccagcagagcgccgagctggccagcatggagctgaacgagagcagcagatggaccgaggaggagatggagaccgccaagaagggcctgctggagcacggcagaaactggagcgccatcgccagaatggtgggcagcaagaccgtgagccagtgcaagaacttctacttcaactacaagaagagacagaacctggacgagatcctgcagcagcacaagctgaagatggagaaggagagaaacgccagaagaaagaagaagaaggcccccgccgccgccagcgaggaggccgccttcccccccgtggtggaggacgaggagatggaggccagcggcgtgagcggcaacgaggaggagatggtggaggaggccgaggccaccgtgaacaacagcagcgacaccgagagcatccccagcccccacaccgaggccgccaaggacaccggccagaacggccccaagccccccgccaccctgggcgccgacggccccccccccggcccccccacccccccccccgaggacatccccgcccccaccgagcccacccccgccagcgaggccaccggcgcccccacccccccccccgccccccccagccccagcgcccccccccccgtggtgcccaaggaggagaaggaggaggagaccgccgccgccccccccgtggaggagggcgaggagcagaagccccccgccgccgaggagctggccgtggacaccggcaaggccgaggagcccgtgaagagcgagtgcaccgaggaggccgaggagggccccgccaagggcaaggacgccgaggccgccgaggccaccgccgagggcgccctgaaggccgagaagaaggagggcggcagcggcagagccaccaccgccaagagcagcggcgccccccaggacagcgacagcagcgccacctgcagcgccgacgaggtggacgaggccgagggcggcgacaagaacagactgctgagccccagacccagcctgctgacccccaccggcgaccccagagccaacgccagcccccagaagcccctggacctgaagcagctgaagcagagagccgccgccatcccccccatccaggtgaccaaggtgcacgagccccccagagaggacgccgcccccaccaagcccgccccccccgcccccccccccccccagaacctgcagcccgagagcgacgccccccagcagcccggcagcagccccagaggcaagagcagaagccccgccccccccgccgacaaggaggccgagaagcccgtgttcttccccgccttcgccgccgaggcccagaagctgcccggcgaccccccctgctggaccagcggcctgcccttccccgtgccccccagagaggtgatcaaggccagcccccacgcccccgaccccagcgccttcagctacgccccccccggccaccccctgcccctgggcctgcacgacaccgccagacccgtgctgcccagaccccccaccatcagcaaccccccccccctgatcagcagcgccaagcaccccagcgtgctggagagacagatcggcgccatcagccagggcatgagcgtgcagctgcacgtgccctacagcgagcacgccaaggcccccgtgggccccgtgaccatgggcctgcccctgcccatggaccccaagaagctggcccccttcagcggcgtgaagcaggagcagctgagccccagaggccaggccggcccccccgagagcctgggcgtgcccaccgcccaggaggccagcgtgctgagaggcaccgccctgggcagcgtgcccggcggcagcatcaccaagggcatccccagcaccagagtgcccagcgacagcgccatcacctacagaggcagcatcacccacggcacccccgccgacgtgctgtacaagggcaccatcaccagaatcatcggcgaggacagccccagcagactggacagaggcagagaggacagcctgcccaagggccacgtgatctacgagggcaagaagggccacgtgctgagctacgagggcggcatgagcgtgacccagtgcagcaaggaggacggcagaagcagcagcggccccccccacgagaccgccgcccccaagagaacctacgacatgatggagggcagagtgggcagagccatcagcagcgccagcatcgagggcctgatgggcagagccatcccccccgagagacacagcccccaccacctgaaggagcagcaccacatcagaggcagcatcacccagggcatccccagaagctacgtggaggcccaggaggactacctgagaagagaggccaagctgctgaagagagagggcaccccccccccccccccccccagcagagacctgaccgaggcctacaagacccaggccctgggccccctgaagctgaagcccgcccacgagggcctggtggccaccgtgaaggaggccggcagaagcatccacgagatccccagagaggagctgagacacacccccgagctgcccctggcccccagacccctgaaggagggcagcatcacccagggcacccccctgaagtacgacaccggcgccagcaccaccggcagcaagaagcacgacgtgagaagcctgatcggcagccccggcagaaccttcccccccgtgcaccccctggacgtgatggccgacgccagagccctggagagagcctgctacgaggagagcctgaagagcagacccggcaccgccagcagcagcggcggcagcatcgccagaggcgcccccgtgatcgtgcccgagctgggcaagcccagacagagccccctgacctacgaggaccacggcgcccccttcgccggccacctgcccagaggcagccccgtgaccaccagagagcccacccccagactgcaggagggcagcctgagcagcagcaaggccagccaggacagaaagctgaccagcacccccagagagatcgccaagagcccccacagcaccgtgcccgagcaccacccccaccccatcagcccctacgagcacctgctgagaggcgtgagcggcgtggacctgtacagaagccacatccccctggccttcgaccccaccagcatccccagaggcatccccctggacgccgccgccgcctactacctgcccagacacctggcccccaaccccacctacccccacctgtaccccccctacctgatcagaggctaccccgacaccgccgccctggagaacagacagaccatcatcaacgactacatcaccagccagcagatgcaccacaacgccgccaccgccatggcccagagagccgacatgctgagaggcctgagccccagagagagcagcctggccctgaactacgccgccggccccagaggcatcatcgacctgagccaggtgccccacctgcccgtgctggtgccccccacccccggcacccccgccaccgccatggacagactggcctacctgcccaccgccccccagcccttcagcagcagacacagcagcagccccctgagccccggcggccccacccacctgaccaagcccaccaccaccagcagcagcgagagagagagagacagagacagagagagagacagagacagagagagagagaagagcatcctgaccagcaccaccaccgtggagcacgcccccatctggagacccggcaccgagcagagcagcggcagcagcggcggcggcggcggcagcagcagcagacccgccagccacagccacgcccaccagcacagccccatcagccccagaacccaggacgccctgcagcagagacccagcgtgctgcacaacaccggcatgaagggcatcatcaccgccgtggagcccagcacccccaccgtgctgagaagcaccagcaccagcagccccgtgagacccgccgccaccttcccccccgccacccactgccccctgggcggcaccctggacggcgtgtaccccaccctgatggagcccgtgctgctgcccaaggaggcccccagagtggccagacccgagagacccagagccgacaccggccacgccttcctggccaagccccccgccagaagcggcctggagcccgccagcagccccagcaagggcagcgagcccagacccctggtgccccccgtgagcggccacgccaccatcgccagaacccccgccaagaacctggccccccaccacgccagccccgacccccccgccccccccgccagcgccagcgacccccacagagagaagacccagagcaagcccttcagcatccaggagctggagctgagaagcctgggctaccacggcagcagctacagccccgagggcgtggagcccgtgagccccgtgagcagccccagcctgacccacgacaagggcctgcccaagcacctggaggagctggacaagagccacctggagggcgagctgagacccaagcagcccggccccgtgaagctgggcggcgaggccgcccacctgccccacctgagacccctgcccgagagccagcccagcagcagccccctgctgcagaccgcccccggcgtgaagggccaccagagagtggtgaccctggcccagcacatcagcgaggtgatcacccaggactacaccagacaccacccccagcagctgagcgcccccctgcccgcccccctgtacagcttccccggcgccagctgccccgtgctggacctgagaagaccccccagcgacctgtacctgcccccccccgaccacggcgcccccgccagaggcagcccccacagcgagggcggcaagagaagccccgagcccaacaagaccagcgtgctgggcggcggcgaggacggcatcgagcccgtgagcccccccgagggcatgaccgagcccggccacagcagaagcgccgtgtaccccctgctgtacagagacggcgagcagaccgagcccagcagaatgggcagcaagagccccggcaacaccagccagccccccgccttcttcagcaagctgaccgagagcaacagcgccatggtgaagagcaagaagcaggagatcaacaagaagctgaacacccacaacagaaacgagcccgagtacaacatcagccagcccggcaccgagatcttcaacatgcccgccatcaccggcaccggcctgatgacctacagaagccaggccgtgcaggagcacgccagcaccaacatgggcctggaggccatcatcagaaaggccctgatgggcggcggcggcaaggccaaggtgagcggcagacccagcagcagaaaggccaagagccccgcccccggcctggccagcggcgacagaccccccagcgtgagcagcgtgcacagcgagggcgactgcaacagaagaacccccctgaccaacagagtgtgggaggacagacccagcagcgccggcagcacccccttcccctacaaccccctgatcatgagactgcaggccggcgtgatggccagcccccccccccccggcctgcccgccggcagcggccccctggccggcccccaccacgcctgggacgaggagcccaagcccctgctgtgcagccagtacgagaccctgagcgacagcgagtag

SEQ ID NO: 34814 - DNA, 7377 bp, Artificial Sequence
  derived and/or modified sequence
atgagcggcagcacccagcccgtggcccagacctggagagccaccgagcccagataccccccccacagcctgagctaccccgtgcagatcgccagaacccacaccgacgtgggcctgctggagtaccagcaccacagcagagactacgccagccacctgagccccggcagcatcatccagccccagagaagaagacccagcctgctgagcgagttccagcccggcaacgagagaagccaggagctgcacctgagacccgagagccacagctacctgcccgagctgggcaagagcgagatggagttcatcgagagcaagagacccagactggagctgctgcccgaccccctgctgagacccagccccctgctggccaccggccagcccgccggcagcgaggacctgaccaaggacagaagcctgaccggcaagctggagcccgtgagcccccccagccccccccacaccgaccccgagctggagctggtgccccccagactgagcaaggaggagctgatccagaacatggacagagtggacagagagatcaccatggtggagcagcagatcagcaagctgaagaagaagcagcagcagctggaggaggaggccgccaagccccccgagcccgagaagcccgtgagccccccccccatcgagagcaagcacagaagcctggtgcagatcatctacgacgagaacagaaagaaggccgaggccgcccacagaatcctggagggcctgggcccccaggtggagctgcccctgtacaaccagcccagcgacaccagacagtaccacgagaacatcaagatcaaccaggccatgagaaagaagctgatcctgtacttcaagagaagaaaccacgccagaaagcagtgggagcagaagttctgccagagatacgaccagctgatggaggcctgggagaagaaggtggagagaatcgagaacaaccccagaagaagagccaaggagagcaaggtgagagagtactacgagaagcagttccccgagatcagaaagcagagagagctgcaggagagaatgcagagagtgggccagagaggcagcggcctgagcatgagcgccgccagaagcgagcacgaggtgagcgagatcatcgacggcctgagcgagcaggagaacctggagaagcagatgagacagctggccgtgatcccccccatgctgtacgacgccgaccagcagagaatcaagttcatcaacatgaacggcctgatggccgaccccatgaaggtgtacaaggacagacaggtgatgaacatgtggagcgagcaggagaaggagaccttcagagagaagttcatgcagcaccccaagaacttcggcctgatcgccagcttcctggagagaaagaccgtggccgagtgcgtgctgtactactacctgaccaagaagaacgagaactacaagagcctggtgagaagaagctacagaagaagaggcaagagccagcagcagcagcagcagcagcagcagcagcagcagcagcagcagcagcagcccatgcccagaagcagccaggaggagaaggacgagaaggagaaggagaaggaggccgagaaggaggaggagaagcccgaggtggagaacgacaaggaggacctgctgaaggagaagaccgacgacaccagcggcgaggacaacgacgagaaggaggccgtggccagcaagggcagaaagaccgccaacagccagggcagaagaaagggcagaatcaccagaagcatggccaacgaggccaacagcgaggaggccatcaccccccagcagagcgccgagctggccagcatggagctgaacgagagcagcagatggaccgaggaggagatggagaccgccaagaagggcctgctggagcacggcagaaactggagcgccatcgccagaatggtgggcagcaagaccgtgagccagtgcaagaacttctacttcaactacaagaagagacagaacctggacgagatcctgcagcagcacaagctgaagatggagaaggagagaaacgccagaagaaagaagaagaaggcccccgccgccgccagcgaggaggccgccttcccccccgtggtggaggacgaggagatggaggccagcggcgtgagcggcaacgaggaggagatggtggaggaggccgaggccaccgtgaacaacagcagcgacaccgagagcatccccagcccccacaccgaggccgccaaggacaccggccagaacggccccaagccccccgccaccctgggcgccgacggccccccccccggcccccccacccccccccccgaggacatccccgcccccaccgagcccacccccgccagcgaggccaccggcgcccccacccccccccccgccccccccagccccagcgcccccccccccgtggtgcccaaggaggagaaggaggaggagaccgccgccgccccccccgtggaggagggcgaggagcagaagccccccgccgccgaggagctggccgtggacaccggcaaggccgaggagcccgtgaagagcgagtgcaccgaggaggccgaggagggccccgccaagggcaaggacgccgaggccgccgaggccaccgccgagggcgccctgaaggccgagaagaaggagggcggcagcggcagagccaccaccgccaagagcagcggcgccccccaggacagcgacagcagcgccacctgcagcgccgacgaggtggacgaggccgagggcggcgacaagaacagactgctgagccccagacccagcctgctgacccccaccggcgaccccagagccaacgccagcccccagaagcccctggacctgaagcagctgaagcagagagccgccgccatcccccccatccaggtgaccaaggtgcacgagccccccagagaggacgccgcccccaccaagcccgccccccccgcccccccccccccccagaacctgcagcccgagagcgacgccccccagcagcccggcagcagccccagaggcaagagcagaagccccgccccccccgccgacaaggaggccgagaagcccgtgttcttccccgccttcgccgccgaggcccagaagctgcccggcgaccccccctgctggaccagcggcctgcccttccccgtgccccccagagaggtgatcaaggccagcccccacgcccccgaccccagcgccttcagctacgccccccccggccaccccctgcccctgggcctgcacgacaccgccagacccgtgctgcccagaccccccaccatcagcaaccccccccccctgatcagcagcgccaagcaccccagcgtgctggagagacagatcggcgccatcagccagggcatgagcgtgcagctgcacgtgccctacagcgagcacgccaaggcccccgtgggccccgtgaccatgggcctgcccctgcccatggaccccaagaagctggcccccttcagcggcgtgaagcaggagcagctgagccccagaggccaggccggcccccccgagagcctgggcgtgcccaccgcccaggaggccagcgtgctgagaggcaccgccctgggcagcgtgcccggcggcagcatcaccaagggcatccccagcaccagagtgcccagcgacagcgccatcacctacagaggcagcatcacccacggcacccccgccgacgtgctgtacaagggcaccatcaccagaatcatcggcgaggacagccccagcagactggacagaggcagagaggacagcctgcccaagggccacgtgatctacgagggcaagaagggccacgtgctgagctacgagggcggcatgagcgtgacccagtgcagcaaggaggacggcagaagcagcagcggccccccccacgagaccgccgcccccaagagaacctacgacatgatggagggcagagtgggcagagccatcagcagcgccagcatcgagggcctgatgggcagagccatcccccccgagagacacagcccccaccacctgaaggagcagcaccacatcagaggcagcatcacccagggcatccccagaagctacgtggaggcccaggaggactacctgagaagagaggccaagctgctgaagagagagggcaccccccccccccccccccccagcagagacctgaccgaggcctacaagacccaggccctgggccccctgaagctgaagcccgcccacgagggcctggtggccaccgtgaaggaggccggcagaagcatccacgagatccccagagaggagctgagacacacccccgagctgcccctggcccccagacccctgaaggagggcagcatcacccagggcacccccctgaagtacgacaccggcgccagcaccaccggcagcaagaagcacgacgtgagaagcctgatcggcagccccggcagaaccttcccccccgtgcaccccctggacgtgatggccgacgccagagccctggagagagcctgctacgaggagagcctgaagagcagacccggcaccgccagcagcagcggcggcagcatcgccagaggcgcccccgtgatcgtgcccgagctgggcaagcccagacagagccccctgacctacgaggaccacggcgcccccttcgccggccacctgcccagaggcagccccgtgaccaccagagagcccacccccagactgcaggagggcagcctgagcagcagcaaggccagccaggacagaaagctgaccagcacccccagagagatcgccaagagcccccacagcaccgtgcccgagcaccacccccaccccatcagcccctacgagcacctgctgagaggcgtgagcggcgtggacctgtacagaagccacatccccctggccttcgaccccaccagcatccccagaggcatccccctggacgccgccgccgcctactacctgcccagacacctggcccccaaccccacctacccccacctgtaccccccctacctgatcagaggctaccccgacaccgccgccctggagaacagacagaccatcatcaacgactacatcaccagccagcagatgcaccacaacgccgccaccgccatggcccagagagccgacatgctgagaggcctgagccccagagagagcagcctggccctgaactacgccgccggccccagaggcatcatcgacctgagccaggtgccccacctgcccgtgctggtgccccccacccccggcacccccgccaccgccatggacagactggcctacctgcccaccgccccccagcccttcagcagcagacacagcagcagccccctgagccccggcggccccacccacctgaccaagcccaccaccaccagcagcagcgagagagagagagacagagacagagagagagacagagacagagagagagagaagagcatcctgaccagcaccaccaccgtggagcacgcccccatctggagacccggcaccgagcagagcagcggcagcagcggcggcggcggcggcagcagcagcagacccgccagccacagccacgcccaccagcacagccccatcagccccagaacccaggacgccctgcagcagagacccagcgtgctgcacaacaccggcatgaagggcatcatcaccgccgtggagcccagcacccccaccgtgctgagaagcaccagcaccagcagccccgtgagacccgccgccaccttcccccccgccacccactgccccctgggcggcaccctggacggcgtgtaccccaccctgatggagcccgtgctgctgcccaaggaggcccccagagtggccagacccgagagacccagagccgacaccggccacgccttcctggccaagccccccgccagaagcggcctggagcccgccagcagccccagcaagggcagcgagcccagacccctggtgccccccgtgagcggccacgccaccatcgccagaacccccgccaagaacctggccccccaccacgccagccccgacccccccgccccccccgccagcgccagcgacccccacagagagaagacccagagcaagcccttcagcatccaggagctggagctgagaagcctgggctaccacggcagcagctacagccccgagggcgtggagcccgtgagccccgtgagcagccccagcctgacccacgacaagggcctgcccaagcacctggaggagctggacaagagccacctggagggcgagctgagacccaagcagcccggccccgtgaagctgggcggcgaggccgcccacctgccccacctgagacccctgcccgagagccagcccagcagcagccccctgctgcagaccgcccccggcgtgaagggccaccagagagtggtgaccctggcccagcacatcagcgaggtgatcacccaggactacaccagacaccacccccagcagctgagcgcccccctgcccgcccccctgtacagcttccccggcgccagctgccccgtgctggacctgagaagaccccccagcgacctgtacctgcccccccccgaccacggcgcccccgccagaggcagcccccacagcgagggcggcaagagaagccccgagcccaacaagaccagcgtgctgggcggcggcgaggacggcatcgagcccgtgagcccccccgagggcatgaccgagcccggccacagcagaagcgccgtgtaccccctgctgtacagagacggcgagcagaccgagcccagcagaatgggcagcaagagccccggcaacaccagccagccccccgccttcttcagcaagctgaccgagagcaacagcgccatggtgaagagcaagaagcaggagatcaacaagaagctgaacacccacaacagaaacgagcccgagtacaacatcagccagcccggcaccgagatcttcaacatgcccgccatcaccggcaccggcctgatgacctacagaagccaggccgtgcaggagcacgccagcaccaacatgggcctggaggccatcatcagaaaggccctgatgggcggcggcggcaaggccaaggtgagcggcagacccagcagcagaaaggccaagagccccgcccccggcctggccagcggcgacagaccccccagcgtgagcagcgtgcacagcgagggcgactgcaacagaagaacccccctgaccaacagagtgtgggaggacagacccagcagcgccggcagcacccccttcccctacaaccccctgatcatgagactgcaggccggcgtgatggccagcccccccccccccggcctgcccgccggcagcggccccctggccggcccccaccacgcctgggacgaggagcccaagcccctgctgtgcagccagtacgagaccctgagcgacagcgagtag

SEQ ID NO: 34815 - protein, 562 aa, Artificial Sequence
  derived and/or modified sequence
MERDSHGNASPARTPSAGASPAQASPAGTPPGRASPAQASPAQASPAGTPPGRASPAQASPAGTPPGRASPGRASPLQASPARASPALASLSRSSSGRSSSARSASVTTSPTRVYLVRATPVGAVPIRSSPARSAPATRATRESPGTSLPKFTWREGQKQLPLIGCVLLLIALVVSLIILFQFWQGHTGIRYKEQRESCPKHAVRCDGVVDCKLKSDELGCVRFDWDKSLLKIYSGSSHQWLPICSSNWNDSYSEKTCQQLGFESAHRTTEVAHRDFANSFSILRYNSTIQESLHRSECPSQRYISLQCSHCGLRAMTGRIVGGALASDSKWPWQVSLHFGTTHICGGTLIDAQWVLTAAHCFFVTREKVLEGWKVYAGTSNLHQLPEAASIAEIIINSNYTDEEDDYDIALMRLSKPLTLSAHIHPACLPMHGQTFSLNETCWITGFGKTRETDDKTSPFLREVQVNLIDFKKCNDYLVYDSYLTPRMMCAGDLRGGRDSCQGDSGGPLVCEQNNRWYLAGVTSWGTGCGQRNKPGVYTKVTEVLPWIYSKMESEVRFRKS

SEQ ID NO: 34816 - protein, 586 aa, Artificial Sequence
  derived and/or modified sequence
MERDSHGNASPARTPSAGASPAQASPAGTPPGRASPAQASPAQASPAGTPPGRASPAQASPAGTPPGRASPGRASPAQASPAQASPARASPALASLSRSSSGRSSSARSASVTTSPTRVYLVRATPVGAVPIRSSPARSAPATRATRESPGTSLPKFTWREGQKQLPLIGCVLLLIALVVSLIILFQFWQGHTGIRYKEQRESCPKHAVRCDGVVDCKLKSDELGCVRFDWDKSLLKIYSGSSHQWLPICSSNWNDSYSEKTCQQLGFESAHRTTEVAHRDFANSFSILRYNSTIQESLHRSECPSQRYISLQCSHCGLRAMTGRIVGGALASDSKWPWQVSLHFGTTHICGGTLIDAQWVLTAAHCFFVTREKVLEGWKVYAGTSNLHQLPEAASIAEIIINSNYTDEEDDYDIALMRLSKPLTLSAHIHPACLPMHGQTFSLNETCWITGFGKTRETDDKTSPFLREVQVNLIDFKKCNDYLVYDSYLTPRMMCAGDLRGGRDSCQGDSGGPLVCEQNNRWYLAGVTSWGTGCGQRNKPGVYTKVTEVLPWIYSKMEVRSLQQDTAPSRLGTSSGGDPGGAPRL

SEQ ID NO: 34817 - protein, 567 aa, Artificial Sequence
  derived and/or modified sequence
MERDSHGNASPARTPSAGASPAQASPAGTPPGRASPAQASPAQASPAGTPPGRASPAQASPAGTPPGRASPGRASPAQASPAQASPARASPALASLSRSSSGRSSSARSASVTTSPTRVYLVRATPVGAVPIRSSPARSAPATRATRESPGTSLPKFTWREGQKQLPLIGCVLLLIALVVSLIILFQFWQGHTGIRYKEQRESCPKHAVRCDGVVDCKLKSDELGCVRFDWDKSLLKIYSGSSHQWLPICSSNWNDSYSEKTCQQLGFESAHRTTEVAHRDFANSFSILRYNSTIQESLHRSECPSQRYISLQCSHCGLRAMTGRIVGGALASDSKWPWQVSLHFGTTHICGGTLIDAQWVLTAAHCFFVTREKVLEGWKVYAGTSNLHQLPEAASIAEIIINSNYTDEEDDYDIALMRLSKPLTLSAHIHPACLPMHGQTFSLNETCWITGFGKTRETDDKTSPFLREVQVNLIDFKKCNDYLVYDSYLTPRMMCAGDLRGGRDSCQGDSGGPLVCEQNNRWYLAGVTSWGTGCGQRNKPGVYTKVTEVLPWIYSKMESEVRFRKS

SEQ ID NO: 34818 - DNA, 1689 bp, Artificial Sequence
  derived and/or modified sequence
atggagagagacagccacggcaacgccagccccgccagaacccccagcgccggcgccagccccgcccaggccagccccgccggcaccccccccggcagagccagccccgcccaggccagccccgcccaggccagccccgccggcaccccccccggcagagccagccccgcccaggccagccccgccggcaccccccccggcagagccagccccggcagagccagccccctgcaggccagccccgccagagccagccccgccctggccagcctgagcagaagcagcagcggcagaagcagcagcgccagaagcgccagcgtgaccaccagccccaccagagtgtacctggtgagagccacccccgtgggcgccgtgcccatcagaagcagccccgccagaagcgcccccgccaccagagccaccagagagagccccggcaccagcctgcccaagttcacctggagagagggccagaagcagctgcccctgatcggctgcgtgctgctgctgatcgccctggtggtgagcctgatcatcctgttccagttctggcagggccacaccggcatcagatacaaggagcagagagagagctgccccaagcacgccgtgagatgcgacggcgtggtggactgcaagctgaagagcgacgagctgggctgcgtgagattcgactgggacaagagcctgctgaagatctacagcggcagcagccaccagtggctgcccatctgcagcagcaactggaacgacagctacagcgagaagacctgccagcagctgggcttcgagagcgcccacagaaccaccgaggtggcccacagagacttcgccaacagcttcagcatcctgagatacaacagcaccatccaggagagcctgcacagaagcgagtgccccagccagagatacatcagcctgcagtgcagccactgcggcctgagagccatgaccggcagaatcgtgggcggcgccctggccagcgacagcaagtggccctggcaggtgagcctgcacttcggcaccacccacatctgcggcggcaccctgatcgacgcccagtgggtgctgaccgccgcccactgcttcttcgtgaccagagagaaggtgctggagggctggaaggtgtacgccggcaccagcaacctgcaccagctgcccgaggccgccagcatcgccgagatcatcatcaacagcaactacaccgacgaggaggacgactacgacatcgccctgatgagactgagcaagcccctgaccctgagcgcccacatccaccccgcctgcctgcccatgcacggccagaccttcagcctgaacgagacctgctggatcaccggcttcggcaagaccagagagaccgacgacaagaccagccccttcctgagagaggtgcaggtgaacctgatcgacttcaagaagtgcaacgactacctggtgtacgacagctacctgacccccagaatgatgtgcgccggcgacctgagaggcggcagagacagctgccagggcgacagcggcggccccctggtgtgcgagcagaacaacagatggtacctggccggcgtgaccagctggggcaccggctgcggccagagaaacaagcccggcgtgtacaccaaggtgaccgaggtgctgccctggatctacagcaagatggagagcgaggtgagattcagaaagagctag

SEQ ID NO: 34819 - DNA, 1761 bp, Artificial Sequence
  derived and/or modified sequence
atggagagagacagccacggcaacgccagccccgccagaacccccagcgccggcgccagccccgcccaggccagccccgccggcaccccccccggcagagccagccccgcccaggccagccccgcccaggccagccccgccggcaccccccccggcagagccagccccgcccaggccagccccgccggcaccccccccggcagagccagccccggcagagccagccccgcccaggccagccccgcccaggccagccccgccagagccagccccgccctggccagcctgagcagaagcagcagcggcagaagcagcagcgccagaagcgccagcgtgaccaccagccccaccagagtgtacctggtgagagccacccccgtgggcgccgtgcccatcagaagcagccccgccagaagcgcccccgccaccagagccaccagagagagccccggcaccagcctgcccaagttcacctggagagagggccagaagcagctgcccctgatcggctgcgtgctgctgctgatcgccctggtggtgagcctgatcatcctgttccagttctggcagggccacaccggcatcagatacaaggagcagagagagagctgccccaagcacgccgtgagatgcgacggcgtggtggactgcaagctgaagagcgacgagctgggctgcgtgagattcgactgggacaagagcctgctgaagatctacagcggcagcagccaccagtggctgcccatctgcagcagcaactggaacgacagctacagcgagaagacctgccagcagctgggcttcgagagcgcccacagaaccaccgaggtggcccacagagacttcgccaacagcttcagcatcctgagatacaacagcaccatccaggagagcctgcacagaagcgagtgccccagccagagatacatcagcctgcagtgcagccactgcggcctgagagccatgaccggcagaatcgtgggcggcgccctggccagcgacagcaagtggccctggcaggtgagcctgcacttcggcaccacccacatctgcggcggcaccctgatcgacgcccagtgggtgctgaccgccgcccactgcttcttcgtgaccagagagaaggtgctggagggctggaaggtgtacgccggcaccagcaacctgcaccagctgcccgaggccgccagcatcgccgagatcatcatcaacagcaactacaccgacgaggaggacgactacgacatcgccctgatgagactgagcaagcccctgaccctgagcgcccacatccaccccgcctgcctgcccatgcacggccagaccttcagcctgaacgagacctgctggatcaccggcttcggcaagaccagagagaccgacgacaagaccagccccttcctgagagaggtgcaggtgaacctgatcgacttcaagaagtgcaacgactacctggtgtacgacagctacctgacccccagaatgatgtgcgccggcgacctgagaggcggcagagacagctgccagggcgacagcggcggccccctggtgtgcgagcagaacaacagatggtacctggccggcgtgaccagctggggcaccggctgcggccagagaaacaagcccggcgtgtacaccaaggtgaccgaggtgctgccctggatctacagcaagatggaggtgagaagcctgcagcaggacaccgcccccagcagactgggcaccagcagcggcggcgaccccggcggcgcccccagactgtag

SEQ ID NO: 34820 - DNA, 1704 bp, Artificial Sequence
  derived and/or modified sequence
atggagagagacagccacggcaacgccagccccgccagaacccccagcgccggcgccagccccgcccaggccagccccgccggcaccccccccggcagagccagccccgcccaggccagccccgcccaggccagccccgccggcaccccccccggcagagccagccccgcccaggccagccccgccggcaccccccccggcagagccagccccggcagagccagccccgcccaggccagccccgcccaggccagccccgccagagccagccccgccctggccagcctgagcagaagcagcagcggcagaagcagcagcgccagaagcgccagcgtgaccaccagccccaccagagtgtacctggtgagagccacccccgtgggcgccgtgcccatcagaagcagccccgccagaagcgcccccgccaccagagccaccagagagagccccggcaccagcctgcccaagttcacctggagagagggccagaagcagctgcccctgatcggctgcgtgctgctgctgatcgccctggtggtgagcctgatcatcctgttccagttctggcagggccacaccggcatcagatacaaggagcagagagagagctgccccaagcacgccgtgagatgcgacggcgtggtggactgcaagctgaagagcgacgagctgggctgcgtgagattcgactgggacaagagcctgctgaagatctacagcggcagcagccaccagtggctgcccatctgcagcagcaactggaacgacagctacagcgagaagacctgccagcagctgggcttcgagagcgcccacagaaccaccgaggtggcccacagagacttcgccaacagcttcagcatcctgagatacaacagcaccatccaggagagcctgcacagaagcgagtgccccagccagagatacatcagcctgcagtgcagccactgcggcctgagagccatgaccggcagaatcgtgggcggcgccctggccagcgacagcaagtggccctggcaggtgagcctgcacttcggcaccacccacatctgcggcggcaccctgatcgacgcccagtgggtgctgaccgccgcccactgcttcttcgtgaccagagagaaggtgctggagggctggaaggtgtacgccggcaccagcaacctgcaccagctgcccgaggccgccagcatcgccgagatcatcatcaacagcaactacaccgacgaggaggacgactacgacatcgccctgatgagactgagcaagcccctgaccctgagcgcccacatccaccccgcctgcctgcccatgcacggccagaccttcagcctgaacgagacctgctggatcaccggcttcggcaagaccagagagaccgacgacaagaccagccccttcctgagagaggtgcaggtgaacctgatcgacttcaagaagtgcaacgactacctggtgtacgacagctacctgacccccagaatgatgtgcgccggcgacctgagaggcggcagagacagctgccagggcgacagcggcggccccctggtgtgcgagcagaacaacagatggtacctggccggcgtgaccagctggggcaccggctgcggccagagaaacaagcccggcgtgtacaccaaggtgaccgaggtgctgccctggatctacagcaagatggagagcgaggtgagattcagaaagagctag

SEQ ID NO: 34821 - DNA, 1689 bp, Artificial Sequence
  derived and/or modified sequence
atggagcgggattctcacgggaacgcctcacctgccagaaccccaagtgccggagctagtccagcccaggccagccctgccggcacccctccaggaagggcatcccccgcccaggctagcccggcccaggcctccccagcagggacccccccaggtcgcgcatctccagcacaagcgtcacccgctggcacccctccaggcagagcctcccccggcagggctagcccccttcaagccagtccagcccgcgcgagccctgccttggcttcactttcccgaagctcttccggtcgcagtagttcagcaaggagcgcatcagtcacaacttcccctactcgggtttacctggtgcgggccacaccagttggggccgtccccattagatccagtcctgcacggagcgctcccgctacaagggcaacacgggagtctcctggcaccagtctccctaagttcacatggagggaaggtcagaaacagctgccactgatcggatgtgtgcttttactgatcgccttggtcgtgtcactgatcattctcttccaattctggcagggccataccggaataaggtataaagagcagagagaatcatgccccaagcatgcggtgcggtgtgacggcgttgttgattgtaaactgaagagcgatgaactcgggtgtgtgcggtttgattgggacaagtccctgctgaagatctattcaggatccagccaccagtggttgcctatatgtagttctaattggaacgattcttactcagaaaagacgtgccaacagctgggctttgaaagtgcacataggactaccgaagtagcacacagggacttcgcaaacagtttttctattctgaggtacaacagtaccatccaggaatcgttgcaccgatccgaatgcccgtcccagcgctacatttcactgcagtgctcacactgcgggcttcgggcaatgacaggtaggatcgtcgggggcgcactggctagtgacagtaagtggccatggcaggtgagtctgcacttcgggactacgcacatctgcggcggaacacttatcgatgcgcagtgggtgttgaccgcggctcattgtttctttgtgacacgggagaaagtgctcgaaggttggaaagtgtacgccggaactagtaatctccaccagttgccagaggctgcctccatagcagaaataattattaacagtaactacaccgatgaggaagatgattacgatatcgctcttatgcgcctgtccaagcctctgaccctgagcgcccacattcaccctgcatgtctgcctatgcacggacagaccttttcactgaacgagacctgttggataactggcttcggaaaaaccagagaaacggacgataagacaagcccttttctgcgcgaggtgcaggtaaatctgatcgatttcaaaaagtgtaatgattacttagtctatgattcatacctgacacccagaatgatgtgcgccggtgaccttagaggtggcagagattcctgtcagggagactccggagggcctctcgtgtgcgagcagaataaccgctggtacctcgccggagtgacatcgtggggaaccgggtgcggccagagaaataaaccaggcgtgtataccaaagttaccgaggtcctgccatggatctactcgaaaatggaatccgaagtgcgatttcggaaatcttag

SEQ ID NO: 34822 - DNA, 1761 bp, Artificial Sequence
  derived and/or modified sequence
atggagcgtgactctcatggaaatgcgtcccccgcgcgaactccctccgcgggagcttcacctgcacaggccagtccagcagggaccccacctggcagagcctctccagcacaggcttccccggcacaggcaagcccagcaggaacccctccaggtagggcttctccagcgcaggccagtccggctgggacaccaccggggcgtgccagcccgggacgggcgtctcctgctcaggcgtcgccagctcaggcctctcccgcccgtgctagcccagcccttgcttccctgtcccggtcatcttcagggcggagcagcagcgccaggtctgcatcagtaaccacttcccccaccagagtgtatcttgttcgggcaacaccagtgggcgcggtccctattcggtcctcgccagcgaggtccgctccagccactcgagcgacaagggaaagccccggcacctctctccccaagtttacttggcgagagggtcagaaacaactgccgttgattgggtgcgtcctcctgttaatcgcactggtggtttcactcatcatattgtttcagttctggcagggccacaccggcattagatacaaagagcagcgggagtcctgtcctaaacacgctgtgaggtgtgatggagttgttgattgtaaattgaagagtgacgagctcggatgtgtgcgcttcgattgggataagagtctgcttaaaatttactccgggtcctctcaccaatggctacctatctgctcaagtaattggaatgactcgtatagtgagaagacatgtcagcagcttggattcgagtctgctcatcgaaccacagaggtcgcacaccgggatttcgccaatagcttcagtattcttagatataatagcactattcaggagagtctacaccggagcgagtgcccatctcaacgatatatttccctccagtgctctcactgtggcctgcgtgctatgaccgggagaatagtgggaggtgcgctggccagtgactctaaatggccatggcaagtaagtctacacttcggaacgacgcacatatgcgggggaacgttgattgacgctcaatgggtcttgacagcagcccactgcttttttgtgactagggaaaaagtgctcgaggggtggaaggtctatgcaggcacttctaatctgcatcagcttccggaagccgcatctatcgccgaaatcattattaattccaattataccgacgaggaggatgactatgatatcgcgctgatgcggctctccaagcctttgaccctgtccgcacatatccacccagcttgcctacctatgcatggccagacattctctcttaatgaaacctgctggattacaggcttcggtaagacgcgggaaacggatgataaaacatcgcccttccttcgcgaagtgcaagtcaatctcatagattttaagaagtgcaacgattacctagtctacgacagttacttgaccccgaggatgatgtgcgccggagacctaaggggagggcgcgattcttgtcagggagattctggcggcccattggtctgtgagcagaacaaccggtggtatcttgcgggtgtcactagctggggcactggatgcggacagaggaacaaacctggagtgtacactaaggtgacggaagtgctgccgtggatctacagtaaaatggaagtcaggagtctgcagcaggacaccgccccctcaaggttgggaaccagctcggggggggaccctgggggcgccccaagactgtag

SEQ ID NO: 34823 - DNA, 1704 bp, Artificial Sequence
  derived and/or modified sequence
atggaacgcgattctcatggtaatgcatctccagcaaggaccccttctgccggcgctagcccagcgcaggctagtcctgctggtaccccaccaggtagagcgtcccctgctcaagccagtccagcccaggccagccccgccggcacaccccccggcagagcttcccccgcacaagctagccctgcgggaacaccgccaggccgtgcttcccctgggagggcctcccccgcacaggcatctcctgctcaagcctctcccgcgcgcgcttcaccagctttagcatctctgagtcggtccagctcggggaggagtagctctgcaagatctgcctccgtaaccacctctccaactagagtttatctagtccgcgccacccccgtgggggccgtccctatcaggtccagtcccgcaaggtccgcccccgccacccgcgcaaccagagagtcacctggcacttcattacctaagtttacctggcgcgagggccagaagcagctgcccttgattgggtgcgtgctgctgctgatcgctttagtggtcagcctcatcatcctgttccaattttggcagggccacaccggcatcagatataaagagcagcgggaatcatgtcccaaacacgcggtgcgatgtgatggtgtagtcgattgcaaactcaagagtgatgaactggggtgcgtgcgattcgattgggataagtccctgttgaaaatctactctggcagttctcatcagtggctgcctatctgttcttccaactggaacgattcttactccgaaaaaacatgtcagcagcttggcttcgagagcgctcatagaactactgaggtggcacatagggacttcgccaactctttttccattttacgctataatagcacaattcaagagtccctgcatcgtagtgagtgtcctagccaacgatatatctccctccagtgttcgcattgcgggctgcgcgctatgactggacgaatcgttggtggggcactggcatctgattccaaatggccttggcaagtatcccttcactttggaaccacccatatctgtggtggaactttgatcgacgcacagtgggtactgacagctgcccattgtttttttgtcaccagggaaaaggtgctcgagggctggaaggtgtacgcaggaaccagcaatctgcaccagctgccagaagccgcctctatcgccgagatcattatcaatagcaactatacggacgaggaggatgattacgatatagcactcatgaggttgagcaaacccttaacattgtctgctcatatccatccggcttgtctgcccatgcatggccagaccttctcactgaatgagacatgctggattacaggtttcgggaaaacaagggaaaccgacgacaagacctccccctttctgcgcgaggtgcaggttaacttgatcgactttaaaaaatgcaacgattaccttgtgtacgacagctatttgaccccgaggatgatgtgtgccggagatctgcggggaggccgggacagttgccaaggcgattcaggtgggccactggtctgtgagcagaataaccgatggtatctggccggagttaccagctggggcaccgggtgtggtcagaggaacaagcccggcgtttacacaaaggtgacagaagtcttgccttggatctactcaaagatggaaagtgaggtgcgctttaggaagagttag

SEQ ID NO: 34824 - DNA, 1689 bp, Artificial Sequence
  derived and/or modified sequence
atggagcgggacagccacggcaatgccagccctgcccggacccccagcgctggggccagccctgcccaggccagccctgctggcaccccacctggccgggccagccctgcccaggccagccctgcccaggccagccctgctggcaccccacctggccgggccagccctgcccaggccagccctgctggcaccccacctggccgggccagccctggccgggccagccccctgcaggccagccctgcccgggccagccctgccctggccagcctgagccgcagcagcagcggccgcagcagcagcgcccggagcgcctctgtgaccaccagccccaccagggtgtacctggtgcgggccacccctgtgggcgctgtgcccatccgcagcagccctgcccggagcgccccagccacccgggccacccgggagagccctggcaccagcctgcccaagttcacctggagggagggccagaagcagctgcccctcatcggctgtgtgctgctgctgattgccctggtggtgtccctcatcatcctcttccagttctggcagggccacacaggcatccgctacaaggagcagcgggagagctgccccaagcatgctgtgcgctgtgatggagtggtggactgcaagctgaagagtgatgagctgggctgtgtgcgctttgactgggacaagagcctgctgaagatctacagcggcagcagccaccagtggctgcccatctgcagcagcaactggaatgacagctacagcgagaagacctgccagcagctgggctttgaaagtgcccacaggaccacagaggtggcccaccgggactttgccaacagcttcagcatcctgcgctacaacagcaccatccaggagagcctgcacaggtctgagtgccccagccagcgctacatcagcctgcagtgcagccactgcggcctgcgggccatgactggaagaattgtgggcggggccctggccagtgacagcaagtggccctggcaggtgtccctgcacttcggcaccacccacatctgtggcggcaccctgattgatgcccagtgggtgctgacagctgcccactgcttctttgtgacccgggagaaggtgctggagggctggaaggtgtatgccggcaccagcaacctgcaccagctgcctgaggccgccagcattgctgagatcatcatcaacagcaactacacagatgaagaagatgattatgacatcgccctgatgaggctgagcaagcccctgaccctgagcgcccacatccacccagcctgcctgcccatgcacggccagaccttcagcctgaatgagacctgctggatcaccggctttgggaagacccgggagacagatgacaagaccagccccttcctgcgggaggtgcaggtgaacctgattgacttcaagaagtgcaatgactacctggtgtatgacagctacctgacccccaggatgatgtgtgccggggacctgcggggcggccgggacagctgccagggcgacagcggcggccccctggtgtgtgagcagaacaaccgctggtacctggccggcgtgacctcctggggcaccggctgcggccagaggaacaagccaggagtgtacaccaaggtgacagaggtgctgccctggatctacagcaagatggagagcgaggtgcgcttcaggaagagctag

SEQ ID NO: 34825 - DNA, 1761 bp, Artificial Sequence
  derived and/or modified sequence
atggagcgggacagccacggcaatgccagccctgcccggacccccagcgctggggccagccctgcccaggccagccctgctggcaccccacctggccgggccagccctgcccaggccagccctgcccaggccagccctgctggcaccccacctggccgggccagccctgcccaggccagccctgctggcaccccacctggccgggccagccctggccgggccagccctgcccaggccagccctgcccaggccagccctgcccgggccagccctgccctggccagcctgagccgcagcagcagcggccgcagcagcagcgcccggagcgcctctgtgaccaccagccccaccagggtgtacctggtgcgggccacccctgtgggcgctgtgcccatccgcagcagccctgcccggagcgccccagccacccgggccacccgggagagccctggcaccagcctgcccaagttcacctggagggagggccagaagcagctgcccctgattggctgtgtgctgctgctgattgccctggtggtgtccctcatcatcctcttccagttctggcagggccacacaggcatccgctacaaggagcagcgggagagctgccccaagcatgctgtgcgctgtgatggagtggtggactgcaagctgaagagtgatgagctgggctgtgtgcgctttgactgggacaagagcctgctgaagatctacagcggcagcagccaccagtggctgcccatctgcagcagcaactggaatgacagctacagcgagaagacctgccagcagctgggctttgagagcgcccacaggaccacagaggtggcccaccgggactttgccaacagcttcagcatcctgcgctacaacagcaccatccaggagagcctgcacagaagtgaatgtcccagccagcgctacatcagcctgcagtgcagccactgcggcctgcgggccatgacaggccgcatcgtgggcggggccctggccagtgacagcaagtggccctggcaggtgtccctgcacttcggcaccacccacatctgtggcggcaccctgattgatgcccagtgggtgctgacagctgcccactgcttctttgtgacccgggagaaggtgctggagggctggaaggtgtatgccggcaccagcaacctgcaccagctgcctgaggccgccagcattgctgagatcatcatcaacagcaactacacagatgaggaggatgattatgacatcgccctgatgaggctgagcaagcccctgaccctgagcgcccacatccacccagcctgcctgcccatgcacggccagaccttcagcctgaatgagacctgctggatcactggatttgggaagacccgggagacagatgacaagaccagccccttcctgcgggaggtgcaggtgaacctgattgacttcaagaagtgcaatgactacctggtgtatgacagctacctgacccccaggatgatgtgtgccggggacctgcggggcggccgggacagctgccagggcgacagcggcggccccctggtgtgtgagcagaacaaccgctggtacctggccggcgtgacctcctggggcaccggctgcggccagaggaacaagccaggagtgtacaccaaggtgacagaggtgctgccctggatctacagcaagatggaggtgcgcagcctgcagcaggacacagcccccagccggctgggcaccagcagcggcggggaccccggcggggccccccggctgtag

SEQ ID NO: 34826 - DNA, 1704 bp, Artificial Sequence
  derived and/or modified sequence
atggagcgggacagccacggcaatgccagccctgcccggacccccagcgctggggccagccctgcccaggccagccctgctggcaccccacctggccgggccagccctgcccaggccagccctgcccaggccagccctgctggcaccccacctggccgggccagccctgcccaggccagccctgctggcaccccacctggccgggccagccctggccgggccagccctgcccaggccagccctgcccaggccagccctgcccgggccagccctgccctggccagcctgagccgcagcagcagcggccgcagcagcagcgcccggagcgcctctgtgaccaccagccccaccagggtgtacctggtgcgggccacccctgtgggcgctgtgcccatccgcagcagccctgcccggagcgccccagccacccgggccacccgggagagccctggcaccagcctgcccaagttcacctggagggagggccagaagcagctgcccctgattggctgtgtgctgctgctgattgccctggtggtgtccctcatcatcctcttccagttctggcagggccacacaggcatccgctacaaggagcagcgggagagctgccccaagcatgctgtgcgctgtgatggagtggtggactgcaagctgaagagtgatgagctgggctgtgtgcgctttgactgggacaagagcctgctgaagatctacagcggcagcagccaccagtggctgcccatctgcagcagcaactggaatgacagctacagcgagaagacctgccagcagctgggctttgagagcgcccacaggaccacagaggtggcccaccgggactttgccaacagcttcagcatcctgcgctacaacagcaccatccaggagagcctgcacagaagtgaatgtcccagccagcgctacatcagcctgcagtgcagccactgcggcctgcgggccatgacaggccgcatcgtgggcggggccctggccagtgacagcaagtggccctggcaggtgtccctgcacttcggcaccacccacatctgtggcggcaccctgattgatgcccagtgggtgctgacagctgcccactgcttctttgtgacccgggagaaggtgctggagggctggaaggtgtatgccggcaccagcaacctgcaccagctgcctgaggccgccagcattgctgagatcatcatcaacagcaactacacagatgaggaggatgattatgacatcgccctgatgaggctgagcaagcccctgaccctgagcgcccacatccacccagcctgcctgcccatgcacggccagaccttcagcctgaatgagacctgctggatcactggatttgggaagacccgggagacagatgacaagaccagccccttcctgcgggaggtgcaggtgaacctgattgacttcaagaagtgcaatgactacctggtgtatgacagctacctgacccccaggatgatgtgtgccggggacctgcggggcggccgggacagctgccagggcgacagcggcggccccctggtgtgtgagcagaacaaccgctggtacctggccggcgtgacctcctggggcaccggctgcggccagaggaacaagccaggagtgtacaccaaggtgacagaggtgctgccctggatctacagcaagatggagagcgaggtgcgcttcaggaagagctag

SEQ ID NO: 34827 - DNA, 1689 bp, Artificial Sequence
  derived and/or modified sequence
atggagcgggacagccacggcaacgccagccccgcccggacccccagtgctggagcgagtcctgcgcaggcctcccccgctggaacacctccaggtcgggcctcccctgctcaggcgtccccagcccaagccagtcccgctggtacgccccctgggcgggcttcccctgctcaggccagccccgcagggacaccaccagggagagcctcccccgggcgggcatcacccctgcaagcttctccagctcgcgcatcccccgcactcgcatctctatccagaagttcctctggtcgttctagcagcgctcggtccgctagcgtgaccacttctccaaccagagtctatttagtgagggccacaccagtcggggccgtccctattcggtcctcccctgctcgctcagccccagctactcgcgctacacgtgagtcccctggcactagcctgcctaaattcacatggcgcgaaggacagaagcagctacccttgatcggctgcgtccttctgttaattgccttggtggtaagtctgatcattctgtttcagttttggcaagggcatactggaatacggtataaagagcaacgtgaatcatgcccaaaacatgctgtgagatgcgatggggtggtcgactgcaagctgaagtcagacgagctgggttgtgtccgttttgattgggacaagtcactgctgaagatatatagtggctcctcgcaccagtggcttcccatttgcagcagcaattggaacgactcgtatagcgaaaagacctgtcaacagctcggttttgagagtgcacatcgaaccactgaagtggcccacagagatttcgccaattcatttagcatactgagatacaatagtactatacaagaatctcttcataggtctgaatgtccttcccagcgttacatctctctgcagtgttcccactgcgggttaagggccatgactggccgaatcgtgggaggggctctcgcttctgactcgaagtggccctggcaggtcagtctccatttcggcaccacccacatctgcggtgggacactgatagacgcacagtgggtcctcacagccgcccactgtttttttgtcacaagggaaaaggtgctggagggatggaaagtgtatgctgggacttcaaacctgcaccagctcccggaggccgctagtattgcagagattatcatcaactctaattatacagacgaggaggacgactacgatatagcactcatgcgcctgagtaaaccgctgaccctgtctgcccacatccatccagcctgcctccccatgcacgggcaaacattctccctcaatgaaacatgttggattacaggattcggtaagactagagagactgacgacaagacctccccatttctccgggaggtccaggtcaatctcatcgattttaaaaagtgcaacgattacctggtttatgattcctatctgacccctagaatgatgtgtgccggtgatctgcgtggcggaagggacagctgccagggtgacagcggagggccacttgtgtgcgaacagaataaccgctggtacctggccggggtaacatcctgggggactggctgcggccagaggaacaagccgggcgtttatacgaaggtgacggaggtgctgccctggatatacagcaagatggaaagtgaagtgcgctttagaaaatcctag

SEQ ID NO: 34828 - DNA, 1761 bp, Artificial Sequence
  derived and/or modified sequence
atggagcgggacagccacggcaacgccagccccgcccggacccccagtgctggtgcctctccagcgcaggcctcaccagccggaacccccccaggccgtgcaagccctgctcaggcctccccagcccaagccagcccagccggaacacctccgggtcgagcctcaccagcgcaagcctccccagccggtacgccacctggtcgggctagcccgggacgggccagccccgcccaggccagtcccgctcaggcttcgcccgccagagcctcacctgcattggcgtccttgtctcgctcctccagcggaaggtcatccagcgcacgaagcgcgtccgtgacaaccagtccaacacgagtctacctagtgcgggcaaccccagtgggggcggtacccataagatcctctccagcgcggtctgctcccgctacaagggcgactagagagtccccagggacaagcctcccaaagttcacttggcgcgaaggacagaagcagctgcccctaatcggatgcgtgctgctgctgatcgctctcgtcgtgtctcttatcatactgtttcagttctggcagggacatactggcattaggtacaaagagcaacgcgaaagttgccctaaacatgccgtgcggtgtgacggcgtagttgattgcaaactcaaatctgatgaactgggatgcgtaaggttcgactgggataagtcactcttgaagatttactccggcagttcacatcagtggttacctatctgcagtagtaattggaacgattcatatagtgagaagacatgccaacaactcggcttcgaatcagcgcaccgaaccacagaggtggctcaccgggattttgctaattcattttccatattaagatacaacagcacgatacaggaatccctgcaccggtccgaatgccccagccagaggtatatttcactgcagtgttctcattgtgggctgcgggcaatgactggcaggatcgtgggtggcgccctggccagcgactcgaaatggccatggcaggtgtccctgcatttcggtaccacgcatatctgcggaggcaccctcatagacgctcagtgggtgttgacagccgctcactgcttcttcgtgaccagggagaaggtgctggagggctggaaggtgtacgctggcacctctaatctgcaccagctgccggaagccgcaagtatcgcagaaataatcattaatagcaactacactgatgaagaagacgattatgatattgctctcatgcgtctttcaaagccactcacattatcagcccacattcacccagcctgtctgccgatgcacggccagacttttagtcttaacgagacttgttggatcaccggctttgggaagaccagggaaactgacgataagacctctccattccttcgtgaggttcaggtcaatcttattgactttaagaaatgcaatgactacctcgtgtacgactcctatctaactccaaggatgatgtgtgccggcgaccttcggggaggaagggacagctgtcagggcgacagtggggggccgctggtgtgtgagcagaacaaccgctggtacctggccggtgtgacctcctggggaaccggttgtggccagaggaataaacccggagtctacactaaggtaaccgaagttttaccctggatctacagcaagatggaagtccgaagcttgcagcaagacaccgcccctagccggttgggtacgagctctgggggcgacccaggcggcgccccacggttgtag

SEQ ID NO: 34829 - DNA, 1704 bp, Artificial Sequence
  derived and/or modified sequence
atggagcgggacagccacggcaacgccagccccgcccggaccccctctgcgggcgcctccccagcacaagcttctcctgctggaacacctcccggaagggcgtccccagcacaggcgtcacctgcacaggcatcccccgcgggaaccccacccgggcgggcgagcccagctcaggcgtcacctgctggaacacctcccgggagagcatctccaggtagagcaagtcccgcgcaggccagtcctgctcaggcttccccagcccgagcatcccccgcgttggccagcttatcacggtctagttcaggcagatcatcctctgcccggtccgctagcgtcacaaccagccccacgcgcgtctatctggtgagggcaacacctgtgggagctgtgcccattagaagctcgcccgctcggtcggctcctgcaacccgagcgacaagggaaagtcctgggacctccctgcccaagttcacctggcgcgaagggcaaaagcaactgcccctaatcgggtgcgtgcttcttctgatagctctggtggttagcctgattatcctcttccagttttggcagggacacaccggtatcagatacaaagagcagcgggaatcgtgcccaaagcacgcagttcgatgtgacggagtcgtagactgcaagctaaagtctgacgagctgggttgcgtgaggtttgactgggataagtcgctgctgaagatttactcggggagtagccaccagtggttacctatttgctcctcaaactggaacgacagctacagcgaaaagacatgccagcagctcggctttgaatccgcacaccgcaccaccgaggttgcgcaccgggactttgccaacagttttagcatactgagatataacagcacgatccaggaaagcctgcacagaagcgagtgtccaagccaacggtacatcagcctacagtgttcacactgtgggctcagggcaatgactggccggatagtcggaggcgctctcgcttcagattccaagtggccatggcaggtctcgctgcacttcggaacaactcatatctgcggggggactcttattgatgcccagtgggttctgactgcggcccattgctttttcgtcacacgagaaaaggtgttggaaggctggaaggtatatgctggcacgagtaatctccatcagcttcctgaagcagcatccatcgctgagatcataataaacagcaactacacagacgaagaggacgactacgatatcgccttgatgcggctgagcaagccattgactctgtcagctcatatccatcctgcatgcttacccatgcatggacaaacatttagcttaaatgaaacctgttggatcaccggattcgggaagacccgcgagaccgacgataaaacaagccccttcctgcgcgaggtgcaggtgaatctgattgactttaagaaatgcaacgattacctggtctacgatagctacctaacaccgcggatgatgtgcgcaggcgatttaagagggggtcgagactcttgccaaggagacagcggggggccactcgtgtgtgaacagaataatcggtggtatctggcaggcgttacctcttggggaacaggatgtggccagcgaaataagcccggcgtatacaccaaagttacagaggtcctaccctggatctactctaaaatggaaagcgaagtgcgcttcaggaaaagttag

SEQ ID NO: 34830 - DNA, 1689 bp, Artificial Sequence
  derived and/or modified sequence
atggaaagggacagtcatgggaatgcgagtccagcacgcacgccctccgcgggagctagccctgctcaggcatcgccagcagggacgccaccagggagggcaagtccagctcaggcatcccccgctcaggcttctccagccggtactcccccaggtagggcttctcctgcacaggcaagccctgccggaactccccctggcagggcttctcccggacgtgcatcccctctccaggcttccccagctcgggcttctcctgccttggccagcctttcccgcagctcatcagggcgatcatctagcgccagatccgcatctgtgaccaccagccccacgcgagtttatctagtgcgggcaacacccgtaggagctgtgcccatccggtcctctccagctcgaagcgccccagcgactagggcaacccgggagagtccaggaactagcctacccaaatttacgtggcgggaagggcagaagcagttacccttaatcggctgcgttttactgttaatcgcccttgtcgtgtctctcatcatcctgttccagttttggcaggggcacaccggcataaggtataaagaacagcgggagagctgtccaaaacacgccgtaagatgcgatggggttgtcgactgcaagttgaaaagcgatgagctgggttgcgtacggttcgactgggataagtctttactgaagatttattctggaagcagtcaccagtggctgcccatctgctcatcaaactggaatgactcttactccgaaaaaacgtgccagcagctgggcttcgagagcgcccaccgtacaaccgaggtcgcgcacagggacttcgccaattccttctctattttgcgttataactcgaccatccaggaatcgttacatagatctgagtgtccctctcagaggtatatcagtctccagtgcagccactgtgggcttcgcgcaatgacgggcaggatcgtgggcggagccttggcctcagactcaaagtggccttggcaggtttcactgcacttcggcaccacacacatttgtgggggaacattaatcgacgcccagtgggtgctgaccgcagcacactgcttcttcgtcacacgcgaaaaggtgctagaaggctggaaggtgtatgcaggcacctctaaccttcatcaattgccagaggcagcctccatcgccgaaattataattaattccaactatacggatgaggaagacgattatgatatagccctgatgcggctgagcaaaccactgacactgtctgctcacattcatcctgcctgcctccccatgcacggccaaacattctccttaaacgaaacttgttggatcacaggctttggaaaaacccgtgaaacagacgataaaacttctccctttcttagggaagttcaagttaacttgatagattttaagaagtgtaatgattaccttgtgtacgattcctacctcacccccagaatgatgtgtgctggagacctgcgtggtggcagggactcatgccagggtgacagcggcggaccgttggtctgcgaacagaataatcgctggtacctggcgggtgtaacaagctggggcactggctgtggacagcgcaacaaaccaggagtgtataccaaggttactgaagtgctcccatggatctacagcaaaatggagtctgaggtgaggtttcgcaaatcatag

SEQ ID NO: 34831 - DNA, 1761 bp, Artificial Sequence
  derived and/or modified sequence
atggaaagagactcacacggtaatgcctcccccgcaagaaccccctcggcgggagcaagcccggcacaggcaagtcccgctggcacaccccctggcagagcaagcccagcccaagcatctcccgcacaggcctccccagctggcacacctcctggccgagccagtcctgcccaagccagcccagcaggcacaccccctggcagggccagtcctggtcgcgcttcccccgctcaggcaagccctgcccaagcttcccccgctagagcctccccagcactggcctctcttagtcgcagctcctccggcagaagcagttctgcaagatcagcctctgtgacaacaagcccaaccagggtgtaccttgtgcgcgctactccggtgggtgccgtacccattaggtcctcacccgcacgctccgcccctgctacaagagcaacaagggaatcccccggtacttctcttcccaagtttacctggcgtgaaggtcagaagcagctaccattgattggatgcgttctgctgctgatcgccctagtggttagcctgattatcctttttcagttttggcagggacacaccggcatcagatacaaggagcaacgggagagctgcccgaagcacgccgtgaggtgtgacggtgttgtagactgtaagcttaaaagtgatgagcttggttgcgttcgctttgactgggataaatcgctgcttaagatttactctggcagcagccaccagtggctgcccatatgtagctcaaattggaatgattcttactcagagaagacctgccagcagttgggcttcgaatccgcacatcgaacaacagaggtggctcatcgtgattttgcaaatagtttctccattctgcgatataattcaactattcaggaaagcctccacaggagtgaatgccctagtcagagatatatcagccttcagtgctcccactgcggactgcgtgctatgaccggcaggattgttggcggtgctctcgcctccgactcaaaatggccttggcaggtgtccttgcactttggcactacccacatctgcggaggcactcttattgacgcacaatgggttttgaccgcagcgcactgcttttttgtcaccagagagaaagtattagaagggtggaaagtttacgccggaacttccaaccttcaccagctgcccgaggcagcctcaatagccgaaatcattatcaatagcaactatactgacgaggaagatgattatgatattgccctcatgcgcctgtcaaaacctctcacactgtccgcgcatatccacccagcctgtctaccaatgcacgggcagacattctccctgaacgagacctgttggatcacgggctttgggaagactcgggagacagacgacaaaacttcaccatttctgagggaagtacaggtgaatctgattgacttcaaaaaatgcaacgactacctcgtctatgactcatatctcacaccacggatgatgtgtgccggtgatctgcggggtggccgtgactcatgtcagggtgatagcggaggtcccctcgtttgcgaacagaataacaggtggtaccttgcaggggtaacatcttggggaaccgggtgcgggcagcgcaataagcccggagtttatactaaggtcaccgaggtgcttccctggatctatagcaagatggaggtaagaagtctgcagcaggacactgcaccctccaggcttggcacttcgtcagggggagacccagggggtgcacctcggctctag

SEQ ID NO: 34832 - DNA, 1704 bp, Artificial Sequence
  derived and/or modified sequence
atggagagagactctcacggaaatgctagtccagcacgtacacccagcgccggtgcctcccccgctcaagcgagccctgctgggaccccccctggaagagcaagccccgctcaagccagtcccgcacaggcttcacctgccggaaccccacccggaagggcatcccctgcccaggctagcccagctgggacacctccaggtagagcctcacctgggagggccagccccgctcaggcctctcctgctcaggcatctcctgctcgggcatcccccgctctcgcaagcctgagtagatcatcttccggaagatcatcctctgccaggtccgcatcagtgacaacatcgccaacgcgggtataccttgttagagccactccggtgggagccgtgccaatacgctcctcgcctgcaagatccgccccagccacgcgagcaacgagagaatccccaggtacttccctccccaagttcacctggcgggaggggcagaaacaactcccactgattggatgtgtcctcttactgatcgcgctcgtagtttcactgatcatccttttccagttctggcagggccatactggcatcagatacaaggaacagcgggagtcctgcccaaagcatgctgttcgttgtgatggagtagtggactgcaagctgaaaagcgatgagctgggatgtgtcaggtttgactgggacaagtcactgttgaagatatacagcgggagtagccaccagtggttgccgatatgttcttccaactggaatgattcgtacagcgagaaaacctgccaacagctgggctttgagtcagcccatcggacaactgaggtggcccaccgcgacttcgccaactctttctctatccttcgatataactcgactatccaggaaagtttgcataggtcggaatgcccttcccagcggtatattagcctgcagtgtagtcactgcggcctccgggcaatgaccggacgcattgtcggcggagcactcgctagtgactcaaaatggccctggcaggtgtccttgcatttcggaactactcacatctgtggtggaaccctgatcgatgctcagtgggtactgacagcggctcattgtttctttgtcacccgagaaaaggtgctcgagggatggaaagtgtatgcgggaacaagcaatctgcaccaactcccagaagccgcatcgatagccgaaatcatcattaactcgaactatactgatgaggaggatgactacgatattgccttgatgaggctttccaagccccttacattgtccgcgcacatccaccccgcatgtctgcctatgcacgggcagaccttcagtctcaatgaaacctgctggatcacagggttcggaaagacacgcgagacggacgataaaacatcgcctttcctgcgagaggtgcaagtgaacctgatcgattttaagaagtgtaacgactacctggtgtatgattcttacctgactcctcggatgatgtgtgcgggagacctccgaggagggcgtgattcatgtcagggagacagcggaggaccactagtatgcgagcagaataaccgctggtacttagccggagtgacaagctggggaaccggatgtggccaaagaaataagccgggtgtctacactaaagtgacagaggtcctgccctggatttactcaaagatggagtcagaggtgcgttttcgcaaatcatag

SEQ ID NO: 34833 - DNA, 3266 bp, Artificial Sequence
  derived and/or modified sequence
tgagaagccagggaccaagatggatcttctcctcgacatcagctaagcctggaggactcttcccctcagagaccatggagagggacagccacgggaatgcatctccagcaagaacaccttcagctggagcatctccagcccaggcatctccagctgggacacctccaggccgggcatctccagcccaggcatctccagcccaggcatctccagctgggacacctccgggccgggcatctccagcccaggcatctccagctggtacacctccaggccgggcatctccaggccgggcatctccactccaggcatctccagcccgggcatctccggctctggcatcactttccaggtcctcatccggcaggtcatcatccgccaggtcagcctcggtgacaacctccccaaccagagtgtaccttgttagagcaacaccagtgggggctgtacccatccgatcatctcctgccaggtcagcaccagcaaccagggccaccagggagagcccaggtacgagcctgcccaagttcacctggcgggagggccagaagcagctaccgctcatcgggtgcgtgctcctcctcattgccctggtggtttcgctcatcatcctcttccagttctggcagggccacacagggatcaggtacaaggagcagagggagagctgtcccaagcacgctgttcgctgtgacggggtggtggactgcaagctgaagagtgacgagctgggctgcgtgaggtttgactgggacaagtctctgcttaaaatctactctgggtcctcccatcagtggcttcccatctgtagcagcaactggaatgactcctactcagagaagacctgccagcagctgggtttcgagagtgctcaccggacaaccgaggttgcccacagggattttgccaacagcttctcaatcttgagatacaactccaccatccaggaaagcctccacaggtctgaatgcccttcccagcggtatatctctctccagtgttcccactgcggactgagggccatgaccgggcggatcgtgggaggggcgctggcctcggatagcaagtggccttggcaagtgagtctgcacttcggcaccacccacatctgtggaggcacgctcattgacgcccagtgggtgctcactgccgcccactgcttcttcgtgacccgggagaaggtcctggagggctggaaggtgtacgcgggcaccagcaacctgcaccagttgcctgaggcagcctccattgccgagatcatcatcaacagcaattacaccgatgaggaggacgactatgacatcgccctcatgcggctgtccaagcccctgaccctgtccgctcacatccaccctgcttgcctccccatgcatggacagacctttagcctcaatgagacctgctggatcacaggctttggcaagaccagggagacagatgacaagacatcccccttcctccgggaggtgcaggtcaatctcatcgacttcaagaaatgcaatgactacttggtctatgacagttaccttaccccaaggatgatgtgtgctggggaccttcgtgggggcagagactcctgccagggagacagcggggggcctcttgtctgtgagcagaacaaccgctggtacctggcaggtgtcaccagctggggcacaggctgtggccagagaaacaaacctggtgtgtacaccaaagtgacagaagttcttccctggatttacagcaagatggagagcgaggtgcgattcagaaaatcctaaccagctggcctgctgctctgcacagcaccggctgctgtgaagactctggccatggtgactggccatgtgtggcatcatctgggctaatggccaccgggcaccatcggactcccacctccactgtctgctgcctctgtgtgtgtgtgtgtgtgtgtgtgtgtgtgtgcatatgtgtgcattgccactctcccaagtttttcagaaaccagcagagctgtcaactcttctcaaaatcccaggctggaaattacctggagacaagagttgagtaccgtggatgttcctacaggagtgtccatagatggatggaggaggtggagcccagagcccaaggaagagctgggaattcttgcttctctgaccctcacttacagactagcccagtgtgggcagatgccagcggcccaggtggcgccattgctgtcctgggatggatcgtgggttttggtggatgcagcttcccagggcctggaccgtcttcggtgaaaagctgctcccgttggctttatgagcatcaagtcctcacccagaccccctgctggtgccgtggatgtcaccagtcggactgtgctgtggctaaccaggctgacaactgagatgaggattcactgtactcatttggtcacaagctgctggggcgggttttattttattttatttttatatttaagaaatgaaaatacgggtatttttaaagattctccaaaaagtccagaagccttgacagctggcatcaatcagcccaagacccccaggggattcatgggaaatgtcgtattttagagtcctacagaatatttctggcctcaaggaactggatgaagagactggacaaagtccccaggatgggcatcccccaagtcactacagcatctggagcccctaggagatactcagggaagcaaatccttgtttgggctggcaagcaaatccgacacgacgaggtccacaaactgtttctgcatcccagggctctgacgaaggcgttaagaaacagatgctgttcccgcgtaggctcccaggggccccagggaggtccaggtggactgcctctctcattcccagtagctgtcctgggactttgggatttcttctcagctttctccacctttcagtttctcagttgtttcagaaacatagcaatgacataaaaactgctatggagagaaagctaacatggtcccatgccttccaggcagccctgctgaaggatctaagttggccctgttcctgcaaatcatcaacgtgcctggactcgccagctaaaagcctgggccttccccagccttttttctggggcacctattcctctgccagtcctgctcccctcaccttccttgggcccgtcagagtcttttgtggtgctgtgcttctcagaggcaggatccaagcagatcagcccagcctagcccagctcaggcaggccatggccgctcaagggaaagactgccccagaagagcaagctggagaggctgggcaggggctgatggggctgggtacac

SEQ ID NO: 34834 - DNA, 1950 bp, Artificial Sequence
  derived and/or modified sequence
aagatggatcttctcctcgacatcagctaagcctggaggactcttcccctcagagaccatggagagggacagccacgggaatgcatctccagcaagaacaccttcagctggagcatctccagcccaggcatctccagctgggacacctccaggccgggcatctccagcccaggcatctccagcccaggcatctccagctgggacacctccgggccgggcatctccagcccaggcatctccagctggtacacctccaggccgggcatctccaggccgggcatctccagcccaggcatctccagcccaggcatctccagcccgggcatctccggctctggcatcactttccaggtcctcatccggcaggtcatcatccgccaggtcagcctcggtgacaacctccccaaccagagtgtaccttgttagagcaacaccagtgggggctgtacccatccgatcatctcctgccaggtcagcaccagcaaccagggccaccagggagagcccaggtacgagcctgcccaagttcacctggcgggagggccagaagcagctaccgctcatcgggtgcgtgctcctcctcattgccctggtggtttcgctcatcatcctcttccagttctggcagggccacacagggatcaggtacaaggagcagagggagagctgtcccaagcacgctgttcgctgtgacggggtggtggactgcaagctgaagagtgacgagctgggctgcgtgaggtttgactgggacaagtctctgcttaaaatctactctgggtcctcccatcagtggcttcccatctgtagcagcaactggaatgactcctactcagagaagacctgccagcagctgggtttcgagagtgctcaccggacaaccgaggttgcccacagggattttgccaacagcttctcaatcttgagatacaactccaccatccaggaaagcctccacaggtctgaatgcccttcccagcggtatatctctctccagtgttcccactgcggactgagggccatgaccgggcggatcgtgggaggggcgctggcctcggatagcaagtggccttggcaagtgagtctgcacttcggcaccacccacatctgtggaggcacgctcattgacgcccagtgggtgctcactgccgcccactgcttcttcgtgacccgggagaaggtcctggagggctggaaggtgtacgcgggcaccagcaacctgcaccagttgcctgaggcagcctccattgccgagatcatcatcaacagcaattacaccgatgaggaggacgactatgacatcgccctcatgcggctgtccaagcccctgaccctgtccgctcacatccaccctgcttgcctccccatgcatggacagacctttagcctcaatgagacctgctggatcacaggctttggcaagaccagggagacagatgacaagacatcccccttcctccgggaggtgcaggtcaatctcatcgacttcaagaaatgcaatgactacttggtctatgacagttaccttaccccaaggatgatgtgtgctggggaccttcgtgggggcagagactcctgccagggagacagcggggggcctcttgtctgtgagcagaacaaccgctggtacctggcaggtgtcaccagctggggcacaggctgtggccagagaaacaaacctggtgtgtacaccaaagtgacagaagttcttccctggatttacagcaagatggagagcgaggtgcgattcagaaaatcctaaccagctggcctgctgctctgcacagcaccggctgctgtgaagactctggccatggtgactggccatgtgtggcatcatctgggctaatggccaccgggcaccatcggactcccacctccactgtctgctgcctctgtgtgtgtgtgtgtgtgtgtgtgtgtgtgtgcatatgtgtgcattgccactct

SEQ ID NO: 34835 - protein, 471 aa, Artificial Sequence
  derived and/or modified sequence
MNYDSQQPPLPPLPYAGCRRASGFPALGRGGTVPVGVWGGAGQGREGRSWGEGPRGPGLGRRDLSSADPAVLGATMESRCYGCAVKFTLFKKEYGCKNCGRAFCSGCLSFSAAVPRTGNTQQKVCKQCHEVLTRGSSANASKWSPPQNYKKRVAALEAKQKPSTSQSQGLTRQDQMIAERLARLRQENKPKLVPSQAEIEARLAALKDERQGSIPSTQEMEARLAALQGRVLPSQTPQPAHHTPDTRTQAQQTQDLLTQLAAEVAIDESWKGGGPAASLQNDLNQGGPGSTNSKRQANWSLEEEKSRLLAEAALELREENTRQERILALAKRLAMLRGQDPERVTLQDYRLPDSDDDEDEETAIQRVLQQLTEEASLDEASGFNIPAEQASRPWTQPRGAEPEAQDVDPRPEAEEEELPWCCICNEDATLRCAGCDGDLFCARCFREGHDAFELKEHQTSAYSPPRAGQEH

SEQ ID NO: 34836 - DNA, 1416 bp, Artificial Sequence
  derived and/or modified sequence
atgaactacgacagccagcagccccccctgccccccctgccctacgccggctgcagaagagccagcggcttccccgccctgggcagaggcggcaccgtgcccgtgggcgtgtggggcggcgccggccagggcagagagggcagaagctggggcgagggccccagaggccccggcctgggcagaagagacctgagcagcgccgaccccgccgtgctgggcgccaccatggagagcagatgctacggctgcgccgtgaagttcaccctgttcaagaaggagtacggctgcaagaactgcggcagagccttctgcagcggctgcctgagcttcagcgccgccgtgcccagaaccggcaacacccagcagaaggtgtgcaagcagtgccacgaggtgctgaccagaggcagcagcgccaacgccagcaagtggagccccccccagaactacaagaagagagtggccgccctggaggccaagcagaagcccagcaccagccagagccagggcctgaccagacaggaccagatgatcgccgagagactggccagactgagacaggagaacaagcccaagctggtgcccagccaggccgagatcgaggccagactggccgccctgaaggacgagagacagggcagcatccccagcacccaggagatggaggccagactggccgccctgcagggcagagtgctgcccagccagaccccccagcccgcccaccacacccccgacaccagaacccaggcccagcagacccaggacctgctgacccagctggccgccgaggtggccatcgacgagagctggaagggcggcggccccgccgccagcctgcagaacgacctgaaccagggcggccccggcagcaccaacagcaagagacaggccaactggagcctggaggaggagaagagcagactgctggccgaggccgccctggagctgagagaggagaacaccagacaggagagaatcctggccctggccaagagactggccatgctgagaggccaggaccccgagagagtgaccctgcaggactacagactgcccgacagcgacgacgacgaggacgaggagaccgccatccagagagtgctgcagcagctgaccgaggaggccagcctggacgaggccagcggcttcaacatccccgccgagcaggccagcagaccctggacccagcccagaggcgccgagcccgaggcccaggacgtggaccccagacccgaggccgaggaggaggagctgccctggtgctgcatctgcaacgaggacgccaccctgagatgcgccggctgcgacggcgacctgttctgcgccagatgcttcagagagggccacgacgccttcgagctgaaggagcaccagaccagcgcctacagcccccccagagccggccaggagcactag

SEQ ID NO: 34837 - DNA, 1416 bp, Artificial Sequence
  derived and/or modified sequence
atgaattacgatagtcagcaacctcccctgccacccctgccttatgccgggtgtagaagagcctcgggtttcccagcactgggacgggggggcacggttcccgtaggtgtgtggggcggcgcaggtcagggcagagaggggcggtcctggggagagggcccccgcgggcccggactgggtagacgggacctgtctagcgccgatcctgccgtattgggagctactatggaaagtcggtgctacgggtgtgctgtgaagtttactctgttcaagaaggaatacggatgtaagaactgcggtcgggccttctgcagtgggtgtctgagcttcagtgccgctgtgccaagaacaggtaacacccaacagaaggtatgcaaacaatgtcacgaggtgcttactagaggctcgagtgctaacgcttccaaatggagcccccctcagaattacaagaaaagagtggcagccctagaggctaaacaaaagccatccacgagtcaatctcaggggctcacccgccaggaccaaatgatagccgaaagactcgcgcggttgcgtcaggaaaataagccgaaacttgtgccctcacaggctgagatcgaggctagactggctgccctgaaggacgagcgccaaggatcaataccatccactcaggaaatggaagctcggctcgcagcactgcagggaagggttctgccgtctcagacaccgcagcccgcacaccatacacccgatacccgaactcaggcccagcaaacgcaggatttactcacacaactggctgccgaggtcgccatcgatgagtcctggaaaggaggtgggcctgctgcctctctccagaacgacttgaaccagggcgggcccgggtccaccaattcgaaaagacaggcgaactggagccttgaagaagagaagtcgagattattagccgaagcagccctggagctgcgcgaggagaacaccagacaggagagaatcctagcacttgcaaaaaggttggccatgctcagaggccaggatccggaacgcgttacgttgcaggactacaggctgcccgatagcgacgatgatgaagacgaggaaacagccattcagcgtgtccttcagcagctgacggaggaggccagtttggatgaggcctcaggcttcaatatccctgctgagcaggcctccaggccgtggactcagcccaggggggcggagccagaagcccaggacgttgacccacggcccgaagctgaggaagaagagttaccttggtgttgtatttgcaatgaagatgccacccttcgatgcgcagggtgtgatggtgacttgttttgcgcccggtgtttccgggaggggcacgatgcctttgaacttaaagaacaccagacctccgcttatagccctccgcgcgctgggcaggaacattag

SEQ ID NO: 34838 - DNA, 1416 bp, Artificial Sequence
  derived and/or modified sequence
atgaactatgacagccagcagccccccctgccccccctgccctatgccggctgcagaagagccagcggcttccctgccctgggccggggcggcaccgtgcctgtgggcgtgtggggcggggccggccagggccgggagggccgctcctggggcgagggcccccggggccctggcctgggcagaagagacctgagcagcgctgaccctgctgtgctgggcgccaccatggagagccgctgctacggctgtgctgtgaagttcaccctcttcaagaaggagtatggctgcaagaactgtggccgggccttctgcagcggctgcctgtccttctctgctgctgtgcccaggactggaaacacccagcagaaggtgtgcaagcagtgccacgaggtgctgacccggggcagcagcgccaatgccagcaagtggagccccccccagaactacaagaagagggtggccgccctggaggccaagcagaagcccagcaccagccagagccagggcctgacccggcaggaccagatgattgctgagcggctggcccggctgcggcaggagaacaagcccaagctggtgcccagccaggccgagattgaggcccggctggccgccctgaaggatgagcggcagggcagcatccccagcacccaggagatggaggcccggctggccgccctgcagggccgggtgctgcccagccagaccccccagcctgcccaccacaccccagacaccaggacccaggcccagcagacccaggacctgctgacccagctggccgctgaggtggccattgatgagagctggaagggcggcggccctgctgccagcctgcagaatgacctgaaccagggcggccctggcagcaccaacagcaagaggcaggccaactggagcctggaggaggagaagagccggctgctggccgaggccgccctggagctgcgggaggagaacacccggcaggagcgcatcctggccctggccaagaggctggccatgctgcggggccaggaccctgagcgggtgaccctgcaggactaccgcctgcctgacagtgatgatgatgaagatgaggagacagccatccagagggtgctgcagcagctgacagaggaggccagcctggatgaggccagcggcttcaacatcccagctgagcaggccagccggccctggacccagcccagaggagctgagcctgaggcccaggatgtggaccccaggcctgaggccgaggaggaggagctgccctggtgctgcatctgcaatgaagatgccaccctgcgctgtgccggctgtgatggagacctcttctgtgcccgctgcttccgggagggccatgatgcctttgagctgaaggagcaccagaccagcgcctacagcccccccagggctggccaggagcactag

SEQ ID NO: 34839 - DNA, 1416 bp, Artificial Sequence
  derived and/or modified sequence
atgaactacgacagccagcagccccccctgccccccctgccctacgcaggatgtcgccgggcgagcggatttccggctttaggcaggggtgggactgtgcctgtgggtgtgtggggcggtgccggccagggacgcgaaggcaggagctggggggagggaccacgtggcccggggcttgggcggagagatctgtcgtctgcagatcctgccgttctgggcgcaacgatggaatcaaggtgctacggttgtgccgtcaaatttacacttttcaaaaaagagtacggatgtaaaaactgtggccgggccttctgtagcggatgtctcagcttttctgccgcggtccctcgaactggcaacacacaacagaaggtctgcaagcagtgtcatgaggtgctaaccaggggaagcagtgcaaacgcaagcaaatggagtccccctcaaaattacaaaaaaagggtcgccgcactggaggctaagcaaaaacccagcacctcccagagtcaaggcttaacccggcaagaccaaatgattgcagaaagattagcccgattgcgacaagagaataaacctaaactcgtgcctagccaagcagagattgaagctagactggccgcactcaaggatgaaaggcagggcagcattccatccacacaggaaatggaagctagactcgccgcattgcaggggagagtgctaccatcacagactccccagcccgcacaccatacacctgacacgagaactcaagctcagcagacacaagatttactgactcagctggccgctgaagttgcgatcgacgagtcctggaagggcggcggtccagctgctagtctgcaaaatgatctgaaccagggcggtccaggatctacaaacagcaaacgtcaggcgaattggtccctggaagaggagaaatccaggctgctggcagaagcagcactcgagctccgggaggagaacacgcgtcaggaacggatcctcgctcttgctaaaaggcttgctatgctccgtggccaggatccagagcgggtcacactgcaggattacagacttcccgacagcgacgacgacgaggacgaagaaaccgctatacagagggttctacagcagttgactgaggaggcgtcgctggatgaagcatctggatttaacattcccgctgagcaggcatcccgcccctggacccagcccagaggcgccgagcccgaagcacaggacgtcgacccacgccccgaagcagaagaggaggagctaccatggtgttgcatttgtaatgaggatgcaaccctgagatgcgcaggctgcgacggggacttgttctgcgcaagatgtttcagagaaggccatgatgccttcgaactgaaagaacatcagacgagcgcgtacagtccaccgagagcaggtcaggaacattag

SEQ ID NO: 34840 - DNA, 1416 bp, Artificial Sequence
  derived and/or modified sequence
atgaactatgatagccagcaaccaccactgcctcccttgccatatgcagggtgccgaagggcatccggcttcccagctctcggcagaggaggaaccgtgcctgtgggcgtgtgggggggagcgggacaggggcgagagggtcgctcatggggcgagggcccaagggggccaggcttgggcagacgggatttatcaagcgccgatcccgcagtgctcggggcaacaatggaatcccggtgctatggctgtgcagtaaaatttacactgttcaagaaagagtatggctgcaaaaactgtgggcgagcgttctgctctggttgtctatcgttttccgcagctgtgcccaggaccggcaatacacaacaaaaagtgtgcaaacagtgccacgaggtgctaacacggggaagcagtgccaacgctagcaaatggagccctccccagaattacaaaaagagagtggccgcactcgaagccaagcagaaacctagtacaagccaatcacaggggctgacccgacaggatcagatgatagccgaaagactcgcacggctgcgccaggagaataaaccgaagctcgtgccctctcaggccgagatagaggctcgcctggctgccttgaaggacgagcgccaaggaagcattccgagcactcaagaaatggaggcacggctggccgctctgcagggtcgggtgctgccttctcagacgcctcagcctgcacaccacactcccgacacgcggacccaggcccagcagactcaagatctgttgacacagttggccgctgaagtggccatcgatgagtcctggaaaggcggaggacccgctgcgtctctacaaaatgacctgaatcaaggcggacctggatctacaaacagcaagagacaggcaaactggtccctggaggaggaaaaatctcgactcctggccgaggctgcgctcgagctaagggaggagaatacacgtcaggaacgtatcctggcattggcaaagcggctggccatgctccggggacaggatccagagagagtgacactgcaagactaccggctgcccgacagtgatgacgacgaagacgaagaaaccgcaatacaaagggtcttacagcaactgacagaagaggcgtcattggacgaggcgagcggctttaatatcccggctgagcaagccagccggccatggacgcaaccgaggggagccgaaccggaggcacaggatgtcgatcctcgtcccgaggcggaagaagaagagttgccctggtgttgcatttgcaatgaagacgccacattacgctgtgctggctgcgacggagacctcttctgtgccaggtgcttccgcgagggccatgatgcctttgaactaaaggagcaccagactagtgcctacagtccgccacgtgccggacaggaacactag

SEQ ID NO: 34841 - DNA, 2260 bp, Artificial Sequence
  derived and/or modified sequence
gttccttgctgcctcgccccgcggcctctaggagacaggggccacggggagagcacagccacccggcgcgaagagccctctgtaccccgcttcctcttgaggccctcggaccgtccaggaaatgtctgggagcccgcctgcggagggcatagcgccgaccctcgctccccgcccaggacccgaatgaacctggagagcggatgccagcagtggccgaggcgctaggacaggaaggaccgccagacctctcaagatcagccttcctcgccaccgttctcacctctttgtccgctgccttctcctcaatgcctagcagcgcgtacaggtccatctgtaagagctccttggtcactgccatggttccggcctgacggattcgtactacaactcccaagagtctaagcgcgcgtgaggactgcaggctccgagcggcgcctagccctctgggaattgtgttctgggtcaggcttgactgactctgagggaggccggcagtcgtgaatgaactacgactcccagcagcccccgttgccgccgctgccgtacgctggctgcaggagagcgtccggattccctgctctaggtcgcggcgggacagtgccagtgggcgtgtggggcggggcagggcagggaagggaagggcggagctggggtgagggtccaaggggcccaggacttggccggcgtgatctcagctctgcagaccctgcggtgctgggagccaccatggagagtaggtgctacggctgcgctgtcaagttcaccctcttcaagaaggagtacggctgtaagaattgtggcagggccttctgttcaggctgcctaagcttcagtgcagcagtgcctcggactgggaacacccaacagaaagtctgcaagcaatgccatgaggtcctgaccagagggtcttctgccaatgcctccaagtggtcaccacctcagaactataagaagcgtgtggcagccttggaagccaagcaaaagcccagcacttcccagagccagggactgacacgacaagaccagatgattgctgagcgcctagcacgactccgccaggagaacaagcccaagttagtcccctcacaggcagagatagaggcacggctggctgccctaaaggatgaacgtcagggttccatcccttccacccaggaaatggaggcacgacttgcagcgttgcagggcagagttctaccttctcaaaccccccagccggcacatcacacaccggacaccaggacccaagcccagcagacacaggatctgctaacgcagctggcagctgaggtggctatcgatgaaagctggaaaggaggaggcccagctgcctctctccagaatgatctcaaccagggtggcccagggagcactaattccaagaggcaggccaactggtccttggaggaggagaagagcagactgctggctgaggcagcacttgagttgcgggaggagaacacgaggcaggaacggattctggccctggccaagcgactagccatgctgcggggacaggaccccgagagagtgaccctccaggactatcgcctcccagacagtgatgacgacgaggatgaggagacagccatccaaagagtcctgcagcagctcactgaagaagcttccctggatgaggcaagtggctttaacatccctgcagagcaggcttctcgaccctggacgcaaccccgcggggcagagcctgaggcccaggatgtggaccccaggcctgaggctgaggaagaggagctcccctggtgctgcatctgcaatgaggatgccaccctacgctgcgctggctgcgatggggacctcttctgtgcccgctgcttccgagagggccatgatgcctttgagcttaaagagcaccagacatctgcctactctcctccacgtgcaggccaagagcactgaagacaccctggtcctcccggaagggcagtcccacaggcagcggcacccatttctgggcccagccacaggacgtccgatgggagagcttgtctggctctactgatgatggataggccccttcctgagccttggtgtccctggaatgaggaaagattctccattcgagagaatgactgggagggaagaagtcggggccctcctattagaagcccagactggaagtgagaggcatgatggggagagaccagactgaatctacgggtgagccctgtaacctggctctagggcacaggcccctcccctggcacttagtgggtctaataaagtatgttgattcattggg

SEQ ID NO: 34842 - protein, 568 aa, Artificial Sequence
  derived and/or modified sequence
MRDNTSPISVILVSSGSRGNKLLFRYPFQRSQEHPASQTSKPRSRYAASNTGDHADEQDGDSRFSDVILATILATKSEMCGQKFELKIDNVRFVGHPTLLQHALGQISKTDPSPKREAPTMILFNVVFALRANADPSVINCLHNLSRRIATVLQHEERRCQYLTREAKLILALQDEVSAMADGNEGPQSPFHHILPKCKLARDLKEAYDSLCTSGVVRLHINSWLEVSFCLPHKIHYAASSLIPPEAIERSLKAIRPYHALLLLSDEKSLLGELPIDCSPALVRVIKTTSAVKNLQQLAQDADLALLQVFQLAAHLVYWGKAIIIYPLCENNVYMLSPNASVCLYSPLAEQFSHQFPSHDLPSVLAKFSLPVSLSEFRNPLAPAVQETQLIQMVVWMLQRRLLIQLHTYVCLMASPSEEEPRPREDDVPFTARVGGRSLSTPNALSFGSPTSSDDMTLTSPSMDNSSAELLPSGDSPLNQRMTENLLASSEHERAAILSVPAAQNPEDLRMFARLLHYFRGRHHLEEIMYNENTRRSQLLMLFDKFRSVLVVTTHEDPVIAVFQALLP

SEQ ID NO: 34843 - protein, 69 aa, Artificial Sequence
  derived and/or modified sequence
MRDNTSPISVILVSSGSRGNKLLFRYPFQRSQEHPASQTSKPRSRYAASNTGDHADEQDGDSRPTQTRQ

SEQ ID NO: 34844 - DNA, 1707 bp, Artificial Sequence
  derived and/or modified sequence
atgagagacaacaccagccccatcagcgtgatcctggtgagcagcggcagcagaggcaacaagctgctgttcagataccccttccagagaagccaggagcaccccgccagccagaccagcaagcccagaagcagatacgccgccagcaacaccggcgaccacgccgacgagcaggacggcgacagcagattcagcgacgtgatcctggccaccatcctggccaccaagagcgagatgtgcggccagaagttcgagctgaagatcgacaacgtgagattcgtgggccaccccaccctgctgcagcacgccctgggccagatcagcaagaccgaccccagccccaagagagaggcccccaccatgatcctgttcaacgtggtgttcgccctgagagccaacgccgaccccagcgtgatcaactgcctgcacaacctgagcagaagaatcgccaccgtgctgcagcacgaggagagaagatgccagtacctgaccagagaggccaagctgatcctggccctgcaggacgaggtgagcgccatggccgacggcaacgagggcccccagagccccttccaccacatcctgcccaagtgcaagctggccagagacctgaaggaggcctacgacagcctgtgcaccagcggcgtggtgagactgcacatcaacagctggctggaggtgagcttctgcctgccccacaagatccactacgccgccagcagcctgatcccccccgaggccatcgagagaagcctgaaggccatcagaccctaccacgccctgctgctgctgagcgacgagaagagcctgctgggcgagctgcccatcgactgcagccccgccctggtgagagtgatcaagaccaccagcgccgtgaagaacctgcagcagctggcccaggacgccgacctggccctgctgcaggtgttccagctggccgcccacctggtgtactggggcaaggccatcatcatctaccccctgtgcgagaacaacgtgtacatgctgagccccaacgccagcgtgtgcctgtacagccccctggccgagcagttcagccaccagttccccagccacgacctgcccagcgtgctggccaagttcagcctgcccgtgagcctgagcgagttcagaaaccccctggcccccgccgtgcaggagacccagctgatccagatggtggtgtggatgctgcagagaagactgctgatccagctgcacacctacgtgtgcctgatggccagccccagcgaggaggagcccagacccagagaggacgacgtgcccttcaccgccagagtgggcggcagaagcctgagcacccccaacgccctgagcttcggcagccccaccagcagcgacgacatgaccctgaccagccccagcatggacaacagcagcgccgagctgctgcccagcggcgacagccccctgaaccagagaatgaccgagaacctgctggccagcagcgagcacgagagagccgccatcctgagcgtgcccgccgcccagaaccccgaggacctgagaatgttcgccagactgctgcactacttcagaggcagacaccacctggaggagatcatgtacaacgagaacaccagaagaagccagctgctgatgctgttcgacaagttcagaagcgtgctggtggtgaccacccacgaggaccccgtgatcgccgtgttccaggccctgctgccctag

SEQ ID NO: 34845 - DNA, 1707 bp, Artificial Sequence
  derived and/or modified sequence
atgagggataacacctctcccatctccgtaatcctggttagttccgggtctcgagggaacaaattgcttttccgctatcccttccagcgatctcaggagcacccagctagccaaacatctaaacccaggtctcgatacgccgcctcaaacacgggcgatcacgctgatgaacaagacggcgattctcgcttttccgacgtaatcttggcaaccatcctcgctacaaagtccgagatgtgtggtcagaagtttgaactcaaaatcgacaacgttcggtttgtgggacaccccaccttattacaacacgcgctcggccaaatatcaaagactgaccctagcccgaaaagagaggctccgaccatgatattgtttaacgtggtttttgcactcagagccaatgctgatcccagtgtaatcaattgtctccacaatctctcacggcgaatcgcaactgttctgcagcatgaagaacgtcgctgtcagtatttgactcgggaggcgaagctaatcctggcacttcaagatgaagtaagtgcaatggcagacgggaatgaggggccccagtcccccttccatcacatactcccaaaatgtaagttggcccgggatctgaaagaagcctacgacagcctgtgtacgtcaggcgtcgttcggttgcacattaattcctggttggaggtttctttctgcttgccacacaagatccattatgctgcttcttcgctgatccctccagaagccattgagcgatcactaaaggccatccgcccatatcacgcattgttgcttctctccgacgaaaaaagtttactaggtgagcttccgattgactgttctcctgcgctggtgagggttatcaaaacaaccagcgctgtgaaaaacttgcagcagctcgctcaggacgctgacctggcgctgctgcaagtattccagttagcggcacacctcgtgtattgggggaaagccatcataatatatcctctgtgtgaaaataacgtctacatgctgtccccaaatgcctcggtgtgtttgtactcccccctggccgaacaattctctcaccaattccccagtcatgacctcccttcagtgctcgccaaattttctctgccggtgagcctttctgagtttcgcaaccccttagccccagcagtacaggagactcaactgatccagatggtcgtgtggatgctgcagagacggctgttgatccaactccacacctatgtctgccttatggctagcccctcagaggaagagccgagacctcgtgaggacgatgttccctttaccgctcgggtgggaggccgctctctgtcgactcctaatgccctgagtttcggctctcctacatcctctgacgatatgactctcacaagtccatccatggacaacagttctgctgagctcctgcccagcggcgacagccccctcaatcagaggatgacggagaatctcctggcgtcctctgaacacgaaagagctgccatactctcagtccccgccgcccagaatcccgaggacctgagaatgtttgccagactcctccattacttcagggggaggcaccacctggaagaaattatgtacaacgagaatacacgccggtctcagctgctgatgctgtttgacaagtttagaagcgtcctggttgtaacaacacacgaggacccggtgatcgctgtgtttcaagcattacttccatag

SEQ ID NO: 34846 - DNA, 1707 bp, Artificial Sequence
  derived and/or modified sequence
atgagggacaacaccagccccatcagcgtcatcctggtgagcagcggcagccggggcaacaagctgctcttccgctaccccttccagaggagccaggagcacccagccagccagaccagcaagcccaggagccgctatgctgccagcaacacaggagaccatgctgatgagcaggatggagacagccgcttcagtgatgtgatcctggccaccatcctggccaccaagtctgagatgtgtggccagaagtttgagctgaagattgacaacgtgcgctttgtgggccaccccaccctgctgcagcacgccctgggccagatcagcaagacagaccccagccccaagcgggaggcccccaccatgatcctcttcaacgtggtgtttgccctgcgggccaatgctgaccccagcgtcatcaactgcctgcacaacctgagcagaagaattgccaccgtgctgcagcacgaggagcggcgctgccagtacctgacccgggaggccaagctgatcctggccctgcaggatgaggtgtctgccatggctgatggaaatgaaggcccccagagccccttccaccacatcctgcccaagtgcaagctggcccgggacctgaaggaggcctatgacagcctgtgcaccagcggcgtggtgcggctgcacatcaacagctggctggaggtgtccttctgcctgccccacaagatccactacgccgccagcagcctcatccccccagaggccatcgagaggagcctgaaggccatccggccctaccacgccctgctgctgctgagtgatgagaagagcctgctgggggagctgcccatcgactgcagccctgccctggtgcgggtcatcaagaccaccagcgctgtgaagaacctgcagcagctggcccaggatgctgacctggccctgctgcaggtgttccagctggccgcccacctggtgtactggggcaaggccatcatcatctaccccctgtgtgagaacaacgtgtacatgctgagccccaatgcctctgtgtgcctgtacagccccctggccgagcagttcagccaccagttccccagccatgacctgcccagcgtgctggccaagttcagcctgcctgtgtccctgtctgagttcaggaaccccctggccccagctgtgcaggagacccagctgatccagatggtggtgtggatgctgcagaggcggctgctgatccagctgcacacctacgtgtgcctgatggccagccccagcgaggaggagccccggcccagagaagatgatgtgcccttcaccgcccgggtgggcggccgcagcctgagcaccccaaatgccctgagctttggcagccccaccagcagtgatgacatgaccctgaccagccccagcatggacaacagcagcgctgagctgctgcccagcggggacagccccctgaaccagaggatgacagagaacctgctggccagcagcgagcacgagagagctgccatcctgtctgtgcctgctgcccagaaccctgaggacctgaggatgtttgcccggctgctgcactacttccggggccgccaccacctggaggagatcatgtacaatgaaaacaccaggaggagccagctgctgatgctgtttgacaagttccgctctgtgctggtggtgaccacccatgaggaccctgtgattgctgtgttccaggccctgctgccctag

SEQ ID NO: 34847 - DNA, 1707 bp, Artificial Sequence
  derived and/or modified sequence
atgcgggacaacaccagccccatcagcgtgatcctggtgagcagcggtagtcgggggaacaagctgctgttccgctaccctttccagcgctcccaggagcatccagccagccagacctcgaaaccgcgtagcaggtacgcagcttccaatacaggagaccatgctgacgagcaggacggtgattcccgtttctccgacgtgatcctcgcaactatattggcaaccaagagcgagatgtgcggtcagaaattcgagcttaagattgacaacgtgcggtttgtcggacatcctacgctgctccaacatgccttgggccagatttccaagactgatccatcacctaaacgagaggcccccactatgattctgttcaacgttgtctttgctcttagggctaacgccgacccctccgtaatcaattgtctgcataacctgtctcgccggatagcgaccgttctgcagcacgaagagaggcggtgccaatatctgaccagagaggctaagctcatccttgccctacaggatgaagtatctgccatggccgatgggaatgagggcccacagagcccttttcatcacatcttgcccaaatgcaagctggcccgggatctcaaagaggcctatgattcactgtgtacatcaggggtggtccggctgcatatcaattcctggttagaggtaagtttctgccttccacacaaaatacactatgccgcatcctcgcttatcccacccgaagccatcgagaggagcttaaaggctattcggccttatcacgctttgctgctactctcggacgaaaaaagtctcttgggcgagcttccaatcgactgttccccggccctggtccgcgtcattaagaccaccagcgccgtgaagaatctccagcagctggctcaagatgctgatttggctctcttgcaagtgtttcaactggccgcccacttggtctactgggggaaggctattatcatttaccccctctgcgaaaataatgtgtatatgctctctcctaatgcatcagtttgcctgtactcgcctctggccgagcagtttagccatcagtttccttcccacgacctgccctctgtcttggcaaaattttcattaccagtgtccctttcagagttccgtaaccctctggctcccgcagtgcaggaaactcagctgatccagatggtggtatggatgctgcaacgacgactgctgatccaactgcacacttacgtgtgcctgatggcttcaccatctgaagaagagccaaggcctagggaagacgacgtgcccttcacagccagagtgggaggccgctctctgtccacgcctaatgcactgagtttcgggtctccgaccagcagcgacgacatgaccctgacgtcaccatccatggataactccagcgcagaattgctgcctagcggcgatagtccccttaaccaaagaatgaccgaaaatctcctggcctcgtcagagcacgaaagggctgccatcttatcggtgcccgcagctcaaaatccagaggacctcagaatgttcgcccgactgttgcattacttccgagggcgtcaccatctagaagagataatgtataatgagaacacgagaagatcgcagctgcttatgctcttcgacaaattccggagtgtgttggttgtcacaactcacgaggatccagtgatcgcggtttttcaggctctcctcccttag

SEQ ID NO: 34848 - DNA, 3008 bp, Artificial Sequence
  derived and/or modified sequence
gtctcgcgagcccggagcgtggcacgtgggttggtaactgtggcgctgctccgcgtccaccaccacccctgtcctcctcaggccccctccgcctccacccctgccctcctcaggccccctccgcctccacccctgccctactcaggccccctccgcctccacccctgccctcctcaggccccctccgcctccacccctgccctcctcaggccccctccgcctccacccctgccctcctcaggccccctccgcctccacccctgccctcctcaggccccctgcgtccccgcctcgtcctcctcaggccccctccgcctccggctccgtcctcctcaggccccctccgcctccggctccgtcctcctctggccccctccgcccccggccccggccccacggcgggatgcgggacaacaccagccccatcagcgtgattctggtgagctcggggagcaggggcaataagctgctgttcaggtaccccttccagagaagccaggagcacccggcgtcccagacaagtaagccgcgtagcagatacgctgccagcaacacgggcgaccatgctgatgagcaggacggcgattccaggttttcagatgttattctggcaacaattttggcaaccaagtctgaaatgtgtggccaaaaatttgaactgaagattgataatgtgcgatttgttgggcacccaacactgctacagcatgctctggggcagatctccaaaacagatccttccccgaagagggaagcacctactatgattctttttaatgtggtgtttgcactgagggccaacgcagacccgtcagtgataaactgtctgcataacctgtcccgtcgtatcgccaccgtgctgcagcacgaggagcgccgctgccagtacctcacccgggaggccaagctgatcctggcgctccaggatgaggtgtccgccatggctgatggaaatgaaggtcctcagtccccattccatcacatcctgcccaagtgcaagctggccagggacctcaaggaagcttatgacagcctgtgcacgtcgggcgtagttcggcttcacatcaacagctggctggaggtgagcttctgcctgccccacaagatccactatgcggcctccagtctgatccccccagaggccatcgaacggagcctgaaagccatccgcccctaccatgccctgctgctgctcagtgatgagaagtccttgctgggtgagcttcctattgactgctcccctgccctagtgcgggtgatcaagaccacatctgctgtgaagaacctgcagcagctagcccaagatgcggacctggccttgctgcaggttttccagcttgcagctcatctggtgtactggggcaaggccatcatcatctacccgctgtgtgagaacaacgtctacatgctgtctcccaatgccagcgtatgtctgtactccccgctggccgagcagttctcccaccagttcccatctcatgacctgccgtccgttcttgccaagttctccttgccggtctccttgtcagaatttaggaatcccctggcccccgctgtgcaggagacccagctcatccagatggtggtgtggatgctgcagcgccggcttctcatccagctgcacacctatgtctgcctgatggcctcacccagcgaggaggagccccgtccgcgagaggacgacgtccccttcactgcccgggtcggcggtcgcagcctcagcacgcccaacgccctcagctttggctccccaaccagcagcgatgacatgaccctcaccagccccagcatggacaactccagcgcagagctacttcccagcggggactcgccactgaaccagaggatgacggagaacctgctggccagctcggagcatgaacgcgcagccatcctcagtgtacccgcagcccagaaccctgaggacctccgcatgtttgccaggctccttcactacttccgcggccgccaccacctggaggagattatgtacaacgagaacacgcggcgctcccagctgctcatgctgtttgacaagttccgcagcgtgctggtggtgaccacccacgaggaccctgtcattgccgtcttccaggctctgctcccctgagcccaggcggagggcggaaggctgctggggtgcgcaggtgggcgctcgcgtctccccaccccagggctccccccgtgctgaggctgagccctcttggccctgaggcctggcattgggtggatgcgggctggccgtggcccagtgaagcctgcagagccccgctgtccttgcccctggtggttccgctgtggggctgctgccctctgtgttcctacgcttccctccagtccttgccgcacgcgtaggcatctccacgctggaggggggcctgccaggactcctgtctctgggtgaggccgcatccttcaaggcccatgtgggctgtgcgtttctcagaccctccttctgtccctacacctgctccttggaccccccagtctgtggccaccctgaagaatgtgcagaaacacttgtgtggcctgtccctgtctctctgacagccttctatttgtgaagtgccctgtggccccctccccagcacctctgtctgccatgcgcttcttcctcccaggctaccctgagcctttcctggcccagtcctcaccacagtccacagaagccgcaaacaggctcatagccaagctgtgacctggtcctgaccatctggggcacgagggcctgggctggccctgctaggctggagaagccctgtcacctgtgcacatcttgctggtggaggcatggcccactgtgcaggaccccaccctcgggggctttcggctcccacactgatgattctccccagcatccacaccgggcctggcgctacgtactcaggcccccagctctcgtgtcctggaggaagagctagctccagacatgggttgatcacctagaggagctctggctaaggcacagttttctagaaataaaacatttattcggtttttaaacaatt

SEQ ID NO: 34849 - DNA, 1707 bp, Artificial Sequence
  derived and/or modified sequence
atgcgcgacaacacctcccccataagcgtcatactcgtttcctccggctcaagaggtaacaagctgcttttccggtatcctttccagcgatcacaggagcatccagcctctcagacaagcaagccacgctccagatacgccgcttccaataccggagaccacgctgacgaacaggatggcgattctcgtttctctgacgtgattctcgctaccattctggcaaccaagagcgagatgtgcggacaaaagtttgagctgaagattgacaatgtgcgctttgtagggcacccgactcttttgcagcatgcactgggtcaaatttctaaaacagatcctagccctaagagagaagctccaacgatgattctgttcaatgtcgtttttgctctgcgggctaatgccgatcccagtgtgatcaattgtctccacaatctatcccgcaggatcgccaccgtgcttcaacatgaagaaagacgctgtcagtatctcacgagagaagcgaagttaatcctcgctctgcaggatgaagtcagtgcaatggctgacggcaatgaaggccctcagtcaccattccatcacatcctgccaaaatgtaagttggcccgagacctcaaagaggcttacgactctctgtgtacgtctggggtggtgagactccatattaacagctggttggaggtgagtttttgtcttcctcacaaaatccattacgctgctagctcactaatacctccagaagcaatcgagaggtctcttaaagctatcagaccgtaccacgccctccttctcttgtccgatgagaaaagcttgctgggagaactccctatcgactgttctccggcactggtgcgagtgataaaaaccacttctgcagtaaagaatcttcagcagctcgctcaggacgcagacctcgcgctgctgcaggtattccagctagccgctcacctggtgtactggggaaaggccattataatttatccactgtgcgagaataacgtgtacatgttgagtccgaacgcaagtgtgtgcttgtacagccccctagctgaacagttttctcatcagtttcccagtcacgatctcccctcagtgttggcaaagttctctctgcctgtcagtctctcagaatttcgaaatcctctggcccctgcggtgcaggaaactcagctcattcaaatggtagtctggatgttgcaaaggaggctgctgatacagcttcatacctacgtctgccttatggcctcgcctagtgaggaggagccacgtcctagggaagatgacgtccctttcaccgcacgggtcggcggacggagcttgagcactcccaacgccttgtcattcggctcaccaacttccagtgatgatatgacgctgacaagccctagcatggacaatagttccgccgagctactcccaagtggcgacagccccctgaatcagcggatgacagagaatcttctcgcctccagcgaacacgagagagccgcaatactcagtgtgcctgccgctcagaaccctgaggatctcaggatgtttgctaggctcctacattactttcggggacggcatcatctcgaagagataatgtacaacgaaaacacaaggcggtcccagctgctgatgctgttcgataagtttaggtcagtgttagtagttactacccacgaggaccctgtgattgccgtgtttcaggccctccttccatag

SEQ ID NO: 34850 - protein, 489 aa, Artificial Sequence
  derived and/or modified sequence
MSPKCSADAENSFKESMEKSSYSDWLINNSIAELVASTGLPVNISDAYQDPRFDAEADQISGFHIRSVLCVPIWNSNHQIIGVAQVLNRLDGKPFDDADQRLFEAFVIFCGLGINNTIMYDQVKKSWAKQSVALDVLSYHATCSKAEVDKFKAANIPLVSELAIDDIHFDDFSLDVDAMITAALRMFMELGMVQKFKIDYETLCRWLLTVRKNYRMVLYHNWRHAFNVCQLMFAMLTTAGFQDILTEVEILAVIVGCLCHDLDHRGTNNAFQAKSGSALAQLYGTSATLEHHHFNHAVMILQSEGHNIFANLSSKEYSDLMQLLKQSILATDLTLYFERRTEFFELVSKGEYDWNIKNHRDIFRSMLMTACDLGAVTKPWEISRQVAELVTSEFFEQGDRERLELKLTPSAIFDRNRKDELPRLQLEWIDSICMPLYQALVKVNVKLKPMLDSVATNRSKWEELHQKRLLASTASSSPASVMVAKEDRN

SEQ ID NO: 34851 - protein, 575 aa, Artificial Sequence
  derived and/or modified sequence
MQMYLPFCGIAISNAQLFAASRKEYERSRALLEVVNDLFEEQTDLEKIVKKIMHRAQTLLKCERCSVLLLEDIESPVVKFTKSFELMSPKCSADAENSFKESMEKSSYSDWLINNSIAELVASTGLPVNISDAYQDPRFDAEADQISGFHIRSVLCVPIWNSNHQIIGVAQVLNRLDGKPFDDADQRLFEAFVIFCGLGINNTIMYDQVKKSWAKQSVALDVLSYHATCSKAEVDKFKAANIPLVSELAIDDIHFDDFSLDVDAMITAALRMFMELGMVQKFKIDYETLCRWLLTVRKNYRMVLYHNWRHAFNVCQLMFAMLTTAGFQDILTEVEILAVIVGCLCHDLDHRGTNNAFQAKSGSALAQLYGTSATLEHHHFNHAVMILQSEGHNIFANLSSKEYSDLMQLLKQSILATDLTLYFERRTEFFELVSKGEYDWNIKNHRDIFRSMLMTACDLGAVTKPWEISRQVAELVTSEFFEQGDRERLELKLTPSAIFDRNRKDELPRLQLEWIDSICMPLYQALVKVNVKLKPMLDSVATNRSKWEELHQKRLLASTASSSPASVMVAKEDRN

SEQ ID NO: 34852 - protein, 124 aa, Artificial Sequence
  derived and/or modified sequence
MLMTACDLGAVTKPWEISRQVAELVTSEFFEQGDRERLELKLTPSAIFDRNRKDELPRLQLEWIDSICMPLYQALVKVNVKLKPMLDSVATNRSKWEELHQKRLLASTASSSPASVMVAKEDRN

SEQ ID NO: 34853 - DNA, 691 bp, Artificial Sequence
  derived and/or modified sequence
gtcggacggttccgaggcgttgccgggagccgggcgcggctctgtgtggactcggagaaacgcgggttatttaggaggattcgatggcaattttttgtggaacagaattggagcagaatacagtagcaacgtgcctgtgtggtccctgcgcctgctgccagcactcgcgggggccttgtcggtccccatggcctaccagatagtgttggagctccacttttctcattgtgccgccatgggagctgctctgttgatgcttatcgagaatgctctcatcactcagtcaaggctaatgcttttggaatcagtgttaatatttttcaatctattggccgtgttgtcctacctgaagttcttcaactgccaaaagcacagccctttttctctgagctggtggttctggctaacactgacaggggtcgcttgttcctgtgcagtgggcatcaagtacatgggtgtgttcacgtacgtgctcgtgctgggtgttgcagctgtccatgcctggcacctgcttggagaccagactttgtccaatgtctgtgtgttctgtcacttgctcgcccgagcagtggctttgctggtcatcccggtcgtcctgtacttactgttcttctacgtccacttgattctagtcttccgctctgggccccacgaccaaatcatgtccagtgccttccaggccagcttagag

SEQ ID NO: 34854 - protein, 571 aa, Artificial Sequence
  derived and/or modified sequence
MAAAVAVAAASRRQSCYLCDLPRMPWAMIWDFTEPVCRGCVNYEGADRVEFVIETARQLKRAHGCFPEGRSPPGAAASAAAKPPPLSAKDILLQQQQQLGHGGPEAAPRAPQALERYPLAAAAERPPRLGSDFGSSRPAASLAQPPTPQPPPVNGILVPNGFSKLEEPPELNRQSPNPRRGHAVPPTLVPLMNGSATPLPTALGLGGRAAASLAAVSGTAAASLGSAQPTDLGAHKRPASVSSSAAVEHEQREAAAKEKQPPPPAHRGPADSLSTAAGAAELSAEGAGKSRGSGEQDWVNRPKTVRDTLLALHQHGHSGPFESKFKKEPALTAVARTARKRKPSPEPEGEVGPPKINGEAQPWLSTSTEGLKIPMTPTSSFVSPPPPTASPHSNRTTPPEAAQNGQSPMAALILVADNAGGSHASKDANQVHSTTRRNSNSPPSPSSMNQRRLGPREVGGQGAGNTGGLEPVHPASLPDSSLATSAPLCCTLCHERLEDTHFVQCPSVPSHKFCFPCSRQSIKQQGASGEVYCPSGEKCPLVGSNVPWAFMQGEIATILAGDVKVKKERDS

SEQ ID NO: 34855 - DNA, 4615 bp, Artificial Sequence
  derived and/or modified sequence
ctcctcctccggcgtcgcgggctcctcggacatggccgcggcggtggcggtggcggccgcgtcccggcggcagtcgtgctacctgtgtgacctgccccgcatgccctgggccatgatctgggacttcaccgaacccgtctgccgcggctgcgtcaactacgagggcgccgaccgcgtcgagttcgtcatcgagacggcgcggcagctcaagcgggcgcacggctgcttcccggagggtcgctccccacccggcgccgcggcctcggccgccgccaagccgccgccgctctccgccaaggacatccttttgcagcagcagcagcagcttggccacggcggccccgaggcggccccgcgcgcgccgcaggccttggagcgctacccgttggcggccgcggccgagaggcccccgcgcctcggctctgacttcggcagcagccgcccggcagcgagcctggcccagccgccgacgccgcagccgccgcccgtgaacggcatcctggtgcccaacggcttctccaagctagaggagccgcccgagctgaatcgccagagcccgaacccgcggcgcggccacgcggtgccgcccaccctggtgccgctcatgaacggctcggccacgccgctgcccaccgcgctcggcctcggcggccgcgctgccgcctccttagccgcggtgtccggaaccgcggccgccagcctgggctccgcgcagcccaccgatctgggcgcccacaagcggccggcatccgtgtcgagcagcgctgccgtggagcacgagcagcgtgaggcggcagccaaggagaaacaaccgccgccgcctgcgcaccggggcccggccgacagcctgtccaccgcggccggggccgccgagctgagcgcggaaggtgcgggcaagagccgcgggtctggagagcaggactgggtcaacaggcccaagaccgtgcgcgacacgctgctggcgctgcaccagcacggccactcggggcccttcgagagcaagtttaagaaggagccggccctgactgcagttgcaagaacagcaaggaaaaggaagccctctccagaaccagaaggtgaagtcgggccccctaagatcaacggagaggcccagccgtggctgtccacatccacagaggggctcaagatccccatgactcctacatcctcttttgtgtctccgccaccacccactgcctcacctcattccaaccggaccacaccgcctgaagcggcccagaatggccagtcccccatggcagccctgatcttagtagcagacaatgcagggggcagtcatgcctcaaaagatgccaaccaggttcactccactaccaggaggaatagcaacagtccgccctctccgtcctctatgaaccaaagaaggctgggccccagagaggtggggggccagggagcaggcaacacaggaggactggagccagtgcaccctgccagcctcccggactcctctctggcaaccagtgccccgctgtgctgcaccctctgccacgagcggctggaggacacccattttgtgcagtgcccgtccgtcccttcgcacaagttctgcttcccttgctccagacaaagcatcaaacagcagggagctagtggagaggtctattgtcccagtggggaaaaatgccctcttgtgggctccaatgtcccctgggcctttatgcaaggggaaattgcaaccatccttgctggagatgtgaaagtgaaaaaagagagagactcgtgacttttccggtttcagaaaaacccaatgattacccttaattaaaactgcttgaattgtatatatatctccatatatatatatatccaagacaagggaaatgtagacttcataaacatggctgtataattttgattttttttgaatacattgtgtttctatattttttttgacgacaaaaggtatgtacttataaagacatttttttcttttgttaacgttattagcatatctttgtgctttattatcctggtgacagttaccgttctatgtaggctgtgacttgcgctgcttttttagagcacttggcaaatcagaaatgcttctagctgtatttgtatgcacttattttaaaaagaaaaaaaaagccaaatacattttctgacattgtaagattgccttactgtctgtcattccttattgctggcccctttctcaggccggaggccaagtggtggagaaggaaaggaaatgatcgaacgggcatgttgtcaagtgggcatgccactgggaaataccaccagtttaccctgaaacattgtcctcagaggagtaggaaagtggattttgaatctctattttgctcaaaagttcagttcctgagatactgatgactgagagtgctgctgggaaattttcaggattgtgtggtcttttggggttttttgtttttttttttttaagacaaagttgaccgctgttcactgtccacgtgatcagttgtaagattacaatgctgcatgctagttggttacataagatacaattccagtgatggaaggcggttataatggatggtggtgtgtacaagatggcactgccatctttgagcagagcccagctctgcagcgccacttcatctttttaaacaccctagaggtctgtttgttgttgctgttgtcctttattttgaaagagttgcaagagaagttacagtccaggtgaacttggagattgtgggattggttttgtttctgttttgttttgtttatcatttacctgtagtgctattgctgttgatactatcacctataccctgtttctagtgagtgctgaatacagtatggtacaatgacagtaacagccgcgtggtgctgccaggactgcccttgggcatatcagtgacagcccaaatgtgggtggaggaaacctgtaatttccttcttaacatgtgtttgaaataccaagtgaataatactgttctggaaaaaaatgataaactagtggaaattaaagaaattaagggttttatataatagacaggccccacctctcaaaatatttttagaagtctttttgtaaactaatttcttttgatcactattttgcatcagtaaaatgatttttttaaaaccaataaatcatcaattattagaaatagttgtctcacagtgatactggtttttcttttgtgctgttatgatttaacattgacaggaacactattttaaatccttacgttcaggtgtttgtaacttggccttataattaggctgaattatggcttcaaggtctacaatttatgtgtatggttcacagcctagcttctatttacatttgaaaatacagatttttaccaactttggattcttttttagttatatgtttgtctttcctttttaaattgttcaaaactattttttaatggtcaagttactaacacttgaaaatcagatactgcaccaaatacagtgtttttccgtagtgtttttaatgagtgcacctattactactgtgcgagaattcatgttttaccagtcattgttatattacaaacagacttgcatgattaaccagttgttacacttactttttcaagttggagtatatatgactcagtgcagactggtctctcttatgtgaatgcacacatgcagaaatgcagagtcaattttacatgcccataaagacatttgtaaagaattcagctcttatggtctgttgtataaatgtgtatctaggcactttggaatttgacctcacagatgttacaacttgatcagtcgtttgacctaatttgtggtagctatctgtatgttttgcaatcttaatacagacatgctttccaaaaagattaatacagaaccatcctgccgttttggataagtctatccagctgtggaaagggcaacctgtggtttctctgtactggtgtttaatgggggaagaatatgaacagctttaaagagctgtgtattgtggttactactattaaaaaataagatctgcacgagtctgactggcctttgggtggcctttgtggacggctcgtagctggaaagtgttgatctgggttttctggcattcttttaagttaaaaagttaacatcgggacatgggtttgatcttttgttgtacctgatgacagtgcagagattctccacagctggataaaaatgtcacaaagctacttactgtacatgggcagtatcagatttcaaatcctaatatttcagctgtgcttttaatactcaaaatattaggggatggggtgttgaagctttcccttttttgcttttaacaatttatagaatttaacagatgtactgtctttcatgtggcctcacatttaaagttatgagaacatacacatggtttacaacttttactatatacctttccttggccaccaagtattttaaaagtgtgccaccttttaacctttactttttttaagttgaaggtgatactttttctatatatgatgaaactcatgtcaactgaagtgagtgtaatctcagataccaacattattatattttaaaatcacgctatggaaatatcacctgaattctgtcatttgtcagatttacagtacctttttttctttaacttttagcattaaataaaaataaaattgggagcactgaa

SEQ ID NO: 34856 - DNA, 1716 bp, Artificial Sequence
  derived and/or modified sequence
atggcggctgccgtagccgtggcagccgcatccagacgccaatcctgttatctgtgcgacctgccacgcatgccctgggcaatgatctgggattttacagagccagtttgccgtggatgcgtgaactatgaaggcgccgaccgagttgagtttgttattgagactgccagacaactgaagagagcacatggttgtttcccagagggacggagcccgccaggcgcagccgcaagcgccgcagccaagcctccccccctgtcagccaaagacattcttcttcagcaacagcagcaactgggccatggcggacccgaggctgctcctcgcgcccctcaagctctcgaacggtatcctctggcagctgcagccgaacggcccccgcgtctcggcagcgatttcgggtcctcaagaccagcagcctcccttgcgcagccccctacaccgcagccaccacccgtcaacgggattctcgtgcctaacggattctctaaactagaagagccacctgagttgaatcgccaatcccctaatccccgtcggggccacgccgtgccgccaacactcgtgccactcatgaatggcagtgctacccccttaccaaccgcgctgggtttgggcggccgggcggccgcctccctcgcagctgtctcagggaccgccgctgcttcactggggagtgctcagccgacagatctaggggcccataagcgcccagcgtccgtctcgtcctccgccgcagttgagcatgagcagagagaagccgctgccaaagagaagcagccaccacctcctgcccaccgggggcctgccgattctctctcaaccgcggctggcgcagccgaactaagcgctgagggtgctggaaaaagcagaggaagcggggaacaagattgggtaaatcgccccaagactgtgcgggacacactgttagctttacaccagcacggccacagcggaccgtttgagtctaaattcaagaaagagccagccttaaccgcagttgcgcgcacagccaggaaacgaaagccaagccccgaaccagagggagaagtggggccccctaaaatcaacggggaagctcagccgtggcttagtacaagcacagaggggttgaaaataccaatgacaccgacttcctcattcgtgagtccacctcccccgactgcttcgccacactctaatcggacaactcctcctgaagccgctcagaatgggcagagccctatggctgcactgattctcgtggctgacaatgctggtggaagccatgcgtccaaagatgctaaccaggtgcactccacgacacgtcgaaattccaatagtcccccctccccctcctcaatgaatcagcggagattgggccccagagaggtcgggggacaaggggcaggaaatactggaggcctggaaccggtgcaccctgcatccctccccgattcttctctagctaccagcgctcctctttgctgcactctgtgccatgagagactagaagacacccattttgtccagtgcccctctgtgccctcgcataagttttgtttcccttgcagtcgccaatccattaagcaacagggcgcctccggcgaggtgtattgcccatcaggagaaaagtgccccctcgtgggctccaacgtgccctgggcatttatgcagggcgaaattgctacgatcttagctggagatgtgaaggtgaaaaaagagcgcgactcctag

SEQ ID NO: 34857 - DNA, 1716 bp, Artificial Sequence
  derived and/or modified sequence
atggctgctgctgtggccgtggccgccgccagccggcggcagagctgctacctgtgtgacctgcccaggatgccctgggccatgatctgggacttcacagagcctgtgtgccggggctgtgtgaactatgaaggagctgacagagtggagtttgtgattgaaacagcccggcagctgaagagggcccacggctgcttccctgagggccgcagccccccaggagctgctgccagcgctgctgccaagcccccacccctgagcgccaaggacatcctgctgcagcagcagcagcagctgggccatggaggccctgaggccgccccccgggccccccaggccctggagcgctaccccctggccgctgctgctgagcggcccccccggctgggcagtgactttggcagcagcaggcctgctgccagcctggcccagccccccaccccccagcccccacctgtgaatggcatcctggtgcccaacggcttcagcaagctggaggagcccccagagctgaaccggcagagccccaacccccggcggggccatgctgtgccccccaccctggtgcccctgatgaatggaagtgccacccccctgcccacagccctgggcctgggcggccgggccgccgccagcctggccgctgtgtctggaacagctgctgccagcctgggcagcgcccagcccacagacctgggcgcccacaagaggcctgcctctgtgagcagcagcgctgctgtggagcacgagcagcgggaggccgccgccaaggagaagcagcccccacctccagcccaccggggccctgctgacagcctgagcacagctgctggagctgctgagctgtctgctgagggcgccggcaagagccggggcagcggggagcaggactgggtgaaccggcccaagacagtgcgggacaccctgctggccctgcaccagcacggccacagcggcccctttgagagcaagttcaagaaggagcccgccctgacagctgtggccaggacagccaggaagaggaagcccagccctgagcctgagggggaggtgggcccccccaagatcaatggagaggcccagccctggctgagcaccagcacagagggcctgaagatccccatgacccccaccagcagctttgtgagccccccaccacccacagccagcccccacagcaacagaaccaccccacctgaggccgcccagaatggccagagccccatggccgccctgatcctggtggccgacaatgccggcggcagccacgccagcaaggatgccaaccaggtgcacagcaccaccaggaggaacagcaacagcccccccagccccagctccatgaaccagaggcggctgggcccccgggaggtgggcggccagggcgccggcaacacaggaggcctggagcctgtgcacccagccagcctgcctgacagcagcctggccaccagcgcccccctgtgctgcaccctgtgccacgagcggctggaggacacccactttgtgcagtgccccagcgtgcccagccacaagttctgcttcccctgcagccggcagagcatcaagcagcagggcgccagcggggaggtgtactgccccagcggggagaagtgccccctggtgggcagcaatgtgccctgggccttcatgcagggcgagatcgccaccatcctggccggagatgtgaaggtgaagaaggagcgggacagctag

SEQ ID NO: 34858 - DNA, 1716 bp, Artificial Sequence
  derived and/or modified sequence
atggccgccgccgtggccgtggccgccgccagccggcggcagagctgttatctctgcgatctgcccagaatgccttgggccatgatctgggactttaccgaacctgtctgccgcggctgtgtgaactatgagggagccgacagggtggagttcgtaatcgaaaccgcacggcagttaaaaagggcgcacgggtgctttcccgagggcaggtcccctcctggggccgccgctagtgccgctgcaaagccgcccccgctgtcggccaaagacatactcttgcagcagcaacagcaattaggacatggaggccccgaagccgcccctagggctccgcaagcattggagcggtatcctctcgcagccgctgcagaaagacccccacgcctgggttctgattttgggagctcccgcccggccgcctctctcgcacaaccgccaacaccgcagcctcctcctgttaatggaatcctcgtccccaacggattctccaaactggaagaaccacctgaactcaataggcaaagccctaatccccggcgtggacacgccgtccccccaactcttgttcccctgatgaatgggtctgcaacccccctacctacagccctggggctaggcggacgggccgccgcttcacttgctgctgttagcggaaccgcagctgcatccctggggtccgctcagcctacggatcttggagcccacaaaaggccagcttctgtgagctcttccgccgccgtggagcatgaacagcgagaggctgccgccaaagagaagcagccgcctccaccggcacataggggccccgctgacagtctctctacggccgctggtgccgccgagctgtctgctgaaggcgctggcaagagccgcggctctggggagcaggattgggtgaacaggccaaagactgtaagggatacgctgcttgcactccaccagcatgggcactcaggtccgtttgagagcaaatttaagaaagagccagctttgactgctgtggctcgcaccgcccgcaagaggaagcctagcccggaaccagaaggagaggtggggccaccaaagattaacggggaggctcagccgtggttgtccacttccacagagggcttaaagatccccatgacccccacctcttcattcgtgtcccctccccccccaaccgcgtcccctcattccaatagaaccacgccaccagaggccgctcagaatggccagagtcccatggctgccctgattctggtggcggataacgctggagggtcccacgccagtaaagacgccaatcaggttcattccactactagacggaactcaaacagccctccaagccccagtagcatgaaccagagaaggttggggccacgtgaggtcggcggacagggggcaggcaatacaggaggactggagccggtgcaccctgcctccctgcctgattcttcactggcaaccagcgcccccctatgctgtaccttgtgccatgagagactagaagatacccacttcgtgcagtgtcctagtgtgccatcccacaagttctgcttcccgtgctcacgccaatccataaagcagcaaggcgcttcaggggaggtttactgcccgtccggagaaaaatgccctctggtgggttcaaatgttccgtgggctttcatgcagggagaaatcgcgactattctcgctggagatgtaaaggtgaagaaagagcgagacagctag

SEQ ID NO: 34859 - DNA, 1716 bp, Artificial Sequence
  derived and/or modified sequence
atggccgcagccgtcgctgtcgccgcagcttcacgcaggcagtcttgctatctctgtgatctcccaagaatgccctgggctatgatttgggattttactgagcccgtgtgccgcggttgcgtaaattatgagggggctgacagggttgagttcgtgatcgagacagctagacagctgaaacgggctcatgggtgcttccccgaggggagatccccaccgggagccgcagccagtgctgcagccaaaccaccccctctgagtgcaaaagacatactccttcaacagcaacagcaactggggcatggcggtcccgaagccgcacccagagcccctcaggccctagaaagatatcctctggcagctgctgcggagcggcctccacggctagggagtgacttcggatctagtcggcctgccgcttctctcgcacagccacccacaccacaaccacctccagtgaacggaatcttagtacctaatggattctccaagctggaagaaccacccgagctgaatcggcaaagcccgaatcctaggagaggacatgcggttccccctactctggtgcccttgatgaatggcagcgcaacacccttacccaccgccttaggactcggtggtcgtgctgccgctagtttagccgctgtgagtggcacagctgccgcttctctagggtccgcacagcctacagatctgggcgctcacaaaaggcccgcaagcgtgagctcaagtgcagcagtagaacatgaacagagggaagcggcagctaaggagaagcaacccccacctcctgctcatcgcggtcctgccgacagcttgagcacagcggcaggagcggctgagctgtccgccgagggggcaggaaaatcccgaggctcaggggaacaggattgggtgaaccggccaaaaactgtgcgggacacgctgctagccctgcaccagcacggccactcgggtccattcgagtccaagttcaaaaaagagcctgctctcaccgcagtagcgaggacagccaggaaacggaagccgtctccagagcccgagggtgaggtcgggcctccaaaaatcaatggcgaagcccagccctggctaagtacttctaccgagggcttaaaaattcccatgactcccactagcagctttgtctcgccccctccacctactgcaagtccacatagtaaccgcacaacccccccagaggcagcacagaatggacagagcccgatggcagcactgattcttgtggccgacaacgcaggagggtctcatgcctcaaaggatgccaaccaggtgcattctactacccgtagaaacagtaactcgccccctagcccgtcctctatgaatcagcgacgactggggccaagggaggttgggggacagggagccggtaacacaggagggttggagcccgttcaccccgcatctctgcctgacagctccctggcgacttcagcacccctatgctgtacactgtgtcatgagaggcttgaagatactcatttcgttcagtgccctagcgtgcccagccacaagttctgttttccctgctcaaggcagtccattaaacagcagggggcttccggggaggtgtactgtccatcaggggagaagtgcccactcgtgggctcaaacgtgccctgggccttcatgcagggggagattgcaacgatccttgccggtgatgttaaagtgaaaaaagaaagggactcttag

SEQ ID NO: 34860 - DNA, 1716 bp, Artificial Sequence
  derived and/or modified sequence
atggccgccgccgtggccgtggccgccgccagcagaagacagagctgctacctgtgcgacctgcccagaatgccctgggccatgatctgggacttcaccgagcccgtgtgcagaggctgcgtgaactacgagggcgccgacagagtggagttcgtgatcgagaccgccagacagctgaagagagcccacggctgcttccccgagggcagaagcccccccggcgccgccgccagcgccgccgccaagcccccccccctgagcgccaaggacatcctgctgcagcagcagcagcagctgggccacggcggccccgaggccgcccccagagccccccaggccctggagagataccccctggccgccgccgccgagagaccccccagactgggcagcgacttcggcagcagcagacccgccgccagcctggcccagccccccaccccccagcccccccccgtgaacggcatcctggtgcccaacggcttcagcaagctggaggagccccccgagctgaacagacagagccccaaccccagaagaggccacgccgtgccccccaccctggtgcccctgatgaacggcagcgccacccccctgcccaccgccctgggcctgggcggcagagccgccgccagcctggccgccgtgagcggcaccgccgccgccagcctgggcagcgcccagcccaccgacctgggcgcccacaagagacccgccagcgtgagcagcagcgccgccgtggagcacgagcagagagaggccgccgccaaggagaagcagccccccccccccgcccacagaggccccgccgacagcctgagcaccgccgccggcgccgccgagctgagcgccgagggcgccggcaagagcagaggcagcggcgagcaggactgggtgaacagacccaagaccgtgagagacaccctgctggccctgcaccagcacggccacagcggccccttcgagagcaagttcaagaaggagcccgccctgaccgccgtggccagaaccgccagaaagagaaagcccagccccgagcccgagggcgaggtgggcccccccaagatcaacggcgaggcccagccctggctgagcaccagcaccgagggcctgaagatccccatgacccccaccagcagcttcgtgagcccccccccccccaccgccagcccccacagcaacagaaccaccccccccgaggccgcccagaacggccagagccccatggccgccctgatcctggtggccgacaacgccggcggcagccacgccagcaaggacgccaaccaggtgcacagcaccaccagaagaaacagcaacagcccccccagccccagcagcatgaaccagagaagactgggccccagagaggtgggcggccagggcgccggcaacaccggcggcctggagcccgtgcaccccgccagcctgcccgacagcagcctggccaccagcgcccccctgtgctgcaccctgtgccacgagagactggaggacacccacttcgtgcagtgccccagcgtgcccagccacaagttctgcttcccctgcagcagacagagcatcaagcagcagggcgccagcggcgaggtgtactgccccagcggcgagaagtgccccctggtgggcagcaacgtgccctgggccttcatgcagggcgagatcgccaccatcctggccggcgacgtgaaggtgaagaaggagagagacagctag

SEQ ID NO: 34861 - DNA, 399 bp, Artificial Sequence
  derived and/or modified sequence
tttacacagacataccgtcgaagccggcaacacgagcagctgcctggacagcgacacatggacctgctgactggttactccaaactgatccaatcccgcttaaagttgctgctgcacctgggttctcagccacccgttgggaagaccttcttcttttcttgttggtgccatccactgttccatggatccaaaaccacccctaacgtttggtataagttctccgagactgctctctcgattctaaatagttgtcaggcgtcccagttgggcgtgaggaaaatgcctggggatatgtcatctagtcccagggttagggaattctccgcacttgttgctatcaaggaaaagattcacatacttcccactaatgccaaagttggaagcaaattcggaagttag

SEQ ID NO: 34862 - DNA, 399 bp, Artificial Sequence
  derived and/or modified sequence
ttcacccagacctaccggcggagccggcagcacgagcagctgcccggacaaaggcatatggacctcctcacgggctatagtaagctcatacagtctagattaaaactcctactgcaccttgggagccagccccctgtcggcaaaacgttttttttttcctgttggtgccacccactatttcatggctcaaagactacccccaatgtgtggtataagttctccgagaccgcattatcaatcctgaactcatgccaggcgagccagctcggcgtgcgaaagatgcctggggatatgtcttcttccccccgtgtgagagagttcagtgcactcgttgccattaaggagaagatccacattctcccaacaaacgcgaaagtggggagtaaattcggaagttag

SEQ ID NO: 34863 - DNA, 399 bp, Artificial Sequence
  derived and/or modified sequence
ttcacgcaaacctatcgtagatctagacagcacgaacagttgccaggccagcgccacatggatctgttgactggatacagtaagttgatccagtctcgccttaaattgctgctgcatcttggatcacagcccccagtcggcaagactttctttttcagttgctggtgccatcccttgttccatggtagcaagacaacgcctaacgtatggtataaattttccgagaccgctcttagcatcctaaactcgtgccaagctagtcagctgggggtaaggaaaatgccaggagacatgagttcttcaccacgcgtccgcgaatttagcgctcttgtagcaattaaagaaaaaatccatattctccccacgaatgcaaaggttggcagtaaatttggcagttag

SEQ ID NO: 34864 - DNA, 399 bp, Artificial Sequence
  derived and/or modified sequence
ttcactcagacatataggaggtccaggcagcatgaacagctccctggtcagagacacatggatttgctcactggttactcaaagctgattcaaagccgattaaagctgctgcttcatctggggtcccaacctccagtgggaaaaacattcttcttttcctgctggtgtcacccactgttccacggatccaaaacaacacccaatgtttggtacaaatttagtgaaacagctctttccattcttaactcatgccaagcatctcagcttggggtcaggaaaatgccaggggacatgagctcttctcctagagttagagaattctctgccttagttgcaataaaggaaaagatacacattcttcctacaaatgccaaagtaggctcaaaatttggttcctag

SEQ ID NO: 34865 - protein, 142 aa, Artificial Sequence
  derived and/or modified sequence
MAAVVAATALKGRGARNARVLRGILAGATANKASHNRTRALQSHSSPEGKEEPEPLSPELEYIPRKRGKNPMKAVGLAWAIGFPCGILLFILTKREVDKDRVKQMKARQNMRLSNTGEYESQRFRASSQSAPSPDVGSGVQT

SEQ ID NO: 34866 - DNA, 429 bp, Artificial Sequence
  derived and/or modified sequence
atggctgcagtcgtcgctgcaactgctctgaaaggccggggagcccgtaatgccagggtgctgaggggcatactggcaggcgcaaccgctaacaaagcgagtcataaccggaccagggcattgcagtcccactcatctcccgaggggaaagaagagccagagcccttatctccagagctggagtacatccctcggaaacggggaaaaaaccccatgaaggccgtcggactcgcctgggctatcggattcccctgtggaatcctccttttcattttgacgaaacgcgaggtagataaagatcgcgtgaaacagatgaaggcgagacaaaacatgcgtcttagcaatactggcgaatacgagagccaaaggttccgggctagtagtcagtctgcgccctcaccggacgtgggatctggcgtgcagacctag

SEQ ID NO: 34867 - DNA, 429 bp, Artificial Sequence
  derived and/or modified sequence
atggctgctgtggtggccgccacagccctgaagggccgcggggccagaaatgcccgggtgctgcggggcatcctggccggggccacagccaacaaggccagccacaacagaacccgggccctgcagagccacagcagccctgagggcaaggaggagcctgagcccctgagccctgagctggagtacatccccaggaagaggggcaagaaccccatgaaggctgtgggcctggcctgggccatcggcttcccctgtggcatcctgctcttcatcctgaccaagcgggaggtggacaaggacagagtgaagcagatgaaggcccggcagaacatgaggctgagcaacacaggagaatatgagagccagcgcttccgggccagcagccagagcgcccccagcccagatgtgggcagcggcgtgcagacctag

SEQ ID NO: 34868 - DNA, 429 bp, Artificial Sequence
  derived and/or modified sequence
atggccgccgtggtggccgccaccgccctgaagggccggggcgccagaaatgccagggtgctacgtggcattctggccggagccactgccaataaggcgagccataatcggacgagagcccttcagagccacagctcacccgaggggaaagaagaacctgagccactgtcccccgaattagagtacatcccacgaaagcgtggaaaaaacccgatgaaagccgtgggattagcctgggctattggctttccttgtggcatcctgcttttcattctgacaaagcgagaggtcgacaaagacagagtgaagcagatgaaagccagacaaaacatgcgactgtcaaacaccggtgaatacgagagccagagattcagagccagcagtcaatctgcccccagtcctgacgtggggtctggggtgcagacctag

SEQ ID NO: 34869 - DNA, 758 bp, Artificial Sequence
  derived and/or modified sequence
gagtagttctcctgggtccgctctgcgggcttctgggagatgtagtttctggtctgtaggcaggacggaaggagcgggggaggccccttacgcaaactacaattcccggcggggagcgcggtgaagcgggggtgggatctgaacatggcggcggtggtagctgctacggcgctgaagggccggggggcgagaaatgcccgcgtcctccgggggattctcgcaggagccacagctaacaaggcttctcataacaggacccgggccctgcaaagccacagctccccagagggcaaggaggaacctgaacccctatccccggagctggaatacattcccagaaagaggggcaagaaccccatgaaagctgtgggactggcctgggccatcggcttcccttgtggtatcctcctcttcatcctcaccaagcgggaagtggacaaggaccgtgtgaagcagatgaaggctcggcagaacatgcggttgtccaacacgggcgagtatgagagccagaggttcagggcttcctcccagagtgccccgtcccctgatgttgggtctggggtgcagacctgaggagcgctgcgaccctcctaggctattgactgttaagtcctcaggtttggcccagattccagttcgtgcctctgaggtccaccagagggcgcatgaagcccaggctgttgccaaaccctaccctgccccacaccaaggagccagccaaaggcaaataaagttattgagtgtttagtagaaaggaa

SEQ ID NO: 34870 - DNA, 429 bp, Artificial Sequence
  derived and/or modified sequence
atggctgcagtggttgctgccaccgctctgaaaggaaggggggctcggaatgctcgggttctgagagggattctagctggcgctacggctaataaagctagccataatagaactcgcgcactccagtctcactcatctccggagggtaaggaggagcccgagccgctgtcacctgaactggagtatatcccacgtaaacggggaaaaaatcccatgaaggccgtagggctggcgtgggccatcggattcccatgcgggatattgctgttcatattgacgaaaagggaggtggataaggatcgcgtgaagcagatgaaggcgcgacagaatatgcggctgtctaatacgggcgagtatgaaagccagagattcagagcatcatcacagtcggcaccaagtccagacgtgggctctggcgttcagacctag

SEQ ID NO: 34871 - DNA, 429 bp, Artificial Sequence
  derived and/or modified sequence
atggccgccgtggtggccgccaccgccctgaagggcagaggcgccagaaacgccagagtgctgagaggcatcctggccggcgccaccgccaacaaggccagccacaacagaaccagagccctgcagagccacagcagccccgagggcaaggaggagcccgagcccctgagccccgagctggagtacatccccagaaagagaggcaagaaccccatgaaggccgtgggcctggcctgggccatcggcttcccctgcggcatcctgctgttcatcctgaccaagagagaggtggacaaggacagagtgaagcagatgaaggccagacagaacatgagactgagcaacaccggcgagtacgagagccagagattcagagccagcagccagagcgcccccagccccgacgtgggcagcggcgtgcagacctag

SEQ ID NO: 34872 - protein, 503 aa, Artificial Sequence
  derived and/or modified sequence
MTLGSPRKGLLMLLMALVTQGDPVKPSRGPLVTCTCESPHCKGPTCRGAWCTVVLVREEGRHPQEHRGCGNLHRELCRGRPTEFVNHYCCDSHLCNHNVSLVLEATQPPSEQPGTDGQLALILGPVLALLALVALGVLGLWHVRRRQEKQRGLHSELGESSLILKASEQGDSMLGDLLDSDCTTGSGSGLPFLVQRTVARQVALVECVGKGRYGEVWRGLWHGESVAVKIFSSRDEQSWFRETEIYNTVLLRHDNILGFIASDMTSRNSSTQLWLITHYHEHGSLYDFLQRQTLEPHLALRLAVSAACGLAHLHVEIFGTQGKPAIAHRDFKSRNVLVKSNLQCCIADLGLAVMHSQGSDYLDIGNNPRVGTKRYMAPEVLDEQIRTDCFESYKWTDIWAFGLVLWEIARRTIVNGIVEDYRPPFYDVVPNDPSFEDMKKVVCVDQQTPTIPNRLAADPVLSGLAQMMRECWYPNPSARLTALRIKKTLQKISNSPEKPKVIQ

SEQ ID NO: 34873 - protein, 517 aa, Artificial Sequence
  derived and/or modified sequence
MALTPPLLLLSAGTMTLGSPRKGLLMLLMALVTQGDPVKPSRGPLVTCTCESPHCKGPTCRGAWCTVVLVREEGRHPQEHRGCGNLHRELCRGRPTEFVNHYCCDSHLCNHNVSLVLEATQPPSEQPGTDGQLALILGPVLALLALVALGVLGLWHVRRRQEKQRGLHSELGESSLILKASEQGDSMLGDLLDSDCTTGSGSGLPFLVQRTVARQVALVECVGKGRYGEVWRGLWHGESVAVKIFSSRDEQSWFRETEIYNTVLLRHDNILGFIASDMTSRNSSTQLWLITHYHEHGSLYDFLQRQTLEPHLALRLAVSAACGLAHLHVEIFGTQGKPAIAHRDFKSRNVLVKSNLQCCIADLGLAVMHSQGSDYLDIGNNPRVGTKRYMAPEVLDEQIRTDCFESYKWTDIWAFGLVLWEIARRTIVNGIVEDYRPPFYDVVPNDPSFEDMKKVVCVDQQTPTIPNRLAADPVLSGLAQMMRECWYPNPSARLTALRIKKTLQKISNSPEKPKVIQ

SEQ ID NO: 34874 - DNA, 1512 bp, Artificial Sequence
  derived and/or modified sequence
atgactttaggttcccctaggaagggtctgctcatgctcctgatggctctggtgacccagggcgaccccgttaagccttcacgaggtccactggtgacatgtacgtgcgaatcgcctcattgcaaggggccaacctgtcgtggggcatggtgcaccgttgttctggtgcgcgaggaaggccggcatccacaggaacacaggggatgcggcaatctgcaccgcgagctatgccggggtagaccaaccgagtttgtgaaccactactgttgtgactctcacctctgtaatcataatgtgagtttggtcctagaggccacacaaccaccatccgaacaacccggcacagatggccagcttgccctcatcctgggacctgtgttggccctgctggctctggtagctctgggagtgctgggcctgtggcacgtacggcggagacaggagaaacagagagggcttcactcagagctgggggagtcttcgctgatactgaaagccagcgaacagggtgatagtatgctaggggatttgcttgatagcgattgtacaacagggtccggatccggcctgcctttcctagtgcagaggaccgtggctagacaggtggcactggtggagtgcgtggggaagggcagatacggagaggtgtggcgtgggctgtggcacggggagtccgtggcggtcaagattttctcatcgagagacgaacagtcatggttccgggaaaccgagatctataataccgtcctgctccgccacgataatatattgggtttcatcgcaagcgacatgacgtcccgcaattctagcactcaattgtggctgattacccattaccacgaacacggatctttgtacgattttctccagcgacagacactcgaaccacatctagctctgagacttgctgtgtcagcggcatgcgggttggcccacctccacgtggaaatttttggcacacagggaaagcccgccatagcacaccgcgactttaaatcacgcaatgtcctcgtgaaatccaatctgcagtgctgcatcgcagacctcggactcgcggtgatgcactcacagggcagcgactaccttgacatcggaaataaccccagagtgggaacaaaacggtatatggctcctgaggtgctggacgaacagattcggacggattgcttcgagtcttataagtggactgacatctgggctttcggtctcgtcctgtgggagatcgcacgccggacaattgttaatggcatcgttgaggactaccggccacccttctatgacgtcgttcccaatgatcctagcttcgaggatatgaaaaaggtggtgtgtgtggatcagcaaaccccaacgattcccaatagactcgccgcagaccccgtgctgtcggggctggcacagatgatgcgggagtgctggtatcctaatccttcggctcggctgacagctctgcgaattaagaagactctacagaaaatttccaattcaccggaaaaacccaaagttatccagtag

SEQ ID NO: 34875 - DNA, 1512 bp, Artificial Sequence
  derived and/or modified sequence
atgacgctgggttccccaagaaagggactcctcatgctcctgatggccctggtgacgcagggagatcccgtgaagcccagtcgggggccattggttacctgtacttgcgagtctccccactgcaaagggccaacgtgcagaggcgcttggtgtactgtggtccttgtacgcgaagagggccgacacccccaggagcataggggatgtggaaacctgcaccgcgagttatgtcgcggccgaccaacggaatttgtgaaccattattgttgtgacagtcatctctgtaaccacaacgtgagccttgtgttagaggccacgcagcctcccagcgagcagcctggtacagacgggcagctggctctgatactgggcccagttctggcgctgttagctttggtggcactgggggtcctggggctctggcacgttcgtagaagacaggagaaacagaggggactgcacagcgagctgggggaaagctcattaattctgaaggcgtctgaacaaggcgactccatgttaggagatctgctggattctgactgcacgactggctctggatcagggttaccctttctggtacagaggactgtagctcgccaggtcgcacttgtcgagtgtgtgggaaaaggccggtatggcgaggtatggcgggggctgtggcatggcgagtccgttgccgttaagatatttagctcacgggatgaacaaagttggttccgcgaaactgaaatttataataccgtcctactgcggcacgacaacatactggggttcattgctagtgatatgaccagcagaaattcctcgacccaactgtggctaatcacccattaccacgaacacggttccctttacgacttcctgcagcgccagactctggaaccccatcttgcactcagactggcggtgtccgcagcctgcggactagcccacctccatgtggaaatattcgggactcagggaaagcccgccatcgcccatcgagatttcaagtcacggaacgtgctcgtcaaatccaatttacagtgctgtattgcggatctgggtctggccgtgatgcatagccaggggtccgactacttggacatagggaacaacccacgcgtagggacaaagcggtacatggctcctgaagtgctggacgagcagattcgcacagattgtttcgagtcctacaagtggacggacatctgggcattcggcttggtgttatgggaaattgcacgaagaactatcgttaatggtattgtcgaggattatcgaccaccattttatgatgttgtcccgaatgatccttcctttgaggatatgaagaaagtcgtgtgcgtggatcagcaaacaccaacgattcctaacagactggccgctgatccagtcctatccgggctggctcaaatgatgcgggaatgctggtatcccaatcctagcgcacgactgaccgcccttcgaatcaaaaaaaccctgcaaaagatttccaacagccctgaaaagccgaaggtgatccagtag

SEQ ID NO: 34876 - DNA, 1554 bp, Artificial Sequence
  derived and/or modified sequence
atggcacttacaccccccctcctcctcctttccgccggcacaatgacgctcggaagcccacgaaaaggtctactgatgctacttatggcactcgtgacgcagggtgaccccgtcaaacctagccgcggcccactggtcacgtgtacatgtgaaagtccacactgcaaaggcccgacctgcagaggcgcttggtgcactgttgttctcgtcagagaggaaggaaggcatccgcaggagcatcggggctgcggtaacctccacagagagctgtgtaggggacgccccacagaattcgttaaccactactgttgcgactctcacctctgtaaccacaacgttagccttgtcctcgaggcaacccagcctccctccgagcagcctggcactgatggccagctggctctcatcttagggcccgtgctggctctgcttgcccttgtcgcactgggagtgctgggcttatggcacgtgaggcgcaggcaggaaaagcaaagaggcctccacagcgagctcggtgaatctagtctgattctgaaggcatccgagcagggggactccatgctaggcgacctgttggatagtgactgtacaacgggttcaggcagcgggctgccatttctggtgcaacgcaccgtcgcacgccaggtggcccttgtcgaatgcgttggcaaagggcgatatggcgaagtttggcggggcttatggcatggcgagtccgtggccgtgaagattttctcctcacgcgatgaacagagttggtttcgtgaaacggagatttacaatacagtccttctgagacacgataatattctcgggtttatagctagcgacatgacttcacgcaacagctctacacagttgtggttgattactcactaccatgagcacggaagtttgtacgactttctgcagcggcagactttggagcctcatcttgccctgcggctggccgtgtccgcagcatgcggactggcacacctgcacgttgaaatcttcggaacgcaaggtaagccggccattgcacaccgcgatttcaagtccaggaacgttttggtgaagtccaacctacaatgctgcatcgctgacctgggcctggctgtgatgcactcacagggctcagattacttagatatcgggaacaaccctcgggtggggactaaacgctatatggcacccgaagtcctggacgagcagatccggaccgattgtttcgaatcttacaaatggaccgatatttgggcattcggactcgtgctgtgggaaattgctaggcgcacgatagtgaacggcatagtcgaagattatcggccccccttttacgacgttgtcccgaacgatccgagcttcgaggacatgaaaaaagttgtatgcgtggaccaacagaccccaaccattccaaaccggctggccgccgacccagttctgagcgggctcgcacaaatgatgagagaatgctggtaccctaacccgtcagctagactgaccgcgctgagaataaagaagacattgcagaaaatctctaatagcccggagaaacccaaagtcattcaatag

SEQ ID NO: 34877 - DNA, 1512 bp, Artificial Sequence
  derived and/or modified sequence
atgaccctgggcagccccaggaagggcctgctgatgctgctgatggccctggtgacccagggcgaccctgtgaagcccagccggggccccctggtgacctgcacctgtgagagcccccactgcaagggccccacctgccgcggggcctggtgcaccgtggtgctggtgcgggaggagggccgccacccccaggagcaccggggctgcggcaacctgcaccgggagctgtgccggggccggcccacagaatttgtgaaccactactgctgtgacagccacctgtgcaaccacaacgtgtccctggtgctggaggccacccagccccccagcgagcagcctggaacagatggccagctggccctgatcctgggccctgtgctggccctgctggccctggtggccctgggcgtgctgggcctgtggcacgtgagaagacggcaggagaagcagaggggcctgcacagcgagctgggggagagcagcctcatcctgaaggccagcgagcagggcgacagcatgctgggggacctgctggacagcgactgcaccaccggcagcggcagcggcctgcccttcctggtgcagaggacagtggcccggcaggtggccctggtggagtgtgtgggcaagggccgctatggagaggtgtggaggggcctgtggcacggggagagcgtggccgtgaagatcttcagcagcagagatgagcagagctggttccgggagacagagatctacaacacagtgctgctgcggcatgacaacatcctgggcttcatcgccagtgacatgaccagcaggaacagcagcacccagctgtggctgatcacccactaccacgagcacggcagcctgtatgacttcctgcagaggcagaccctggagccccacctggccctgcggctggccgtgtctgctgcctgtggcctggcccacctgcacgtggagatcttcggcacccagggcaagccagccatcgcccaccgggacttcaagagcagaaatgtgctggtgaagagcaacctgcagtgctgcatcgctgacctgggcctggccgtgatgcacagccagggcagtgactacctggacatcggcaacaacccccgggtgggcaccaagcgctacatggcccctgaggtgctggatgagcagatcagaacagactgctttgagagctacaagtggacagacatctgggccttcggcctggtgctgtgggagatcgcccggaggaccatcgtgaatggaattgtggaggactacagaccacccttctatgatgtggtgcccaatgaccccagctttgaggacatgaagaaggtggtgtgtgtggaccagcagacccccaccatccccaaccggctggccgctgaccctgtgctgagcggcctggcccagatgatgagggagtgctggtaccccaaccccagcgcccggctgacagccctgcgcatcaagaagaccctgcagaagatcagcaacagccctgagaagcccaaggtgatccagtag

SEQ ID NO: 34878 - DNA, 1554 bp, Artificial Sequence
  derived and/or modified sequence
atggccctgaccccacccctgctgctgctgtctgctggcaccatgaccctgggcagccccaggaagggcctgctgatgctgctgatggccctggtgacccagggcgaccctgtgaagcccagccggggccccctggtgacctgcacctgtgagagcccccactgcaagggccccacctgccgcggggcctggtgcaccgtggtgctggtgcgggaggagggccgccacccccaggagcaccggggctgcggcaacctgcaccgggagctgtgccggggccggcccacagaatttgtgaaccactactgctgtgacagccacctgtgcaaccacaacgtgtccctggtgctggaggccacccagccccccagcgagcagcctggaacagatggccagctggccctgatcctgggccctgtgctggccctgctggccctggtggccctgggcgtgctgggcctgtggcacgtgagaagacggcaggagaagcagaggggcctgcacagcgagctgggggagagcagcctcatcctgaaggccagcgagcagggcgacagcatgctgggggacctgctggacagcgactgcaccaccggcagcggcagcggcctgcccttcctggtgcagaggacagtggcccggcaggtggccctggtggagtgtgtgggcaagggccgctatggagaggtgtggaggggcctgtggcacggggagagcgtggccgtgaagatcttcagcagcagagatgagcagagctggttccgggagacagagatctacaacacagtgctgctgcggcatgacaacatcctgggcttcatcgccagtgacatgaccagcaggaacagcagcacccagctgtggctgatcacccactaccacgagcacggcagcctgtatgacttcctgcagaggcagaccctggagccccacctggccctgcggctggccgtgtctgctgcctgtggcctggcccacctgcacgtggagatcttcggcacccagggcaagccagccatcgcccaccgggacttcaagagcagaaatgtgctggtgaagagcaacctgcagtgctgcatcgctgacctgggcctggccgtgatgcacagccagggcagtgactacctggacatcggcaacaacccccgggtgggcaccaagcgctacatggcccctgaggtgctggatgagcagatcagaacagactgctttgagagctacaagtggacagacatctgggccttcggcctggtgctgtgggagatcgcccggaggaccatcgtgaatggaattgtggaggactacagaccacccttctatgatgtggtgcccaatgaccccagctttgaggacatgaagaaggtggtgtgtgtggaccagcagacccccaccatccccaaccggctggccgctgaccctgtgctgagcggcctggcccagatgatgagggagtgctggtaccccaaccccagcgcccggctgacagccctgcgcatcaagaagaccctgcagaagatcagcaacagccctgagaagcccaaggtgatccagtag

SEQ ID NO: 34879 - DNA, 1512 bp, Artificial Sequence
  derived and/or modified sequence
atgaccctgggcagcccccggaagggcctgctgatgctgctgatggccctggtcacacaaggggatcctgtcaaaccttctagagggcccctggtgacctgcacctgcgagtcgccccactgcaagggccctacttgccggggcgcatggtgcactgtcgtcctggtccgcgaggagggaagacacccgcaggagcatcgcggctgtggcaacctgcacagagagctatgtcgggggcgtccgaccgaatttgtgaaccattactgttgtgacagccatctgtgtaaccacaatgtcagtctggttcttgaagcgacacagcccccatcagagcagccgggtactgatggtcagctggctctgattctgggccctgtgcttgcactgttggctctcgtagcgctgggggtattgggcttatggcatgtgagacggcgccaggagaagcaaagaggcctgcactcagagctgggcgagtcatccctcattctgaaggcatccgaacagggcgattccatgctgggcgatctgctggattccgactgtacaaccggatctggctctgggctgcccttcctggtgcagcggaccgtcgccaggcaggtggctctcgtggagtgtgtgggaaaggggcgctacggagaagtgtggagaggcctctggcacggtgagagtgtggccgtgaagatcttctctagcagagacgagcaatcctggttcagggagacagagatttacaacactgtgctcctcaggcatgacaatatactcggcttcatcgcgagcgacatgacgagccgcaatagttcgactcagctgtggctcatcacccactaccacgaacacggcagtctttatgattttttacaacggcagacactggaacctcatctggctttgcggctggccgtgtccgctgcttgcgggctagctcacttgcacgtggaaattttcggaacacaaggcaaacctgccatagctcacagggactttaaaagtcgcaacgtgcttgtgaagtctaatctccaatgttgcattgcagacctgggcctggcagtgatgcatagccaggggtctgattatctggacataggcaacaacccacgggtggggacaaagcgctatatggcacctgaggtgctggatgaacagatcaggactgattgtttcgagtcctacaaatggaccgacatttgggcatttgggctagtcctgtgggagattgctaggagaaccatcgtgaacggtatagtcgaagattatcgcccccctttctacgatgttgtgcctaatgacccctcttttgaggatatgaaaaaagtggtatgcgtggatcaacagacacccacaatccctaatcggcttgcagctgatccagtgctcagtgggctggcccaaatgatgcgagaatgttggtatccaaacccatctgctcgcctcaccgccctgagaattaaaaagactctgcaaaagatctccaactcccctgagaaacctaaagtgattcagtag

SEQ ID NO: 34880 - DNA, 1512 bp, Artificial Sequence
  derived and/or modified sequence
atgaccctgggcagcccccggaagggcctgctgatgctgctgatggctctggttacgcagggtgatccggtgaaaccttcacgcggcccgctagtgacgtgcacttgtgagtcgcctcactgcaaaggtcctacctgtcgaggcgcatggtgtacggttgtgctggtgagagaggaaggccgtcatccacaagaacatcgaggatgtggcaatttgcaccgcgagctctgcagggggaggcctaccgagttcgtcaaccactattgctgcgattctcacctctgtaaccataatgtgagcctggtgctggaggcaacgcagccacctagcgaacagcccggcaccgatggccaattagcactaatcctcggacccgtgctagctctgctagccctggtagctctgggggttctgggcctgtggcatgttcggcggcgccaggaaaagcagcggggcctccacagcgagctgggtgaatcttcgctcatcctgaaagctagtgagcagggcgactctatgcttggggatctgctcgactcagactgcacaaccggaagcgggagcgggctgccatttttagtccaaagaacggtcgccaggcaggtcgcgctcgtagagtgtgttggtaaaggccgatacggtgaggtctggagggggttgtggcatggagagtcagtggcagtgaagatcttttctagtagggatgagcaatcatggtttcgggagacggagatatataatactgtgttacttaggcacgataatatcctggggttcatcgctagcgatatgacttctcgcaacagttccacacagctctggctgatcactcactatcacgagcacggctcactgtatgatttcctgcagagacagacgctggagccacatcttgccctccgcttagccgtgtcagccgcttgcggcttggcccacctccacgtcgagatctttgggacccaaggtaagcccgcgattgcccacagggactttaagagccgaaacgtcctggtgaagtccaatctgcagtgctgcatcgccgatttaggacttgcagttatgcacagccagggctctgactatctagacattggtaataatcctcgtgtggggactaaacgctatatggcacctgaagtactggacgagcaaattcggactgattgttttgaaagttacaaatggaccgacatttgggccttcgggctggttctctgggaaatcgcccgacgcacaatcgtgaacggcattgtggaggactaccgaccccctttctatgatgtcgtacccaacgacccctcattcgaagacatgaaaaaggtagtctgcgtggaccagcagacaccaaccatccccaacaggctggccgccgatcccgtcttgagcggtttggctcagatgatgagagaatgttggtacccaaacccctccgcccgcctaaccgcgctgcgaattaagaagaccctgcagaagatcagtaacagccccgagaagccaaaagtaattcaatag

SEQ ID NO: 34881 - DNA, 1554 bp, Artificial Sequence
  derived and/or modified sequence
atggccctgaccccccccctgctgctgctgagcgccggcaccatgacacttgggagcccccgaaagggactactaatgctgctgatggccctcgtcacccaaggtgatcctgtcaagccgagtagaggaccattggtcacatgtacctgtgagagtcctcactgcaagggcccaacatgccggggcgcatggtgtaccgttgtgctggtgcgtgaagaagggagacacccccaagaacacagagggtgcggaaatctccaccgagaactgtgtcgggggcgccccactgagtttgtgaatcactattgttgcgacagtcatttatgcaatcacaatgtcagtctcgtactggaagccacccaacctcccagcgaacagcccggcacagacgggcagctcgctctgattctggggcctgtactggccctcctagcgctggtggccctgggagtgcttgggctttggcatgtgaggagacgccaagaaaaacagagaggcctgcactccgagctgggcgagtctagtctcatactgaaagcatccgagcagggcgattcaatgcttggcgacctactggattcagactgtacaacaggatcagggtcaggcctgccctttctggttcaacggaccgtcgctagacaggtagccctcgtggaatgcgtggggaagggtaggtacggggaagtttggagagggttgtggcatggagagtctgtcgcggtcaagattttctcatctagggacgagcagtcttggtttagagagactgagatatacaataccgttcttttgaggcacgacaatatacttggttttatcgcttcagatatgacatcccggaatagctccactcagctgtggctgatcactcattaccacgagcacggctctctgtacgacttcctgcagcggcagactctggagccccacctggctctgagactggcagtgagcgctgcctgcggcttagctcatctgcacgttgaaatcttcgggacccaaggaaagcccgccattgcacaccgggactttaagtcgagaaacgtgctggtaaaaagcaatctccaatgttgcatcgcagatttgggtctggctgttatgcattctcagggcagcgactacctagacatcggtaataatccccgagttggaactaaaagatatatggcccccgaagtgctggatgagcagatcaggaccgattgcttcgagtcgtacaagtggacggacatatgggccttcggcctggtgctatgggagatcgcacggcgcacaatcgtgaacgggatcgtcgaggactatcggccaccgttctacgacgttgtgcccaacgacccatcctttgaggatatgaagaaagtagtttgtgtcgaccagcagacgcccactatccccaatcgtctggcagccgatcccgtgctgtccggactggctcagatgatgcgcgagtgttggtaccctaatccaagcgcaaggctgacggccctgcggattaagaaaacgctgcagaagatctcaaattcccctgagaagccaaaagttattcaatag

SEQ ID NO: 34882 - DNA, 1512 bp, Artificial Sequence
  derived and/or modified sequence
atgaccctgggttcccctcggaagggacttcttatgctgctaatggccctcgtgacccagggcgaccccgtaaagccatcccgagggccactggtcacctgcacttgtgagtcgccacattgtaagggccctacctgtcgcggagcttggtgcacagtggtgctcgtccgcgaggaaggtcgtcacccacaagaacaccgaggatgtggtaatcttcatagagaactctgtcggggacgccctacagagtttgttaatcattattgctgcgattcgcacctgtgtaatcacaacgtttcgctggtgcttgaggccacccagcctccatcggaacagcctggcacagacgggcagctcgctttgatccttgggcctgtcctggccctgcttgctcttgtggctctaggtgtcctagggctgtggcacgtcaggagacgccaggaaaagcagcgagggttgcacagcgagttgggtgagagtagcctgattctgaaggcatccgagcagggcgacagtatgttaggcgatttgctggactctgactgcacgaccggtagcggctctgggttgcctttcctggtgcaaagaaccgttgcacgacaagtcgctctggtcgagtgcgtcgggaagggccgatacggggaggtgtggaggggcttgtggcacggcgagagtgtggctgtcaagatattcagctcgcgcgacgaacaatcatggttccgggagaccgagatttacaataccgtgttgcttcgtcatgataatattctgggatttatcgcttccgacatgacgagccgcaatagcagcacacaactgtggttgatcacacattaccatgagcacggatctctttacgacttcctccagaggcagaccctggagcctcacttggcgctgcgacttgccgtatctgcagcatgtggactggcgcatctccacgtggaaattttcggcactcagggcaagccggcaatcgcccaccgagattttaagagccggaacgtcctggtaaaatcgaatttacagtgttgtatagccgacctcggattagccgtgatgcattcccaaggttctgattacctcgatattggcaataatcccagagttggcacgaagagatacatggctcctgaggtcctcgacgagcaaatccggaccgattgtttcgagtcttacaaatggaccgatatttgggcctttgggctggtcctgtgggagatcgccagacgcactattgtgaacggtatcgtagaagattatagacccccattttatgatgtggtaccaaacgatcctagtttcgaggatatgaagaaggttgtgtgcgtggaccagcaaactccgacaatacccaaccgcttggccgcagaccctgtcctgagtggtctggcacagatgatgcgtgagtgttggtacccaaatccctcagctcgtctgacagctctgaggatcaaaaaaaccctgcagaaaatctctaattcccccgagaaaccaaaggttattcagtag

SEQ ID NO: 34883 - DNA, 1512 bp, Artificial Sequence
  derived and/or modified sequence
atgaccctgggctcccccaggaaggggctgcttatgctgcttatggctctagtgactcagggcgatcccgtgaagccttccagaggacctctggtgacctgtacctgtgaaagtccccactgtaaaggacccacatgcagaggcgcatggtgcaccgtcgtgctggtccgagaggaagggaggcaccctcaagagcaccgaggatgtggcaacctacatcgcgagctgtgtagggggcgtcccacagaattcgtgaatcactactgctgcgattcccacctctgcaatcacaacgtgtctctggtgctggaggccacccaacctccctctgagcagccaggtactgatggccagcttgcccttattctgggaccagtgttagcactgttggcactggtggccttaggtgtactgggcctctggcatgtcaggaggagacaggaaaaacagcgtggtctgcacagtgagctcggggagtccagcctgatacttaaagcctctgagcagggggattctatgttgggagacctgctggactcagattgcactactggatcaggctctgggctgccatttctggtacagcgtaccgtagcaagacaggtcgctctggtggagtgtgtaggtaaaggtagatacggtgaggtgtggagaggactgtggcacggtgaatctgttgcagttaagatcttcagctctcgggatgaacagagttggtttagggagactgaaatttataacactgtgctgctgcgccacgacaacatcctgggatttatagcctccgatatgacctctcgcaattcaagcactcagctctggcttataacacattaccacgaacacgggagcctgtatgactttcttcagcgccagaccctcgaacctcatcttgccctgaggctggctgtgagtgctgcttgcggcctcgcccatctgcacgtcgagatctttggtacccaggggaagcccgcaatcgcacaccgtgatttcaagtcgcggaacgtcttagttaagagtaacctgcagtgctgtatcgccgacttaggactggccgttatgcattcccagggtagcgactacctggatattggcaataatcccagggtgggaactaaaagatatatggccccagaagtgttggatgagcagataagaacggattgtttcgagtcctataaatggacggatatttgggcattcggtctggtgttatgggagatcgctcgcagaacgattgtcaatggcatcgtggaagattaccggcctccgttttacgatgtcgtgcccaacgacccctcatttgaagatatgaaaaaggtggtctgcgtggatcaacagaccccaaccatcccaaataggttggcagctgaccccgtgctgtcagggctcgctcagatgatgcgcgaatgttggtatccgaaccccagcgcaaggttgactgccctacgcatcaagaaaactcttcaaaaaatttcaaacagtccagaaaaaccgaaggtgattcaatag

SEQ ID NO: 34884 - DNA, 1554 bp, Artificial Sequence
  derived and/or modified sequence
atggctttaactccaccattactccttctttctgcagggacgatgacattaggcagtcccaggaaaggactgctcatgctgctgatggcactggtgacgcagggtgaccctgtgaagccttctagagggcctctggtgacttgcacctgtgagagcccacactgtaagggacctacttgccgaggggcatggtgtacggtggtcttggtgcgggaggaaggcagacacccacaggaacatcgcggttgcggcaatttgcaccgggagctgtgtaggggcaggccaacggaatttgtgaatcattattgttgcgacagccacttgtgtaaccataatgtgagtctcgtcctggaggccactcagcccccttctgagcagcccggaacagacggccagctggcgctgattttgggccctgtgctggcactgcttgccctcgtcgcccttggcgttctggggctctggcatgtgcgccgtaggcaggaaaagcagcggggtttgcattcggagctgggagaatctagcctgatccttaaagcctccgagcagggcgactcaatgctgggagacctcctcgatagcgactgcaccactggtagcgggtcaggtctgcctttcctggtgcagaggactgtcgccagacaggtggcactggtcgaatgcgttggcaaggggagatacggtgaggtgtggaggggattatggcacggggagagcgttgctgtaaagatatttagttcacgagatgagcagtcttggttccgcgaaacggagatttacaacaccgtgttgctccgccatgataatatactaggtttcatagcatccgatatgacatcaaggaactcttcaacacagttgtggctgattactcactatcatgaacatggctctctttatgattttctgcagcggcaaacgctggagccacatctggccttgaggctggccgtgtcagctgcatgcggcctcgcccatcttcacgtggagatctttggtacacaaggaaaacctgcaattgcacatagggactttaagagccgcaatgtcctggtgaagagtaaccttcaatgctgtattgcggatctgggcctcgcagttatgcactcccaagggtctgactacctagatatcggcaataacccacgagtggggacaaagaggtatatggcacctgaagtcttggacgaacagatccggacggattgctttgagtcatataagtggacagacatctgggcattcggactcgttctttgggaaatagctagacggaccattgtgaacggtatagtggaagattacagacctcccttctatgatgtagtacccaatgaccctagcttcgaagacatgaagaaagtggtctgtgtggatcagcagactccgaccattcctaataggctagcagcggatccagtgttgtccggactggcacaaatgatgcgggagtgctggtaccccaatccctcagctcgactgacagccctgcgcattaaaaagacactgcagaaaatttctaactcccctgagaagccgaaagtgattcagtag

SEQ ID NO: 34885 - DNA, 1512 bp, Artificial Sequence
  derived and/or modified sequence
atgaccctgggcagccccagaaagggcctgctgatgctgctgatggccctggtgacccagggcgaccccgtgaagcccagcagaggccccctggtgacctgcacctgcgagagcccccactgcaagggccccacctgcagaggcgcctggtgcaccgtggtgctggtgagagaggagggcagacacccccaggagcacagaggctgcggcaacctgcacagagagctgtgcagaggcagacccaccgagttcgtgaaccactactgctgcgacagccacctgtgcaaccacaacgtgagcctggtgctggaggccacccagccccccagcgagcagcccggcaccgacggccagctggccctgatcctgggccccgtgctggccctgctggccctggtggccctgggcgtgctgggcctgtggcacgtgagaagaagacaggagaagcagagaggcctgcacagcgagctgggcgagagcagcctgatcctgaaggccagcgagcagggcgacagcatgctgggcgacctgctggacagcgactgcaccaccggcagcggcagcggcctgcccttcctggtgcagagaaccgtggccagacaggtggccctggtggagtgcgtgggcaagggcagatacggcgaggtgtggagaggcctgtggcacggcgagagcgtggccgtgaagatcttcagcagcagagacgagcagagctggttcagagagaccgagatctacaacaccgtgctgctgagacacgacaacatcctgggcttcatcgccagcgacatgaccagcagaaacagcagcacccagctgtggctgatcacccactaccacgagcacggcagcctgtacgacttcctgcagagacagaccctggagccccacctggccctgagactggccgtgagcgccgcctgcggcctggcccacctgcacgtggagatcttcggcacccagggcaagcccgccatcgcccacagagacttcaagagcagaaacgtgctggtgaagagcaacctgcagtgctgcatcgccgacctgggcctggccgtgatgcacagccagggcagcgactacctggacatcggcaacaaccccagagtgggcaccaagagatacatggcccccgaggtgctggacgagcagatcagaaccgactgcttcgagagctacaagtggaccgacatctgggccttcggcctggtgctgtgggagatcgccagaagaaccatcgtgaacggcatcgtggaggactacagaccccccttctacgacgtggtgcccaacgaccccagcttcgaggacatgaagaaggtggtgtgcgtggaccagcagacccccaccatccccaacagactggccgccgaccccgtgctgagcggcctggcccagatgatgagagagtgctggtaccccaaccccagcgccagactgaccgccctgagaatcaagaagaccctgcagaagatcagcaacagccccgagaagcccaaggtgatccagtag

SEQ ID NO: 34886 - DNA, 1554 bp, Artificial Sequence
  derived and/or modified sequence
atggccctgaccccccccctgctgctgctgagcgccggcaccatgaccctgggcagccccagaaagggcctgctgatgctgctgatggccctggtgacccagggcgaccccgtgaagcccagcagaggccccctggtgacctgcacctgcgagagcccccactgcaagggccccacctgcagaggcgcctggtgcaccgtggtgctggtgagagaggagggcagacacccccaggagcacagaggctgcggcaacctgcacagagagctgtgcagaggcagacccaccgagttcgtgaaccactactgctgcgacagccacctgtgcaaccacaacgtgagcctggtgctggaggccacccagccccccagcgagcagcccggcaccgacggccagctggccctgatcctgggccccgtgctggccctgctggccctggtggccctgggcgtgctgggcctgtggcacgtgagaagaagacaggagaagcagagaggcctgcacagcgagctgggcgagagcagcctgatcctgaaggccagcgagcagggcgacagcatgctgggcgacctgctggacagcgactgcaccaccggcagcggcagcggcctgcccttcctggtgcagagaaccgtggccagacaggtggccctggtggagtgcgtgggcaagggcagatacggcgaggtgtggagaggcctgtggcacggcgagagcgtggccgtgaagatcttcagcagcagagacgagcagagctggttcagagagaccgagatctacaacaccgtgctgctgagacacgacaacatcctgggcttcatcgccagcgacatgaccagcagaaacagcagcacccagctgtggctgatcacccactaccacgagcacggcagcctgtacgacttcctgcagagacagaccctggagccccacctggccctgagactggccgtgagcgccgcctgcggcctggcccacctgcacgtggagatcttcggcacccagggcaagcccgccatcgcccacagagacttcaagagcagaaacgtgctggtgaagagcaacctgcagtgctgcatcgccgacctgggcctggccgtgatgcacagccagggcagcgactacctggacatcggcaacaaccccagagtgggcaccaagagatacatggcccccgaggtgctggacgagcagatcagaaccgactgcttcgagagctacaagtggaccgacatctgggccttcggcctggtgctgtgggagatcgccagaagaaccatcgtgaacggcatcgtggaggactacagaccccccttctacgacgtggtgcccaacgaccccagcttcgaggacatgaagaaggtggtgtgcgtggaccagcagacccccaccatccccaacagactggccgccgaccccgtgctgagcggcctggcccagatgatgagagagtgctggtaccccaaccccagcgccagactgaccgccctgagaatcaagaagaccctgcagaagatcagcaacagccccgagaagcccaaggtgatccagtag

SEQ ID NO: 34887 - DNA, 4263 bp, Artificial Sequence
  derived and/or modified sequence
aggaaacggtttattaggagggagtggtggagctgggccaggcaggaagacgctggaataagaaacatttttgctccagcccccatcccagtcccgggaggctgccgcgccagctgcgccgagcgagcccctccccggctccagcccggtccggggccgcgcccggaccccagcccgccgtccagcgctggcggtgcaactgcggccgcgcggtggaggggaggtggccccggtccgccgaaggctagcgccccgccacccgcagagcgggcccagagggaccatgaccttgggctcccccaggaaaggccttctgatgctgctgatggccttggtgacccagggagaccctgtgaagccgtctcggggcccgctggtgacctgcacgtgtgagagcccacattgcaaggggcctacctgccggggggcctggtgcacagtagtgctggtgcgggaggaggggaggcacccccaggaacatcggggctgcgggaacttgcacagggagctctgcagggggcgccccaccgagttcgtcaaccactactgctgcgacagccacctctgcaaccacaacgtgtccctggtgctggaggccacccaacctccttcggagcagccgggaacagatggccagctggccctgatcctgggccccgtgctggccttgctggccctggtggccctgggtgtcctgggcctgtggcatgtccgacggaggcaggagaagcagcgtggcctgcacagcgagctgggagagtccagtctcatcctgaaagcatctgagcagggcgacagcatgttgggggacctcctggacagtgactgcaccacagggagtggctcagggctccccttcctggtgcagaggacagtggcacggcaggttgccttggtggagtgtgtgggaaaaggccgctatggcgaagtgtggcggggcttgtggcacggtgagagtgtggccgtcaagatcttctcctcgagggatgaacagtcctggttccgggagactgagatctataacacagtgttgctcagacacgacaacatcctaggcttcatcgcctcagacatgacctcccgcaactcgagcacgcagctgtggctcatcacgcactaccacgagcacggctccctctacgactttctgcagagacagacgctggagccccatctggctctgaggctagctgtgtccgcggcatgcggcctggcgcacctgcacgtggagatcttcggtacacagggcaaaccagccattgcccaccgcgacttcaagagccgcaatgtgctggtcaagagcaacctgcagtgttgcatcgccgacctgggcctggctgtgatgcactcacagggcagcgattacctggacatcggcaacaacccgagagtgggcaccaagcggtacatggcacccgaggtgctggacgagcagatccgcacggactgctttgagtcctacaagtggactgacatctgggcctttggcctggtgctgtgggagattgcccgccggaccatcgtgaatggcatcgtggaggactatagaccacccttctatgatgtggtgcccaatgaccccagctttgaggacatgaagaaggtggtgtgtgtggatcagcagacccccaccatccctaaccggctggctgcagacccggtcctctcaggcctagctcagatgatgcgggagtgctggtacccaaacccctctgcccgactcaccgcgctgcggatcaagaagacactacaaaaaattagcaacagtccagagaagcctaaagtgattcaatagcccaggagcacctgattcctttctgcctgcagggggctgggggggtggggggcagtggatggtgccctatctgggtagaggtagtgtgagtgtggtgtgtgctggggatgggcagctgcgcctgcctgctcggcccccagcccacccagccaaaaatacagctgggctgaaacctgatcccctgctgtctggcctgctcaaagcggcaggctccctgacgcctggctctctccccacccctatggccagcatggtgcaccccctaccactcccgggacaggatgcaaaagaggctccagagtcagagtgccaagccagggaatcccagtcccagactcagagcccgggcctgcactttgccccctgcccttgatcaaccccactgccccaccagagctgccagggtggcacagggccctgtccagcccctggcacacacttccctgccaggcctcagcctctagcataagctccagagagccagggcccatcagtttctctctgtggatttgtatctcagctccatgatgccttgggctttctgtctcctcaacaagagtgcagcttgctgaatgtcagctgcctgagagagctggggcctgacttactagggcattaaatcctaagaggtcctactgaggtgtggcaggatcacaggccagtggaaaaagggcaggtcagatgggcaaggcccaggactttcagattaactgagaggatatcgaggccaagcatggcagggggaaggtcagtgggtgtcaagagacccaggtctgaccccggatgtttgctccatgtgacaaaagcaggcctgtctcaggaccttttcttttcttttttccttctttttttttttgacacggagtttcgctcttgttgtccaggctagagtgcaatggcatgatcccagctcaccgcaacgtctacctcccaggttcaaatcattctcttgcctcagactcccgagtagctgggattacaggcacatgccaccatgcctggctaattttgtatatttagtagaaacagggtttcaccatgctggccatgctggtctcgaactcctgacctcaggtgttccacctacctcagcctcccaaagtgctggggttacaggtgtgagccatcgcgcctggccaggacctttgtttcttatctacatattggaagatttggtcctgatgtcctttgaggcttctttagctctagttctctgacacttcagcctatatcacagctaacttcttcagtctcatctattccttatgctccagcccctggcaatttgcctcaagatgggggtttgaaaataactttacctgactcaaggagtgtctggagcacctcctagtctaagtctgcaagctccagttcttgcctaaaaccatgccagtggccacccttgggctcagacagctctgggccttttgaccacaagccagcccctcgccctctctgtggcatagtcttctctgccccaggactgcagggcggcttcctccaaggcttccaaggctcaaaagaaatttggctccatccaagaaggctccagctcccctactggcccctggctcaggcccacacccctggccaggcccagagagtgtgtctcaggagaattcaatggctctagagagacacacagaaagtttggcatttggaaatttcaaggatgtatgtatgctcacgtatggagcaggttgtcctggtccctgggtgcagggaagtgggctgcagggaagtggattggaggggagcttgaggaatataaggagcgggggtggagactcaggctatggacaaggacagccccaaggttgggaagacctggccttagtcgtcctcagcctaggggcagggcagtgaagaaagctctccccgctcctgctgtaatgacccagagtagcctccccaggccggcatcttatgtgtgtcttccaccatcctcatggtggcacttttctaggcctgtctcccagcattgtgcaaggctcggaagagaaccaggaagtgaaactgggtgaaaacagaaagctcaatggatgggctaggttcccagatcattagggcagagtttgcacgtcctctggtcactggaatccacccagcccacgaatcatctccctcttgaaggattttatttctactgggttttggaacaaactcctgctgagaccccacagccagaaactgaaagcagcagctccccaaagcctggaaaatccctaagagaaggcctggggcaggaagtggagtgacaggggacaggtagagagaagggggcccaatggccagggagtgaaggaggtggcgttgctgagagcagtctgcacatgcttctgtctgagtgcaggaaggtgttccagggtcgaaattacacttctcgtacctggagacgctgtttgtgggagcactgggctcatgcctggcacacaataggtctgcaataaaccatggttaaatcctga

SEQ ID NO: 34888 - DNA, 1971 bp, Artificial Sequence
  derived and/or modified sequence
aggaaacggtttattaggagggagtggtggagctgggccaggcaggaagacgctggaataagaaacatttttgctccagcccccatcccagtcccgggaggctgccgcgccagctgcgccgagcgagcccctccccggctccagcccggtccggggccgcgcccggaccccagcccgccgtccagcgctggcggtgcaactgcggccgcgcggtggaggggaggtggccccggtccgccgaaggctagcgccccgccacccgcagagcgggcccagagggaccatgaccttgggctcccccaggaaaggccttctgatgctgctgatggccttggtgacccagggagaccctgtgaagccgtctcggggcccgctggtgacctgcacgtgtgagagcccacattgcaaggggcctacctgccggggggcctggtgcacagtagtgctggtgcgggaggaggggaggcacccccaggaacatcggggctgcgggaacttgcacagggagctctgcagggggcgccccaccgagttcgtcaaccactactgctgcgacagccacctctgcaaccacaacgtgtccctggtgctggaggccacccaacctccttcggagcagccgggaacagatggccagctggccctgatcctgggccccgtgctggccttgctggccctggtggccctgggtgtcctgggcctgtggcatgtccgacggaggcaggagaagcagcgtggcctgcacagcgagctgggagagtccagtctcatcctgaaagcatctgagcagggcgacagcatgttgggggacctcctggacagtgactgcaccacagggagtggctcagggctccccttcctggtgcagaggacagtggcacggcaggttgccttggtggagtgtgtgggaaaaggccgctatggcgaagtgtggcggggcttgtggcacggtgagagtgtggccgtcaagatcttctcctcgagggatgaacagtcctggttccgggagactgagatctataacacagtgttgctcagacacgacaacatcctaggcttcatcgcctcagacatgacctcccgcaactcgagcacgcagctgtggctcatcacgcactaccacgagcacggctccctctacgactttctgcagagacagacgctggagccccatctggctctgaggctagctgtgtccgcggcatgcggcctggcgcacctgcacgtggagatcttcggtacacagggcaaaccagccattgcccaccgcgacttcaagagccgcaatgtgctggtcaagagcaacctgcagtgttgcatcgccgacctgggcctggctgtgatgcactcacagggcagcgattacctggacatcggcaacaacccgagagtgggcaccaagcggtacatggcacccgaggtgctggacgagcagatccgcacggactgctttgagtcctacaagtggactgacatctgggcctttggcctggtgctgtgggagattgcccgccggaccatcgtgaatggcatcgtggaggactatagaccacccttctatgatgtggtgcccaatgaccccagctttgaggacatgaagaaggtggtgtgtgtggatcagcagacccccaccatccctaaccggctggctgcagacccggtcctctcaggcctagctcagatgatgcgggagtgctggtacccaaacccctctgcccgactcaccgcgctgcggatcaagaagacactacaaaaaattagcaacagtccagagaagcctaaagtgattcaatagcccaggagcacctgattcctttctgcctgcagggggctgggggggtggggggcagtggatggtgccctatctgggtagaggtagtgtgagtgtggtgtgtgctggggatgggcagctgcgcctgcctgctcggcccccagcccacccagccaaaaatacagctgggctgaaacctg

SEQ ID NO: 34889 - DNA, 4121 bp, Artificial Sequence
  derived and/or modified sequence
cggcagggagtagggaggcggcctccctgcctcccctccaaaaaaaactctgtgatttcctctgggcaggagggagccacggccagcggctgtcacacttcatggctcttactccacctctcttgctcctctctgcagggaccatgaccttgggctcccccaggaaaggccttctgatgctgctgatggccttggtgacccagggagaccctgtgaagccgtctcggggcccgctggtgacctgcacgtgtgagagcccacattgcaaggggcctacctgccggggggcctggtgcacagtagtgctggtgcgggaggaggggaggcacccccaggaacatcggggctgcgggaacttgcacagggagctctgcagggggcgccccaccgagttcgtcaaccactactgctgcgacagccacctctgcaaccacaacgtgtccctggtgctggaggccacccaacctccttcggagcagccgggaacagatggccagctggccctgatcctgggccccgtgctggccttgctggccctggtggccctgggtgtcctgggcctgtggcatgtccgacggaggcaggagaagcagcgtggcctgcacagcgagctgggagagtccagtctcatcctgaaagcatctgagcagggcgacagcatgttgggggacctcctggacagtgactgcaccacagggagtggctcagggctccccttcctggtgcagaggacagtggcacggcaggttgccttggtggagtgtgtgggaaaaggccgctatggcgaagtgtggcggggcttgtggcacggtgagagtgtggccgtcaagatcttctcctcgagggatgaacagtcctggttccgggagactgagatctataacacagtgttgctcagacacgacaacatcctaggcttcatcgcctcagacatgacctcccgcaactcgagcacgcagctgtggctcatcacgcactaccacgagcacggctccctctacgactttctgcagagacagacgctggagccccatctggctctgaggctagctgtgtccgcggcatgcggcctggcgcacctgcacgtggagatcttcggtacacagggcaaaccagccattgcccaccgcgacttcaagagccgcaatgtgctggtcaagagcaacctgcagtgttgcatcgccgacctgggcctggctgtgatgcactcacagggcagcgattacctggacatcggcaacaacccgagagtgggcaccaagcggtacatggcacccgaggtgctggacgagcagatccgcacggactgctttgagtcctacaagtggactgacatctgggcctttggcctggtgctgtgggagattgcccgccggaccatcgtgaatggcatcgtggaggactatagaccacccttctatgatgtggtgcccaatgaccccagctttgaggacatgaagaaggtggtgtgtgtggatcagcagacccccaccatccctaaccggctggctgcagacccggtcctctcaggcctagctcagatgatgcgggagtgctggtacccaaacccctctgcccgactcaccgcgctgcggatcaagaagacactacaaaaaattagcaacagtccagagaagcctaaagtgattcaatagcccaggagcacctgattcctttctgcctgcagggggctgggggggtggggggcagtggatggtgccctatctgggtagaggtagtgtgagtgtggtgtgtgctggggatgggcagctgcgcctgcctgctcggcccccagcccacccagccaaaaatacagctgggctgaaacctgatcccctgctgtctggcctgctcaaagcggcaggctccctgacgcctggctctctccccacccctatggccagcatggtgcaccccctaccactcccgggacaggatgcaaaagaggctccagagtcagagtgccaagccagggaatcccagtcccagactcagagcccgggcctgcactttgccccctgcccttgatcaaccccactgccccaccagagctgccagggtggcacagggccctgtccagcccctggcacacacttccctgccaggcctcagcctctagcataagctccagagagccagggcccatcagtttctctctgtggatttgtatctcagctccatgatgccttgggctttctgtctcctcaacaagagtgcagcttgctgaatgtcagctgcctgagagagctggggcctgacttactagggcattaaatcctaagaggtcctactgaggtgtggcaggatcacaggccagtggaaaaagggcaggtcagatgggcaaggcccaggactttcagattaactgagaggatatcgaggccaagcatggcagggggaaggtcagtgggtgtcaagagacccaggtctgaccccggatgtttgctccatgtgacaaaagcaggcctgtctcaggaccttttcttttcttttttccttctttttttttttgacacggagtttcgctcttgttgtccaggctagagtgcaatggcatgatcccagctcaccgcaacgtctacctcccaggttcaaatcattctcttgcctcagactcccgagtagctgggattacaggcacatgccaccatgcctggctaattttgtatatttagtagaaacagggtttcaccatgctggccatgctggtctcgaactcctgacctcaggtgttccacctacctcagcctcccaaagtgctggggttacaggtgtgagccatcgcgcctggccaggacctttgtttcttatctacatattggaagatttggtcctgatgtcctttgaggcttctttagctctagttctctgacacttcagcctatatcacagctaacttcttcagtctcatctattccttatgctccagcccctggcaatttgcctcaagatgggggtttgaaaataactttacctgactcaaggagtgtctggagcacctcctagtctaagtctgcaagctccagttcttgcctaaaaccatgccagtggccacccttgggctcagacagctctgggccttttgaccacaagccagcccctcgccctctctgtggcatagtcttctctgccccaggactgcagggcggcttcctccaaggcttccaaggctcaaaagaaatttggctccatccaagaaggctccagctcccctactggcccctggctcaggcccacacccctggccaggcccagagagtgtgtctcaggagaattcaatggctctagagagacacacagaaagtttggcatttggaaatttcaaggatgtatgtatgctcacgtatggagcaggttgtcctggtccctgggtgcagggaagtgggctgcagggaagtggattggaggggagcttgaggaatataaggagcgggggtggagactcaggctatggacaaggacagccccaaggttgggaagacctggccttagtcgtcctcagcctaggggcagggcagtgaagaaagctctccccgctcctgctgtaatgacccagagtagcctccccaggccggcatcttatgtgtgtcttccaccatcctcatggtggcacttttctaggcctgtctcccagcattgtgcaaggctcggaagagaaccaggaagtgaaactgggtgaaaacagaaagctcaatggatgggctaggttcccagatcattagggcagagtttgcacgtcctctggtcactggaatccacccagcccacgaatcatctccctcttgaaggattttatttctactgggttttggaacaaactcctgctgagaccccacagccagaaactgaaagcagcagctccccaaagcctggaaaatccctaagagaaggcctggggcaggaagtggagtgacaggggacaggtagagagaagggggcccaatggccagggagtgaaggaggtggcgttgctgagagcagtctgcacatgcttctgtctgagtgcaggaaggtgttccagggtcgaaattacacttctcgtacctggagacgctgtttgtgggagcactgggctcatgcctggcacacaataggtctgcaataaaccatggttaaatcct

SEQ ID NO: 34890 - protein, 345 aa, Artificial Sequence
  derived and/or modified sequence
MSSSLTRSSAVTARGSAPKPRCSCCWPLRSRTSRRCWWPSGATVSLPRPLCHEAPRARSARAGLPNRLPTALFNSGFWLKRSSYEEQPTVRFQHQVLLVALLGPESDGFLAWSTFPAFNRLQGDRLRVPLVSTREEDRNQDGKTDMLHFKLELPLQSTEHVLGVQLILTFSYRLHRMATLVMQSMAFLQSSFPVPGSQLYVNGDLRLQQKQPLSCGGLDARYNISVINGTSPFAYDYDLTHIVAAYQERNVTTVLNDPNPIWLVGRAADAPFVINAIIRYPVEVISYQPGFWEMVKFAWVQYVSILLIFLWVFERIKIFVFQNQVVTTIPVTVTPRGDLCKEHLS

SEQ ID NO: 34891 - DNA, 1038 bp, Artificial Sequence
  derived and/or modified sequence
atgagcagcagcctgaccagaagcagcgccgtgaccgccagaggcagcgcccccaagcccagatgcagctgctgctggcccctgagaagcagaaccagcagaagatgctggtggcccagcggcgccaccgtgagcctgcccagacccctgtgccacgaggcccccagagccagaagcgccagagccggcctgcccaacagactgcccaccgccctgttcaacagcggcttctggctgaagagaagcagctacgaggagcagcccaccgtgagattccagcaccaggtgctgctggtggccctgctgggccccgagagcgacggcttcctggcctggagcaccttccccgccttcaacagactgcagggcgacagactgagagtgcccctggtgagcaccagagaggaggacagaaaccaggacggcaagaccgacatgctgcacttcaagctggagctgcccctgcagagcaccgagcacgtgctgggcgtgcagctgatcctgaccttcagctacagactgcacagaatggccaccctggtgatgcagagcatggccttcctgcagagcagcttccccgtgcccggcagccagctgtacgtgaacggcgacctgagactgcagcagaagcagcccctgagctgcggcggcctggacgccagatacaacatcagcgtgatcaacggcaccagccccttcgcctacgactacgacctgacccacatcgtggccgcctaccaggagagaaacgtgaccaccgtgctgaacgaccccaaccccatctggctggtgggcagagccgccgacgcccccttcgtgatcaacgccatcatcagataccccgtggaggtgatcagctaccagcccggcttctgggagatggtgaagttcgcctgggtgcagtacgtgagcatcctgctgatcttcctgtgggtgttcgagagaatcaagatcttcgtgttccagaaccaggtggtgaccaccatccccgtgaccgtgacccccagaggcgacctgtgcaaggagcacctgagctag

SEQ ID NO: 34892 - DNA, 1038 bp, Artificial Sequence
  derived and/or modified sequence
atgtcctcatccctgacgagatcttcagccgtgaccgcaagggggtccgctccaaagcctcggtgctcatgctgttggcctttacggtccagaactagccgccgctgctggtggccttctggtgcaacggtgagcctgcctaggcctctgtgccacgaggcccccagagcccgctcggctagggcgggcctacctaacagactccccaccgctctgtttaatagcggcttttggctgaagcggagctcatatgaggagcagcccacagtgcgtttccaacaccaggtacttctcgtggccttactcgggccagaatctgacggttttctggcctggtccacattcccagcattcaaccgcctacagggggaccgactgcgggtgccactggtgagcacaagagaagaagatcgtaaccaggacggtaaaactgatatgcttcactttaaactggagctgcctctccaatcaaccgaacacgtgcttggagtccaactgatccttactttttcatatcgcctgcacagaatggccactctcgttatgcaaagcatggcgtttcttcagtcaagttttcccgtgccagggagccagctctatgtaaacggcgacctcagactccagcaaaagcagcctctcagctgcggaggactggacgccaggtacaacatttcagttattaatggaacctccccctttgcttacgactacgatctcacacacatcgtggccgcctaccaggagaggaatgttacaacagtgttgaatgatcctaaccccatttggctcgtgggacgcgcagctgatgccccttttgttattaacgccatcattcgataccctgtggaagtgatctcctatcagcccggtttttgggaaatggtaaaattcgcttgggtgcagtacgtgagcatactgttgatcttcctgtgggtctttgaaagaattaagattttcgtgttccagaatcaggtggtaactactatccctgttaccgtgacaccacgaggcgacctgtgcaaggaacacctgtcttag

SEQ ID NO: 34893 - DNA, 1038 bp, Artificial Sequence
  derived and/or modified sequence
atgagcagcagcctgaccaggagcagcgctgtgacagcccggggcagcgcccccaagccccgctgcagctgctgctggcccctgcggagcaggaccagccgccgctgctggtggcccagcggggccaccgtgtccctgccccggcccctgtgccacgaggccccccgggcccggagcgcccgggccggcctgcccaaccggctgcccacagccctcttcaacagcggcttctggctgaagaggagcagctatgaggagcagcccaccgtgcgcttccagcaccaggtgctgctggtggccctgctgggccctgagagtgatggcttcctggcctggagcaccttccctgccttcaaccggctgcagggcgaccggctgcgggtgcccctggtgtccacccgggaggaggacaggaaccaggacggcaagacagacatgctgcacttcaagctggagctgcccctgcagagcacagagcacgtgctgggcgtgcagctgatcctgaccttctcctaccgcctgcacaggatggccaccctggtgatgcagagcatggccttcctgcagagcagcttccctgtgcccggcagccagctgtatgtgaatggagacctgcggctgcagcagaagcagcccctgagctgtggcggcctggatgcccgctacaacatcagcgtcatcaatggcaccagcccctttgcctatgactatgacctgacccacatcgtggccgcctaccaggagagaaatgtgaccaccgtgctgaatgaccccaaccccatctggctggtgggccgggcagcagatgcccccttcgtcatcaatgccatcatccgctaccctgtggaggtgatctcctaccagcccggcttctgggagatggtgaagtttgcctgggtgcagtatgtgtccatcctgctgatcttcctgtgggtgtttgagcgcatcaagatctttgtgttccagaaccaggtggtgaccaccatccctgtgacagtgacccccaggggggacctgtgcaaggagcacctgtcctag

SEQ ID NO: 34894 - DNA, 1038 bp, Artificial Sequence
  derived and/or modified sequence
atgagcagcagcctgacccggagcagcgccgtgaccgcccggggcagtgcacccaaaccaagatgctcatgttgttggccattgagatctagaacgtctcggcgctgttggtggccaagcggagccactgtgagtttgcctcggcctctctgtcacgaggcacctcgtgcccgatcagcgcgagccgggcttcccaataggctgcctactgctttatttaactccggcttttggctcaagcgctccagttatgaggaacaacccaccgtgcgctttcaacatcaggtactgctggtagccctgctgggacccgagagcgatggctttcttgcttggagcacttttccggcatttaacagattgcagggggacaggcttcgggtgccgttggtttcaacacgagaagaggaccgcaatcaggatggaaagactgacatgctccactttaaattggagctgccactgcagagcactgaacacgttctgggggtgcagctcatcctgaccttcagttaccgtcttcatagaatggcgacgctagtgatgcaatcaatggcttttctgcaatcctcattcccagtccccggctctcagctgtatgtgaatggagaccttagactccaacagaagcaaccgctgtcctgtggcggtctggatgctcgctacaatatctctgtaattaatggaacaagtccattcgcctacgactatgacctgacgcatattgttgcggcttatcaggagcgcaatgttacaaccgtgttgaatgacccaaaccccatctggctggtgggcagagcagccgacgcaccctttgttatcaacgccatcatccgctatcctgtggaagttatttcttaccagcctggattctgggaaatggtcaaatttgcttgggtgcagtacgtttctattctcctgatcttcctgtgggtcttcgaacgcataaagatatttgtctttcagaaccaggtcgtgaccacgatacccgtgacggtgacccctcgcggggacttgtgcaaagaacatttgagctag

SEQ ID NO: 34895 - DNA, 1038 bp, Artificial Sequence
  derived and/or modified sequence
atgtcctccagtctgactaggagttcagcagtgaccgctcgtggctccgcgccaaaacctcggtgcagctgttgctggcccttacgctcccgtactagccggcgatgctggtggccctccggagcaaccgtgtcgctacctcggcctctctgccacgaggccccacgggctcgaagtgccagagccggtctaccgaatcgattgccaaccgcgcttttcaattcaggcttttggctgaagaggtcctcctacgaagagcaacctactgtgagatttcagcatcaggtgctcctggtggccctactgggcccagaatctgatggctttttagcctggagcacatttcccgctttcaacaggctacaaggagacagattgagggtgcctctagtgtcaactagggaggaggatcgcaaccaggatggcaaaactgacatgcttcattttaagctggaattaccacttcaatccacagagcacgttctgggggtccagctgattcttacctttagctaccgacttcatcggatggccactctggttatgcagagtatggccttcctgcagtcgagctttcctgtgccaggcagtcagttgtatgtgaacggcgatctgcgcctgcagcagaaacagcccctgtcttgtggtgggcttgatgcgagatataacatctctgtaattaatggcacgtccccatttgcatatgactacgatctaactcacattgtcgctgcataccaggagcgaaatgtgactactgtccttaatgacccgaatccgatctggttggtcgggcgagccgcagacgcaccatttgtaatcaatgcaatcatcagatatccagtggaagtgatttcttatcagcctggattctgggagatggtgaagtttgcatgggtacaatacgtgagcatcctgctgatcttcctgtgggtgtttgagcgaattaagattttcgtttttcagaaccaggtggtgacaaccattcctgtcactgtgactcctcgaggtgatctctgtaaggaacacctctcatag

SEQ ID NO: 34896 - DNA, 2952 bp, Artificial Sequence
  derived and/or modified sequence
ggctcgcggagtgcctgcgagcggtgctcatggcgctctatgagctcttctctcacccggtcgagcgcagttaccgcgcggggctctgctccaaagccgcgctgttcctgctgctggccgctgcgctcacgtacatcccgccgctgctggtggccttccggagccacggtgagcctgccccggccgctgtgccacgaggctccccgggcgcgctcggccagggccggcctccctaaccgcctccctaccgccctctttaactcagggttttggctgaagcggagcagctacgaggagcagccgaccgtgcgcttccaacaccaggtgctgctcgtggccctgctcggacccgaaagcgacgggttcctcgcctggagcacgttccccgccttcaaccggctgcaaggggatcgcctgcgcgtcccgctcgtttcgactagagaagaagacaggaaccaggatgggaagacggacatgttacattttaagctggagcttcccctgcagtccacggagcacgttctcggtgtgcagctcatcctgactttctcctatcgattacacaggatggcgaccctcgtgatgcagagcatggcgtttctccagtcctcctttcctgtcccgggatcccagttatacgtgaacggagacctgaggctgcagcagaagcagccgctgagctgtggtggcctagatgcccgatacaacatatccgtgatcaacgggaccagcccctttgcctatgactacgacctcacccatattgttgctgcctaccaggagaggaacgttaccaccgtcctgaatgatcccaaccccatctggctggtgggcagggccgcagatgctccatttgtgattaatgctatcatccgataccctgtggaagtcatttcttatcagccaggattctgggagatggtaaagttcgcctgggtgcagtatgtcagcatcctgcttatcttcctctgggtgtttgaaagaatcaagatcttcgtgtttcagaatcaggtggtgaccaccattcctgtgacagtgacgccccggggagacttgtgtaaggagcacttatcctagaaaggccatttctgaagactcagcaggaccgtggctgcctcattgtcatcttctgggaacatcttaggaccttttgaaagagcccagcggacacctgcgggcttgtgtgcttttccctcagagacaacggttctttccggttttgctctacacagttccgtatcttcagagctcctgcagaattgtcagggactagtttgtggaaaggtctgagagttcctggaggctataattagctttttgggttttccttctttgccttagcgttgaatttcaggagaaaattgcagtcagttcagacatcttggaaagagtcccatctctggtcaagcagagacttttcctctgttgaactgaggaacacactgtgcatttctaccttctgttgtgagccactcttactcttttcagggctctcttgtgacaaacatgccaatcactagcactttgcacccctgggcttctccatttcccattcacagctttgatttccagagctgaggcctttaactggagacctggaggggcagggcccaagggcaagggccgcattagcacaggcaatcagggagggccgctgaaggacacttggaccgtccacctgccccagcccaacagtcagtcatctgtcatcagctcagctgagcagccctggatctttgccgtactgtgactgggctctttgccctatttttccctctgtctgtgcccctggatggcaggctgaagtcagaggggctgtttcattctcagccccctcagcagcactgggggaagaaagcattgtcacaacaggttctttctggccctcacccaacagcctgggcacttggccctcctcctccttgacagccctcccccttcctgcaaaggacaggggcgacaggggttggtgttgggattggctcccgctgcctgacaaccacaagtttatttggaaggctagcgggaagcccagcggctggcgtttcccttgactaaggaacagggtgcccatcagagtggggcgggcagctttgggaaggacacaagaagcagtaagagtgtaaagaggatgctggcctgggcaggccagtccagcctggccactagcagaataccaagcagtccagtggattaccctcgtggctaagcaagtgtctgcaggagcagagatggctggaaggggcctctgcacacggaagatggcttgttcagcccattcacctcctgaggatgtgggcagtctcctccaagaacacatggagctgcttcctgatcccaagcaggtcattgccactggaaggacatggccccggtgatccatgcttcatgcccacccagaaacacacccctcagtgtgtgcctcagtttactttggagatcagttgtcgtttttagtgctcctttaggcttactaaaacagttttggaaacaaagctattttgaagtattcaagcagaggaattccctaacactgacccccttgtctttttttaatattcaggctgttttatatgcctaaatttttttcttaagatctaaacgaaaaatagtttcttgtttaaattcacataaggcaatgagatatggaaagatgacaagatacgtataaacattggtttgcattttattaaattattctaatgcaaatcttgtataaagaacccatgatgttttgtaactttctaattaaaatgttcaaaatgaggccgagcatggtggttcattcctgtaatctcaacactttgggaggccaaggtgggaggatcacttgagcccaggagcttgaggctgcagtgtgctatgattgcaccactgtactgtagcctgggtgacagagtgagaccctatctgttaaaataaataaataaataaataaaaaagtcaaaatgg

SEQ ID NO: 34897 - DNA, 204 bp, Artificial Sequence
  derived and/or modified sequence
atgcggaagccccaggccggcaccggcgaggccgcccgggacccctctctgcggccggctcgcacagtgcttgtgggcgatcaagacgagtatacagctgccgagaataagagcccacgcggcaccctctgcccaaccggagaacagcggattcacgcccgggaggatgcctgcattttcagccgcctgttctccgagaagtag

SEQ ID NO: 34898 - protein, 316 aa, Artificial Sequence
  derived and/or modified sequence
MALYELFSHPVERSYRAGLCSKAALFLLLAAALTYIPPLLVAFRSHGFWLKRSSYEEQPTVRFQHQVLLVALLGPESDGFLAWSTFPAFNRLQGDRLRVPLVSTREEDRNQDGKTDMLHFKLELPLQSTEHVLGVQLILTFSYRLHRMATLVMQSMAFLQSSFPVPGSQLYVNGDLRLQQKQPLSCGGLDARYNISVINGTSPFAYDYDLTHIVAAYQERNVTTVLNDPNPIWLVGRAADAPFVINAIIRYPVEVISYQPGFWEMVKFAWVQYVSILLIFLWVFERIKIFVFQNQVVTTIPVTVTPRGDLCKEHLS

SEQ ID NO: 34899 - DNA, 951 bp, Artificial Sequence
  derived and/or modified sequence
atggccctgtacgagctgttcagccaccccgtggagagaagctacagagccggcctgtgcagcaaggccgccctgttcctgctgctggccgccgccctgacctacatcccccccctgctggtggccttcagaagccacggcttctggctgaagagaagcagctacgaggagcagcccaccgtgagattccagcaccaggtgctgctggtggccctgctgggccccgagagcgacggcttcctggcctggagcaccttccccgccttcaacagactgcagggcgacagactgagagtgcccctggtgagcaccagagaggaggacagaaaccaggacggcaagaccgacatgctgcacttcaagctggagctgcccctgcagagcaccgagcacgtgctgggcgtgcagctgatcctgaccttcagctacagactgcacagaatggccaccctggtgatgcagagcatggccttcctgcagagcagcttccccgtgcccggcagccagctgtacgtgaacggcgacctgagactgcagcagaagcagcccctgagctgcggcggcctggacgccagatacaacatcagcgtgatcaacggcaccagccccttcgcctacgactacgacctgacccacatcgtggccgcctaccaggagagaaacgtgaccaccgtgctgaacgaccccaaccccatctggctggtgggcagagccgccgacgcccccttcgtgatcaacgccatcatcagataccccgtggaggtgatcagctaccagcccggcttctgggagatggtgaagttcgcctgggtgcagtacgtgagcatcctgctgatcttcctgtgggtgttcgagagaatcaagatcttcgtgttccagaaccaggtggtgaccaccatccccgtgaccgtgacccccagaggcgacctgtgcaaggagcacctgagctag

SEQ ID NO: 34900 - DNA, 951 bp, Artificial Sequence
  derived and/or modified sequence
atggccctgtatgaactcttttcccaccctgttgagcggagctacagggctggcctttgttcgaaagctgccctgttcctcctgctggccgctgccttgacctatatccccccactgctggtggctttcagaagtcacggcttttggctaaaacgttcatcctatgaagagcagcccaccgtaagattccagcatcaggtactccttgtcgcgctcctgggccccgaaagcgatggattcctcgcctggagcacattcccagccttcaacagactacaaggggaccgtcttagggtgccgctggtctctacacgcgaggaggaccgaaaccaagacggaaaaacagatatgctgcattttaagctggagctgcccctgcagtctaccgagcacgtactgggggtccaattgattctcacattcagctatcgactgcacagaatggctactctggtgatgcaatctatggctttcctgcagtcaagtttccctgtgccgggcagccagctatacgtgaatggtgatctgaggcttcagcaaaagcagcccctctcatgtggaggactggatgcgcgttacaatatttctgtgataaacggtacaagtccttttgcatacgattatgatttgacccacattgtcgccgcataccaagaaagaaacgtgaccaccgtgttgaacgatccaaacccaatctggctggtcgggcgcgcggccgatgctccattcgtcataaatgctatcattagataccctgtggaggttattagttatcagccaggattttgggaaatggtgaagtttgcctgggtccagtatgtgagtatcctgttaatctttctctgggtgttcgagaggatcaaaatctttgtctttcaaaatcaggtggtcacaacaatccctgtcacagtgactccacggggcgatctgtgcaaagagcatctcagctag

SEQ ID NO: 34901 - DNA, 951 bp, Artificial Sequence
  derived and/or modified sequence
atggccctgtatgagctgttcagccaccctgtggagaggagctacagagctggcctgtgcagcaaggccgccctcttcctgctgctggccgccgccctgacctacatcccccccctgctggtggccttccgcagccacggcttctggctgaagaggagcagctatgaggagcagcccaccgtgcgcttccagcaccaggtgctgctggtggccctgctgggccctgagagtgatggcttcctggcctggagcaccttccctgccttcaaccggctgcagggcgaccggctgcgggtgcccctggtgtccacccgggaggaggacaggaaccaggacggcaagacagacatgctgcacttcaagctggagctgcccctgcagagcacagaacatgtgctgggcgtgcagctgatcctgaccttctcctaccgcctgcacaggatggccaccctggtgatgcagagcatggccttcctgcagagcagcttccctgtgcccggcagccagctgtatgtgaatggagacctgcggctgcagcagaagcagcccctgagctgtggcggcctggatgcccgctacaacatcagcgtcatcaatggcaccagcccctttgcctatgactatgacctgacccacatcgtggccgcctaccaggagagaaatgtgaccaccgtgctgaatgaccccaaccccatctggctggtgggccgggctgctgatgccccctttgtgatcaatgccatcatccgctaccctgtggaggtgatctcctaccagcccggcttctgggagatggtgaagtttgcctgggtgcagtatgtgtccatcctgctgatcttcctgtgggtgtttgagcgcatcaagatctttgtgttccagaaccaggtggtgaccaccatccctgtgacagtgacccccaggggggacctgtgcaaggagcacctgtcctag

SEQ ID NO: 34902 - DNA, 951 bp, Artificial Sequence
  derived and/or modified sequence
atggccctgtacgagctgttcagccaccccgtggagcggagctaccgggccggactctgttccaaggctgcccttttcctgctcctcgccgctgccctcacctacattcctccactccttgtagcattccggtcccacggcttttggctcaaacggtcatcatacgaggagcagccgactgtacgttttcaacaccaggtactgctcgttgccctgttgggaccagaatctgacggatttctggcatggtcgacattccccgcctttaaccgtcttcaaggcgacagactgagagttcccctggtgtcaacacgggaagaggaccggaaccaagatggtaagacagacatgctccattttaagctcgaattgccactgcagtcaactgaacacgtactcggggttcagctgattctgacattctcatacagactccacaggatggctacactggtgatgcagagcatggcttttcttcagtcatcttttccagtcccaggatctcagctatacgttaacggcgacctgagactgcaacagaaacaacccttaagctgcggcggtctggacgccagatataatatttccgtcattaatggcacatccccattcgcgtacgattacgatctgactcacatcgtggctgcctaccaggagaggaatgtcacaactgtgctcaatgatcccaatcccatatggcttgtgggccgcgccgcggatgctccctttgtgattaatgccataattcggtatccagtggaggtgatcagctatcagcctggattctgggagatggtgaagttcgcctgggtccagtacgtctccattttgttgatcttcctttgggttttcgaaaggattaagatattcgtatttcagaaccaggtagttacaacaattccggtcactgtcactccacgcggagacctatgtaaagaacacttgtcctag

SEQ ID NO: 34903 - DNA, 951 bp, Artificial Sequence
  derived and/or modified sequence
atggccctttacgaattattctcgcaccctgtggaacgcagctaccgcgctgggttatgttccaaggcggctttgtttttattactcgcggctgccctcacctatattccaccactactcgtggccttccgatctcacggcttttggctcaagaggtcctcttacgaagaacaacccaccgtgcgatttcagcatcaagttctgttggtggcactgcttggtccggaatccgacggctttctcgcctggtcaacattccccgcttttaataggcttcagggcgaccgactgcgggtcccacttgtttcaactcgcgaagaggataggaaccaggacggcaagaccgatatgctgcattttaagctggaactgcccttgcagagcactgaacatgtactaggtgtgcaactaatcctcactttcagttaccggttacaccgcatggccaccctcgtcatgcaatctatggccttcctgcaatcttctttccccgtacctggctcccagctttacgtgaatggcgaccttcggttgcagcagaaacagcccttgagttgtggcggactggatgctagatataatattagcgtcatcaacggaacaagccccttcgcttacgactacgacttgacacacatcgtcgccgcttaccaggaacggaacgtgacgactgtgctgaacgaccctaaccctatctggctggtgggcagggccgctgacgcccctttcgtcatcaatgccattatacgataccccgttgaagtaatcagctatcaacctggcttttgggagatggtgaaattcgcatgggtgcagtacgttagtattctgctcatcttcctatgggtatttgagcgaataaagatctttgtattccagaaccaagtcgttaccaccatccccgtgactgtcacacctcggggtgatttgtgcaaggaacacctgtcatag

SEQ ID NO: 34904 - DNA, 2889 bp, Artificial Sequence
  derived and/or modified sequence
gatggcaaccaggagaagccaaacttggtcccccggctcgcggagtgcctgcgagcggtgctcatggcgctctatgagctcttctctcacccggtcgagcgcagttaccgcgcggggctctgctccaaagccgcgctgttcctgctgctggccgctgcgctcacgtacatcccgccgctgctggtggccttccggagccacgggttttggctgaagcggagcagctacgaggagcagccgaccgtgcgcttccaacaccaggtgctgctcgtggccctgctcggacccgaaagcgacgggttcctcgcctggagcacgttccccgccttcaaccggctgcaaggggatcgcctgcgcgtcccgctcgtttcgactagagaagaagacaggaaccaggatgggaagacggacatgttacattttaagctggagcttcccctgcagtccacggagcacgttctcggtgtgcagctcatcctgactttctcctatcgattacacaggatggcgaccctcgtgatgcagagcatggcgtttctccagtcctcctttcctgtcccgggatcccagttatacgtgaacggagacctgaggctgcagcagaagcagccgctgagctgtggtggcctagatgcccgatacaacatatccgtgatcaacgggaccagcccctttgcctatgactacgacctcacccatattgttgctgcctaccaggagaggaacgttaccaccgtcctgaatgatcccaaccccatctggctggtgggcagggccgcagatgctccatttgtgattaatgctatcatccgataccctgtggaagtcatttcttatcagccaggattctgggagatggtaaagttcgcctgggtgcagtatgtcagcatcctgcttatcttcctctgggtgtttgaaagaatcaagatcttcgtgtttcagaatcaggtggtgaccaccattcctgtgacagtgacgccccggggagacttgtgtaaggagcacttatcctagaaaggccatttctgaagactcagcaggaccgtggctgcctcattgtcatcttctgggaacatcttaggaccttttgaaagagcccagcggacacctgcgggcttgtgtgcttttccctcagagacaacggttctttccggttttgctctacacagttccgtatcttcagagctcctgcagaattgtcagggactagtttgtggaaaggtctgagagttcctggaggctataattagctttttgggttttccttctttgccttagcgttgaatttcaggagaaaattgcagtcagttcagacatcttggaaagagtcccatctctggtcaagcagagacttttcctctgttgaactgaggaacacactgtgcatttctaccttctgttgtgagccactcttactcttttcagggctctcttgtgacaaacatgccaatcactagcactttgcacccctgggcttctccatttcccattcacagctttgatttccagagctgaggcctttaactggagacctggaggggcagggcccaagggcaagggccgcattagcacaggcaatcagggagggccgctgaaggacacttggaccgtccacctgccccagcccaacagtcagtcatctgtcatcagctcagctgagcagccctggatctttgccgtactgtgactgggctctttgccctatttttccctctgtctgtgcccctggatggcaggctgaagtcagaggggctgtttcattctcagccccctcagcagcactgggggaagaaagcattgtcacaacaggttctttctggccctcacccaacagcctgggcacttggccctcctcctccttgacagccctcccccttcctgcaaaggacaggggcgacaggggttggtgttgggattggctcccgctgcctgacaaccacaagtttatttggaaggctagcgggaagcccagcggctggcgtttcccttgactaaggaacagggtgcccatcagagtggggcgggcagctttgggaaggacacaagaagcagtaagagtgtaaagaggatgctggcctgggcaggccagtccagcctggccactagcagaataccaagcagtccagtggattaccctcgtggctaagcaagtgtctgcaggagcagagatggctggaaggggcctctgcacacggaagatggcttgttcagcccattcacctcctgaggatgtgggcagtctcctccaagaacacatggagctgcttcctgatcccaagcaggtcattgccactggaaggacatggccccggtgatccatgcttcatgcccacccagaaacacacccctcagtgtgtgcctcagtttactttggagatcagttgtcgtttttagtgctcctttaggcttactaaaacagttttggaaacaaagctattttgaagtattcaagcagaggaattccctaacactgacccccttgtctttttttaatattcaggctgttttatatgcctaaatttttttcttaagatctaaacgaaaaatagtttcttgtttaaattcacataaggcaatgagatatggaaagatgacaagatacgtataaacattggtttgcattttattaaattattctaatgcaaatcttgtataaagaacccatgatgttttgtaactttctaattaaaatgttcaaaatgaggccgagcatggtggttcattcctgtaatctcaacactttgggaggccaaggtgggaggatcacttgagcccaggagcttgaggctgcagtgtgctatgattgcaccactgtactgtagcctgggtgacagagtgagaccctatctgttaaaataaataaataaataaataaaaaagtcaaaatgg

SEQ ID NO: 34905 - protein, 869 aa, Artificial Sequence
  derived and/or modified sequence
MGRSNSRSHSSRSKSRSQSSSRSRSRSHSRKKRYRSRSRTYSRSRSRDRMYSRDYRRDYRNNRGMRRPYGYRGRGRGYYQGGGGRYHRGGYRPVWNRRHSRSPRRGRSRSRSPKRRSVSSQRSRSRSRRSYRSSRSPRSSSSRSSSPYSKSPVSKRRGSQEKQTKKAEGEPQEESPLKSKSQEEPKDTFEHDPSESIDEFNKSSATSGDIWPGLSAYDNSPRSPHSPSPIATPPSQSSSCSDAPMLSTVHSAKNTPSQHSHSIQHSPERSGSGSVGNGSSRYSPSQNSPIHHIPSRRSPAKTIAPQNAPRDESRGRSSFYPDGGDQETAKTGKFLKRFTDEESRVFLLDRGNTRDKEASKEKGSEKGRAEGEWEDQEALDYFSDKESGKQKFNDSEGDDTEETEDYRQFRKSVLADQGKSFATASHRNTEEEGLKYKSKVSLKGNRESDGFREEKNYKLKETGYVVERPSTTKDKHKEEDKNSERITVKKETQSPEQVKSEKLKDLFDYSPPLHKNLDAREKSTFREESPLRIKMIASDSHRPEVKLKMAPVPLDDSNRPASLTKDRLLASTLVHSVKKEQEFRSIFDHIKLPQASKSTSESFIQHIVSLVHHVKEQYFKSAAMTLNERFTSYQKATEEHSTRQKSPEIHRRIDISPSTLRKHTRLAGEERVFKEENQKGDKKLRCDSADLRHDIDRRRKERSKERGDSKGSRESSGSRKQEKTPKDYKEYKSYKDDSKHKREQDHSRSSSSSASPSSPSSREEKESKKEREEEFKTHHEMKEYSGFAGVSRPRGTFHDDRDDGVDYWAKRGRGRGTFQRGRGRFNFKKSGSSPKWTHDKYQGDGIVEDEEETMENNEEKKDRRKEEKE

SEQ ID NO: 34906 - DNA, 2610 bp, Artificial Sequence
  derived and/or modified sequence
atgggtaggagtaactcacggtcgcattcatcacgctcaaagtctcggtctcaaagctcatctagaagtagaagtcgctcccactcccggaaaaaaagatatagatcccgaagtcgaacatacagcaggtccagatctcgagacaggatgtactcccgggactataggagagattacaggaacaaccggggaatgcgcaggccatacgggtacagggggcgcggcaggggatattaccaaggaggcgggggtcggtaccacagaggaggctaccgtcccgtgtggaaccgaaggcactccagatccccgcggagaggtaggtcgcggtctagaagccctaaacgaagatcagtgtccagccagcgctctagatctcggagtaggagatcctacagatccagccgctcgcctagatctagcagtagcaggtcctcctccccatattcgaaatccccagtgtcgaagagaagggggtcccaggagaagcagacgaagaaggctgagggagagccccaggaggaaagtccccttaaaagtaaatcccaagaagaaccaaaggacacattcgagcacgacccttctgaaagcatagatgaattcaacaagtcctcagccacatcaggggatatctggccgggcctgagcgcttacgacaattccccgagatcaccgcactccccatcaccaattgccacgcctccatctcagtcgtcctcttgttctgacgcccccatgctcagtacggtgcactcagccaagaacactccctcacagcatagccatagcatacaacatagcccagagagatcaggctcaggtagcgtggggaacggaagctctcgatacagcccgagccagaatagtcctattcaccacattccaagtcggaggtcccccgcaaaaacaattgctccacaaaatgccccaagggacgaatcgagggggcggtccagcttctatccggatggaggcgaccaggagacagccaaaactggtaagtttctaaagcgcttcactgatgaagagagcagggtttttctactggatcgagggaatacaagggataaggaggccagtaaagaaaagggatcagaaaaaggtagggctgagggcgaatgggaggaccaagaagctctggactatttcagcgacaaggagagcggaaagcagaaattcaacgattcagagggagacgacacggaagagaccgaggattaccgacagttcaggaaatccgtgttggcagaccaaggaaaatcttttgctactgcgtcacacaggaatacagaggaagaaggcctcaaatataagagcaaagtgtccctaaaaggaaatcgcgagagtgatgggttcagggaagaaaaaaattacaaactgaaagagactggctacgtggttgagcgcccatcaactacgaaagacaagcataaggaggaggataagaactcagagcggataacggtcaagaaggaaacacagagtcctgaacaagtcaagagcgaaaaacttaaagatttatttgattatagtccccccctacacaaaaatttagacgctcgggagaagtctacattcagggaggaaagccccctgcgaatcaagatgatcgcatctgattctcaccgacccgaggtgaagctgaagatggcacctgtgcctctggatgattcgaacagacctgcttcattgaccaaagataggctgctggctagcacccttgttcactctgtgaagaaagagcaggaattcagatcgattttcgatcatatcaagctgccacaggccagcaagtcaacttctgagtctttcatccaacacatagtgtcgctagtccaccacgtaaaggagcaatatttcaagagcgccgcgatgaccctcaacgagaggtttacatcataccagaaggccacagaagagcactcaactcggcaaaagtctcctgagatccatagaaggatcgacatcagtcccagtaccctcagaaagcataccaggctggcgggggaagagagggtctttaaagaagagaatcagaagggtgacaagaagctgcgctgcgacagcgccgatcttcgccacgatattgatcggcggcgtaaagagcggtctaaagagcggggggactcgaaggggagccgagagtcttcaggctcccgtaagcaggagaagacccccaaagactacaaggagtataagtcttacaaagacgacagcaagcacaagagagaacaagatcacagtcgctcctcctccagctctgccagccccagcagcccgagtagtagagaggaaaaggagagcaagaaagaacgcgaggaggagtttaaaacgcaccacgaaatgaaggaatattctggctttgctggcgtgtcaagacctagaggaactttccatgacgaccgggatgacggagtcgactattgggctaagcggggaaggggccggggtacctttcagaggggaagagggcgctttaatttcaagaagtctggaagtagtcctaagtggacacacgacaagtatcaaggagatggaatagtagaagatgaagaggagactatggaaaacaacgaggagaagaaggatcgtcgaaaggaggaaaaagagtag

SEQ ID NO: 34907 - DNA, 2610 bp, Artificial Sequence
  derived and/or modified sequence
atggggaggtctaactcgcgaagccactcctctcgcagcaagagccggagccaatcaagctctaggtctagatcccgaagccattctcgcaaaaagcgttatcgatctcgatctagaacatactcacggagccggagtagagaccgcatgtactcgcgcgattacaggagagactaccgaaacaatcgtggtatgaggagaccctatggatacagaggtaggggtcggggttactaccagggaggtggtggtagatatcatcgtggtggataccgacccgtgtggaacaggcgccacagccggtccccacggcgcggacgctctagaagtcgcagcccaaaaagaagatccgtcagcagccagcggagtcggtcacggagtcgacgctcctacagaagcagccgctccccacgatcttctagctcccgctccagtagcccatattccaagtcgcccgtgagtaaaaggaggggcagtcaggaaaagcagaccaaaaaagctgaaggagaacctcaggaagagtcccctctgaagtccaaaagccaggaagaaccaaaagacacctttgaacatgacccttctgagtccatcgacgagttcaacaagagcagcgcgacgtccggcgatatttggccgggcctttccgcctacgataattcccccaggtctccgcattctccctctcccatagccacccccccctctcagagcagcagctgctctgacgcacctatgctatccacggtgcatagtgcaaaaaacacccctagtcagcactctcactctattcagcactcacctgagagatcgggttcaggaagtgtcggcaatggttcatccagatactccccttctcagaatagcccgatccaccacatccccagccggaggtctcccgcgaaaacaattgcccctcagaacgccccccgcgacgaaagcaggggtcggtcatctttttatcccgacggcggggaccaggagacggcgaagaccgggaagttccttaaacgattcaccgatgaagaatccagagtgttcctgctcgatagaggcaatacccgagacaaggaagcctctaaggagaaaggctctgaaaagggtcgtgctgagggcgagtgggaggaccaggaagctctggattatttctccgacaaagagtcagggaagcagaagttcaatgacagtgagggcgacgataccgaagagacagaagactaccgccaatttcggaagtccgtcttggcggatcaaggaaagtctttcgcaaccgcctcccatagaaacacggaggaggaagggctcaaatataagagtaaggtttccctgaaagggaaccgtgagtcggacggatttagggaggagaagaattacaaactgaaagaaactgggtatgttgtggagcgcccgagtactactaaggataagcacaaggaggaggacaagaattcagagcgcattactgtgaagaaagaaacccagtccccagaacaggtgaagtcggagaaattgaaagacctatttgactacagccctccacttcacaaaaatttggacgctcgggaaaaatctactttccgcgaggaatcgcccctgagaatcaaaatgatcgcatctgacagccaccggccggaagtaaagctcaagatggctcccgtacctctggatgactctaatcgtccagcatctcttactaaagaccggctgcttgcatcaactcttgtacattcagtaaagaaagaacaagagtttagatccatctttgaccacattaaactgccccaagctagcaaatcgacctccgagagtttcatccagcatatcgtttcactggtgcaccacgtgaaggaacaatactttaagagtgccgctatgacacttaatgagcgcttcacaagctaccagaaggctaccgaggagcactccaccagacagaagtcccccgagattcaccggaggatcgatatctccccgtcaacactacgaaagcacacgaggctggccggggaagagagggttttcaaggaggaaaaccaaaaaggagacaaaaagttgcggtgtgactccgctgatctgagacatgatatcgaccgcaggcgtaaagagcgaagtaaagagcggggcgatagcaagggcagcagagagtccagcggatctagaaagcaggaaaaaacacctaaggattacaaggagtacaagtcctataaggatgactctaaacacaaaagagaacaggaccactctcgcagttcgtcttcttctgccagccctagctctccgagctccagggaggagaaggagtctaagaaggagcgagaggaggagttcaagactcaccatgagatgaaagagtacagcgggtttgcaggggtgagtcgaccgcgagggacatttcatgatgacagggatgatggggtggactactgggccaaacggggccgaggtcgtggcacttttcagaggggaagaggtaggttcaattttaaaaagagcggcagtagcccgaagtggactcatgacaaataccagggcgatgggatcgtcgaggatgaagaggagaccatggaaaataatgaggaaaaaaaagacaggcgtaaagaggagaaggaatag

SEQ ID NO: 34908 - DNA, 2610 bp, Artificial Sequence
  derived and/or modified sequence
atgggccgcagcaacagccgcagccacagcagccgcagcaagagccgcagccagagcagcagccgcagccgcagccgcagccacagcaggaagaagcgctaccgcagccgcagcaggacctacagccgcagccgcagccgggacaggatgtacagccgggactaccgccgggactacagaaacaacagaggcatgaggcggccctacggctaccggggccggggccggggctactaccagggcggcggcggccgctaccacagaggaggctacagacctgtgtggaacagaagacacagccgcagcccccggcggggccgcagccgcagccgcagccccaagagaagatctgtgagcagccagaggagccgcagccgcagccgccgcagctaccgcagcagccgcagccccaggagcagcagcagccgcagcagcagcccctacagcaagagccctgtgtccaagaggcggggcagccaggagaagcagaccaagaaggccgagggggagccccaggaggagagccccctgaagagcaagagccaggaggagcccaaggacacctttgaacatgaccccagcgagagcattgatgagttcaacaagagcagcgccaccagcggggacatctggccaggcctgagcgcctatgacaacagccccaggagcccccacagccccagccccatcgccaccccacccagccagagcagcagctgcagtgatgcccccatgctgagcacagtgcacagcgccaagaacacccccagccagcacagccacagcatccagcacagccctgagaggagcggcagcggctctgtgggcaatggcagcagccgctacagccccagccagaacagccccatccaccacatccccagccgccgcagccctgccaagaccatcgccccccagaatgcccccagagatgagagccggggccgcagcagcttctacccagatggaggagaccaggagacagccaagacaggcaagttcctgaagcgcttcacagatgaggagagcagggtcttcctgctggaccggggcaacacccgggacaaggaggccagcaaggagaagggcagcgagaagggccgggcagagggggagtgggaggaccaggaggccctggactacttcagtgacaaggagagcggcaagcagaagttcaatgattctgaaggagatgacacagaggagacagaggactaccggcagttcaggaagtctgtgctggccgaccagggcaagagctttgccacagccagccacaggaacacagaggaggagggcctgaagtacaagagcaaggtgtccctgaagggcaaccgggagagtgatggcttccgggaggagaagaactacaagctgaaggagaccggctacgtggtggagcggcccagcaccaccaaggacaagcacaaggaggaggacaagaacagcgagcgcatcaccgtgaagaaggagacccagagccctgagcaggtgaagtctgagaagctgaaggacctgtttgactacagcccccccctgcacaagaacctggatgcccgggagaagagcaccttccgggaggagagccccctgcgcatcaagatgattgccagtgacagccacaggcctgaggtgaagctgaagatggcccctgtgcccctggatgacagcaacagacctgccagcctgaccaaggaccggctgctggccagcaccctggtgcacagcgtgaagaaggagcaggagttccgcagcatctttgaccacatcaagctgccccaggccagcaagagcaccagcgagagcttcatccagcacatcgtgtccctggtgcaccacgtgaaggagcagtacttcaagtctgctgccatgaccctgaatgaacgcttcaccagctaccagaaggccacagaggagcacagcacccggcagaagagccctgagatccacagaagaattgacatcagccccagcaccctgaggaagcacacccggctggccggggaggagagggtcttcaaggaggagaaccagaagggggacaagaagctgcgctgtgacagcgctgacctgcggcatgacatcgacagaagaaggaaggagaggagcaaggagcggggggacagcaagggcagccgggagagcagcggcagcaggaagcaggagaagacccccaaggactacaaggagtacaagagctacaaggatgacagcaagcacaagcgggagcaggaccacagccgcagcagcagcagcagcgccagccccagcagccccagcagccgggaggagaaggagagcaagaaggagcgggaggaggagttcaagacccaccacgagatgaaggagtacagcggctttgctggggtgtcccggccccggggcaccttccatgatgacagagatgatggagtggactactgggccaagaggggccggggccggggcaccttccagaggggccggggccgcttcaacttcaagaagagcggcagcagccccaagtggacccatgacaagtaccagggagatggcatcgtggaggatgaggaggagaccatggagaacaatgaggagaagaaggacaggaggaaggaggagaaggagtag

SEQ ID NO: 34909 - DNA, 2610 bp, Artificial Sequence
  derived and/or modified sequence
atgggccggagcaacagccggagccacagcagccggagcaagagcaggtcacaaagcagtagcaggtcacgctctaggtcccactcaaggaaaaaaaggtacagatccagatcccggacctactcccggtctcgtagccgcgacagaatgtactcacgcgactatcggcgggactacagaaataatcggggcatgcggaggccatacggctaccgaggccgcggtcgtgggtactaccagggaggcggaggccgataccatcggggcggatatagacccgtctggaaccgccgacatagtaggtcacccaggcggggccgatctcggagccgttcacccaaacggcggtcagtctcttcccaacggtctcggagtcgcagccggcggagttaccggtcctcaaggagcccacgctcttcctcatcccgctcatcctctccatactctaaaagcccagtctctaaacggagaggcagtcaagaaaaacagacaaaaaaggccgagggcgagccgcaggaagaatcaccgctaaagagtaaatcccaagaggagccaaaagatacgtttgaacacgatcccagcgaatcgatcgatgagttcaataagtcatctgcaacctccggggatatctggcctggtctctcggcctacgacaacagcccacgcagcccacatagcccatctccaatagcaacacctccttctcaatcctcttcctgctcagacgcgcccatgctcagtaccgtccactcagcaaagaacacaccctcacagcacagccattcaatccagcattcccctgaaaggagtgggtctgggtcggtcgggaatggctccagccgctattctccttcccaaaattcacccattcatcacattccctcccgacggagtcctgcgaagactatcgccccccagaacgcccctagagatgaaagcagaggacgttcatctttttaccccgatggcggcgatcaggagacggccaaaaccggtaagtttctgaaaaggttcaccgatgaagagagtcgggtctttctgctcgaccggggtaacaccagggacaaggaggcatcaaaggagaagggtagcgagaagggtagagccgagggggaatgggaggatcaggaagctctcgactacttctcagataaggaatctggcaagcagaaatttaacgactccgagggagacgacaccgaggaaaccgaagactatcgtcaattcagaaagtcagtgcttgctgatcagggaaagtcgttcgccaccgcttcccaccgcaacacagaagaggaaggattgaaatacaagtccaaagtttcattgaagggtaatagagaatcagatggctttagagaggagaagaattacaagctcaaggagaccggatacgtcgttgaaagaccttcaaccactaaagataagcacaaagaggaagataagaatagtgaaaggatcaccgtcaaaaaggagactcagtcccccgagcaggttaagtccgagaagctgaaggatttattcgattactctcccccgctgcacaaaaacctggacgcccgggaaaaatccacgttcagagaggagtctccgctcagaatcaaaatgattgcctctgactcccaccgcccagaggttaaattgaagatggctcctgtccccctggacgattccaaccggccagcgtccctgactaaggacaggctcctggcaagtaccctcgttcactcggtcaagaaggaacaggaatttcgttctatctttgaccatatcaagttaccacaagcgagcaagagtacatcagaaagcttcatacaacacattgtctctcttgtgcatcacgtaaaggagcagtacttcaaaagcgctgccatgactctcaatgaaagattcacctcgtaccagaaggccaccgaggaacactccactaggcagaagtccccagaaattcataggcgcatcgacatatccccctctacattgaggaaacacacccgccttgccggggaagagcgggtattcaaggaagagaaccagaaaggggataaaaaattgaggtgcgacagcgcggacctccgccatgacattgacagacggcgtaaggagagatccaaggagagaggcgacagtaaagggagccgcgagtcatcggggtcacggaaacaggagaaaacaccaaaggactacaaggagtataaatcttataaagacgattcaaaacataagcgggagcaggatcactctcggtccagttccagctctgcctccccctcgtcccctagctcccgggaagaaaaagagagcaagaaggagagggaggaagaatttaaaactcatcacgagatgaaagaatactctggtttcgcaggggtgagtaggccccgggggacgttccacgatgatcgcgatgacggcgtggattactgggctaaacggggcaggggccgtggcacatttcagagaggcaggggcagattcaattttaagaagtccggcagttcccccaagtggacgcatgacaaataccaaggcgatggcattgtcgaggacgaagaggaaacaatggagaacaatgaagagaagaaggacaggcgtaaagaggagaaggagtag

SEQ ID NO: 34910 - DNA, 2610 bp, Artificial Sequence
  derived and/or modified sequence
atgggccggagcaacagccggagccacagcagccggagcaagagcagaagccagtcctctagccggtcgcggtcaagaagccatagccgcaagaaacgctaccgaagtaggagccgcacctacagtaggagccgaagtagagaccggatgtacagccgcgattatagacgcgattaccgaaataatcgagggatgcggcgaccctatgggtacagaggcagggggcgaggatactaccagggaggaggcggtagatatcaccgcgggggctataggcctgtctggaacagaagacactcccggtcccctcgccggggccgatcaagatcgcgcagtcccaagagaaggagcgtctctagccagcgctctaggtcaagaagtcgcaggtcttaccggagttcgcgctctccccgctcaagtagttctcgctcttctagcccttattcaaaaagccccgtttccaaacgaagaggctcccaggagaagcagaccaaaaaggctgaaggggaacctcaggaagaatctccgcttaagtcaaaatcgcaagaggaacctaaagacactttcgagcatgacccctcagagtccatagacgagttcaacaaatcctcggcaacttcaggcgatatctggcctggattaagcgcctatgataactcaccgcgcagtccacactctcctagcccaatcgctactcctccatcacagagtagcagttgcagtgacgctcctatgctatctaccgtgcactcggccaaaaatacccccagccagcatagccatagcattcaacacagtccagagcgctctggatccgggagtgtcggaaatgggtcttcaagatattcgccctcccagaatagtcccattcaccacataccttctcggcggtcccccgcgaagacaatagcaccgcagaacgctcctcgcgacgagagtcgggggagaagttctttctatccagatggcggcgatcaagagactgccaagacaggcaagttcctcaaacgctttacagatgaggaatcaagggttttcttgctcgataggggcaacactagagataaggaagccagtaaagaaaaggggtccgagaagggacgagctgaaggtgaatgggaagatcaggaggcattagattacttctcagataaggaaagcgggaaacagaagtttaatgattccgaaggagatgatacggaggagactgaggattacagacaatttcgcaagtctgtgctagctgatcaaggaaaaagcttcgcaaccgcctctcaccgtaacaccgaagaggagggtctgaaatacaagtcaaaggtgtcgctgaaaggaaaccgggagtcagacggatttagggaggaaaagaactacaaattgaaagaaactggttacgttgtggagagaccctcgacaacgaaggataagcataaggaggaggacaaaaactcagaacgcatcaccgttaagaaggaaacgcagtctcctgagcaggtcaaaagtgagaaactgaaggacctattcgactactctcccccactgcacaaaaatctcgacgccagggagaaatcaacttttcgggaagaaagcccactaagaataaaaatgatcgccagtgacagtcatcggcctgaggtcaagctgaagatggcacccgtaccactcgacgattcaaataggcctgccagcttgacgaaggatcggcttctggcgagtactttggtgcactctgtgaagaaagaacaggagttcaggagcatcttcgaccacattaagctcccacaggcatctaaatctacatccgagtccttcatacagcacatcgtaagcctggtgcaccatgtgaaggaacagtactttaaaagtgccgccatgaccctcaacgaacgcttcacctcataccagaaggcgaccgaagagcactccacgaggcaaaaatcccctgaaatccaccgacggattgacatctctccgtcaacgcttcggaagcacaccagactggcaggggaagaacgcgtgttcaaggaagagaatcagaaaggggataagaaattgaggtgtgattccgctgacctgaggcatgatattgataggcgtaggaaagaacggagtaaggagaggggagattcaaagggctcaagggagtcttctggtagtagaaaacaagagaagacacccaaagattacaaggagtacaagtcctacaaagatgactcaaagcacaagagagaacaggatcatagccggtcttcctcatcctccgcttcaccatctagtccctcaagccgagaggaaaaagagtcgaaaaaagagcgggaggaagagtttaagacccatcacgaaatgaaggagtactccggatttgccggcgtgtcaagaccccgtggaacctttcacgatgatcgtgatgatggggtcgactattgggccaagcgtggcagaggtagaggaacatttcagcggggccgcggccgcttcaactttaagaagagcggaagctctccaaaatggacgcatgacaagtatcagggagacgggattgtggaggacgaggaagagacaatggaaaataatgaagagaaaaaagacagaaggaaggaagaaaaggaatag

SEQ ID NO: 34911 - DNA, 2610 bp, Artificial Sequence
  derived and/or modified sequence
atgggcagatctaactcccgcagtcactcctcgcggagtaagtctcgttcacaaagctcctcgcggagtcggagtagatcccatagcaggaaaaaaagataccgtagtcgatctagaacctactcgcggtcccgatctcgcgatcggatgtatagccgcgactaccgtagggattaccgaaataatagaggtatgaggcggccatacggctatcgtggcaggggacggggttattaccaggggggaggcggtcgctatcataggggaggttataggcccgtatggaacaggcggcattccaggagcccacgcaggggcaggtcccggtctcggagtcctaaacgacgtagcgtgagttcacagcggtcacggtctagatctcgtaggtcctacaggtcatcaaggtcccctaggtccagcagtagcaggtcaagttccccttactctaaaagccctgttagcaaaaggcggggttcacaagagaagcaaacaaaaaaagctgaaggggaaccgcaagaagagtctcctctcaaaagcaaatcccaagaggagcccaaagacacctttgaacacgatccttccgagtccattgacgagtttaacaagagcagtgcaacaagtggagacatatggcctggactgagcgcctacgacaattcccccagatctcctcattccccttctcccattgccactcctccctctcagtctagttcttgtagtgacgcccctatgttgagcaccgtgcattcagccaaaaacactccgagccaacattcccactcaattcagcacagtcctgagcggagtggttccgggtcagtgggcaatgggtcgagtcgatacagtccctcccagaactcccctattcatcacatcccaagtaggcgctctcccgctaagaccattgcgcctcagaacgcccctcgggacgaaagtcgcggacgttcctcattttatcctgacggtggcgaccaggagactgctaagaccggaaagttcctgaaacgctttactgacgaagaaagtcgcgtgttcttgctcgatagaggcaatacgagagacaaggaagcaagcaaagagaagggcagcgagaaggggcgtgctgaaggcgaatgggaggaccaagaagcactggattatttttcagacaaagagtctgggaaacagaagttcaatgatagcgagggcgatgacactgaggaaactgaagactaccgccaattccgtaaaagtgtgttggccgaccaaggtaagagttttgccacagcgtcccatagaaacacggaggaagaaggcctcaaatacaaatccaaggtgtcattgaaggggaatcgtgagagcgacggctttcgtgaggagaaaaattataagctcaaggagacagggtatgtcgttgagcgtcctagtactacgaaagataaacacaaggaagaagacaagaacagcgaaaggattaccgtgaagaaagagacacagtctcctgaacaggtaaagtctgaaaaattgaaggacctcttcgattatagtcccccactacacaaaaatttagatgctcgggaaaagtccacatttcgggaggaatcaccactccgcatcaagatgatcgcatctgactcacacaggcctgaagtgaaactgaagatggcccctgttccgctcgacgactcaaatcgccctgccagtctcaccaaagatcgattactggcctcaacactggttcactcggttaaaaaggagcaggagtttaggtcaatttttgaccacataaaattgccgcaggcgtctaaaagcacctctgagtcatttattcagcacattgttagcctcgtccatcacgtgaaggaacagtacttcaagtccgctgccatgacacttaacgagagattcacgtcttaccaaaaggcaaccgaagagcatagcacacgccagaaaagccccgagatccacagacgtatcgatatatcaccttctacactccgtaaacatacgagactagccggagaagaacgcgttttcaaagaagaaaaccagaagggggataagaagctgcgatgtgacagcgcagacttgaggcacgacatcgaccggcgacgaaaagagagaagcaaggaacggggagacagcaaggggtcacgggagtcaagtggctctagaaagcaggagaagactcctaaggactacaaggagtataagtcttataaagatgactctaaacataagcgggagcaggatcacagccgctcatcctcctcatcagcgagcccctcttcacccagttcacgggaagagaaagagagcaaaaaagagagagaagaggagtttaagacacaccacgagatgaaagagtattccggctttgccggtgtgagtaggccgagagggacatttcatgatgaccgcgatgatggggtggattactgggctaaaagggggagagggaggggcacatttcagcgaggcagggggagattcaacttcaaaaaaagtggaagcagcccgaaatggacccacgataaatatcagggggacggtattgtggaggacgaggaagaaacaatggaaaataacgaggagaaaaaagataggcggaaagaggagaaggagtag

SEQ ID NO: 34912 - DNA, 2610 bp, Artificial Sequence
  derived and/or modified sequence
atggggaggagcaattcgcggagccactccagcaggtcaaagagcagatcgcagagttccagccgcagccgttcacgaagccacagcaggaaaaagagatacagatccagatcccgcacctactcccggtctcgctctagggaccgcatgtactctcgcgactatcgtagggattaccgcaacaacagaggaatgcggagaccgtacggatacagggggaggggaaggggttattaccaaggcggtgggggacggtaccaccgaggaggctatcggccagtgtggaataggagacacagtcgtagtccacgcaggggtagaagcagaagccgcagccccaagagacgctccgtgagttctcagagatctagatccagatcccggcgtagttacagaagctccagaagccctcgcagctcttcctctcgttcctctagtccatatagcaaatccccggtgtctaagagacgaggctcccaggagaaacagacaaagaaagccgagggtgagccccaagaggagagtcccctcaaatctaagtcacaggaagaacctaaggatacattcgaacacgacccatcagagagcatagatgaattcaacaagagcagcgccacctctggcgatatttggccgggactgtctgcgtacgacaattcccccagaagccctcactctccgtcccccatagctaccccaccttcacagtcctcttcctgtagcgacgcacccatgctctcaactgtccactccgcgaagaatacccccagccagcattcacacagtatacaacatagtccagagagaagtggctcgggctccgtgggcaatgggtccagtcggtactctccttcacaaaattcccccatacatcacatccctagcaggaggtcccctgctaagaccatcgcccctcagaatgccccacgggacgaatcacgaggaaggagttcattttacccagacgggggtgatcaggaaacggccaagaccggaaaatttttgaagagattcaccgacgaggaatctagggtgttccttctcgacagggggaacacaagggataaagaagcctctaaggaaaaaggcagtgaaaaagggagggcggagggcgagtgggaggatcaggaggctctggattacttctcagataaggagtccggtaaacaaaaatttaacgactcggagggcgatgacactgaagagaccgaagattatcggcagttccgcaaaagcgtccttgcagaccagggaaagagttttgcaacggcaagccatcgaaacacagaagaggaggggctgaaatataagagtaaagtgtctctcaaaggcaatcgggaatctgacgggtttagggaggaaaagaattacaagttgaaagaaacaggatacgtggtcgaacgaccatctaccacaaaggacaaacataaggaggaggacaagaattccgagagaatcacagtgaagaaggagactcaatcccctgaacaggttaaatcggagaagctgaaggacttgttcgactattctcccccactccataagaatttggatgcccgtgaaaaaagtacctttagggaagaatcgccactacgaataaaaatgattgcgtccgactcccataggcccgaggtcaagctgaagatggcacccgtgccactagatgatagcaatcgtcctgccagcttaactaaagatcgcctgctcgcatcgacactcgtgcacagtgtgaaaaaggagcaagaatttcggtcgatctttgatcatatcaaattgccccaggcctcaaaatctacctctgagtccttcatacaacatatagtctcactggtccaccatgtgaaggaacagtacttcaagtctgcggctatgacactgaatgagagattcaccagctaccagaaagctacagaggagcactccacacgccaaaagtcgccagagatacatcgccgaattgatatttctcccagcactcttagaaaacacacacgcttggcaggcgaggagagggtgtttaaggaggagaaccagaaaggggacaaaaaactgaggtgcgatagcgcagacctgcgccacgatatcgatcgcagacgaaaggagaggtcaaaggaacgcggagatagcaagggaagccgcgagtcatccgggtcccgaaagcaagaaaagacaccgaaggactacaaggagtacaaatcatacaaagacgactcgaagcataaacgggagcaagatcacagcaggtctagctccagctcagcatctccatccagcccatcgtctagggaagagaaggagagcaaaaaagagcgtgaagaagaatttaaaacgcatcacgagatgaaggaatatagcgggttcgctggcgtgagtagacccaggggtacatttcacgacgaccgagacgatggtgtggattactgggcaaagcgtggcaggggacgcggtactttccaaaggggcagggggagattcaactttaagaaaagcggttcctcccccaagtggactcatgataagtatcagggcgacggcattgtggaggatgaggaagaaacgatggaaaataatgaagaaaaaaaagatcgtcgcaaagaagaaaaggaatag

SEQ ID NO: 34913 - DNA, 7110 bp, Artificial Sequence
  derived and/or modified sequence
gccccagatcggaagtgacggagacgtgctagcgcgtcgaaggtagctctatggttttcctcgcgttcttgagtcgggaaatggccgctgtgtggttgcaacggagataaattcccggaaccgcgattcggcgtgtcaggaattcgaatttagagtttaatttctcagagcattctctccaggaagaatttttacagtatctcaaagacttcacttgacttcttgatcctgcataaaaccaaggagaaaagaaatgggtcgctccaattctagatcacattcttcaaggtcaaagtctagatcacagtctagttctcgatcaagatcaagatctcattctagaaagaagcgatacaggtctcgttccagaacatattcaaggtctcgtagtagagatcgtatgtattctagagattatcgtcgcgattacagaaataatagaggaatgagacgaccttatgggtacagaggaaggggtagagggtattatcaaggaggaggaggtagatatcatcgaggtggttatagacctgtctggaatagaaggcactctaggagtcctagacgaggtcgttcacgttccaggagtccaaaaagaagatccgtttcttctcaaagatccagaagcagatctcgccggtcatatagatcttctaggtctccaagatcatcctcttctcgttcttcatccccatatagcaaatctcctgtttctaaaagacgagggtctcaggaaaaacaaaccaaaaaagctgaaggggaaccccaagaagagagtccgttgaaaagtaaatcacaggaggaaccgaaagatacatttgaacatgacccatctgagtctatcgatgaatttaataagtcatcagccacatccggtgatatttggcctggcctttcagcttatgataatagtcctagatcaccccatagtccttcacctattgctacaccacctagtcagagttcatcttgctctgatgctcccatgctcagtacagttcactctgcaaaaaatactccttctcagcattcacattccattcagcatagtcctgaaaggtctgggtctggttctgttggaaatggatctagtcgatacagtccttctcagaatagtccaattcatcacatcccttcacgaagaagtcctgcaaagacaatcgcaccacagaatgctccaagagatgagtctaggggccgttcctcgttttatcctgatggtggagatcaggaaactgcaaagactgggaagttcttaaaaaggttcacagatgaagagtctagagtattcctgcttgataggggtaataccagggataaagaggcttcaaaagagaaaggatcagagaaagggagggcagagggagaatgggaagatcaggaagctctagattacttcagtgataaagagtctggaaaacaaaagtttaatgattcagaaggggatgacacagaggagacagaggattatagacagttcaggaagtcagtcctcgcagatcagggtaaaagttttgctactgcatctcaccggaatactgaggaggaaggactcaagtacaagtccaaagtttcactgaaaggcaatagagaaagtgatggatttagagaagaaaaaaattataaacttaaagagactggatatgtagtggaaaggcctagcactacaaaagataagcacaaagaagaagacaaaaattctgaaagaataacagtaaagaaagaaactcagtcacctgagcaggtaaagtctgaaaagctcaaagacctctttgattacagtccccctctacacaagaatctggatgcacgagaaaagtctaccttcagagaggaaagcccacttaggatcaaaatgatagcgagtgattctcaccgtcctgaagtcaaactcaaaatggcacctgttcctcttgatgattctaacagacctgcttccttgactaaagacaggctgcttgctagtacacttgtccattctgtcaagaaggagcaagaattccgatccatctttgaccacattaagttgccacaggccagcaaaagcacttcagagtcatttattcaacacattgtgtccttggttcatcatgttaaagagcaatacttcaagtcagctgcaatgaccctaaacgagcggttcacttcgtatcagaaagccactgaagaacatagtactcggcaaaagagccctgaaatacacaggagaattgacatctcaccaagtaccctgaggaagcatacccgtttagcaggggaagagagagtttttaaagaagaaaatcaaaagggagataaaaaattaaggtgtgactctgctgaccttcggcatgacattgatcgccgtagaaaagaaagaagtaaagaacggggagattccaagggctccagggaatccagtggatcaagaaagcaggaaaaaactccaaaagattacaaggaatacaaatcttacaaagatgacagtaaacataaaagagagcaagatcattctcgatcttcatcctcttcagcatcaccttcttctcccagttctcgagaagaaaaggagagtaagaaggaaagagaagaagaatttaaaactcaccatgaaatgaaagaatactcaggctttgcaggagttagccgaccacgaggaacctttcatgacgacagagatgatggtgtggattattgggccaaaagaggaagaggtcgtggtacttttcaacgtggcagagggcgctttaacttcaaaaaatcaggtagcagtcctaaatggactcatgacaaataccaaggggatgggattgttgaagatgaagaagagaccatggaaaataatgaagaaaagaaggacagacgcaaggaagaaaaggaataataaatatgaagtaagattacaacagagcagaacttgcacccaccattttttttacctgatttttgttttcaaataagaatgtaagcattttacttaaattttactgtttgcaagtagtctatagaaattttgttttaagtcttcaaatatcttgagaaatagtagactgtatgttgaaaattgtactgaaataaagtagaaaattgttacgtaccatatttgtaactatcaacttttaaaacttttaacgtttttgttacatgcattgtaattctgctttgtctataagatatggtcaagtacagctctgtgaaagttctgattctcttccttccctgtttgtcaatgttttattctgaagtaaacgttagctctacatataaatcctggaacagaaattgtttatagagactacactaattattttaactgtatacatctgtttaatttgaacacactacatcgtagggtgactgatttttgaagtataccacagacaaaaagttgttactatggtaaactaagctagtttaacacttgagcaaatgcttaagaaggaattaaaaaaaaaaagctttgccaatagctaaaaagtacaagctattaaaaatcagattgaaaagttttgagaaaatgttatttttactgaaagcaagcagtggcctataaagaacattcttaggagccttttctatttgcgttcaaaactgtgtgttctctttctattcctatttgatagtttgagtcatggtcttagatattagctatttgtgagaggaaactggtttgtaacaatactgcaaatagaaaccccatttctactgaacatcctagttttaaacagaagaaaaactgtaatcctggggttggtatgtaggaggtctatcctgcagaataagttgatacattagtacctgatttcatatcttacatatttatttgagctgaacattagtttgtagtgtaactattagtaaaaatagagaaacacagcatactgttcattaatagtattttaaaaaaattgtttttcaaatgtcaccaataaaagttttggcaggaagcttgttgcggcattgatctaacctttttcccccccatttcagttgcagtttttgtagaatggctttttctttttcctcttaagagttctattcttcaggtagataatttttcaaatgtgaattatcttttgtgtctatattgatagctcttaaaggagtgaaaatctaaaatagtaaatttcaatgttaagtgtctgctttatgggcatatataaaagtagacacatttcatttgttaatttagttgtgtgtgtgtgttaaaaggagctaatgcttattctgttaatgtaaacttttgaagatcttaagtgtattgctctttcatcttaaacactttcgaggatttgcagtgcgtctagcacctagattacagccaggaacattggttaagaactgttggaaacaaaactaaaagcaaactcaacatatgtgatgtttatggccctcagatccttagtattgtgtgattttcccccgttaacatgtctttctaaaattgtctattaaagcagaggaaatacctgccaaaggaagtatgtattgcattaatcagggcataactaatattctcctgttcagaataatacttatttacgtgtgaaagcaacatggatgtgattcccaacacagaattttcatgacccttttattgtatacaaataaataccataacagttacttggttagacatcaaatctgtgtgcatgactatgtgcttatccacttaagacaataggtaaaaggggatctgagaaattatgtaatagggagtgggaataaaactacttaattcctgtgggcaggttatattttaagttcaaatgcattgctttaacctttggttacttttattctgttaaacagaattgaagaaagagtattataccagagtgtagtaggctagggtgattgtaagaactctgtaatagaatgtcattgtggatgttacctttttcagatccaagcatataaaaagcctgtatattttttaaaaacacatcttaactccacgctttacgatattataaaagttgaatggttcctcttggtaaggatatttgcttacaagtgctaggaaataactcactgatacctgcgttaacatactttgttttgcctagagaggggcaataaaaatgaaccaaaggatatttccagaaaggattaagaaagctgtttaagaaggccatgactctttaggtgtgtatgtgtacctttcagcatcctaggaatttttatactaaaagcaaaatgttttttccagttagtcttcttcaaggaattactattgttccttttgtcacaggtaaaatcagtgttgggaattataatttgagaaaaatattacccagtaacattgaatgtagatggctaaacgattcttactcagtgtgatgtataatgatgcaacagggacccttgtaaattgtcatacgccaataaaatgtcacaagtaataactgctgttgtttgtttacctgtgtctatttcacacatcttatttctgtggcctattttagaatatcagcgcatctgttaggaagattactggtgtggtaaggcttgataaatgctttataaactccctcaaacctttctttactgtttttttgttttgtcttgtttttgtttttgtttttgtttttgtttttgtttttgtttttcccttgtctcccctgggaaaatgggaaattttacagttggtaaatctaagccaaaattattttgaaataaaggaattctggatgtccagtttagtcctcgttttcttacgttaatctgggaccttatcacccataatatggtgattacttctctttctaaaaacatagtagctagtaaataagtaaaaagaattgtcttttcattcactttaagtaagatgtggtataattcttaccatgtgccatcctgtcagttttaacaaagcattttcacagaaatttgtgtactaagacaaactgacacattttgactcatacaaatggcaaattagtccttaaaaattctgtgagagaaataactctgtgtgtacatacatatgcatgtaaagtgttgtgtaagatcattggtagcttaattatactggataattgtaatgttatatacaaatttcttatataaaagtatgctgcattattaacatttgtttaacttttcttatttttctttttctgggtttcaactggaatcccattggtggggatgtaccttaagtttccttgtggaataatagactttcacatccagaaagagaagttcagaggcctttctcaatttacagagttgaagaggaaaggcaaatggaggaataaacttcattgtcattgggattaatttggctagactcaatctcttgagccttaaaatgagaaagtaatatccattacatgtttagagttctcaaatagttgatactattattaaatgtttcaaattttattggggtagatactaaaaattagtacactgtcctaatgaagtttaaatgaacaagttttacatttcttaggattcaggaatatatggaatctagttgtatttaattgacttgagagccacagagattgtgttgatttatgagctggactcctattgttttagaaacatgcagtaatgattaacttgtgtcaatgatggtaatgagaccaaacttgtacatttaattaagggtaccagttctttttatgttactagactataccttggcctttaaaaatgaatctcactgattaaagagaacaggcattattaggatagcattccaccacaactagaaacattcaaataatgtgtcttaattgtaatctgtatataggaaaatttttcctatggatatttttggtgttttaccacagtgaactgatttgtagcacttatgaagtgcagaaggtaatattcttgaaaatagaaaaaggttgggtgagcaggctttaatgcctttcccccaagaatatacatcgaatttttcttaatcttttggggttggccagcttccagatttcattaataatgagctctgcctttaataaaagtacatgatcatagctacactgtatgtttaggtggtgtgaaatgatttataatcacagcttgaactgtgtttgcttggtactgtcatagtgattacaaatttcatggaatgcgaagagcaacaataaataaaaaataccactcaccctc

SEQ ID NO: 34914 - DNA, 2610 bp, Artificial Sequence
  derived and/or modified sequence
atgggtcgctccaattctagatcacattcttcaaggtcaaagtctagatcacagtctagttctcgatcaagatcaagatctcattctagaaagaagcgatacaggtctcgttccagaacatattcaaggtctcgtagtagagatcgtatgtattctagagattatcgtcgcgattacagaaataatagaggaatgagacgaccttatgggtacagaggaaggggtagagggtattatcaaggaggaggaggtagatatcatcgaggtggttatagacctgtctggaatagaaggcactctaggagtcctagacgaggtcgttcacgttccaggagtccaaaaagaagatccgtttcttctcaaagatccagaagcagatctcgccggtcatatagatcttctaggtctccaagatcatcctcttctcgttcttcatccccatatagcaaatctcctgtttctaaaagacgagggtctcaggaaaaacaaaccaaaaaagctgaaggggaaccccaagaagagagtccgttgaaaagtaaatcacaggaggaaccgaaagatacatttgaacatgacccatctgagtctatcgatgaatttaataagtcatcagccacatccggtgatatttggcctggcctttcagcttatgataatagtcctagatcaccccatagtccttcacctattgctacaccacctagtcagagttcatcttgctctgatgctcccatgctcagtacagttcactctgcaaaaaatactccttctcagcattcacattccattcagcatagtcctgaaaggtctgggtctggttctgttggaaatggatctagtcgatacagtccttctcagaatagtccaattcatcacatcccttcacgaagaagtcctgcaaagacaatcgcaccacagaatgctccaagagatgagtctaggggccgttcctcgttttatcctgatggtggagatcaggaaactgcaaagactgggaagttcttaaaaaggttcacagatgaagagtctagagtattcctgcttgataggggtaataccagggataaagaggcttcaaaagagaaaggatcagagaaagggagggcagagggagaatgggaagatcaggaagctctagattacttcagtgataaagagtctggaaaacaaaagtttaatgattcagaaggggatgacacagaggagacagaggattatagacagttcaggaagtcagtcctcgcagatcagggtaaaagttttgctactgcatctcaccggaatactgaggaggaaggactcaagtacaagtccaaagtttcactgaaaggcaatagagaaagtgatggatttagagaagaaaaaaattataaacttaaagagactggatatgtagtggaaaggcctagcactacaaaagataagcacaaagaagaagacaaaaattctgaaagaataacagtaaagaaagaaactcagtcacctgagcaggtaaagtctgaaaagctcaaagacctctttgattacagtccccctctacacaagaatctggatgcacgagaaaagtctaccttcagagaggaaagcccacttaggatcaaaatgatagcgagtgattctcaccgtcctgaagtcaaactcaaaatggcacctgttcctcttgatgattctaacagacctgcttccttgactaaagacaggctgcttgctagtacacttgtccattctgtcaagaaggagcaagaattccgatccatctttgaccacattaagttgccacaggccagcaaaagcacttcagagtcatttattcaacacattgtgtccttggttcatcatgttaaagagcaatacttcaagtcagctgcaatgaccctaaacgagcggttcacttcgtatcagaaagccactgaagaacatagtactcggcaaaagagccctgaaatacacaggagaattgacatctcaccaagtaccctgaggaagcatacccgtttagcaggggaagagagagtttttaaagaagaaaatcaaaagggagataaaaaattaaggtgtgactctgctgaccttcggcatgacattgatcgccgtagaaaagaaagaagtaaagaacggggagattccaagggctccagggaatccagtggatcaagaaagcaggaaaaaactccaaaagattacaaggaatacaaatcttacaaagatgacagtaaacataaaagagagcaagatcattctcgatcttcatcctcttcagcatcaccttcttctcccagttctcgagaagaaaaggagagtaagaaggaaagagaagaagaatttaaaactcaccatgaaatgaaagaatactcaggctttgcaggagttagccgaccacgaggaacctttcatgacgacagagatgatggtgtggattattgggccaaaagaggaagaggtcgtggtacttttcaacgtggcagagggcgctttaacttcaaaaaatcaggtagcagtcctaaatggactcatgacaaataccaaggggatgggattgttgaagatgaagaagagaccatggaaaataatgaagaaaagaaggacagacgcaaggaagaaaaggaataa

SEQ ID NO: 34915 - DNA, 2610 bp, Artificial Sequence
  derived and/or modified sequence
atgggcagaagcaacagcagaagccacagcagcagaagcaagagcagaagccagagcagcagcagaagcagaagcagaagccacagcagaaagaagagatacagaagcagaagcagaacctacagcagaagcagaagcagagacagaatgtacagcagagactacagaagagactacagaaacaacagaggcatgagaagaccctacggctacagaggcagaggcagaggctactaccagggcggcggcggcagataccacagaggcggctacagacccgtgtggaacagaagacacagcagaagccccagaagaggcagaagcagaagcagaagccccaagagaagaagcgtgagcagccagagaagcagaagcagaagcagaagaagctacagaagcagcagaagccccagaagcagcagcagcagaagcagcagcccctacagcaagagccccgtgagcaagagaagaggcagccaggagaagcagaccaagaaggccgagggcgagccccaggaggagagccccctgaagagcaagagccaggaggagcccaaggacaccttcgagcacgaccccagcgagagcatcgacgagttcaacaagagcagcgccaccagcggcgacatctggcccggcctgagcgcctacgacaacagccccagaagcccccacagccccagccccatcgccaccccccccagccagagcagcagctgcagcgacgcccccatgctgagcaccgtgcacagcgccaagaacacccccagccagcacagccacagcatccagcacagccccgagagaagcggcagcggcagcgtgggcaacggcagcagcagatacagccccagccagaacagccccatccaccacatccccagcagaagaagccccgccaagaccatcgccccccagaacgcccccagagacgagagcagaggcagaagcagcttctaccccgacggcggcgaccaggagaccgccaagaccggcaagttcctgaagagattcaccgacgaggagagcagagtgttcctgctggacagaggcaacaccagagacaaggaggccagcaaggagaagggcagcgagaagggcagagccgagggcgagtgggaggaccaggaggccctggactacttcagcgacaaggagagcggcaagcagaagttcaacgacagcgagggcgacgacaccgaggagaccgaggactacagacagttcagaaagagcgtgctggccgaccagggcaagagcttcgccaccgccagccacagaaacaccgaggaggagggcctgaagtacaagagcaaggtgagcctgaagggcaacagagagagcgacggcttcagagaggagaagaactacaagctgaaggagaccggctacgtggtggagagacccagcaccaccaaggacaagcacaaggaggaggacaagaacagcgagagaatcaccgtgaagaaggagacccagagccccgagcaggtgaagagcgagaagctgaaggacctgttcgactacagcccccccctgcacaagaacctggacgccagagagaagagcaccttcagagaggagagccccctgagaatcaagatgatcgccagcgacagccacagacccgaggtgaagctgaagatggcccccgtgcccctggacgacagcaacagacccgccagcctgaccaaggacagactgctggccagcaccctggtgcacagcgtgaagaaggagcaggagttcagaagcatcttcgaccacatcaagctgccccaggccagcaagagcaccagcgagagcttcatccagcacatcgtgagcctggtgcaccacgtgaaggagcagtacttcaagagcgccgccatgaccctgaacgagagattcaccagctaccagaaggccaccgaggagcacagcaccagacagaagagccccgagatccacagaagaatcgacatcagccccagcaccctgagaaagcacaccagactggccggcgaggagagagtgttcaaggaggagaaccagaagggcgacaagaagctgagatgcgacagcgccgacctgagacacgacatcgacagaagaagaaaggagagaagcaaggagagaggcgacagcaagggcagcagagagagcagcggcagcagaaagcaggagaagacccccaaggactacaaggagtacaagagctacaaggacgacagcaagcacaagagagagcaggaccacagcagaagcagcagcagcagcgccagccccagcagccccagcagcagagaggagaaggagagcaagaaggagagagaggaggagttcaagacccaccacgagatgaaggagtacagcggcttcgccggcgtgagcagacccagaggcaccttccacgacgacagagacgacggcgtggactactgggccaagagaggcagaggcagaggcaccttccagagaggcagaggcagattcaacttcaagaagagcggcagcagccccaagtggacccacgacaagtaccagggcgacggcatcgtggaggacgaggaggagaccatggagaacaacgaggagaagaaggacagaagaaaggaggagaaggagtag

SEQ ID NO: 34916 - protein, 138 aa, Artificial Sequence
  derived and/or modified sequence
MKEYSGFAGVSRPRGTFFRIRGRGRARGVFAGTNTGPNNSNTTFQKRPKEEEWDPEYTPKSKKYFLHDDRDDGVDYWAKRGRGRGTFQRGRGRFNFKKSGSSPKWTHDKYQGDGIVEDEEETMENNEEKKDRRKEEKE

SEQ ID NO: 34917 - protein, 747 aa, Artificial Sequence
  derived and/or modified sequence
MGRSNSRSHSSRSKSRSQSSSRSRSRSHSRKKRYSSRSRSRTYSRSRSRDRMYSRDYRRDYRNNRGMRRPYGYRGRGRGYYQGGGGRYHRGGYRPVWNRRHSRSPRRGRSRSRSPKRRSVSSQRSRSRSRRSYRSSRSPRSSSSRSSSPYSKSPVSKRRGSQEKQTKKAEGEPQEESPLKSKSQEEPKDTFEHDPSESIDEFNKSSATSGDIWPGLSAYDNSPRSPHSPSPIATPPSQSSSCSDAPMLSTVHSAKNTPSQHSHSIQHSPERSGSGSVGNGSSRYSPSQNSPIHHIPSRRSPAKTIAPQNAPRDESRGRSSFYPDGGDQETAKTGKFLKSPPLHKNLDAREKSTFREESPLRIKMIASDSHRPEVKLKMAPVPLDDSNRPASLTKDRLLASTLVHSVKKEQEFRSIFDHIKLPQASKSTSESFIQHIVSLVHHVKEQYFKSAAMTLNERFTSYQKATEEHSTRQKSPEIHRRIDISPSTLRKHTRLAGEERVFKEENQKGDKKLRCDSADLRHDIDRRRKERSKERGDSKGSRESSGSRKQEKTPKDYKEYKSYKDDSKHKREQDHSRSSSSSASPSSPSSREEKESKKEREEEFKTHHEMKEYSGFAGVSRPRGTFFRIRGRGRARGVFAGTNTGPNNSNTTFQKRPKEEEWDPEYTPKSKKYFLHDDRDDGVDYWAKRGRGRGTFQRGRGRFNFKKSGSSPKWTHDKYQGDGIVEDEEETMENNEEKKDRRKEEKE

SEQ ID NO: 34918 - DNA, 2244 bp, Artificial Sequence
  derived and/or modified sequence
atgggtaggtcaaatagtcggtctcactcttctcggagcaaatccagatctcaatcaagcagccggtctaggtccaggtctcattcccggaagaaacggtattcctctcggtcacgcagtcgtacctatagtagatcacgctctagggacaggatgtatagtcgggactacagacgagactatagaaacaatcgcggtatgaggcggccttatggctaccgcggacgggggcgcgggtactatcaaggaggtggaggccgataccatagagggggatacagaccggtgtggaacaggaggcatagtcgcagtcctagacgcggtcgatcacgtagccggtcacctaagcgacgctctgtcagctcccagcgctcaaggagccggtctcgccgttcataccgctcatcaagatctccacgttccagctctagcagatcatcatccccctacagtaagtccccggttagcaagcgcagaggcagccaggaaaagcagacaaaaaaagcagaaggggagccccaggaagaatccccgctcaaatccaagagccaagaagagccaaaagatacttttgagcatgacccatcagagagtattgacgagtttaacaagagtagcgcaacctctggtgacatatggcccggactgtctgcttatgacaatagcccccggtctcctcattctccaagtcctattgcaacgcccccaagtcagtccagttcatgcagtgacgcccctatgttgtcgaccgtgcattctgccaaaaatacaccaagtcaacactcccattccatccaacattcaccggaaaggtccggctctgggtcggtgggcaacgggtcgagtaggtatagtccttcccagaacagcccgattcaccatatcccatctcggagatctccagctaaaacaattgcaccacagaatgcaccgcgagatgagagcagaggcagatcgagcttctatcccgacggcggagatcaggaaaccgccaaaaccggtaaattcctcaaatcaccaccacttcacaagaaccttgacgcacgcgagaagagcacattcagagaggaatcaccgctcaggataaaaatgatcgcctcagatagccataggcctgaggtgaagcttaagatggcccctgtccctctggacgacagcaaccggcctgcctcactcaccaaagaccggctgcttgcttctacccttgttcactcagttaaaaaggaacaggagttcaggtccattttcgaccatattaagttaccacaggcatcgaagtctacatccgagtctttcatacagcacattgtgagcttagtgcaccatgttaaagagcagtactttaaaagcgctgccatgacacttaatgagagattcacctcgtatcaaaaagctaccgaggagcactcgactcgacagaaaagccccgagattcatcgccggatcgacatcagtcccagcacgctgagaaagcacactaggctggcaggggaagagagggtgttcaaggaagaaaaccagaaaggcgacaaaaaactgaggtgtgacagtgctgacctgaggcatgatatcgaccgcagacggaaagagcgcagtaaggagagaggtgactctaagggctcacgtgaatcttcaggatcacgaaaacaggagaaaactcccaaggactacaaggagtataagtcctacaaagatgacagcaagcacaagcgtgaacaggaccactcccggtcaagttcttcatctgctagcccctcctctccatctagcagagaagaaaaggaatcaaagaaagaacgcgaagaagagttcaaaacccaccatgagatgaaggaatattctggtttcgcgggtgtgtccagacctcgcggaactttcttcaggataaggggccgcggccgggcacggggagtcttcgctgggacaaataccgggcccaacaactcaaacactaccttccagaaacggcccaaggaagaagagtgggacccagagtatactccaaaatccaagaagtactttcttcatgacgaccgggacgacggagtggattattgggcaaaacgaggtaggggcagggggaccttccagcggggcagggggagattcaatttcaaaaaaagcggaagttccccgaagtggacgcacgacaaatatcaaggcgacggcatagtagaagacgaagaggaaaccatggaaaacaatgaagagaagaaagacaggcgcaaggaagaaaaagaatag

SEQ ID NO: 34919 - DNA, 2244 bp, Artificial Sequence
  derived and/or modified sequence
atgggccgcagcaacagccgcagccacagcagccgcagcaagagccgcagccagagcagcagccgcagccgcagccgcagccacagcaggaagaagcgctacagcagccgcagccgcagcaggacctacagccgcagccgcagccgggacaggatgtacagccgggactaccgccgggactacagaaacaacagaggcatgaggcggccctacggctaccggggccggggccggggctactaccagggcggcggcggccgctaccacagaggaggctacagacctgtgtggaacagaagacacagccgcagcccccggcggggccgcagccgcagccgcagccccaagagaagatctgtgagcagccagaggagccgcagccgcagccgccgcagctaccgcagcagccgcagccccaggagcagcagcagccgcagcagcagcccctacagcaagagccctgtgtccaagaggcggggcagccaggagaagcagaccaagaaggccgagggggagccccaggaggagagccccctgaagagcaagagccaggaggagcccaaggacacctttgaacatgaccccagcgagagcattgatgagttcaacaagagcagcgccaccagcggggacatctggccaggcctgagcgcctatgacaacagccccaggagcccccacagccccagccccatcgccaccccacccagccagagcagcagctgcagtgatgcccccatgctgagcacagtgcacagcgccaagaacacccccagccagcacagccacagcatccagcacagccctgagaggagcggcagcggctctgtgggcaatggcagcagccgctacagccccagccagaacagccccatccaccacatccccagccgccgcagccctgccaagaccatcgccccccagaatgcccccagagatgagagccggggccgcagcagcttctacccagatggaggagaccaggagacagccaagacaggcaagttcctgaagagcccccccctgcacaagaacctggatgcccgggagaagagcaccttccgggaggagagccccctgcgcatcaagatgattgccagtgacagccacaggcctgaggtgaagctgaagatggcccctgtgcccctggatgacagcaacagacctgccagcctgaccaaggaccggctgctggccagcaccctggtgcacagcgtgaagaaggagcaggagttccgcagcatctttgaccacatcaagctgccccaggccagcaagagcaccagcgagagcttcatccagcacatcgtgtccctggtgcaccacgtgaaggagcagtacttcaagtctgctgccatgaccctgaatgaacgcttcaccagctaccagaaggccacagaggagcacagcacccggcagaagagccctgagatccacagaagaattgacatcagccccagcaccctgaggaagcacacccggctggccggggaggagagggtcttcaaggaggagaaccagaagggggacaagaagctgcgctgtgacagcgctgacctgcggcatgacatcgacagaagaaggaaggagaggagcaaggagcggggggacagcaagggcagccgggagagcagcggcagcaggaagcaggagaagacccccaaggactacaaggagtacaagagctacaaggatgacagcaagcacaagcgggagcaggaccacagccgcagcagcagcagcagcgccagccccagcagccccagcagccgggaggagaaggagagcaagaaggagcgggaggaggagttcaagacccaccacgagatgaaggagtacagcggctttgctggggtgtcccggccccggggcaccttcttccgcatccggggccggggccgggcccggggcgtgtttgctggcaccaacacaggccccaacaacagcaacaccaccttccagaagaggcccaaggaggaggagtgggaccctgagtacacccccaagagcaagaagtacttcctgcatgatgacagagatgatggagtggactactgggccaagaggggccggggccggggcaccttccagaggggccggggccgcttcaacttcaagaagagcggcagcagccccaagtggacccatgacaagtaccagggagatggcatcgtggaggatgaggaggagaccatggagaacaatgaggagaagaaggacaggaggaaggaggagaaggagtag

SEQ ID NO: 34920 - DNA, 2244 bp, Artificial Sequence
  derived and/or modified sequence
atgggccggagcaacagccggagccacagcagccggagcaagagccgcagtcagtcaagctctagatctaggtcacgcagtcactccaggaagaaaagatatagttcaagatctcgcagccggacctacagtcgctctcggtctcgcgataggatgtactcccgagactaccgccgcgactatagaaataatcgtggaatgcggcggccctatggctatagaggcaggggacgtggttactatcagggcggcggcggccgatatcacagaggaggctaccgcccagtgtggaatcgacgtcacagccgatcccccagaaggggacgctctaggtctagatcccccaaaaggaggagtgtttccagccagcgctcccggtctcgcagtcggcgctcatatcgatccagccggagcccacgcagctcctcttcaaggagttcatcgccatactctaagagtcctgtaagcaaaagaagaggaagccaggagaagcaaaccaaaaaagctgagggcgaacctcaggaagaatcacctctcaaatctaagtcccaagaagagccaaaggataccttcgagcacgatccttcagagagcatcgacgagttcaacaagtccagtgcaacaagtggggatatatggcccggattgagcgcctatgataacagtccccgttctcctcactctccgtctcccatcgcaactccaccctctcaaagctctagctgttcagatgctcccatgttaagcacggtgcactccgcaaaaaacactccgtctcagcacagccatagcattcagcactcaccagaacggtctggatcggggtcagtggggaatggctccagcagatattccccatcccagaactcccccatccatcatattccctcacgccggagcccggcaaagacaattgctccgcagaacgctcctcgcgatgagtctcgcggtaggagttccttttatcctgatggcggcgaccaggaaacagccaagacagggaagttccttaaatccccccccctgcataaaaacttagacgctcgcgagaaatctacgttccgcgaagagtctcccctccgaatcaagatgattgctagtgactcgcataggcccgaagtgaaactaaagatggctccggtgccactggatgattcaaaccgccctgcctctctgaccaaggaccgactcctcgcctcgaccctcgttcactccgtgaagaaagagcaggaattcaggtccatcttcgatcacatcaagctgccacaggcatccaaaagtacaagtgagtctttcatccagcatattgtttccttggtgcatcatgttaaggaacagtattttaaatcagcagccatgaccttgaacgaaaggtttacctcctatcagaaggctacagaagagcatagtactcgacagaagtcccccgaaatacatcgaaggatcgacatatcccctagcaccctgcgtaagcacactcggctcgccggtgaggagcgagtcttcaaggaggagaaccagaagggcgacaagaagttaaggtgtgactccgctgatttacgccacgacattgaccgaaggcgaaaggagcgctctaaggagaggggagacagcaaagggagccgcgagtcgtccggctccagaaaacaagaaaaaactcctaaagattacaaggaatacaaatcttacaaggacgactctaaacataaacgggaacaggaccactcccgcagctccagtagcagcgcatcaccgtcctcacccagcagtagagaagagaaagagtccaaaaaggaaagagaggaggagtttaagacccaccatgagatgaaggagtacagcggtttcgctggtgtcagtaggccacggggcactttcttcagaatccgcggaagaggacgggcaaggggtgtgtttgcaggcaccaacactggccctaataacagcaacacaacatttcaaaagcgacctaaagaggaggagtgggatccagaatacacacctaaaagcaagaaatatttccttcatgacgatcgagatgacggcgtcgattactgggcaaagagagggagagggcggggcactttccagcgcggaaggggacggtttaattttaagaaatctggctccagccccaaatggacccacgacaagtaccagggggacggcattgtggaggatgaggaagaaacgatggaaaataacgaggaaaagaaggatcgccggaaggaagaaaaggagtag

SEQ ID NO: 34921 - DNA, 2244 bp, Artificial Sequence
  derived and/or modified sequence
atgggccgttccaacagcaggagccatagtagtcgctcaaagtccagatcacagtctagcagtagatcgcgcagtcgttcgcactcacgcaaaaagaggtacagctcacggtctagaagtagaacttactctcgatctagatcgagagatcgcatgtattctcgcgactacaggcgggattaccgaaataaccgtggaatgcgtcgaccttatgggtacagaggtaggggacggggatactaccaaggcggtggtggcagatatcatcgtggaggatatcggccagtgtggaacagacggcacagccggagccctaggcggggtcgaagcagaagcagaagtcctaagaggcggtctgtttcttcacagcgatccaggtctagatctaggcgttcctaccgttcctcgaggagccctcgctcttctagcagcaggagttcttccccctactccaagagccccgtttccaaaagaagaggcagccaagaaaaacaaactaaaaaagccgagggagagccccaggaggagtctccactcaagtcaaaatcacaagaagaaccaaaagacactttcgagcacgatccatctgagagcatagatgagtttaataaatcttccgccaccagcggagatatctggccgggtttgtccgcctacgacaatagcccacgctccccccatagccctagcccaatcgccaccccaccaagccaatcctcgtcttgcagcgacgcaccaatgctttccaccgtgcattctgctaaaaacactcccagtcagcatagccattcaatacagcattccccggaaaggagtggtagcggttcggtgggaaacggtagtagtagatactccccatctcagaacagcccaatccatcacattccctcccgcagatcgcccgctaaaaccatcgccccacaaaacgcacccagggacgagtctaggggtcggagttcattctatcctgacggtggcgatcaggagaccgctaaaaccggcaaattcctcaagtctccacctctgcacaaaaatttggacgcacgcgaaaagtccacatttcgggaagagagtcccctcagaatcaaaatgattgcctccgactcgcaccgcccagaggttaaactgaaaatggctcccgttccgctcgacgatagcaatcggcctgcttcgctcacgaaagaccggctgctggcctctaccctcgtccattcagtaaaaaaagagcaagaatttaggagcattttcgaccacatcaagctcccccaggcctctaaatctacatccgagtctttcatccagcacattgtatcgttggtacaccatgtcaaggaacaatattttaagtccgccgctatgacgttgaatgaacgatttacgagttaccaaaaagcaactgaggagcactcaacacgacagaagtctcctgagatccacagaaggatcgatatttctcctagcaccctgagaaaacacaccaggcttgccggtgaagagcgtgtgttcaaggaagaaaaccagaaaggcgataaaaaactgcgctgcgacagtgcagacctccgccatgacatcgataggagaagaaaagaaagaagtaaagagcggggtgatagcaaggggtcccgcgaaagcagcggctccaggaagcaggagaagacccctaaagactacaaagaatataagtcgtacaaggatgattccaaacacaagcgagaacaagatcactcaaggagcagcagtagcagtgcttctccttccagcccgtcctctagagaggagaaggagtcaaagaaggagcgagaggaggaattcaagacacatcacgagatgaaggagtattccggattcgctggggtgtccagaccgagaggaactttcttccgtatccggggaaggggcagagcccgaggagttttcgctggcaccaacactggccctaataattccaataccacctttcagaagaggcccaaggaggaggaatgggacccagagtacaccccgaagtcaaaaaagtacttcctccacgatgaccgagacgatggcgtggactattgggcgaagcgtgggcgaggacggggaactttccaacggggaagaggcagatttaactttaagaagagtgggtcctccccgaaatggacccacgacaagtatcaaggcgatggaatcgtggaagatgaggaggaaactatggagaacaacgaggagaagaaggatagaaggaaggaggaaaaagaatag

SEQ ID NO: 34922 - DNA, 4186 bp, Artificial Sequence
  derived and/or modified sequence
gagtcgggaaatggccgctgtgtggttgcaacggagataaattcccggaaccgcgattcggcgtgtcaggaattcgaatttagagtttaatttctcagagcattctctccaggaagaatttttacagtatctcaaagacttcacttgacttcttgatcctgcataaaaccaaggagaaaagaaatgggtcgctccaattctagatcacattcttcaaggtcaaagtctagatcacagtctagttctcgatcaagatcaagatctcattctagaaagaagcgatacagttctaggtctcgttccagaacatattcaaggtctcgtagtagagatcgtatgtattctagagattatcgtcgcgattacagaaataatagaggaatgagacgaccttatgggtacagaggaaggggtagagggtattatcaaggaggaggaggtagatatcatcgaggtggttatagacctgtctggaatagaaggcactctaggagtcctagacgaggtcgttcacgttccaggagtccaaaaagaagatccgtttcttctcaaagatccagaagcagatctcgccggtcatatagatcttctaggtctccaagatcatcctcttctcgttcttcatccccatatagcaaatctcctgtttctaaaagacgagggtctcaggaaaaacaaaccaaaaaagctgaaggggaaccccaagaagagagtccgttgaaaagtaaatcacaggaggaaccgaaagatacatttgaacatgacccatctgagtctatcgatgaatttaataagtcatcagccacatccggtgatatttggcctggcctttcagcttatgataatagtcctagatcaccccatagtccttcacctattgctacaccacctagtcagagttcatcttgctctgatgctcccatgctcagtacagttcactctgcaaaaaatactccttctcagcattcacattccattcagcatagtcctgaaaggtctgggtctggttctgttggaaatggatctagtcgatacagtccttctcagaatagtccaattcatcacatcccttcacgaagaagtcctgcaaagacaatcgcaccacagaatgctccaagagatgagtctaggggccgttcctcgttttatcctgatggtggagatcaggaaactgcaaagactgggaagttcttaaaaagtccccctctacacaagaatctggatgcacgagaaaagtctaccttcagagaggaaagcccacttaggatcaaaatgatagcgagtgattctcaccgtcctgaagtcaaactcaaaatggcacctgttcctcttgatgattctaacagacctgcttccttgactaaagacaggctgcttgctagtacacttgtccattctgtcaagaaggagcaagaattccgatccatctttgaccacattaagttgccacaggccagcaaaagcacttcagagtcatttattcaacacattgtgtccttggttcatcatgttaaagagcaatacttcaagtcagctgcaatgaccctaaacgagcggttcacttcgtatcagaaagccactgaagaacatagtactcggcaaaagagccctgaaatacacaggagaattgacatctcaccaagtaccctgaggaagcatacccgtttagcaggggaagagagagtttttaaagaagaaaatcaaaagggagataaaaaattaaggtgtgactctgctgaccttcggcatgacattgatcgccgtagaaaagaaagaagtaaagaacggggagattccaagggctccagggaatccagtggatcaagaaagcaggaaaaaactccaaaagattacaaggaatacaaatcttacaaagatgacagtaaacataaaagagagcaagatcattctcgatcttcatcctcttcagcatcaccttcttctcccagttctcgagaagaaaaggagagtaagaaggaaagagaagaagaatttaaaactcaccatgaaatgaaagaatactcaggctttgcaggagttagccgaccacgaggaaccttttttcgaattagaggcagaggaagagccagaggagtttttgctgggacaaatactggtccaaacaactcaaatactacttttcaaaagagaccgaaggaagaggaatgggatccagaatataccccaaagagcaagaagtacttcttgcatgacgacagagatgatggtgtggattattgggccaaaagaggaagaggtcgtggtacttttcaacgtggcagagggcgctttaacttcaaaaaatcaggtagcagtcctaaatggactcatgacaaataccaaggggatgggattgttgaagatgaagaagagaccatggaaaataatgaagaaaagaaggacagacgcaaggaagaaaaggaataataaatatgaagtaagattacaacagagcagaacttgcacccaccattttttttacctgatttttgttttcaaataagaatgtaagcattttacttaaattttactgtttgcaagtagtctatagaaattttgttttaagtcttcaaatatcttgagaaatagtagactgtatgttgaaaattgtactgaaataaagtagaaaattgttacgtaccatatttgtaactatcaacttttaaaacttttaacgtttttgttacatgcattgtaattctgctttgtctataagatatggtcaagtacagctctgtgaaagttctgattctcttccttccctgtttgtcaatgttttattctgaagtaaacgttagctctacatataaatcctggaacagaaattgtttatagagactacactaattattttaactgtatacatctgtttaatttgaacacactacatcgtagggtgactgatttttgaagtataccacagacaaaaagttgttactatggtaaactaagctagtttaacacttgagcaaatgcttaagaaggaattaaaaaaaaaaagctttgccaatagctaaaaagtacaagctattaaaaatcagattgaaaagttttgagaaaatgttatttttactgaaagcaagcagtggcctataaagaacattcttaggagccttttctatttgcgttcaaaactgtgtgttctctttctattcctatttgatagtttgagtcatggtcttagatattagctatttgtgagaggaaactggtttgtaacaatactgcaaatagaaaccccatttctactgaacatcctagttttaaacagaagaaaaactgtaatcctggggttggtatgtaggaggtctatcctgcagaataagttgatacattagtacctgatttcatatcttacatatttatttgagctgaacattagtttgtagtgtaactattagtaaaaatagagaaacacagcatactgttcattaatagtattttaaaaaaattgtttttcaaatgtcaccaataaaagttttggcaggaagcttgttgcggcattgatctaacctttttcccccccatttcagttgcagtttttgtagaatggctttttctttttcctcttaagagttctattcttcaggtagataatttttcaaatgtgaattatcttttgtgtctatattgatagctcttaaaggagtgaaaatctaaaatagtaaatttcaatgttaagtgtctgctttatgggcatatataaaagtagacacatttcatttgttaatttagttgtgtgtgtgtgttaaaaggagctaatgcttattctgttaatgtaaacttttgaagatcttaagtgtattgctctttcatcttaaacactttcgaggatttgcagtgcgtctagcacctagattacagccaggaacattggttaagaactgttggaaacaaaactaaaagcaaactcaacatatgtgatgtttatggccctcagatccttagtattgtgtgattttcccccgttaacatgtctttctaaaattgtctattaaagcagaggaaatacctgccaaaggaagtatgtattgcattaatcagggcataactaatattctcctgttcagaataatacttatttacgtgtgaaagcaacatggatgtgattcccaacacagaattttcatgacccttttattgtatacaaataaataccataacagttacttggttagacatcaaa

SEQ ID NO: 34923 - DNA, 2244 bp, Artificial Sequence
  derived and/or modified sequence
atgggcagaagcaacagcagaagccacagcagcagaagcaagagcagaagccagagcagcagcagaagcagaagcagaagccacagcagaaagaagagatacagcagcagaagcagaagcagaacctacagcagaagcagaagcagagacagaatgtacagcagagactacagaagagactacagaaacaacagaggcatgagaagaccctacggctacagaggcagaggcagaggctactaccagggcggcggcggcagataccacagaggcggctacagacccgtgtggaacagaagacacagcagaagccccagaagaggcagaagcagaagcagaagccccaagagaagaagcgtgagcagccagagaagcagaagcagaagcagaagaagctacagaagcagcagaagccccagaagcagcagcagcagaagcagcagcccctacagcaagagccccgtgagcaagagaagaggcagccaggagaagcagaccaagaaggccgagggcgagccccaggaggagagccccctgaagagcaagagccaggaggagcccaaggacaccttcgagcacgaccccagcgagagcatcgacgagttcaacaagagcagcgccaccagcggcgacatctggcccggcctgagcgcctacgacaacagccccagaagcccccacagccccagccccatcgccaccccccccagccagagcagcagctgcagcgacgcccccatgctgagcaccgtgcacagcgccaagaacacccccagccagcacagccacagcatccagcacagccccgagagaagcggcagcggcagcgtgggcaacggcagcagcagatacagccccagccagaacagccccatccaccacatccccagcagaagaagccccgccaagaccatcgccccccagaacgcccccagagacgagagcagaggcagaagcagcttctaccccgacggcggcgaccaggagaccgccaagaccggcaagttcctgaagagcccccccctgcacaagaacctggacgccagagagaagagcaccttcagagaggagagccccctgagaatcaagatgatcgccagcgacagccacagacccgaggtgaagctgaagatggcccccgtgcccctggacgacagcaacagacccgccagcctgaccaaggacagactgctggccagcaccctggtgcacagcgtgaagaaggagcaggagttcagaagcatcttcgaccacatcaagctgccccaggccagcaagagcaccagcgagagcttcatccagcacatcgtgagcctggtgcaccacgtgaaggagcagtacttcaagagcgccgccatgaccctgaacgagagattcaccagctaccagaaggccaccgaggagcacagcaccagacagaagagccccgagatccacagaagaatcgacatcagccccagcaccctgagaaagcacaccagactggccggcgaggagagagtgttcaaggaggagaaccagaagggcgacaagaagctgagatgcgacagcgccgacctgagacacgacatcgacagaagaagaaaggagagaagcaaggagagaggcgacagcaagggcagcagagagagcagcggcagcagaaagcaggagaagacccccaaggactacaaggagtacaagagctacaaggacgacagcaagcacaagagagagcaggaccacagcagaagcagcagcagcagcgccagccccagcagccccagcagcagagaggagaaggagagcaagaaggagagagaggaggagttcaagacccaccacgagatgaaggagtacagcggcttcgccggcgtgagcagacccagaggcaccttcttcagaatcagaggcagaggcagagccagaggcgtgttcgccggcaccaacaccggccccaacaacagcaacaccaccttccagaagagacccaaggaggaggagtgggaccccgagtacacccccaagagcaagaagtacttcctgcacgacgacagagacgacggcgtggactactgggccaagagaggcagaggcagaggcaccttccagagaggcagaggcagattcaacttcaagaagagcggcagcagccccaagtggacccacgacaagtaccagggcgacggcatcgtggaggacgaggaggagaccatggagaacaacgaggagaagaaggacagaagaaaggaggagaaggagtag

SEQ ID NO: 34924 - protein, 340 aa, Artificial Sequence
  derived and/or modified sequence
MASREDELRNCVVCGDQATGYHFNALTCEGCKGFFRRTVSKSIGPTCPFAGSCEVSKTQRRHCPACRLQKCLDAGMRKDMILSAEALALRRAKQAQRRAQQTPVQLSKEQEELIRTLLGAHTRHMGTMFEQFVQFRPPAHLFIHHQPLPTLAPVLPLVTHFADINTFMVLQVIKFTKDLPVFRSLPIEDQISLLKGAAVEICHIVLNTTFCLQTQNFLCGPLRYTIEDGARVGFQVEFLELLFHFHGTLRKLQLQEPEYVLLAAMALFSPAPYLTDRPGVTQRDEIDQLQEEMALTLQSYIKGQQRRPRDRSPGTPWIHWSGKMLGPKIGPGSKGAQWLQ

SEQ ID NO: 34925 - DNA, 1023 bp, Artificial Sequence
  derived and/or modified sequence
atggctagcagggaggatgagctgagaaattgcgtggtctgcggagatcaggccaccggctaccacttcaatgcgcttacttgtgaagggtgcaagggattcttccggcggaccgttagtaagtcaataggccctacttgcccctttgccgggtcatgtgaagttagcaagacccagcgcaggcattgtcccgcatgccgactgcaaaagtgcctggatgctggtatgcgcaaagacatgatcctgtctgccgaggcgttggccctccgaagagctaaacaggcccagaggcgggcccagcaaacccctgttcagctttcaaaagaacaggaagaactaatcaggacactgttaggggcccacactcgacacatgggcaccatgttcgagcagtttgtccagtttcggccccctgctcacctgttcatccaccatcagccactccccacactcgcacctgtgttaccgctcgtgacccactttgccgacatcaataccttcatggtcttacaggtgattaaattcactaaggacctacccgtctttagaagtctgcccatagaggaccaaatcagcctgctgaaaggcgcagcggtcgagatctgtcacatagtcctaaatacgacattttgcttgcaaactcaaaatttcctttgtggtccactcagatacactattgaggacggagcgcgcgtgggcttccaggtagaatttctagagctgctattccactttcacggaaccctacggaagctgcaattacaagaacccgaatatgtactgctggccgctatggccttgttctcccccgccccttacctgacagatcgtccaggagtcactcagagagatgagattgatcagcttcaagaagagatggccctcacactgcagtcatatattaaaggacagcagcgtaggcctagggacaggtctcctgggaccccgtggatccattggtccggtaaaatgctggggcctaagataggcccgggttctaagggtgcccagtggctgcagtag

SEQ ID NO: 34926 - DNA, 1117 bp, Artificial Sequence
  derived and/or modified sequence
ggagaggcattccataccagattctgtggcctgcaggtgacatgctgcctaagagaagcaggagtctgtgacagccaccccaacacgtgacgtcatggccagtagggaagatgagctgaggaactgtgtggtatgtggggaccaagccacaggctaccactttaatgcgctgacttgtgagggctgcaagggtttcttcaggagaacagtcagcaaaagcattggtcccacctgcccctttgctggaagctgtgaagtcagcaagactcagaggcgccactgcccagcctgcaggttgcagaagtgcttagatgctggcatgaggaaagacatgatactgtcggcagaagccctggcattgcggcgagcaaagcaggcccagcggcgggcacagcaaacacctgtgcaactgagtaaggagcaagaagagctgatccggacactcctgggggcccacacccgccacatgggcaccatgtttgaacagtttgtgcagtttaggcctccagctcatctgttcatccatcaccagcccttgcccaccctggcccctgtgctgcctctggtcacacacttcgcagacatcaacactttcatggtactgcaagtcatcaagtttactaaggacctgcccgtcttccgttccctgcccattgaagaccagatctcccttctcaagggagcagctgtggaaatctgtcacatcgtactcaataccactttctgtctccaaacacaaaacttcctctgcgggcctcttcgctacacaattgaagatggagcccgtgtggggttccaggtagagtttttggagttgctctttcacttccatggaacactacgaaaactgcagctccaagagcctgagtatgtgctcttggctgccatggccctcttctctcctgctccctatcttacagaccgacctggagttacccagagagatgagattgatcagctgcaagaggagatggcactgactctgcaaagctacatcaagggccagcagcgaaggccccgggatcgctcacctggaacaccctggatacactggagtgggaaaatgctgggaccaaagattgggccgggttcaaagggagcccagtggttgcaatga

SEQ ID NO: 34927 - DNA, 1023 bp, Artificial Sequence
  derived and/or modified sequence
atggccagcagagaagatgagctgaggaactgtgtggtgtgtggggaccaggccaccggctaccacttcaatgccctgacctgtgagggctgcaagggcttcttccggaggacagtgtccaagagcatcggccccacctgcccctttgctggcagctgtgaggtgtccaagacccagaggaggcactgcccagcctgccgcctgcagaagtgcctggatgctggcatgaggaaggacatgatcctgtctgctgaggccctggccctgcggcgggccaagcaggcccagaggcgggcccagcagacccctgtgcagctgagcaaggagcaggaggagctgatccgcaccctgctgggcgcccacaccaggcacatgggcaccatgtttgagcagtttgtgcagttccggcccccagcccacctgttcatccaccaccagcccctgcccaccctggcccctgtgctgcccctggtgacccactttgctgacatcaacaccttcatggtgctgcaggtgatcaagttcaccaaggacctgcccgtcttccgcagcctgcccatcgaggaccagatcagcctgctgaagggagctgctgtggagatctgccacatcgtgctgaacaccaccttctgcctgcagacccagaacttcctgtgtggccccctgcgctacaccattgaagatggagcccgggtgggcttccaggtggagttcctggagctgctcttccacttccacggcaccctgaggaagctgcagctgcaggagccagaatatgtgctgctggccgccatggccctcttcagccctgccccctacctgacagacaggcctggggtgacccagagagatgaaattgaccagctgcaggaggagatggccctgaccctgcagagctacatcaagggccagcagaggcggccccgggacaggagccctggcaccccctggatccactggagcggcaagatgctgggccccaagattggccctggcagcaagggggcccagtggctgcagtag

SEQ ID NO: 34928 - DNA, 1023 bp, Artificial Sequence
  derived and/or modified sequence
atggccagccgggaggacgagctgcggaactgcgtggtgtgcggcgatcaggccaccggataccatttcaatgctcttacatgcgaaggctgtaaaggcttctttagaaggaccgtctctaaaagtattggccctacctgcccattcgccggatcctgcgaggtgtcaaagacacagagacgccattgtcctgcttgccggctccaaaagtgtcttgacgctgggatgaggaaggacatgattctctccgccgaagctcttgccctacggagagctaagcaagcccaacggcgagcccaacagacccctgttcaactcagcaaagagcaggaagaactgattcgcacacttttgggtgcccacaccagacatatgggcactatgtttgaacagtttgtgcaatttaggccaccagctcatctgtttatccaccaccagcctttgccaacccttgcacctgtcctacctctggtgacacatttcgctgacataaataccttcatggtgctgcaggtgatcaaatttacaaaggacctgcctgtgtttaggagtttgccgatagaggatcaaatctctttactgaaaggagcagcggtggagatctgtcacattgtgttgaacactacattttgcctgcagacacagaattttttatgtgggccactgcgttatactatcgaagacggagccagagtgggatttcaggtcgaatttctggaacttctgttccattttcacggtacgctgcgaaagctgcagttacaagagcctgaatacgtgctcctggccgccatggcattgttcagcccagctccatacctaacagatcgacctggggttacccagcgagacgaaattgatcaacttcaagaagagatggcgctcacactccagagctatattaagggacaacagcggcggcctagggacagatcccctggtactccgtggattcactggagtggtaaaatgctgggcccaaaaattgggccaggctctaaaggggcccagtggctgcagtag

SEQ ID NO: 34929 - DNA, 1023 bp, Artificial Sequence
  derived and/or modified sequence
atggcgtcgcgggaagatgagctgcggaattgtgtcgtctgcggtgatcaggcaactggataccactttaatgctttaacctgtgaggggtgtaaaggatttttcaggcggacggtgtcaaaatccattggacctacatgtccttttgccggaagctgcgaggtgtctaaaacccagcggcgtcattgtccagcctgtcggctgcaaaaatgtcttgacgcaggaatgaggaaagacatgatcctgtccgctgaagcacttgccctgcgacgtgctaagcaagcccagcgaagagctcaacaaacccctgtgcaactttcaaaggaacaggaggaactgatccgcacgcttcttggggcacatactcgccacatgggtacgatgttcgagcagtttgtgcagttccgccctcccgcacatctgtttattcatcaccagccactgcctacgctagcccctgtgctcccactggttacccactttgccgacatcaacacatttatggtgttacaagtcatcaagttcactaaggatctccctgtttttcggtctttgcctatcgaggaccagatcagcctcctgaagggggctgcagtggaaatctgccacatcgtgctcaatacgacgttctgcctccagacccaaaactttctttgtggtccattacggtataccatcgaggatggagccagggtaggtttccaggtggagtttctcgaattgttgttccacttccatgggaccttaagaaagttgcaattacaggagcccgagtacgtactacttgctgcaatggcactgttttccccagccccatacctgacagataggccgggtgtcacccagagagacgaaattgatcaactgcaagaggaaatggcgctaacgcttcagtcctacatcaaaggccagcagaggcgccctcgagatagaagcccaggtaccccctggatacactggagtggaaagatgctgggcccaaaaattggccctgggtcaaaaggcgctcagtggcttcagtag

SEQ ID NO: 34930 - DNA, 1023 bp, Artificial Sequence
  derived and/or modified sequence
atggccagcagagaggacgagctgagaaactgcgtggtgtgcggcgaccaggccaccggctaccacttcaacgccctgacctgcgagggctgcaagggcttcttcagaagaaccgtgagcaagagcatcggccccacctgccccttcgccggcagctgcgaggtgagcaagacccagagaagacactgccccgcctgcagactgcagaagtgcctggacgccggcatgagaaaggacatgatcctgagcgccgaggccctggccctgagaagagccaagcaggcccagagaagagcccagcagacccccgtgcagctgagcaaggagcaggaggagctgatcagaaccctgctgggcgcccacaccagacacatgggcaccatgttcgagcagttcgtgcagttcagaccccccgcccacctgttcatccaccaccagcccctgcccaccctggcccccgtgctgcccctggtgacccacttcgccgacatcaacaccttcatggtgctgcaggtgatcaagttcaccaaggacctgcccgtgttcagaagcctgcccatcgaggaccagatcagcctgctgaagggcgccgccgtggagatctgccacatcgtgctgaacaccaccttctgcctgcagacccagaacttcctgtgcggccccctgagatacaccatcgaggacggcgccagagtgggcttccaggtggagttcctggagctgctgttccacttccacggcaccctgagaaagctgcagctgcaggagcccgagtacgtgctgctggccgccatggccctgttcagccccgccccctacctgaccgacagacccggcgtgacccagagagacgagatcgaccagctgcaggaggagatggccctgaccctgcagagctacatcaagggccagcagagaagacccagagacagaagccccggcaccccctggatccactggagcggcaagatgctgggccccaagatcggccccggcagcaagggcgcccagtggctgcagtag

SEQ ID NO: 34931 - protein, 280 aa, Artificial Sequence
  derived and/or modified sequence
MLPKRSRRTVSKSIGPTCPFAGSCEVSKTQRRHCPACRLQKCLDAGMRKDMILSAEALALRRAKQAQRRAQQTPVQLSKEQEELIRTLLGAHTRHMGTMFEQFVQFRPPAHLFIHHQPLPTLAPVLPLVTHFADINTFMVLQVIKFTKDLPVFRSLPIEDQISLLKGAAVEICHIVLNTTFCLQTQNFLCGPLRYTIEDGARDRPGVTQRDEIDQLQEEMALTLQSYIKGQQRRPRDRFLYAKLLGLLAELRSINEAYGYQIQHIQGLSAMMPLLQEICS

SEQ ID NO: 34932 - DNA, 843 bp, Artificial Sequence
  derived and/or modified sequence
atgctgcccaaaaggtcccggcgtaccgtgtcaaaatctatagggcccacctgtccattcgcaggcagctgcgaagtgagtaagactcaacgacgtcactgtcctgcatgccgattacagaagtgcctcgacgcaggaatgcggaaggacatgatcctgagtgccgaggctctcgctttacgcagagccaagcaagcccagagaagggcgcagcagaccccagtgcagctgtccaaggagcaagaggaattgatcaggacactacttggcgctcatacccgccacatgggcaccatgtttgagcagttcgtgcagtttaggccgccggctcacttattcattcatcaccagcctttgcccacgctggcacccgttttgcccctggttactcatttcgctgacataaatacattcatggttcttcaggtaattaagttcactaaagacctccccgtgttccggtccctgccaatcgaggatcagatttctttgcttaagggcgctgcagttgagatctgtcatatcgttttaaatactacgttctgcctccaaacccagaacttcctgtgcgggccactgcggtacacaattgaggatggtgcacgagatcgccccggtgtgacgcagcgggatgagatcgatcagctgcaggaggaaatggctctgacacttcaatcctacattaaggggcagcagagaagaccgagagatcggttcctgtatgcaaagctcctcgggctgttagctgagctgagaagtatcaatgaggcctacggctatcagatacagcatattcagggattatcagcaatgatgccgttacttcaggagatttgttcctag

SEQ ID NO: 34933 - DNA, 774 bp, Artificial Sequence
  derived and/or modified sequence
ggagaggcattccataccagattctgtggcctgcaggtgacatgctgcctaagagaagcaggagtctgtgacagccaccccaacacgtgacgtcatggccagtagggaagatgagctgaggaactgtgtggtatgtggggaccaagccacaggctaccactttaatgcgctgacttgtgagggctgcaagggtttcttcaggagaacagtcagcaaaagcattggtcccacctgcccctttgctggaagctgtgaagtcagcaagactcagaggcgccactgcccagcctgcaggttgcagaagtgcttagatgctggcatgaggaaagacattccctgcccattgaagaccagatctcccttctcaagggagcagctgtggaaatctgtcacatcgtactcaataccactttctgtctccaaacacaaaacttcctctgcgggcctcttcgctacacaattgaagatggagcccgtgaccgacctggagttacccagagagatgagattgatcagctgcaagaggagatggcactgactctgcaaagctacatcaagggccagcagcgaaggccccgggatcggtttctgtatgcgaagttgctaggcctgctggctgagctccggagcattaatgaggcctacgggtaccaaatccagcacatccagggcctgtctgccatgatgccgctgctccaggagatctgcagctgaggccatgctcacttccttccccagctcacctggaacaccctggatacactggagtgggaa

SEQ ID NO: 34934 - DNA, 634 bp, Artificial Sequence
  derived and/or modified sequence
ggagaggcattccataccagattctgtggcctgcaggtgacatgctgcctaagagaagcaggagaacagtcagcaaaagcattggtcccacctgcccctttgctggaagctgtgaagtcagcaagactcagaggcgccactgcccagcctgcaggttgcagaagtgcttagatgctggcatgaggaaagacattccctgcccattgaagaccagatctcccttctcaagggagcagctgtggaaatctgtcacatcgtactcaataccactttctgtctccaaacacaaaacttcctctgcgggcctcttcgctacacaattgaagatggagcccgtgaccgacctggagttacccagagagatgagattgatcagctgcaagaggagatggcactgactctgcaaagctacatcaagggccagcagcgaaggccccgggatcggtttctgtatgcgaagttgctaggcctgctggctgagctccggagcattaatgaggcctacgggtaccaaatccagcacatccagggcctgtctgccatgatgccgctgctccaggagatctgcagctgaggccatgctcacttccttccccagctcacctggaacaccctggatacactggagtgggaa

SEQ ID NO: 34935 - DNA, 774 bp, Artificial Sequence
  derived and/or modified sequence
ggagaggcattccataccagattctgtggcctgcaggtgacatgctgcctaagagaagcaggagaacagtcagcaaaagcattggtcccacctgcccctttgctggaagctgtgaagtcagcaagactcagaggcgccactgcccagcctgcaggttgcagaagtgcttagatgctggcatgaggaaagacacctccagctcatctgttcatccatcaccagcccttgcccaccctggcccctgtgctgcctctggtcacacacttcgcagacatcaacactttcatggtactgcaagtcatcaagtttactaaggacctgcccgtcttccgttccctgcccattgaagaccagatctcccttctcaagggagcagctgtggaaatctgtcacatcgtactcaataccactttctgtctccaaacacaaaacttcctctgcgggcctcttcgctacacaattgaagatggagcccgtgaccgacctggagttacccagagagatgagattgatcagctgcaagaggagatggcactgactctgcaaagctacatcaagggccagcagcgaaggccccgggatcggtttctgtatgcgaagttgctaggcctgctggctgagctccggagcattaatgaggcctacgggtaccaaatccagcacatccagggcctgtctgccatgatgccgctgctccaggagatctgcagctgaggccatgctcacttccttccccagctcacctggaacaccctggatacactggagtgggaa

SEQ ID NO: 34936 - DNA, 843 bp, Artificial Sequence
  derived and/or modified sequence
atgctgcccaagaggagcagaagaacagtgtccaagagcatcggccccacctgcccctttgctggcagctgtgaggtgtccaagacccagaggaggcactgcccagcctgccgcctgcagaagtgcctggatgctggcatgaggaaggacatgatcctgtctgctgaggccctggccctgcggcgggccaagcaggcccagaggcgggcccagcagacccctgtgcagctgagcaaggagcaggaggagctgatccgcaccctgctgggcgcccacaccaggcacatgggcaccatgtttgagcagtttgtgcagttccggcccccagcccacctgttcatccaccaccagcccctgcccaccctggcccctgtgctgcccctggtgacccactttgctgacatcaacaccttcatggtgctgcaggtgatcaagttcaccaaggacctgcctgtgttccgcagcctgcccatcgaggaccagatcagcctgctgaagggagctgctgtggagatctgccacatcgtgctgaacaccaccttctgcctgcagacccagaacttcctgtgtggccccctgcgctacaccattgaagatggagcccgggacaggcctggggtgacccagagagatgaaattgaccagctgcaggaggagatggccctgaccctgcagagctacatcaagggccagcagaggcggccccgggaccgcttcctgtatgccaagctgctgggcctgctggccgagctgcggagcatcaatgaggcctacggctaccagatccagcacatccagggcctgagcgccatgatgcccctgctgcaggagatctgcagctag

SEQ ID NO: 34937 - DNA, 843 bp, Artificial Sequence
  derived and/or modified sequence
atgctgcccaagcggagccggcggaccgtgagcaagagcatcggccccacatgcccctttgcaggttcctgcgaggtcagtaaaacacagcggcgtcattgtcccgcctgtcggctccagaaatgcctggatgctggcatgagaaaagacatgatactgtctgccgaggcgctggctctgcggagggctaagcaggcccagcgccgggctcagcagacgccagtccagctgtccaaagagcaagaggagcttatccgtaccctgctgggagcccacactcggcacatggggacgatgttcgaacagttcgtccaatttcggcctcccgctcatctgttcatccatcatcagccattgcctacacttgctccagtgctgccgttggtcacccatttcgcagatataaataccttcatggtattgcaggttataaagtttacaaaggatcttccagtattccgatccctgccaatcgaggaccagatctctctcctgaaaggcgctgccgtggagatatgtcacattgttctcaatacaacgttctgcctccagacgcagaacttcctgtgcggacctctgcgttatacgattgaggacggtgctagagacagacccggtgttacccaacgcgatgaaattgatcagctgcaagaagaaatggccctcacccttcaaagttatattaaaggacagcagcgccgtccccgcgaccgctttttgtacgcaaaactcctgggattacttgcagagcttcgcagcatcaatgaggcctacggataccaaattcagcatatccaggggctgtccgcaatgatgcccctgctgcaggagatctgtagctag

SEQ ID NO: 34938 - DNA, 843 bp, Artificial Sequence
  derived and/or modified sequence
atgcttccaaagcgctctcgcagaactgtaagtaaaagtattgggccaacatgccctttcgctggttcctgcgaagttagtaagacacagagaagacactgtcctgcttgtagattgcagaagtgtctggacgccggaatgcgtaaagatatgattctgagcgctgaggccctagcacttcggagagccaagcaggcccagcggagagcgcagcaaactcccgtacagctgtctaaggaacaggaggaactgatcaggaccttgctgggagcccatactcgtcatatgggcacaatgtttgaacaatttgtacaatttaggcctccagctcatctattcatacaccaccagcctttgcccaccttggcccctgtccttcccctggtcacacattttgccgatatcaacacattcatggttctgcaggtcattaagttcactaaagacctccccgtgttccggtctcttccaatcgaggatcagatttctctactgaaaggtgccgctgtcgagatatgccacattgttctcaacactactttttgccttcagacccagaactttctctgcggtccactcaggtatacaatcgaggacggcgctcgagatcgcccaggggtgacccagcgagacgagatcgatcagctgcaagaggaaatggccctgaccctgcaatcttatataaagggccagcagcgtcgtcctcgtgatcgctttctgtacgcaaagcttctgggtttgttggccgagctccggtccatcaacgaagcctacggataccaaatacaacacatccagggactctccgctatgatgcccctgctgcaggaaatctgttcttag

SEQ ID NO: 34939 - DNA, 843 bp, Artificial Sequence
  derived and/or modified sequence
atgctgcccaagagaagcagaagaaccgtgagcaagagcatcggccccacctgccccttcgccggcagctgcgaggtgagcaagacccagagaagacactgccccgcctgcagactgcagaagtgcctggacgccggcatgagaaaggacatgatcctgagcgccgaggccctggccctgagaagagccaagcaggcccagagaagagcccagcagacccccgtgcagctgagcaaggagcaggaggagctgatcagaaccctgctgggcgcccacaccagacacatgggcaccatgttcgagcagttcgtgcagttcagaccccccgcccacctgttcatccaccaccagcccctgcccaccctggcccccgtgctgcccctggtgacccacttcgccgacatcaacaccttcatggtgctgcaggtgatcaagttcaccaaggacctgcccgtgttcagaagcctgcccatcgaggaccagatcagcctgctgaagggcgccgccgtggagatctgccacatcgtgctgaacaccaccttctgcctgcagacccagaacttcctgtgcggccccctgagatacaccatcgaggacggcgccagagacagacccggcgtgacccagagagacgagatcgaccagctgcaggaggagatggccctgaccctgcagagctacatcaagggccagcagagaagacccagagacagattcctgtacgccaagctgctgggcctgctggccgagctgagaagcatcaacgaggcctacggctaccagatccagcacatccagggcctgagcgccatgatgcccctgctgcaggagatctgcagctag

SEQ ID NO: 34940 - protein, 309 aa, Artificial Sequence
  derived and/or modified sequence
MASREDELRNCVVCGDQATGYHFNALTCEGCKGFFRRTVSKSIGPTCPFAGSCEVSKTQRRHCPACRLQKCLDAGMRKDMILSAEALALRRAKQAQRRAQQTPVQLSKEQEELIRTLLGAHTRHMGTMFEQFVQFRPPAHLFIHHQPLPTLAPVLPLVTHFADINTFMVLQVIKFTKDLPVFRSLPIEDQISLLKGAAVEICHIVLNTTFCLQTQNFLCGPLRYTIEDGARDRPGVTQRDEIDQLQEEMALTLQSYIKGQQRRPRDRFLYAKLLGLLAELRSINEAYGYQIQHIQGLSAMMPLLQEICS

SEQ ID NO: 34941 - DNA, 930 bp, Artificial Sequence
  derived and/or modified sequence
atggctagtcgtgaggacgagctccgtaactgcgtggtttgtggtgaccaggccaccggatatcatttcaatgcactgacctgtgaggggtgcaaagggtttttccggaggacggtgtctaagtcaatcggcccgacgtgtccattcgctggcagttgtgaggtaagcaaaacacagcggcggcactgcccagcctgccggcttcagaagtgtttagatgctgggatgaggaaagatatgattctgtcagccgaggccctcgctctccgtcgtgccaaacaggcgcagcggagagcccagcaaacacctgttcaactgtctaaagagcaggaagagctgatccggactcttctgggggcacatactaggcacatgggaacaatgttcgaacagtttgtacagttcaggcctcctgcccatctgtttattcatcaccagcccctccccacattggcacccgtgctgcccctggtcacacatttcgccgacatcaacacctttatggttctgcaagtgatcaagttcacaaaagacctgccggtgttccgcagcttacccatcgaggatcagattagcctgctcaaaggggctgccgttgagatatgccacatagtgctgaacaccaccttttgccttcagactcagaacttcctgtgtggtcctttgcgctacaccatcgaggatggagctagggatcgacccggagtaacccagcgggacgagattgatcaactacaggaagagatggcattgactctacagtcttatatcaagggacagcaacggcgccctcgagatcggttcctatatgctaagctgttaggcctgttggctgagctcagaagcataaacgaggcatacggctaccagattcagcacatccagggcttgtcggctatgatgcccctcctccaagagatatgttcatag

SEQ ID NO: 34942 - DNA, 1059 bp, Artificial Sequence
  derived and/or modified sequence
gggagtttggggagaggcattccataccagattctgtggcctgcaggtgacatgctgcctaagagaagcaggagtctgtgacagccaccccaacacgtgacgtcatggccagtagggaagatgagctgaggaactgtgtggtatgtggggaccaagccacaggctaccactttaatgcgctgacttgtgagggctgcaagggtttcttcaggagaacagtcagcaaaagcattggtcccacctgcccctttgctggaagctgtgaagtcagcaagactcagaggcgccactgcccagcctgcaggttgcagaagtgcttagatgctggcatgaggaaagacatgatactgtcggcagaagccctggcattgcggcgagcaaagcaggcccagcggcgggcacagcaaacacctgtgcaactgagtaaggagcaagaagagctgatccggacactcctgggggcccacacccgccacatgggcaccatgtttgaacagtttgtgcagtttaggcctccagctcatctgttcatccatcaccagcccttgcccaccctggcccctgtgctgcctctggtcacacacttcgcagacatcaacactttcatggtactgcaagtcatcaagtttactaaggacctgcccgtcttccgttccctgcccattgaagaccagatctcccttctcaagggagcagctgtggaaatctgtcacatcgtactcaataccactttctgtctccaaacacaaaacttcctctgcgggcctcttcgctacacaattgaagatggagcccgtgaccgacctggagttacccagagagatgagattgatcagctgcaagaggagatggcactgactctgcaaagctacatcaagggccagcagcgaaggccccgggatcggtttctgtatgcgaagttgctaggcctgctggctgagctccggagcattaatgaggcctacgggtaccaaatccagcacatccagggcctgtctgccatgatgccgctgctccaggagatctgcagctgaggccatgctcacttccttccccagc

SEQ ID NO: 34943 - DNA, 930 bp, Artificial Sequence
  derived and/or modified sequence
atggccagcagagaagatgagctgaggaactgtgtggtgtgtggggaccaggccaccggctaccacttcaatgccctgacctgtgagggctgcaagggcttcttccggaggacagtgtccaagagcatcggccccacctgcccctttgctggcagctgtgaggtgtccaagacccagaggaggcactgcccagcctgccgcctgcagaagtgcctggatgctggcatgaggaaggacatgatcctgtctgctgaggccctggccctgcggcgggccaagcaggcccagaggcgggcccagcagacccctgtgcagctgagcaaggagcaggaggagctgatccgcaccctgctgggcgcccacaccaggcacatgggcaccatgtttgagcagtttgtgcagttccggcccccagcccacctgttcatccaccaccagcccctgcccaccctggcccctgtgctgcccctggtgacccactttgctgacatcaacaccttcatggtgctgcaggtgatcaagttcaccaaggacctgcccgtcttccgcagcctgcccatcgaggaccagatcagcctgctgaagggagctgctgtggagatctgccacatcgtgctgaacaccaccttctgcctgcagacccagaacttcctgtgtggccccctgcgctacaccattgaagatggagcccgggacaggcctggggtgacccagagagatgaaattgaccagctgcaggaggagatggccctgaccctgcagagctacatcaagggccagcagaggcggccccgggaccgcttcctgtatgccaagctgctgggcctgctggccgagctgcggagcatcaatgaggcctacggctaccagatccagcacatccagggcctgagcgccatgatgcccctgctgcaggagatctgcagctag

SEQ ID NO: 34944 - DNA, 930 bp, Artificial Sequence
  derived and/or modified sequence
atggccagccgggaggacgagctgcggaactgcgtggtgtgcggcgaccaggctactggatatcattttaatgccctcacatgtgaaggctgtaagggatttttccggcgaactgtctcgaaaagcattggccctacgtgcccatttgccggttcatgcgaggtgtccaaaacacaaagaagacactgtcccgcctgcaggctgcagaagtgtctggacgcggggatgcggaaagatatgattctctctgcagaagctctcgctctgcgcagagccaagcaggcacagcgaagagcccagcagacgccagtgcagctgtctaaggagcaggaggagctcataaggactcttctgggtgctcatacaagacatatgggaacaatgtttgagcagtttgtacagtttcgcccgcccgctcacctattcatccaccaccagccgctgcctacgttggccccagttctcccattggtgacacattttgccgacattaacacatttatggtgctgcaagtcattaagttcaccaaggacctgcccgtgttccgttcacttcccatcgaagatcagatctcactcctcaaaggcgcagcggtcgagatttgccatattgtcctcaacactactttctgcctgcagactcagaattttctgtgtgggccactgaggtatactatcgaggatggtgctagagatcgcccgggagtgacccaaagagatgagatcgatcagctccaggaggagatggcactcaccctccagtcttacattaaaggccagcagcgaaggcctcgcgataggtttctgtatgccaaattacttggcctactggccgaacttaggtctatcaatgaggcctatggttaccagatccagcacatccaaggcttgagtgcgatgatgcccctgctacaggaaatctgtagttag

SEQ ID NO: 34945 - DNA, 930 bp, Artificial Sequence
  derived and/or modified sequence
atggccagcagagaggatgaacttagaaattgcgttgtctgcggggaccaggcaacaggctaccactttaatgctctgacctgtgaaggctgcaaaggcttcttccgtagaactgtgtcaaagagcatcggaccaacctgtccgttcgccggtagctgcgaggtgagcaagactcagcggaggcactgtccggcttgtcggcttcaaaaatgtctcgacgccggaatgcggaaggacatgattctcagcgccgaggccctcgcccttcgtagagcaaagcaagcgcagagaagggcccaacagactccagtgcagctctcaaaggagcaagaggagcttataaggaccctgttgggggctcacacaaggcatatgggaacaatgttcgagcaatttgttcagttccgtcctcctgcccacctatttatacaccatcaacccctccccactctagctccggtactgccgctggtcactcacttcgccgacatcaacacatttatggttctgcaggtgattaaattcacgaaagacctccctgtgttccgctctctgccgatcgaggaccaaatctctctgctcaaaggcgctgccgtggagatctgccacatcgtgctgaacaccacattttgcctgcagacacagaatttcctgtgtggaccactccgctacaccatagaagatggcgcacgggatcgccctggtgtgacccagagagacgagattgatcagctccaggaagaaatggccctgactctgcaaagttacatcaagggccaacagaggaggcctagggacagatttctgtatgcgaaattgctgggtctgctcgctgagctacggtctatcaatgaagcatatggctaccagattcagcacatacaaggactcagtgccatgatgccgctgttacaggagatctgctcatag

SEQ ID NO: 34946 - DNA, 930 bp, Artificial Sequence
  derived and/or modified sequence
atggccagcagagaggacgagctgagaaactgcgtggtgtgcggcgaccaggccaccggctaccacttcaacgccctgacctgcgagggctgcaagggcttcttcagaagaaccgtgagcaagagcatcggccccacctgccccttcgccggcagctgcgaggtgagcaagacccagagaagacactgccccgcctgcagactgcagaagtgcctggacgccggcatgagaaaggacatgatcctgagcgccgaggccctggccctgagaagagccaagcaggcccagagaagagcccagcagacccccgtgcagctgagcaaggagcaggaggagctgatcagaaccctgctgggcgcccacaccagacacatgggcaccatgttcgagcagttcgtgcagttcagaccccccgcccacctgttcatccaccaccagcccctgcccaccctggcccccgtgctgcccctggtgacccacttcgccgacatcaacaccttcatggtgctgcaggtgatcaagttcaccaaggacctgcccgtgttcagaagcctgcccatcgaggaccagatcagcctgctgaagggcgccgccgtggagatctgccacatcgtgctgaacaccaccttctgcctgcagacccagaacttcctgtgcggccccctgagatacaccatcgaggacggcgccagagacagacccggcgtgacccagagagacgagatcgaccagctgcaggaggagatggccctgaccctgcagagctacatcaagggccagcagagaagacccagagacagattcctgtacgccaagctgctgggcctgctggccgagctgagaagcatcaacgaggcctacggctaccagatccagcacatccagggcctgagcgccatgatgcccctgctgcaggagatctgcagctag

SEQ ID NO: 34947 - protein, 324 aa, Artificial Sequence
  derived and/or modified sequence
MLPKRSRRTVSKSIGPTCPFAGSCEVSKTQRRHCPACRLQKCLDAGMRKDMILSAEALALRRAKQAQRRAQQTPVQLSKEQEELIRTLLGAHTRHMGTMFEQFVQFRPPAHLFIHHQPLPTLAPVLPLVTHFADINTFMVLQVIKFTKDLPVFRSLPIEDQISLLKGAAVEICHIVLNTTFCLQTQNFLCGPLRYTIEDGARVGFQVEFLELLFHFHGTLRKLQLQEPEYVLLAAMALFSPAPYLTDRPGVTQRDEIDQLQEEMALTLQSYIKGQQRRPRDRFLYAKLLGLLAELRSINEAYGYQIQHIQGLSAMMPLLQEICS

SEQ ID NO: 34948 - DNA, 975 bp, Artificial Sequence
  derived and/or modified sequence
atgctgccaaagcgatcgcgtagaactgtgtctaagagtatcggccccacatgcccatttgcaggatcctgcgaagtgtccaagactcaacggcgacactgtcctgcgtgcagattgcagaaatgtttagatgccggcatgcgcaaggacatgattctatccgcagaagctctagccttaaggagggcaaaacaggcgcaacgccgcgcacagcaaacacctgttcaactgtccaaggaacaggaggagctaatccgcacactgctgggggcccacactaggcacatgggaaccatgttcgagcagtttgtgcagtttcggcctcctgcccatttgtttatccaccaccaaccactccctacactggctccggtgctccctctcgtgacccactttgctgatattaacacgtttatggtcctacaggtcatcaaatttactaaggacctgcccgtgtttagatctctccccatagaggatcagatttcgctcttgaagggtgccgccgtcgagatctgccacatcgtgttgaacaccacgttctgtctccagacgcagaacttcctatgcggacccctgcgatatactatcgaagatggggccagagtcggttttcaggtcgaattcctagagctgttgtttcactttcacggaacacttcggaaactgcagctacaggaacccgagtatgttctactggccgcaatggccctgttcagccctgctccctatcttaccgataggccaggtgtgactcagagagatgagatagaccagttgcaagaagagatggcgctgactttgcagagttatattaagggtcaacagcgccgaccacgcgacagattcctttacgccaagcttctgggcctgctcgctgagctgcgcagcattaacgaagcctatgggtaccagattcagcatatccagggcctatccgcaatgatgcccctgctccaggagatttgctcttag

SEQ ID NO: 34949 - DNA, 975 bp, Artificial Sequence
  derived and/or modified sequence
atgctgcccaagaggagcagaagaacagtgtccaagagcatcggccccacctgcccctttgctggcagctgtgaggtgtccaagacccagaggaggcactgcccagcctgccgcctgcagaagtgcctggatgctggcatgaggaaggacatgatcctgtctgctgaggccctggccctgcggcgggccaagcaggcccagaggcgggcccagcagacccctgtgcagctgagcaaggagcaggaggagctgatccgcaccctgctgggcgcccacaccaggcacatgggcaccatgtttgagcagtttgtgcagttccggcccccagcccacctgttcatccaccaccagcccctgcccaccctggcccctgtgctgcccctggtgacccactttgctgacatcaacaccttcatggtgctgcaggtgatcaagttcaccaaggacctgcctgtgttccgcagcctgcccatcgaggaccagatcagcctgctgaagggagctgctgtggagatctgccacatcgtgctgaacaccaccttctgcctgcagacccagaacttcctgtgtggccccctgcgctacaccattgaagatggagcccgggtgggcttccaggtggagttcctggagctgctcttccacttccacggcaccctgaggaagctgcagctgcaggagccagaatatgtgctgctggccgccatggccctcttctccccagccccctacctgacagacaggcctggggtgacccagagagatgaaattgaccagctgcaggaggagatggccctgaccctgcagagctacatcaagggccagcagaggcggccccgggaccgcttcctgtatgccaagctgctgggcctgctggccgagctgcggagcatcaatgaggcctacggctaccagatccagcacatccagggcctgagcgccatgatgcccctgctgcaggagatctgcagctag

SEQ ID NO: 34950 - DNA, 975 bp, Artificial Sequence
  derived and/or modified sequence
atgctgcccaagcggagccggcggaccgtgagcaagagcatcggcccgacctgtccctttgctggctcttgtgaagtgtccaagacccagaggcgccactgtcccgcatgccggttgcagaaatgcctggacgccgggatgcgcaaagacatgattctaagcgctgaggcattggccctccgccgcgctaagcaggctcagagaagggcccagcagacccccgtgcagctgtcaaaggaacaggaggaacttattagaacacttttgggcgcccatacaagacacatgggcactatgttcgaacagttcgttcagttccgccctccagcgcatctgtttattcatcatcagccgctgcctacccttgccccagtgctgccgttggttactcatttcgcagacataaacaccttcatggtcctacaagtgattaaattcacaaaagaccttcctgtttttcggtcgctcccgattgaggaccaaataagcctgttaaagggtgccgcggtggaaatctgccacattgttttgaacacaaccttttgtctccagacacagaatttcttgtgtggtccgctacgctatactattgaagacggcgcgagagtgggttttcaggtggagttcttagaattgctgttccattttcacgggacactccgcaagctgcaactgcaagagccggagtatgtgctcctggcagccatggctttgtttagtccggctccatacttgaccgatcggccaggggtgacccaaagagatgagatcgaccagctgcaggaagaaatggccctaactctccagtcatacatcaaggggcaacagcgacgtcctagagatcgttttttgtacgccaaactgctgggactgcttgctgaactcagatctataaatgaggcttatggttatcaaattcagcatattcaaggattatcggctatgatgcccctcctccaggaaatatgtagctag

SEQ ID NO: 34951 - DNA, 975 bp, Artificial Sequence
  derived and/or modified sequence
atgctgcctaaaagaagccggaggaccgtgagcaaatccattggacccacgtgtccttttgctggaagctgcgaggtgtcaaagacccagcgcaggcattgcccagcatgtaggctgcagaaatgcctggacgccggaatgcgcaaggatatgatcctttctgccgaggcgctggccctgcgcagagcgaagcaggcccaaaggcgggctcagcagacccccgtccagctgtctaaggaacaagaggagcttattcgcaccctgttaggcgctcatacccggcacatgggtactatgttcgaacaatttgttcagttcagaccgcctgctcacctttttatccaccatcagccattgcctaccctggcccctgtattaccgttggtaactcattttgccgacattaacactttcatggtccttcaggtgattaagtttactaaggatcttcccgtttttcgttctttaccaatagaggaccagattagcctccttaaaggcgctgccgtggaaatatgtcatattgtgctgaacaccaccttctgcctccagactcagaactttttgtgcgggccactccggtacacaatcgaggatggagccagagttggcttccaagtcgagttcttagaactgctgttccatttccatggcacactgaggaagctccagctgcaagaacccgagtatgtattgttggccgcaatggctcttttttctcctgcaccctaccttacagaccggccaggtgtgacccaacgcgacgagatcgatcagctgcaggaggagatggccttgacccttcagtcctacatcaaagggcagcaaaggcgacctcgggataggtttctatacgctaagctgctgggcctcctagccgaactcaggtcaataaacgaagcgtatgggtatcagatccaacatattcagggactatccgccatgatgccccttctgcaggagatatgttcctag

SEQ ID NO: 34952 - DNA, 975 bp, Artificial Sequence
  derived and/or modified sequence
atgctgcccaagagaagcagaagaaccgtgagcaagagcatcggccccacctgccccttcgccggcagctgcgaggtgagcaagacccagagaagacactgccccgcctgcagactgcagaagtgcctggacgccggcatgagaaaggacatgatcctgagcgccgaggccctggccctgagaagagccaagcaggcccagagaagagcccagcagacccccgtgcagctgagcaaggagcaggaggagctgatcagaaccctgctgggcgcccacaccagacacatgggcaccatgttcgagcagttcgtgcagttcagaccccccgcccacctgttcatccaccaccagcccctgcccaccctggcccccgtgctgcccctggtgacccacttcgccgacatcaacaccttcatggtgctgcaggtgatcaagttcaccaaggacctgcccgtgttcagaagcctgcccatcgaggaccagatcagcctgctgaagggcgccgccgtggagatctgccacatcgtgctgaacaccaccttctgcctgcagacccagaacttcctgtgcggccccctgagatacaccatcgaggacggcgccagagtgggcttccaggtggagttcctggagctgctgttccacttccacggcaccctgagaaagctgcagctgcaggagcccgagtacgtgctgctggccgccatggccctgttcagccccgccccctacctgaccgacagacccggcgtgacccagagagacgagatcgaccagctgcaggaggagatggccctgaccctgcagagctacatcaagggccagcagagaagacccagagacagattcctgtacgccaagctgctgggcctgctggccgagctgagaagcatcaacgaggcctacggctaccagatccagcacatccagggcctgagcgccatgatgcccctgctgcaggagatctgcagctag

SEQ ID NO: 34953 - protein, 315 aa, Artificial Sequence
  derived and/or modified sequence
MLPKRSRRTVSKSIGPTCPFAGSCEVSKTQRRHCPACRLQKCLDAGMRKDMILSAEALALRRAKQAQRRAQQTPVQLSKEQEELIRTLLGAHTRHMGTMFEQFVQFRPPAHLFIHHQPLPTLAPVLPLVTHFADINTFMVLQVIKFTKDLPVFRSLPIEDQISLLKGAAVEICHIVLNTTFCLQTQNFLCGPLRYTIEDGARVSPTVGFQVEFLELLFHFHGTLRKLQLQEPEYVLLAAMALFSPAPYLTDRPGVTQRDEIDQLQEEMALTLQSYIKGQQRRPRDRSPGTPWIHWSGKMLGPKIGPGSKGAQWLQ

SEQ ID NO: 34954 - protein, 274 aa, Artificial Sequence
  derived and/or modified sequence
MLPKRSRRTVSKSIGPTCPFAGSCEVSKTQRRHCPACRLQKCLDAGMRKDMILSAEALALRRAKQAQRRAQQTPVQLSKEQEELIRTLLGAHTRHMGTMFEQFVQFRPPAHLFIHHQPLPTLAPVLPLVTHFADINTFMVLQVIKFTKDLPVFRSLPIEDQISLLKGAAVEICHIVLNTTFCLQTQNFLCGPLRYTIEDGARVSPTVGFQVEFLELLFHFHGTLRKLQLQEPEYVLLAAMALFSPGEHLPKPRAFCCTTSAQILSSLSPSTQAF

SEQ ID NO: 34955 - DNA, 948 bp, Artificial Sequence
  derived and/or modified sequence
atgctgcccaagcgatcccgaaggaccgtgtccaaatctatcggacccacttgcccctttgccggcagctgcgaagtgtctaagacgcaacgccggcattgccctgcatgcagactgcagaagtgccttgatgctggcatgcgcaaggatatgattctttcagctgaagcactagctcttagacgcgcaaaacaggcacagagacgggcacagcagacccctgtgcagttgtccaaagaacaagaggaactcatacgaactttgctaggtgcacatactcgccacatgggtacaatgttcgagcagttcgtgcagtttcggccccctgctcatctgtttatccaccaccagcctctgcctacactggccccagttctgcctcttgtgacccatttcgcagacatcaataccttcatggttttgcaggtgatcaagtttaccaaagatttgcccgtcttccgtagcttgccaatagaggaccaaatttctttgctcaagggagcagcagtggagatctgccacatcgtgctgaacactaccttctgcctccagacccagaacttcctgtgcggccctctgcggtacacaattgaagatggcgcccgcgtttcgccgacagtggggttccaggtagagttcctcgaattgctgtttcattttcatggaacactgcgcaaactgcagttacaggagcccgaatacgtcctgctggctgctatggcattgttttctcccgccccctacctcactgaccggccgggtgtgacacaaagagacgaaattgatcagctacaggaagaaatggcactaactttacaatcctacattaaggggcaacagagacgtccacgagaccggagccctggcaccccgtggattcactggtctggaaagatgctggggcccaaaatcgggccagggagtaaaggcgcacagtggctgcagtag

SEQ ID NO: 34956 - DNA, 825 bp, Artificial Sequence
  derived and/or modified sequence
atgcttccaaaacgtagcagaagaacagtatctaaatcgataggccccacgtgtcccttcgcggggagttgcgaggtaagcaaaacgcagcgccgccactgcccagcttgccggctgcagaagtgcctcgatgcgggcatgcgcaaagatatgattttaagcgccgaggctctggccctaagaagggccaagcaggctcagagacgagctcaacaaactcccgtacagctgtctaaggagcaggaggaactcatcaggaccctgttgggggctcatactcggcatatgggtacaatgttcgaacagtttgtacagtttcgacctcctgcccacctgttcattcatcaccaacctctgccaacactggcccccgttctgcccctggtcacacattttgccgatataaacacattcatggtactgcaggtaatcaagttcaccaaagacctgcccgtctttagatcccttccaattgaggatcaaataagtctgcttaagggtgcagcagtggaaatctgtcatattgtgttgaacacaaccttttgcctgcagacgcaaaattttctgtgtggccccctccggtacactatcgaggatggggcccgtgtgtcccccacagtgggctttcaagtggagttcctggagctacttttccattttcacggaacactgaggaaactccagctgcaggaaccggaatatgtccttctggcggctatggccctcttcagtccaggagagcacttgcccaaaccaagagcattttgctgcaccacaagtgcccagatactgagctcccttagcccctctacacaggcattctag

SEQ ID NO: 34957 - DNA, 989 bp, Artificial Sequence
  derived and/or modified sequence
ggagaggcattccataccagattctgtggcctgcaggtgacatgctgcctaagagaagcaggagaacagtcagcaaaagcattggtcccacctgcccctttgctggaagctgtgaagtcagcaagactcagaggcgccactgcccagcctgcaggttgcagaagtgcttagatgctggcatgaggaaagacatgatactgtcggcagaagccctggcattgcggcgagcaaagcaggcccagcggcgggcacagcaaacacctgtgcaactgagtaaggagcaagaagagctgatccggacactcctgggggcccacacccgccacatgggcaccatgtttgaacagtttgtgcagtttaggcctccagctcatctgttcatccatcaccagcccttgcccaccctggcccctgtgctgcctctggtcacacacttcgcagacatcaacactttcatggtactgcaagtcatcaagtttactaaggacctgcccgtcttccgttccctgcccattgaagaccagatctcccttctcaagggagcagctgtggaaatctgtcacatcgtactcaataccactttctgtctccaaacacaaaacttcctctgcgggcctcttcgctacacaattgaagatggagcccgtgtatctcccacagtggggttccaggtagagtttttggagttgctctttcacttccatggaacactacgaaaactgcagctccaagagcctgagtatgtgctcttggctgccatggccctcttctctcctgctccctatcttacagaccgacctggagttacccagagagatgagattgatcagctgcaagaggagatggcactgactctgcaaagctacatcaagggccagcagcgaaggccccgggatcgctcacctggaacaccctggatacactggagtgggaaaatgctgggaccaaagattgggccgggttcaaagggagcccagtggttgcaatga

SEQ ID NO: 34958 - DNA, 948 bp, Artificial Sequence
  derived and/or modified sequence
atgctgcccaagaggagcagaagaacagtgtccaagagcatcggccccacctgcccctttgctggcagctgtgaggtgtccaagacccagaggaggcactgcccagcctgccgcctgcagaagtgcctggatgctggcatgaggaaggacatgatcctgtctgctgaggccctggccctgcggcgggccaagcaggcccagaggcgggcccagcagacccctgtgcagctgagcaaggagcaggaggagctgatccgcaccctgctgggcgcccacaccaggcacatgggcaccatgtttgagcagtttgtgcagttccggcccccagcccacctgttcatccaccaccagcccctgcccaccctggcccctgtgctgcccctggtgacccactttgctgacatcaacaccttcatggtgctgcaggtgatcaagttcaccaaggacctgcctgtgttccgcagcctgcccatcgaggaccagatcagcctgctgaagggagctgctgtggagatctgccacatcgtgctgaacaccaccttctgcctgcagacccagaacttcctgtgtggccccctgcgctacaccattgaagatggagcccgggtgagccccaccgtgggcttccaggtggagttcctggagctgctcttccacttccacggcaccctgaggaagctgcagctgcaggagccagaatatgtgctgctggccgccatggccctcttctccccagccccctacctgacagacaggcctggggtgacccagagagatgaaattgaccagctgcaggaggagatggccctgaccctgcagagctacatcaagggccagcagaggcggccccgggacaggagccctggcaccccctggatccactggagcggcaagatgctgggccccaagattggccctggcagcaaaggagcccagtggctgcagtag

SEQ ID NO: 34959 - DNA, 825 bp, Artificial Sequence
  derived and/or modified sequence
atgctgcccaagaggagcagaagaacagtgtccaagagcatcggccccacctgcccctttgctggcagctgtgaggtgtccaagacccagaggaggcactgcccagcctgccgcctgcagaagtgcctggatgctggcatgaggaaggacatgatcctgtctgctgaggccctggccctgcggcgggccaagcaggcccagaggcgggcccagcagacccctgtgcagctgagcaaggagcaggaggagctgatccgcaccctgctgggcgcccacaccaggcacatgggcaccatgtttgagcagtttgtgcagttccggcccccagcccacctgttcatccaccaccagcccctgcccaccctggcccctgtgctgcccctggtgacccactttgctgacatcaacaccttcatggtgctgcaggtgatcaagttcaccaaggacctgcctgtgttccgcagcctgcccatcgaggaccagatcagcctgctgaagggagctgctgtggagatctgccacatcgtgctgaacaccaccttctgcctgcagacccagaacttcctgtgtggccccctgcgctacaccattgaagatggagcccgggtgagccccaccgtgggcttccaggtggagttcctggagctgctcttccacttccacggcaccctgaggaagctgcagctgcaggagccagaatatgtgctgctggccgccatggccctcttcagccctggagagcacctgcccaagccccgggccttctgctgcaccaccagcgcccagatcctgagcagcctgagccccagcacccaggccttctag

SEQ ID NO: 34960 - DNA, 948 bp, Artificial Sequence
  derived and/or modified sequence
atgctgcccaagcggagccggcggaccgtgagcaagagcatcggccccacatgccctttcgccggaagttgtgaagtgtccaaaacacagagaagacattgtcccgcctgccggctacagaagtgtctcgatgccggaatgcggaaagatatgattctgagtgctgaggctctggccctgcgcagagctaaacaggcccagagacgggcacaacagacacccgtccagctgtctaaagagcaggaggagctcattcggaccctgctcggtgcccatactcggcatatggggactatgttcgagcagtttgtgcaattcaggccgccagcgcacttgttcattcaccaccagcctctgcccacactggcaccggttctgccgcttgtgacccactttgctgatataaatacgttcatggtactgcaagtaattaaatttacgaaggatctccctgtgtttcgttctctccctatcgaagaccagatcagtctgttaaagggggccgccgtggaaatctgccatattgtactcaatacaacattttgccttcaaactcagaattttctgtgtggcccactacgatacaccatagaagacggcgcacgcgtgtcgcctactgtggggtttcaggttgagtttttggaactgctcttccacttccatggcaccttgagaaaactccaattacaggaacctgaatatgttctcctggcagctatggcactcttctctccggcaccctacttgactgaccgcccaggggtgacccagagggacgagatcgatcagctacaagaggaaatggctttaacccttcagtcatatatcaagggccagcagcggcgcccgcgggataggtcacccggcacaccctggatacactggtccggaaaaatgctggggcctaaaataggacctggcagcaaaggcgcacagtggctccagtag

SEQ ID NO: 34961 - DNA, 825 bp, Artificial Sequence
  derived and/or modified sequence
atgctgcccaagcggagccggcggaccgtgagcaagagcatcggccccacttgcccttttgctggcagctgcgaggtttcgaagacccagagaaggcactgcccagcatgtcggctgcagaaatgcctggatgccggcatgaggaaggacatgatcctctccgccgaggcccttgctttacgacgagcaaaacaagcgcagcgtagggcccaacagacgcccgtccaactgtccaaggagcaggaagagctgattagaactctcctgggtgctcatactcggcatatggggactatgtttgagcaatttgtgcaattccgtccacccgctcaccttttcatccatcatcagcctctacctacactagctccggtactgccgctcgtaacccattttgccgacatcaatacattcatggtcctccaggtgataaaattcactaaagatcttcccgtgttccgcagcctccctatagaagaccaaatatctctgctgaaaggcgctgcagtggaaatatgtcacatcgtgctgaacacaaccttttgtcttcagacacagaattttctctgcggccctctccgatataccatcgaggacggagctcgcgtgtcccctacagtcgggttccaggtggagtttttggagttactattccacttccatggaacactgcggaagctgcaactgcaggagccggaatacgttttgctcgcagcaatggctctcttttctcctggagagcatctacccaaacctcgagctttctgttgtaccacctcagcacaaattttgtcctccctatcaccctctacccaggcattctag

SEQ ID NO: 34962 - DNA, 948 bp, Artificial Sequence
  derived and/or modified sequence
atgctcccaaaaagatcacgacgaaccgtgagcaagtctattgggccaacgtgtcctttcgccggatcttgcgaagtatcaaaaactcagaggaggcactgccctgcatgccgccttcagaagtgcctggacgctggcatgagaaaagacatgattctgtcggcagaggccctggccctcaggcgagcaaagcaggctcaacgccgagcccagcagaccccagtccagttgtctaaggagcaggaggaacttatccgcacactcctaggagcccacacacggcacatggggacaatgttcgagcagttcgtccagttccgacctccagcccatcttttcattcaccatcagccacttcctacgctggcccctgtgttacctctggtgacgcacttcgccgatatcaacaccttcatggtgctgcaagttataaaattcaccaaggacctgcccgtcttcaggtcgctgcccatagaggaccaaattagcctgctcaaaggtgccgctgtcgagatatgtcatattgttctgaacacaaccttttgccttcaaacccaaaatttcctatgcggtcctttgaggtacacgattgaagatggcgcacgtgtctctcccactgtgggattccaagtggagtttctggaattactgttccactttcacggaactcttcgcaaactgcaactccaggaacccgaatacgtactcctcgcggctatggctttatttagtccagccccataccttactgaccgaccgggagtcacacagcgcgacgaaattgaccagttgcaggaggagatggccttgaccttgcagtcctatatcaaagggcagcagaggcggcctcgagaccgtagccctggtactccatggatccactggagtggcaagatgttagggcctaagattggccctgggagcaagggcgctcagtggctgcagtag

SEQ ID NO: 34963 - DNA, 825 bp, Artificial Sequence
  derived and/or modified sequence
atgcttcctaagaggagcagaagaacagtgtcaaagtcaataggacccacatgtccatttgcgggaagctgtgaggtcagtaagacgcagcgccgacactgtcccgcttgcaggttacagaaatgcctcgacgccggaatgagaaaagacatgatactgtccgccgaagctctcgcccttcggcgagccaaacaggctcaaagacgggctcagcagacaccagtgcagttatcaaaagaacaggaggagttgattagaacattactcggggcacatacgcgacatatgggaacaatgttcgaacaatttgtacagtttcgccctccagcccacctgttcatccaccaccagcctctacccacacttgcacccgtattgcccctggttacacatttcgccgatataaacacattcatggtattgcaagtgattaagttcaccaaagacttaccagtgttccggtccctgcccattgaagaccaaataagccttctaaaaggagcagctgtggaaatctgccacatcgtgctgaataccactttttgcctgcagactcagaattttctatgcggccctctccgatataccattgaggatggcgcacgggtgtctcccacggttggttttcaagtggagtttctcgagctactgtttcactttcatggaactctgcggaaactgcagctccaggaaccggaatatgttctgcttgctgcaatggccctcttcagtccaggagaacacctgcccaaacctcgtgctttctgttgcactaccagcgctcagattctctctagcctatccccaagtacccaggcgttttag

SEQ ID NO: 34964 - DNA, 948 bp, Artificial Sequence
  derived and/or modified sequence
atgctgcccaagagaagcagaagaaccgtgagcaagagcatcggccccacctgccccttcgccggcagctgcgaggtgagcaagacccagagaagacactgccccgcctgcagactgcagaagtgcctggacgccggcatgagaaaggacatgatcctgagcgccgaggccctggccctgagaagagccaagcaggcccagagaagagcccagcagacccccgtgcagctgagcaaggagcaggaggagctgatcagaaccctgctgggcgcccacaccagacacatgggcaccatgttcgagcagttcgtgcagttcagaccccccgcccacctgttcatccaccaccagcccctgcccaccctggcccccgtgctgcccctggtgacccacttcgccgacatcaacaccttcatggtgctgcaggtgatcaagttcaccaaggacctgcccgtgttcagaagcctgcccatcgaggaccagatcagcctgctgaagggcgccgccgtggagatctgccacatcgtgctgaacaccaccttctgcctgcagacccagaacttcctgtgcggccccctgagatacaccatcgaggacggcgccagagtgagccccaccgtgggcttccaggtggagttcctggagctgctgttccacttccacggcaccctgagaaagctgcagctgcaggagcccgagtacgtgctgctggccgccatggccctgttcagccccgccccctacctgaccgacagacccggcgtgacccagagagacgagatcgaccagctgcaggaggagatggccctgaccctgcagagctacatcaagggccagcagagaagacccagagacagaagccccggcaccccctggatccactggagcggcaagatgctgggccccaagatcggccccggcagcaagggcgcccagtggctgcagtag

SEQ ID NO: 34965 - DNA, 825 bp, Artificial Sequence
  derived and/or modified sequence
atgctgcccaagagaagcagaagaaccgtgagcaagagcatcggccccacctgccccttcgccggcagctgcgaggtgagcaagacccagagaagacactgccccgcctgcagactgcagaagtgcctggacgccggcatgagaaaggacatgatcctgagcgccgaggccctggccctgagaagagccaagcaggcccagagaagagcccagcagacccccgtgcagctgagcaaggagcaggaggagctgatcagaaccctgctgggcgcccacaccagacacatgggcaccatgttcgagcagttcgtgcagttcagaccccccgcccacctgttcatccaccaccagcccctgcccaccctggcccccgtgctgcccctggtgacccacttcgccgacatcaacaccttcatggtgctgcaggtgatcaagttcaccaaggacctgcccgtgttcagaagcctgcccatcgaggaccagatcagcctgctgaagggcgccgccgtggagatctgccacatcgtgctgaacaccaccttctgcctgcagacccagaacttcctgtgcggccccctgagatacaccatcgaggacggcgccagagtgagccccaccgtgggcttccaggtggagttcctggagctgctgttccacttccacggcaccctgagaaagctgcagctgcaggagcccgagtacgtgctgctggccgccatggccctgttcagccccggcgagcacctgcccaagcccagagccttctgctgcaccaccagcgcccagatcctgagcagcctgagccccagcacccaggccttctag

SEQ ID NO: 34966 - protein, 296 aa, Artificial Sequence
  derived and/or modified sequence
MASREDELRNCVVCGDQATGYHFNALTCEGCKGFFRRTVSKSIGPTCPFAGSCEVSKTQRRHCPACRLQKCLDAGMRKDMILSAEALALRRAKQAQRRAQQTPVQLSKEQEELIRTLLGAHTRHMGTMFEQFVQFRPPAHLFIHHQPLPTLAPVLPLVTHFADINTFMVLQVIKFTKDLPVFRSLPIEDQISLLKGAAVEICHIVLNTTFCLQTQNFLCGPLRYTIEDGARDRPGVTQRDEIDQLQEEMALTLQSYIKGQQRRPRDRSPGTPWIHWSGKMLGPKIGPGSKGAQWLQ

SEQ ID NO: 34967 - DNA, 360 bp, Artificial Sequence
  derived and/or modified sequence
atggccagccgtgaggatgagctccgtaattgtgtagtgtgcggagaccaagccactggctaccattttaacgctctgacttgtgaagggtgtaaagggtttttcagaagaactgtgtctaaatcgatcgggcccacatgcccctttgcagggtcgtgtgaggtatccaagacccagcggcggcactgcccagcctgtagacttcagaaatgtttggatgcaggaatgcgcaaggatacctcctcatcatctgtccatcctagtcctgctttggcccaccccgggccctgcgctgcctctgggcacacacttagacgtcatcagcactttcacgggacagcttctcaccaggtgtattag

SEQ ID NO: 34968 - DNA, 444 bp, Artificial Sequence
  derived and/or modified sequence
atggcctccagagaagatgagttaaggaactgcgtggtatgcggggaccaggcgacaggatatcattttaacgcactgacatgcgagggatgtaaaggtttttttcgaagaacagtctcaaagtccataggccctacttgtccatttgccgggtcatgcgaagtgtccaagactcagaggcgacactgccccgcttgccggctgcaaaagtgcttagacgcgggaatgaggaaagatattccctgccctctgaaaactaggtcaccattttctagggaacagctttggaagtccgtgacgagttattcgatccctctgtcagtgagcaaacacaaaacctctagcgcgggtcttttcgctacacagctgaaaatggagcccgtcactgatctggaactccctcgggagatgcgcctaatctcctgcaagcgacggtggcactag

SEQ ID NO: 34969 - DNA, 891 bp, Artificial Sequence
  derived and/or modified sequence
atggcttcacgagaggacgagctgcggaactgcgtggtgtgtggagaccaagccaccggataccatttcaacgctcttacttgcgagggatgcaaaggcttctttcgtaggacagttagcaagtctattggaccgacatgtccattcgcaggatcatgcgaggtgtcaaagacccagcggcgccattgtccagcatgccgcctccagaagtgtttggacgctggcatgcgaaaagatatgatcttatccgccgaggccttagctctaaggcgcgcaaagcaggctcagagacgggcacagcaaaccccggtgcagctgagcaaggagcaggaagaattaattaggacactcttgggcgcccatacaaggcatatgggcacaatgtttgaacagttcgtgcaattccgccccccagcccacctctttatccaccatcagccactaccaactcttgcccccgtgctcccgcttgtcacgcacttcgcagatatcaacactttcatggtgctgcaggttatcaaatttaccaaagacctgccagtgttccgaagcctgcctattgaagaccagatctcgctcctgaagggtgctgccgtggaaatctgccacatcgtcctgaatactaccttctgcttgcagactcagaacttcctttgcggccctttacggtatacaatcgaagacggcgccagggaccgtcccggagtgactcagcgtgacgaaatcgatcaactgcaggaagagatggcacttaccttgcaaagctacatcaaaggccaacaaagacgcccgcgagaccgaagtccagggactccatggatccattggtctggcaagatgctggggccaaaaattgggcccggctctaagggggcacagtggctgcagtag

SEQ ID NO: 34970 - DNA, 444 bp, Artificial Sequence
  derived and/or modified sequence
atggcctcgcgagaagacgaattacggaattgcgtcgtttgcggtgaccaagctaccggatatcattttaacgcgttgacttgcgagggatgtaagggattcttccgacgcacagtgtctaaaagcattggaccaacctgcccttttgccggcagctgtgaggtttcaaagactcaaaggaggcactgcccggcctgcagactgcagaaatgcctcgatgcaggcatgaggaaagacatcccctgtccactgaaaacaaggagccctttttctagggaacagttgtggaagtctgtgacctcctacagcatcccgctgtctgtctctaagcataagacctcaagcgctggcctatttgcaactcagctgaagatggaaccagttacagaccttgagctgccaagggaaatgaggttgatctcatgtaagaggaggtggcactag

SEQ ID NO: 34971 - DNA, 717 bp, Artificial Sequence
  derived and/or modified sequence
atggcctctagggaggacgaactgagaaactgtgtagtgtgcggagatcaagctaccggctaccactttaacgcactcacatgcgaaggatgtaagggcttttttagacggactgtctccaagagcatcggtcccacctgtcctttcgctgggtcctgtgaggtgagtaagacccagagaagacactgtcctgcctgtcggctgcagaagtgcctggacgcgggcatgcggaaggatatgattctgtcagccgaggccctggcgctgcgccgggcaaaacaggcccagagacgggctcagcagacaccagtgcagctgtccaaggaacaagaggaattaattaggaccctgctgggagcgcacaccaggcacatgggcacaatgtttgagcaatttgtacagttcaggccaccagcccacttgttcatacatcaccaacctcttcccacgctggcaccggttctgcccctggtgacacactttgccgatattaacacctttatggtgctgcaggtgatcaagttcacaaaggatctaccagtgttccgctctctccccatagaggatcagatcagcctgctgaaaggggccgccgtggaaatctgtcatatcgtgctcaataccacgttctgtcttcagacacagaacttcctgtgtggtccgctgagatacacaatcgaagatggagctcgcggggagatggtcctcgagcagtag

SEQ ID NO: 34972 - DNA, 985 bp, Artificial Sequence
  derived and/or modified sequence
ggagaggcattccataccagattctgtggcctgcaggtgacatgctgcctaagagaagcaggagtctgtgacagccaccccaacacgtgacgtcatggccagtagggaagatgagctgaggaactgtgtggtatgtggggaccaagccacaggctaccactttaatgcgctgacttgtgagggctgcaagggtttcttcaggagaacagtcagcaaaagcattggtcccacctgcccctttgctggaagctgtgaagtcagcaagactcagaggcgccactgcccagcctgcaggttgcagaagtgcttagatgctggcatgaggaaagacatgatactgtcggcagaagccctggcattgcggcgagcaaagcaggcccagcggcgggcacagcaaacacctgtgcaactgagtaaggagcaagaagagctgatccggacactcctgggggcccacacccgccacatgggcaccatgtttgaacagtttgtgcagtttaggcctccagctcatctgttcatccatcaccagcccttgcccaccctggcccctgtgctgcctctggtcacacacttcgcagacatcaacactttcatggtactgcaagtcatcaagtttactaaggacctgcccgtcttccgttccctgcccattgaagaccagatctcccttctcaagggagcagctgtggaaatctgtcacatcgtactcaataccactttctgtctccaaacacaaaacttcctctgcgggcctcttcgctacacaattgaagatggagcccgtgaccgacctggagttacccagagagatgagattgatcagctgcaagaggagatggcactgactctgcaaagctacatcaagggccagcagcgaaggccccgggatcgctcacctggaacaccctggatacactggagtgggaaaatgctgggaccaaagattgggccgggttcaaagggagcccagtggttgcaatga

SEQ ID NO: 34973 - DNA, 360 bp, Artificial Sequence
  derived and/or modified sequence
atggccagcagagaagatgagctgaggaactgtgtggtgtgtggggaccaggccaccggctaccacttcaatgccctgacctgtgagggctgcaagggcttcttccggaggacagtgtccaagagcatcggccccacctgcccctttgctggcagctgtgaggtgtccaagacccagaggaggcactgcccagcctgccgcctgcagaagtgcctggatgctggcatgaggaaggacaccagcagcagctctgtgcaccccagccctgccctggcccaccctggcccctgtgccgccagcggccacaccctgcggcggcaccagcacttccatggaacagccagccaccaggtgtactag

SEQ ID NO: 34974 - DNA, 444 bp, Artificial Sequence
  derived and/or modified sequence
atggccagcagagaagatgagctgaggaactgtgtggtgtgtggggaccaggccaccggctaccacttcaatgccctgacctgtgagggctgcaagggcttcttccggaggacagtgtccaagagcatcggccccacctgcccctttgctggcagctgtgaggtgtccaagacccagaggaggcactgcccagcctgccgcctgcagaagtgcctggatgctggcatgaggaaggacatcccctgccccctgaagaccaggagccccttcagccgggagcagctgtggaagtctgtgaccagctacagcatccccctgtctgtgtccaagcacaagaccagcagcgctggcctgtttgccacccagctgaagatggagcctgtgacagacctggagctgccccgggagatgaggctcatcagctgcaagaggcgctggcactag

SEQ ID NO: 34975 - DNA, 891 bp, Artificial Sequence
  derived and/or modified sequence
atggccagcagagaagatgagctgaggaactgtgtggtgtgtggggaccaggccaccggctaccacttcaatgccctgacctgtgagggctgcaagggcttcttccggaggacagtgtccaagagcatcggccccacctgcccctttgctggcagctgtgaggtgtccaagacccagaggaggcactgcccagcctgccgcctgcagaagtgcctggatgctggcatgaggaaggacatgatcctgtctgctgaggccctggccctgcggcgggccaagcaggcccagaggcgggcccagcagacccctgtgcagctgagcaaggagcaggaggagctgatccgcaccctgctgggcgcccacaccaggcacatgggcaccatgtttgagcagtttgtgcagttccggcccccagcccacctgttcatccaccaccagcccctgcccaccctggcccctgtgctgcccctggtgacccactttgctgacatcaacaccttcatggtgctgcaggtgatcaagttcaccaaggacctgcccgtcttccgcagcctgcccatcgaggaccagatcagcctgctgaagggagctgctgtggagatctgccacatcgtgctgaacaccaccttctgcctgcagacccagaacttcctgtgtggccccctgcgctacaccattgaagatggagcccgggacaggcctggggtgacccagagagatgaaattgaccagctgcaggaggagatggccctgaccctgcagagctacatcaagggccagcagaggcggccccgggacaggagccctggcaccccctggatccactggagcggcaagatgctgggccccaagattggccctggcagcaagggggcccagtggctgcagtag

SEQ ID NO: 34976 - DNA, 717 bp, Artificial Sequence
  derived and/or modified sequence
atggccagcagagaagatgagctgaggaactgtgtggtgtgtggggaccaggccaccggctaccacttcaatgccctgacctgtgagggctgcaagggcttcttccggaggacagtgtccaagagcatcggccccacctgcccctttgctggcagctgtgaggtgtccaagacccagaggaggcactgcccagcctgccgcctgcagaagtgcctggatgctggcatgaggaaggacatgatcctgtctgctgaggccctggccctgcggcgggccaagcaggcccagaggcgggcccagcagacccctgtgcagctgagcaaggagcaggaggagctgatccgcaccctgctgggcgcccacaccaggcacatgggcaccatgtttgagcagtttgtgcagttccggcccccagcccacctgttcatccaccaccagcccctgcccaccctggcccctgtgctgcccctggtgacccactttgctgacatcaacaccttcatggtgctgcaggtgatcaagttcaccaaggacctgcccgtcttccgcagcctgcccatcgaggaccagatcagcctgctgaagggagctgctgtggagatctgccacatcgtgctgaacaccaccttctgcctgcagacccagaacttcctgtgtggccccctgcgctacaccattgaagatggagcccggggggagatggtgctggagcagtag

SEQ ID NO: 34977 - DNA, 360 bp, Artificial Sequence
  derived and/or modified sequence
atggccagccgggaggacgagctgcggaactgcgtggtgtgcggcgaccaggcgactggttaccacttcaacgctttaacctgtgaagggtgtaaaggcttctttagacggaccgtgtccaagagcataggacctacatgccctttcgccgggagctgcgaagtctcaaaaactcaaagacggcattgtccggcttgtcgcctgcaaaagtgtctggatgcgggaatgcggaaggatacaagctcttcctctgtgcatcctagtcccgccctggctcatcccggcccttgcgccgcttcagggcataccctgaggaggcaccagcatttccatggtaccgcatctcatcaggtttactag

SEQ ID NO: 34978 - DNA, 444 bp, Artificial Sequence
  derived and/or modified sequence
atggccagccgggaggacgagctgcggaactgcgtggtgtgcggcgatcaggccactggatatcactttaatgctcttacctgtgaaggttgcaaaggattcttcaggagaacagtgagcaaatccattggccctacatgcccttttgcaggctcatgcgaggtgtcaaagacacaaaggcgccattgcccagcttgccgactgcagaagtgcctcgatgcaggcatgcgaaaggatattccatgccccttgaaaacaaggtcccctttcagtcgggagcagctgtggaagtcagtgacctcctatagcatccctctaagcgttagcaagcacaaaacctcatcagcaggtcttttcgccacacagctaaaaatggagccagttacagatcttgagcttcccagggagatgcgtctgatttcgtgcaaaagacgctggcactag

SEQ ID NO: 34979 - DNA, 891 bp, Artificial Sequence
  derived and/or modified sequence
atggccagccgggaggacgagctgcggaactgcgtggtgtgcggcgatcaagcaaccggctatcattttaacgctctgacatgtgagggatgtaagggctttttcaggagaacagtttctaagagtatcggacctacatgccctttcgctggctcctgcgaagtgtccaagacacagcgcaggcactgccctgcctgccggctacagaaatgtttggacgcggggatgcgcaaggatatgatccttagtgcagaagcgctggccctcagaagagccaagcaggcccagagacgcgcccagcaaacaccagttcagctttctaaagagcaagaagagcttatccgtacactcctcggggcccacactagacatatgggaactatgtttgagcagttcgtccagtttaggcctccagctcaccttttcattcaccatcagcccctgccaactctggcccctgtgctccctctggtcacacacttcgctgatatcaatactttcatggtgctgcaggttatcaagttcacaaaggatctgcctgtctttaggtccctccctatcgaggaccagatttcccttctgaagggtgcggccgttgagatttgtcacattgtactgaataccaccttttgccttcagactcagaacttcctatgtggccctcttaggtatacaatcgaagacggcgcccgcgaccgcccaggcgtgactcagagagacgagatcgatcagctgcaggaagagatggcgctcaccctgcagtcttacataaagggacagcaaaggcggcctcgagataggagcccaggaacaccctggattcactggagtggaaagatgcttggccctaaaattggccccggctctaagggcgcccagtggctccagtag

SEQ ID NO: 34980 - DNA, 444 bp, Artificial Sequence
  derived and/or modified sequence
atggccagccgggaggacgagctgcggaactgcgtggtgtgcggcgatcaggccaccggatatcacttcaacgccctgacctgcgaaggatgtaaggggttcttccgacgcaccgtttctaaatccatagggccaacttgcccctttgccggttcctgcgaggtttcaaagacacaaagacgacactgtcccgcttgtcgtctccagaagtgtttggacgctggcatgcgaaaagatataccgtgccctctgaagactcgttctcccttcagccgggaacagctttggaaatcagttaccagttactcaatccccctgagcgtctctaaacacaaaacctccagtgccgggctgttcgccacccagctgaaaatggaaccggtgaccgacctggaattacccagagagatgagacttatttcatgtaagcgtcggtggcattag

SEQ ID NO: 34981 - DNA, 717 bp, Artificial Sequence
  derived and/or modified sequence
atggccagccgggaggacgagctgcggaactgcgtggtgtgcggcgatcaggccacgggctaccattttaatgccctgacgtgtgaaggttgtaaaggctttttccggagaactgtgagtaagagtatcggtcctacctgcccattcgcaggctcctgcgaagtgtcaaagacacagagacggcactgtcctgcctgcaggctgcagaaatgtttggatgctggcatgcgcaaggatatgatcctatccgctgaggccctcgcactacgccgtgctaagcaggctcaacgaagggcccaacaaacaccggttcaactgtccaaagaacaggaggaattaattaggaccctccttggagctcatactagacatatgggaaccatgtttgagcagtttgtgcagttccggccacctgcccacctgttcatccatcaccagcctctccctactctcgccccagtgctgcctctcgtaactcacttcgcagatattaataccttcatggttctgcaggtgatcaagttcacaaaggatctcccagtgttccggtccctacccatcgaagaccaaatctcactgctgaaaggtgctgctgtggagatatgtcacatcgtgctgaacacaacattctgtcttcagacacagaacttcctctgcggacctctacgctacactatcgaagatggtgcccggggcgaaatggtccttgagcagtag

SEQ ID NO: 34982 - DNA, 360 bp, Artificial Sequence
  derived and/or modified sequence
atggctagccgtgaggatgagttgaggaactgcgtcgtgtgtggtgatcaagccactggatatcactttaacgccctgacctgtgaggggtgtaagggcttctttaggaggaccgtgagcaaaagtatagggcctacctgcccctttgccggttcttgcgaagtctccaaaacccagaggcggcactgcccggcttgtagactgcagaagtgtctggacgccggaatgcgtaaggataccagcagctcttcggtgcatccaagccccgctcttgcccaccccggtccttgcgctgcgagtggccatacgctgcgtcggcatcaacattttcacgggaccgcaagccatcaggtttactag

SEQ ID NO: 34983 - DNA, 444 bp, Artificial Sequence
  derived and/or modified sequence
atggccagtagagaggatgagttaagaaattgcgttgtttgtggcgatcaggccaccggttatcatttcaatgcgctgacatgtgagggctgtaaggggttcttccgcagaaccgtgtcaaagtctattgggcctacatgtccatttgctggcagctgcgaagtgtctaagacacagcggagacactgcccagcgtgccgccttcagaaatgtttggatgccggaatgaggaaagacataccatgcccccttaagacgcgcagtcctttctctagggaacagctttggaaaagtgttacctcatactccatccccctctctgtctcgaaacataagacttccagtgccggtctttttgctacgcaactaaaaatggagccagtcacagacctcgaacttccccgagagatgcgtctgatttcgtgcaaacgcagatggcattag

SEQ ID NO: 34984 - DNA, 891 bp, Artificial Sequence
  derived and/or modified sequence
atggctagcagagaggacgagctgaggaattgtgtcgtatgtggcgaccaggcaacgggctatcactttaacgctctgacttgcgagggctgcaagggtttcttccgcagaaccgtttccaagagtataggtcctacgtgcccttttgcgggtagttgcgaggttagcaagacgcagagacggcactgtccggcatgtcggctgcagaagtgtttagacgctgggatgaggaaggacatgattttgtcagcagaggctcttgcactgcgcagggctaagcaagctcagaggcgcgctcagcagacaccagtgcagctgagcaaggaacaggaagaactaattcgtacgctgctcggggcacacacccgtcacatggggactatgtttgagcagtttgtacaatttcgcccacctgcgcatttgttcatccaccatcaacctttgcccacacttgctcccgttctcccactggtcacacactttgccgatatcaacactttcatggtgctccaagtgatcaagtttactaaggatctcccagtgttccgctccctgcctattgaagatcagatctctctgcttaagggcgcagctgtggagatatgtcacatagtgctgaatacaactttttgtctgcagacacagaatttcctctgcggccctctgcggtacacaatcgaagatggggcacgcgatcgaccgggagttacacagcgtgacgagattgatcagctgcaagaagaaatggctctcaccctgcagtcatacatcaagggccagcagcgcagacccagggatcggagtccaggaacgccatggatccattggtctggaaaaatgctggggcctaagatcgggccaggttccaagggcgcacagtggctccagtag

SEQ ID NO: 34985 - DNA, 444 bp, Artificial Sequence
  derived and/or modified sequence
atggcatcgcgggaggacgaattaagaaactgtgttgtgtgtggggaccaggcgactggataccactttaatgccctcacctgcgagggatgcaagggctttttccgacggaccgtatctaagtctatcggccctacctgcccatttgccggatcttgtgaagttagtaagacccagcggcgacactgtcctgcctgtcggctgcagaagtgcctcgatgcaggaatgcgtaaagatataccttgccctcttaagactaggtcccccttctctcgcgaacagctttggaaatctgtcacctcatactcaataccattgtccgtgtcaaagcataaaacatcttcagccggtctgtttgccacgcagctgaagatggagccagtcacagaccttgagttgccaagggagatgcgactcatctcatgtaagcggagatggcattag

SEQ ID NO: 34986 - DNA, 717 bp, Artificial Sequence
  derived and/or modified sequence
atggcatcgagggaggatgaactgcgaaattgtgtcgtgtgcggagaccaggccacggggtaccatttcaacgcgctgacctgcgaaggctgcaagggctttttcagaaggactgtttccaagagcatcggtcccacgtgccctttcgcgggtagttgcgaagtgtccaagacacagcggaggcactgtcccgcttgccgactccagaagtgcctcgatgccggaatgcgcaaagatatgatcttgtccgctgaggccctagccctgcgaagggcaaaacaggcccagcgtcgcgcacagcagacccccgttcagctgtcaaaggagcaagaggagctgattcgcactctgctgggggctcatacgcgccatatggggaccatgttcgagcagttcgtgcagttcagacctcctgcccacttatttattcatcaccaaccccttccaactctggccccagtgttgcctcttgttactcatttcgccgatatcaataccttcatggtgctgcaggtgattaagttcactaaggacctgcccgtcttccggtctctcccaatcgaagatcagatatcccttctcaagggagccgcagtcgaaatttgccacattgtgctgaatacaacgttctgtctccagacacaaaattttttatgcggtcctctgagatacacaatcgaagacggagccaggggcgagatggttctggaacaatag

SEQ ID NO: 34987 - DNA, 360 bp, Artificial Sequence
  derived and/or modified sequence
atggccagcagagaggacgagctgagaaactgcgtggtgtgcggcgaccaggccaccggctaccacttcaacgccctgacctgcgagggctgcaagggcttcttcagaagaaccgtgagcaagagcatcggccccacctgccccttcgccggcagctgcgaggtgagcaagacccagagaagacactgccccgcctgcagactgcagaagtgcctggacgccggcatgagaaaggacaccagcagcagcagcgtgcaccccagccccgccctggcccaccccggcccctgcgccgccagcggccacaccctgagaagacaccagcacttccacggcaccgccagccaccaggtgtactag

SEQ ID NO: 34988 - DNA, 444 bp, Artificial Sequence
  derived and/or modified sequence
atggccagcagagaggacgagctgagaaactgcgtggtgtgcggcgaccaggccaccggctaccacttcaacgccctgacctgcgagggctgcaagggcttcttcagaagaaccgtgagcaagagcatcggccccacctgccccttcgccggcagctgcgaggtgagcaagacccagagaagacactgccccgcctgcagactgcagaagtgcctggacgccggcatgagaaaggacatcccctgccccctgaagaccagaagccccttcagcagagagcagctgtggaagagcgtgaccagctacagcatccccctgagcgtgagcaagcacaagaccagcagcgccggcctgttcgccacccagctgaagatggagcccgtgaccgacctggagctgcccagagagatgagactgatcagctgcaagagaagatggcactag

SEQ ID NO: 34989 - DNA, 891 bp, Artificial Sequence
  derived and/or modified sequence
atggccagcagagaggacgagctgagaaactgcgtggtgtgcggcgaccaggccaccggctaccacttcaacgccctgacctgcgagggctgcaagggcttcttcagaagaaccgtgagcaagagcatcggccccacctgccccttcgccggcagctgcgaggtgagcaagacccagagaagacactgccccgcctgcagactgcagaagtgcctggacgccggcatgagaaaggacatgatcctgagcgccgaggccctggccctgagaagagccaagcaggcccagagaagagcccagcagacccccgtgcagctgagcaaggagcaggaggagctgatcagaaccctgctgggcgcccacaccagacacatgggcaccatgttcgagcagttcgtgcagttcagaccccccgcccacctgttcatccaccaccagcccctgcccaccctggcccccgtgctgcccctggtgacccacttcgccgacatcaacaccttcatggtgctgcaggtgatcaagttcaccaaggacctgcccgtgttcagaagcctgcccatcgaggaccagatcagcctgctgaagggcgccgccgtggagatctgccacatcgtgctgaacaccaccttctgcctgcagacccagaacttcctgtgcggccccctgagatacaccatcgaggacggcgccagagacagacccggcgtgacccagagagacgagatcgaccagctgcaggaggagatggccctgaccctgcagagctacatcaagggccagcagagaagacccagagacagaagccccggcaccccctggatccactggagcggcaagatgctgggccccaagatcggccccggcagcaagggcgcccagtggctgcagtag

SEQ ID NO: 34990 - DNA, 717 bp, Artificial Sequence
  derived and/or modified sequence
atggccagcagagaggacgagctgagaaactgcgtggtgtgcggcgaccaggccaccggctaccacttcaacgccctgacctgcgagggctgcaagggcttcttcagaagaaccgtgagcaagagcatcggccccacctgccccttcgccggcagctgcgaggtgagcaagacccagagaagacactgccccgcctgcagactgcagaagtgcctggacgccggcatgagaaaggacatgatcctgagcgccgaggccctggccctgagaagagccaagcaggcccagagaagagcccagcagacccccgtgcagctgagcaaggagcaggaggagctgatcagaaccctgctgggcgcccacaccagacacatgggcaccatgttcgagcagttcgtgcagttcagaccccccgcccacctgttcatccaccaccagcccctgcccaccctggcccccgtgctgcccctggtgacccacttcgccgacatcaacaccttcatggtgctgcaggtgatcaagttcaccaaggacctgcccgtgttcagaagcctgcccatcgaggaccagatcagcctgctgaagggcgccgccgtggagatctgccacatcgtgctgaacaccaccttctgcctgcagacccagaacttcctgtgcggccccctgagatacaccatcgaggacggcgccagaggcgagatggtgctggagcagtag

SEQ ID NO: 34991 - protein, 267 aa, Artificial Sequence
  derived and/or modified sequence
MLPKRSRRTVSKSIGPTCPFAGSCEVSKTQRRHCPACRLQKCLDAGMRKDMILSAEALALRRAKQAQRRAQQTPVQLSKEQEELIRTLLGAHTRHMGTMFEQFVQFRPPAHLFIHHQPLPTLAPVLPLVTHFADINTFMVLQVIKFTKDLPVFRSLPIEDQISLLKGAAVEICHIVLNTTFCLQTQNFLCGPLRYTIEDGARDRPGVTQRDEIDQLQEEMALTLQSYIKGQQRRPRDRSPGTPWIHWSGKMLGPKIGPGSKGAQWLQ

SEQ ID NO: 34992 - DNA, 273 bp, Artificial Sequence
  derived and/or modified sequence
atgctaccaaaacggtcccggcgtaccgtgtccaaatcgatcgggcctacctgtccctttgccggctcttgtgaggtctcaaaaactcagcggcgtcactgtcccgcctgccggctccaaaagtgtctggatgcgggaatgcggaaggataccagctcctcgtctgtccatccctctccagcactcgcccacccaggtccttgtgccgcttccggccatacattgagaagacatcagcacttccacggcactgcatcacaccaggtttattag

SEQ ID NO: 34993 - DNA, 357 bp, Artificial Sequence
  derived and/or modified sequence
atgctgcccaagcgttctaggcgcaccgtgtctaaaagcataggccctacttgtccattcgctggctcctgtgaggtaagcaaaacacagcggcgacactgccccgcatgtcgactgcagaaatgcctggatgcagggatgaggaaagacatcccttgtcccctaaaaactagatcgccctttagccgcgagcagttatggaaaagcgttacttcctactccatcccgctctccgtctccaagcacaaaacatccagtgccggattattcgcaacgcagcttaaaatggagcctgtaactgatctggaactgcctcgagagatgaggctgatttcctgcaagcggcggtggcactag

SEQ ID NO: 34994 - DNA, 273 bp, Artificial Sequence
  derived and/or modified sequence
atgctgccaaagcgctcgcgcagaaccgtgtccaaaagcatcggtcccacatgtccctttgccggatcttgcgaagtcagtaagactcagcgacgacattgccctgcgtgcagactgcaaaagtgtctggatgcaggcatgaggaaggatacttccagctcatcagtgcatccatcccctgcactggcccaccctggtccgtgtgccgcctctggacacactttacgaagacaccagcactttcatggaacggcttcccatcaagtatactag

SEQ ID NO: 34995 - DNA, 357 bp, Artificial Sequence
  derived and/or modified sequence
atgttgccaaaacgatcacggaggaccgttagtaagtctattggcccaacctgccccttcgccgggtcatgcgaggtctcaaaaacccagcgacggcattgcccagcgtgccggttacagaaatgtctggacgccggcatgcggaaggatatcccatgtccgctcaaaacgaggagcccattctcacgggagcagttgtggaaaagcgtgaccagctacagcattccactctccgtcagtaagcacaaaacttcctctgccggtctgttcgccacccagctgaaaatggaacctgtcaccgatcttgagctgccccgcgagatgaggcttatatcttgcaagagacgctggcactag

SEQ ID NO: 34996 - DNA, 273 bp, Artificial Sequence
  derived and/or modified sequence
atgcttcctaaacgttcccgcagaaccgtttccaaatcgataggaccgacttgtccctttgcaggcagctgtgaagtgtctaagactcaaaggcgacactgccctgcatgtaggctgcaaaaatgcctggacgcgggtatgaggaaagatacttctagttcctctgtgcatcctagccctgctcttgcacacccaggcccttgcgcggcatccggccacacccttaggaggcatcagcattttcatggcaccgcaagtcaccaagtatactag

SEQ ID NO: 34997 - DNA, 804 bp, Artificial Sequence
  derived and/or modified sequence
atgttacctaaacgcagtagaagaacggtgagcaagtcgattggtcccacatgcccgtttgccgggtcatgtgaggtgtccaaaacacagagacgacactgccccgcctgtcgactccagaagtgtttagatgctggcatgaggaaagacatgatcctctctgccgaggccttggccctccgccgggccaagcaggcacaacggcgcgcgcagcagaccccagtacagctttcaaaggaacaggaggaactaatccggaccttgctgggagcccacacaaggcacatgggcacaatgtttgagcagttcgtgcagttcaggccccctgcgcacttatttattcatcaccagccactgccaacgctcgccccagtgttgcccttggttactcactttgctgatattaacaccttcatggtactacaggtcataaagtttaccaaggatctgccggtattcagatcactgcccatcgaagatcagatctcccttttgaaaggcgccgccgtggaaatctgtcacatagttctgaacaccactttttgcctgcagacacagaatttcctgtgcggtcctttacgttataccatcgaagacggcgcgcgggaccggcctggcgtgacgcagcgggacgaaatcgatcagctccaagaggaaatggcactgacactgcaatcttacatcaaggggcagcagcgtagacctcgtgacagatcccctggtaccccatggattcactggtctggcaaaatgctgggtcccaaaatcgggcctggatcgaagggtgctcagtggttgcaatag

SEQ ID NO: 34998 - DNA, 620 bp, Artificial Sequence
  derived and/or modified sequence
ggagaggcattccataccagattctgtggcctgcaggtgacatgctgcctaagagaagcaggagaacagtcagcaaaagcattggtcccacctgcccctttgctggaagctgtgaagtcagcaagactcagaggcgccactgcccagcctgcaggttgcagaagtgcttagatgctggcatgaggaaagacacctccagctcatctgttcatccatcaccagcccttgcccaccctggcccctgtgctgcctctggtcacacacttcgcagacatcaacactttcatggtactgcaagtcatcaagtttactaaggacctgcccgtcttccgttccctgcccattgaagaccagatctcccttctcaagggagcagctgtggaaatctgtcacatcgtactcaataccactttctgtctccaaacacaaaacttcctctgcgggcctcttcgctacacaattgaagatggagcccgtgaccgacctggagttacccagagagatgagattgatcagctgcaagaggagatggcactgactctgcaaagctacatcaagggccagcagcgaaggccccgggatcgctcacctggaacaccctggatacactggagtgggaa

SEQ ID NO: 34999 - DNA, 480 bp, Artificial Sequence
  derived and/or modified sequence
ggagaggcattccataccagattctgtggcctgcaggtgacatgctgcctaagagaagcaggagaacagtcagcaaaagcattggtcccacctgcccctttgctggaagctgtgaagtcagcaagactcagaggcgccactgcccagcctgcaggttgcagaagtgcttagatgctggcatgaggaaagacattccctgcccattgaagaccagatctcccttctcaagggagcagctgtggaaatctgtcacatcgtactcaataccactttctgtctccaaacacaaaacttcctctgcgggcctcttcgctacacaattgaagatggagcccgtgaccgacctggagttacccagagagatgagattgatcagctgcaagaggagatggcactgactctgcaaagctacatcaagggccagcagcgaaggccccgggatcgctcacctggaacaccctggatacactggagtgggaa

SEQ ID NO: 35000 - DNA, 620 bp, Artificial Sequence
  derived and/or modified sequence
ggagaggcattccataccagattctgtggcctgcaggtgacatgctgcctaagagaagcaggagtctgtgacagccaccccaacacgtgacgtcatggccagtagggaagatgagctgaggaactgtgtggtatgtggggaccaagccacaggctaccactttaatgcgctgacttgtgagggctgcaagggtttcttcaggagaacagtcagcaaaagcattggtcccacctgcccctttgctggaagctgtgaagtcagcaagactcagaggcgccactgcccagcctgcaggttgcagaagtgcttagatgctggcatgaggaaagacattccctgcccattgaagaccagatctcccttctcaagggagcagctgtggaaatctgtcacatcgtactcaataccactttctgtctccaaacacaaaacttcctctgcgggcctcttcgctacacaattgaagatggagcccgtgaccgacctggagttacccagagagatgagattgatcagctgcaagaggagatggcactgactctgcaaagctacatcaagggccagcagcgaaggccccgggatcgctcacctggaacaccctggatacactggagtgggaa

SEQ ID NO: 35001 - DNA, 861 bp, Artificial Sequence
  derived and/or modified sequence
ggagaggcattccataccagattctgtggcctgcaggtgacatgctgcctaagagaagcaggagaacagtcagcaaaagcattggtcccacctgcccctttgctggaagctgtgaagtcagcaagactcagaggcgccactgcccagcctgcaggttgcagaagtgcttagatgctggcatgaggaaagacatgatactgtcggcagaagccctggcattgcggcgagcaaagcaggcccagcggcgggcacagcaaacacctgtgcaactgagtaaggagcaagaagagctgatccggacactcctgggggcccacacccgccacatgggcaccatgtttgaacagtttgtgcagtttaggcctccagctcatctgttcatccatcaccagcccttgcccaccctggcccctgtgctgcctctggtcacacacttcgcagacatcaacactttcatggtactgcaagtcatcaagtttactaaggacctgcccgtcttccgttccctgcccattgaagaccagatctcccttctcaagggagcagctgtggaaatctgtcacatcgtactcaataccactttctgtctccaaacacaaaacttcctctgcgggcctcttcgctacacaattgaagatggagcccgtgaccgacctggagttacccagagagatgagattgatcagctgcaagaggagatggcactgactctgcaaagctacatcaagggccagcagcgaaggccccgggatcgctcacctggaacaccctggatacactggagtgggaaaatgctgggaccaaagattgggccgggttcaaagggagcccagtggttgcaatgaaagactaaagcaataa

SEQ ID NO: 35002 - DNA, 273 bp, Artificial Sequence
  derived and/or modified sequence
atgctgcccaagaggagcagaagaacagtgtccaagagcatcggccccacctgcccctttgctggcagctgtgaggtgtccaagacccagaggaggcactgcccagcctgccgcctgcagaagtgcctggatgctggcatgaggaaggacaccagcagcagctctgtgcaccccagccctgccctggcccaccctggcccctgtgccgccagcggccacaccctgcggcggcaccagcacttccacggcacagccagccaccaggtgtactag

SEQ ID NO: 35003 - DNA, 357 bp, Artificial Sequence
  derived and/or modified sequence
atgctgcccaagaggagcagaagaacagtgtccaagagcatcggccccacctgcccctttgctggcagctgtgaggtgtccaagacccagaggaggcactgcccagcctgccgcctgcagaagtgcctggatgctggcatgaggaaggacatcccctgccccctgaagaccaggagccccttcagccgggagcagctgtggaagtctgtgaccagctacagcatccccctgtctgtgtccaagcacaagaccagcagcgctggcctgtttgccacccagctgaagatggagcctgtgacagacctggagctgccccgggagatgaggctcatcagctgcaagaggcgctggcactag

SEQ ID NO: 35004 - DNA, 804 bp, Artificial Sequence
  derived and/or modified sequence
atgctgcccaagaggagcagaagaacagtgtccaagagcatcggccccacctgcccctttgctggcagctgtgaggtgtccaagacccagaggaggcactgcccagcctgccgcctgcagaagtgcctggatgctggcatgaggaaggacatgatcctgtctgctgaggccctggccctgcggcgggccaagcaggcccagaggcgggcccagcagacccctgtgcagctgagcaaggagcaggaggagctgatccgcaccctgctgggcgcccacaccaggcacatgggcaccatgtttgagcagtttgtgcagttccggcccccagcccacctgttcatccaccaccagcccctgcccaccctggcccctgtgctgcccctggtgacccactttgctgacatcaacaccttcatggtgctgcaggtgatcaagttcaccaaggacctgcctgtgttccgcagcctgcccatcgaggaccagatcagcctgctgaagggagctgctgtggagatctgccacatcgtgctgaacaccaccttctgcctgcagacccagaacttcctgtgtggccccctgcgctacaccattgaagatggagcccgggacaggcctggggtgacccagagagatgaaattgaccagctgcaggaggagatggccctgaccctgcagagctacatcaagggccagcagaggcggccccgggacaggagccctggcaccccctggatccactggagcggcaagatgctgggccccaagattggccctggcagcaaaggagcccagtggctgcagtag

SEQ ID NO: 35005 - DNA, 273 bp, Artificial Sequence
  derived and/or modified sequence
atgctgcccaagcggagccggcggaccgtgagcaagagcatcggccctacttgcccttttgctgggtcatgcgaggtaagtaaaacccagcgcagacattgccctgcatgtcggctgcagaaatgtctggacgccggaatgaggaaagataccagttcatcttccgtgcatccctcgcctgcgctcgcccatccggggccctgtgccgccagcggccacacattgcgcaggcatcagcattttcatggtacagcttcccaccaggtttactag

SEQ ID NO: 35006 - DNA, 357 bp, Artificial Sequence
  derived and/or modified sequence
atgctgcccaagcggagccggcggaccgtgagcaagagcatcggccccacttgtccttttgccggaagttgtgaggtgtccaagactcaacgcagacattgtcctgcctgtcgactgcagaaatgtttggatgctggcatgagaaaggatatcccttgtcccctaaagacgaggagtcctttcagccgagagcaactgtggaaatccgtgacttcatactccatacctctcagtgtgtccaaacataagactagtagcgctggcctctttgctacacagctcaaaatggagccagtcactgacttggaacttccccgggaaatgaggctgatatcgtgtaaacggcgttggcattag

SEQ ID NO: 35007 - DNA, 273 bp, Artificial Sequence
  derived and/or modified sequence
atgctgcccaagcggagccggcggaccgtgagcaagagcatcggcccaacttgccctttcgccggctcctgcgaagtcagcaaaacacagcgccgccactgtccagcctgccggctgcaaaaatgccttgacgccggcatgcgtaaggacactagctctagtagcgtgcacccctctccggcattagcacatccaggtccttgtgccgcaagcggccataccctgagacgccaccagcattttcatggtacagcctcccaccaggtctactag

SEQ ID NO: 35008 - DNA, 357 bp, Artificial Sequence
  derived and/or modified sequence
atgctgcccaagcggagccggcggaccgtgagcaagagcatcggcccaacttgcccttttgccggatcatgtgaagtgagtaaaactcagcgccgacattgtccagcatgtcggcttcagaaatgcctggatgctggcatgcgcaaggacatcccatgccctttgaagaccaggtcccctttcagcagggagcagctgtggaaaagtgttacaagctatagcatccccctgtccgtgagcaaacataagacaagctcagccggcttgtttgccactcagttaaagatggagcccgtgaccgatctagaactgcccagggaaatgaggcttatttcctgtaagagacgctggcattag

SEQ ID NO: 35009 - DNA, 273 bp, Artificial Sequence
  derived and/or modified sequence
atgctgcccaagcggagccggcggaccgtgagcaagagcatcggcccaacctgtcccttcgcaggatcatgcgaggttagcaagacccagcgaaggcactgtccagcttgccgtctgcagaaatgcctggacgctggcatgcggaaagacactagctcatcatccgtacatccgtcacccgctctggctcatcccgggccctgtgccgctagcggacacacactaaggaggcaccaacattttcacgggacggcgagtcatcaggtatattag

SEQ ID NO: 35010 - DNA, 804 bp, Artificial Sequence
  derived and/or modified sequence
atgctgcccaagcggagccggcggaccgtgagcaagagcatcggccccacatgcccatttgcgggaagttgcgaagtgtcaaaaacccagagaaggcactgccccgcttgtagattacagaaatgcctagacgctggaatgagaaaagatatgattctatccgccgaagccttggccctcagaagggcaaaacaggcccaacggagagcacagcagacgccagtccagctatcaaaagagcaggaagagctgataaggaccctcctcggcgctcacacaagacacatgggtaccatgtttgagcagtttgtacaattccggccgcccgcccatctctttatccaccaccaacctctcccgactcttgctccagtgttgcccctggttacgcatttcgctgacattaacacatttatggtcctgcaggtgataaagtttaccaaagacctgccagtatttcgatcactgcctatcgaggaccagatctccttgcttaagggtgccgccgtcgaaatttgccacattgtgttgaatactactttctgcttacagacccaaaactttctgtgtggtcccctcaggtatacaatcgaggacggggcaagggacagacccggtgtgacccaacgtgacgaaatcgatcagttacaggaagaaatggccctcacactccagagctacatcaaggggcagcaaaggagaccccgcgatcgctcaccaggtacaccctggatccactggagtgggaaaatgctcggccccaagattgggcctggctcaaaaggcgcccagtggttacagtag

SEQ ID NO: 35011 - DNA, 273 bp, Artificial Sequence
  derived and/or modified sequence
atgctgccaaagcggtctaggcggacagtaagcaagtccattggacccacatgcccatttgcaggttcttgcgaggtgtctaagacccagcggaggcattgcccggcatgtcgactgcagaaatgtctggatgctggcatgagaaaggataccagctcatcatccgtgcacccaagcccagccttggcgcatccaggaccctgcgccgctagcggccacaccctccggaggcaccagcatttccacggaacagcctcccaccaggtgtattag

SEQ ID NO: 35012 - DNA, 357 bp, Artificial Sequence
  derived and/or modified sequence
atgttgcctaagagaagcaggcggactgtctcaaaatcaatcggcccaacgtgcccctttgcgggttcttgcgaggttagcaaaacccagcggagacactgccccgcttgcaggttgcagaagtgcctcgatgccggaatgcgcaaggatatcccctgtcccttgaagacacgctccccctttagcagagagcagttgtggaagtctgtgacttcatactccattccactctcagtctcgaaacataagacatcttccgcagggctgttcgcaacacaacttaaaatggaacctgtcaccgacctggaactgcccagggagatgaggctaatcagttgcaaacggaggtggcactag

SEQ ID NO: 35013 - DNA, 273 bp, Artificial Sequence
  derived and/or modified sequence
atgctgcccaagcggtcaaggaggaccgtcagcaaatcaattggcccaacatgtcctttcgctgggtcctgtgaggtctccaagacccagcgtagacactgcccagcttgccgtctgcagaagtgcttagatgccggtatgcggaaggacacctctagttccagcgtccatccaagccccgcactggcgcaccctggcccttgtgcagcctcgggacacaccctgcgccgacaccaacacttccatggcacagcctcccaccaggtttattag

SEQ ID NO: 35014 - DNA, 357 bp, Artificial Sequence
  derived and/or modified sequence
atgctacctaaaaggagcagacgaactgtgtcgaaaagcataggtccgacctgccctttcgccggttcctgcgaagtgtctaagacacagaggaggcactgtccagcttgtagattgcagaaatgcctggacgccggaatgagaaaggacatcccgtgtcctctgaaaaccagatcacctttcagcagagagcagctgtggaaaagtgtaacctcctactccattcccctgtctgttagcaagcataaaacctcaagcgccggtctctttgccacacagctgaagatggagccagtgacagacctggagttacctagggagatgaggctgatctcttgcaagagacgatggcactag

SEQ ID NO: 35015 - DNA, 273 bp, Artificial Sequence
  derived and/or modified sequence
atgctgcccaagcgcagcaggcggaccgtgagcaaaagcattggccctacctgtccctttgcaggcagctgcgaagtctccaagacccagagacgccactgcccagcttgtaggctgcaaaaatgcctggacgcgggaatgcggaaagacacaagttcgtccagcgtgcacccctctcccgctctggcccaccccggaccatgcgccgctagcggccatactctgagaaggcaccaacactttcatggcactgcatcccaccaggtgtattag

SEQ ID NO: 35016 - DNA, 804 bp, Artificial Sequence
  derived and/or modified sequence
atgttgcctaagaggtccaggcgcacggtgagcaaatctatcggacccacatgtccctttgccggttcttgcgaagtttcaaaaacacagcgcaggcattgtcccgcttgtaggttgcagaagtgcttagacgctggcatgcgaaaagacatgatcctttcagcggaggcactggctctccgcagagccaaacaggcccagaggcgagcacagcagacgcccgtgcagctgtctaaagagcaggaggaactgattcgtacactactaggagcccacactcggcacatgggaaccatgtttgagcaattcgttcaatttcgacctccggctcatctgttcatacaccaccagcccctgccaactctggcacctgtcttacccctcgtgacacacttcgcagacataaacacatttatggtccttcaggtgattaaattcaccaaggaccttcccgtctttcgtagtctgccaattgaagatcagatctctttgttgaaaggagcagctgtcgagatttgccacatcgttctcaacacaacgttttgcctgcagactcagaacttcttgtgtggtccactgcggtacaccatcgaagacggagccagagataggccaggtgtcacccaaagagatgagatagatcagcttcaggaggaaatggcccttaccctgcagagctacattaaaggccagcagcggcgaccgagggaccgctcccctggaacgccctggatccactggagcgggaaaatgcttgggcctaagattggccctggttccaagggcgcacagtggttacagtag

SEQ ID NO: 35017 - DNA, 273 bp, Artificial Sequence
  derived and/or modified sequence
atgctgcccaagagaagcagaagaaccgtgagcaagagcatcggccccacctgccccttcgccggcagctgcgaggtgagcaagacccagagaagacactgccccgcctgcagactgcagaagtgcctggacgccggcatgagaaaggacaccagcagcagcagcgtgcaccccagccccgccctggcccaccccggcccctgcgccgccagcggccacaccctgagaagacaccagcacttccacggcaccgccagccaccaggtgtactag

SEQ ID NO: 35018 - DNA, 357 bp, Artificial Sequence
  derived and/or modified sequence
atgctgcccaagagaagcagaagaaccgtgagcaagagcatcggccccacctgccccttcgccggcagctgcgaggtgagcaagacccagagaagacactgccccgcctgcagactgcagaagtgcctggacgccggcatgagaaaggacatcccctgccccctgaagaccagaagccccttcagcagagagcagctgtggaagagcgtgaccagctacagcatccccctgagcgtgagcaagcacaagaccagcagcgccggcctgttcgccacccagctgaagatggagcccgtgaccgacctggagctgcccagagagatgagactgatcagctgcaagagaagatggcactag

SEQ ID NO: 35019 - DNA, 804 bp, Artificial Sequence
  derived and/or modified sequence
atgctgcccaagagaagcagaagaaccgtgagcaagagcatcggccccacctgccccttcgccggcagctgcgaggtgagcaagacccagagaagacactgccccgcctgcagactgcagaagtgcctggacgccggcatgagaaaggacatgatcctgagcgccgaggccctggccctgagaagagccaagcaggcccagagaagagcccagcagacccccgtgcagctgagcaaggagcaggaggagctgatcagaaccctgctgggcgcccacaccagacacatgggcaccatgttcgagcagttcgtgcagttcagaccccccgcccacctgttcatccaccaccagcccctgcccaccctggcccccgtgctgcccctggtgacccacttcgccgacatcaacaccttcatggtgctgcaggtgatcaagttcaccaaggacctgcccgtgttcagaagcctgcccatcgaggaccagatcagcctgctgaagggcgccgccgtggagatctgccacatcgtgctgaacaccaccttctgcctgcagacccagaacttcctgtgcggccccctgagatacaccatcgaggacggcgccagagacagacccggcgtgacccagagagacgagatcgaccagctgcaggaggagatggccctgaccctgcagagctacatcaagggccagcagagaagacccagagacagaagccccggcaccccctggatccactggagcggcaagatgctgggccccaagatcggccccggcagcaagggcgcccagtggctgcagtag

SEQ ID NO: 35020 - protein, 311 aa, Artificial Sequence
  derived and/or modified sequence
MLPKRSRRTVSKSIGPTCPFAGSCEVSKTQRRHCPACRLQKCLDAGMRKDMILSAEALALRRAKQAQRRAQQTPVQLSKEQEELIRTLLGAHTRHMGTMFEQFVQFRPPAHLFIHHQPLPTLAPVLPLVTHFADINTFMVLQVIKFTKDLPVFRSLPIEDQISLLKGAAVEICHIVLNTTFCLQTQNFLCGPLRYTIEDGARVGFQVEFLELLFHFHGTLRKLQLQEPEYVLLAAMALFSPAPYLTDRPGVTQRDEIDQLQEEMALTLQSYIKGQQRRPRDRSPGTPWIHWSGKMLGPKIGPGSKGAQWLQ

SEQ ID NO: 35021 - DNA, 936 bp, Artificial Sequence
  derived and/or modified sequence
atgcttcctaagagaagccgacgcaccgtaagcaagagcatcggacctacctgtccctttgcagggtcctgtgaagtctccaaaacacaacggcgccattgcccagcgtgccgcttgcagaagtgcctggacgcgggaatgcgcaaagacatgatactgtctgcagaggctctcgccctgcgtcgggctaaacaggctcagcggagggcacagcagacccccgtgcagctgtccaaggagcaagaggagcttattaggactctgttaggcgctcacactcggcacatgggaacaatgttcgaacaattcgttcagttcagacctcccgcacacctctttattcatcaccaaccattgccgaccctcgctccagtgcttccgcttgttacacacttcgctgacattaacacctttatggtgcttcaggtgatcaagttcactaaagatctccccgttttccggagtctaccaatcgaggatcagatatccttactaaaaggtgccgccgttgaaatttgtcatattgtgctgaacacaaccttttgcctccaaacccagaacttcctctgcgggccactaaggtacaccatcgaggatggcgccagggtcgggtttcaggtggaattcctggaactcttgtttcactttcacgggacactgcgcaagctgcagttgcaggagcccgagtatgtgttgctcgcagctatggcactgttcagccccgcaccctatttaaccgatcggccgggagtgacacaacgcgatgaaatcgaccagctgcaggaggaaatggccctgacactccagtcttacataaagggtcagcagaggagacctcgtgatcgctcccctggaacgccgtggatccactggagtgggaagatgctgggacccaagataggaccgggtagcaagggtgcacagtggctgcagtag

SEQ ID NO: 35022 - DNA, 977 bp, Artificial Sequence
  derived and/or modified sequence
ggagaggcattccataccagattctgtggcctgcaggtgacatgctgcctaagagaagcaggagaacagtcagcaaaagcattggtcccacctgcccctttgctggaagctgtgaagtcagcaagactcagaggcgccactgcccagcctgcaggttgcagaagtgcttagatgctggcatgaggaaagacatgatactgtcggcagaagccctggcattgcggcgagcaaagcaggcccagcggcgggcacagcaaacacctgtgcaactgagtaaggagcaagaagagctgatccggacactcctgggggcccacacccgccacatgggcaccatgtttgaacagtttgtgcagtttaggcctccagctcatctgttcatccatcaccagcccttgcccaccctggcccctgtgctgcctctggtcacacacttcgcagacatcaacactttcatggtactgcaagtcatcaagtttactaaggacctgcccgtcttccgttccctgcccattgaagaccagatctcccttctcaagggagcagctgtggaaatctgtcacatcgtactcaataccactttctgtctccaaacacaaaacttcctctgcgggcctcttcgctacacaattgaagatggagcccgtgtggggttccaggtagagtttttggagttgctctttcacttccatggaacactacgaaaactgcagctccaagagcctgagtatgtgctcttggctgccatggccctcttctctcctgctccctatcttacagaccgacctggagttacccagagagatgagattgatcagctgcaagaggagatggcactgactctgcaaagctacatcaagggccagcagcgaaggccccgggatcgctcacctggaacaccctggatacactggagtgggaaaatgctgggaccaaagattgggccgggttcaaagggagcccagtggttgcaatga

SEQ ID NO: 35023 - DNA, 936 bp, Artificial Sequence
  derived and/or modified sequence
atgctgcccaagaggagcagaagaacagtgtccaagagcatcggccccacctgcccctttgctggcagctgtgaggtgtccaagacccagaggaggcactgcccagcctgccgcctgcagaagtgcctggatgctggcatgaggaaggacatgatcctgtctgctgaggccctggccctgcggcgggccaagcaggcccagaggcgggcccagcagacccctgtgcagctgagcaaggagcaggaggagctgatccgcaccctgctgggcgcccacaccaggcacatgggcaccatgtttgagcagtttgtgcagttccggcccccagcccacctgttcatccaccaccagcccctgcccaccctggcccctgtgctgcccctggtgacccactttgctgacatcaacaccttcatggtgctgcaggtgatcaagttcaccaaggacctgcctgtgttccgcagcctgcccatcgaggaccagatcagcctgctgaagggagctgctgtggagatctgccacatcgtgctgaacaccaccttctgcctgcagacccagaacttcctgtgtggccccctgcgctacaccattgaagatggagcccgggtgggcttccaggtggagttcctggagctgctcttccacttccacggcaccctgaggaagctgcagctgcaggagccagaatatgtgctgctggccgccatggccctcttctccccagccccctacctgacagacaggcctggggtgacccagagagatgaaattgaccagctgcaggaggagatggccctgaccctgcagagctacatcaagggccagcagaggcggccccgggacaggagccctggcaccccctggatccactggagcggcaagatgctgggccccaagattggccctggcagcaaaggagcccagtggctgcagtag

SEQ ID NO: 35024 - DNA, 936 bp, Artificial Sequence
  derived and/or modified sequence
atgctgcccaagcggagccggcggaccgtgagcaagagcatcggcccaacatgtccatttgctggcagctgcgaagtcagtaaaacgcagcgaaggcattgtcccgcgtgtagactgcagaaatgtttggacgctggcatgagaaaggacatgatcctgtctgcagaagcattggcccttaggcgtgctaagcaggctcagcgaagggctcaacagacgcccgtgcaactgtccaaggaacaggaggaacttattcgcactctgctcggcgcccacacgcggcacatgggtacaatgttcgagcaatttgtccagttcaggcctcctgcccacttgtttatccaccaccagccactgcctactctagcccctgttctgccacttgtcacacactttgctgatattaataccttcatggttctgcaagtgatcaaatttacgaaagacttacctgtgttccgttccctgccgattgaagaccagatttccctgttgaaaggcgctgcagttgagatctgccacatcgtgttgaacaccaccttctgcctccagacacagaactttctgtgcgggcccctgaggtacaccatcgaggatggcgcgagagtgggcttccaggtggaattcttggaactgctgtttcattttcacggcacccttaggaagctccagctccaggagcccgagtatgttctgttagccgccatggccctgttctccccggccccttaccttacagatcggcctggtgtgactcagcgagacgaaattgatcagctgcaggaggagatggccctgaccctgcagtcctatataaagggtcagcagagacggccccgggaccgcagcccaggaactccgtggattcattggagcgggaagatgctgggcccaaaaattgggccgggctccaagggagcacagtggctccagtag

SEQ ID NO: 35025 - DNA, 936 bp, Artificial Sequence
  derived and/or modified sequence
atgttgcctaagagatctaggcgcacagtgtctaagagcatcggccctacatgcccttttgctggctcttgtgaagtttcaaagactcagcgcaggcattgcccagcttgtcggctgcaaaagtgtctcgacgccggtatgaggaaagatatgatcctgtccgctgaggcactcgccttgcggagagctaaacaggcccaaagacgggcacagcagactccagtgcagctctcgaaggaacaagaggagcttatcagaaccctccttggagcccacacaagacacatggggaccatgtttgaacagttcgtgcagtttagacccccagcccatctcttcattcaccaccagccattaccaacactagctcccgttctgcctctggttacccacttcgccgacatcaataccttcatggtcctgcaggtaattaagtttacaaaggacctgcctgtcttcagatcgctgccgattgaggatcagattagtttgctgaagggagccgcagtggagatttgtcacattgtcttgaataccacattctgtctgcagactcaaaattttttgtgtgggccactgagatatacgatagaggacggtgccagggttgggttccaagtggagttcctcgaactgctttttcacttccatggcacgctgcggaaactccaactgcaagaaccggaatacgtcctgctggcagccatggctctgttttctcccgctccctatctaactgaccggcctggagtgactcagagagacgagatcgaccagctgcaggaggagatggccctaaccctgcagtcatatattaaagggcagcagaggaggcccagggacaggagccccggaaccccgtggattcattggtcagggaaaatgttgggacccaagatcggccctggaagcaagggcgctcagtggttgcagtag

SEQ ID NO: 35026 - DNA, 936 bp, Artificial Sequence
  derived and/or modified sequence
atgctgcccaagagaagcagaagaaccgtgagcaagagcatcggccccacctgccccttcgccggcagctgcgaggtgagcaagacccagagaagacactgccccgcctgcagactgcagaagtgcctggacgccggcatgagaaaggacatgatcctgagcgccgaggccctggccctgagaagagccaagcaggcccagagaagagcccagcagacccccgtgcagctgagcaaggagcaggaggagctgatcagaaccctgctgggcgcccacaccagacacatgggcaccatgttcgagcagttcgtgcagttcagaccccccgcccacctgttcatccaccaccagcccctgcccaccctggcccccgtgctgcccctggtgacccacttcgccgacatcaacaccttcatggtgctgcaggtgatcaagttcaccaaggacctgcccgtgttcagaagcctgcccatcgaggaccagatcagcctgctgaagggcgccgccgtggagatctgccacatcgtgctgaacaccaccttctgcctgcagacccagaacttcctgtgcggccccctgagatacaccatcgaggacggcgccagagtgggcttccaggtggagttcctggagctgctgttccacttccacggcaccctgagaaagctgcagctgcaggagcccgagtacgtgctgctggccgccatggccctgttcagccccgccccctacctgaccgacagacccggcgtgacccagagagacgagatcgaccagctgcaggaggagatggccctgaccctgcagagctacatcaagggccagcagagaagacccagagacagaagccccggcaccccctggatccactggagcggcaagatgctgggccccaagatcggccccggcagcaagggcgcccagtggctgcagtag

SEQ ID NO: 35027 - protein, 306 aa, Artificial Sequence
  derived and/or modified sequence
MLPKRSRRTVSKSIGPTCPFAGSCEVSKTQRRHCPACRLQKCLDAGMRKDMILSAEALALRRAKQAQRRAQQTPVQLSKEQEELIRTLLGAHTRHMGTMFEQFVQFRPPAHLFIHHQPLPTLAPVLPLVTHFADINTFMVLQVIKFTKDLPVFRSLPIEDQISLLKGAAVEICHIVLNTTFCLQTQNFLCGPLRYTIEDGARVGFQVEFLELLFHFHGTLRKLQLQEPEYVLLAAMALFSPDRPGVTQRDEIDQLQEEMALTLQSYIKGQQRRPRDRSPGTPWIHWSGKMLGPKIGPGSKGAQWLQ

SEQ ID NO: 35028 - DNA, 921 bp, Artificial Sequence
  derived and/or modified sequence
atgttgcccaaacgttccagacggacagtttccaagtctattggcccaacttgcccttttgcagggtcctgcgaagttagtaaaacccagagacgccattgccccgcctgtaggttgcagaagtgtcttgacgccggaatgagaaaagatatgattctgagtgccgaggcattagccctgaggcgggcaaaacaggcgcagaggcgggcgcaacagactccggttcaactgtctaaggagcaggaggagctgattcgaactcttctgggagcgcacacgagacacatggggaccatgttcgaacagttcgtccagtttaggccaccagcacatctattcatacatcaccagccattacctaccctggcgccagtgcttccattggtcacacacttcgcggatattaacacgttcatggttctgcaggtgattaagttcacgaaagatctgcctgtgttcagatctttaccgatcgaggatcagattagcctcctcaaaggtgctgccgtagaaatatgccatatcgtcctgaatactactttttgcctccagactcagaattttctgtgcggcccactccgctacacaatcgaagacggcgcaagggtaggttttcaagttgagttcctagaactgctgttccattttcacggcacactccggaaactacagctccaggaaccagagtatgtgctcttggccgccatggccctgttttctcccgatcgccccggcgtgactcagagggatgaaatcgaccaactgcaggaagagatggctcttactctgcaaagctacatcaaaggccagcagagaaggcccagagaccgtagcccagggacaccttggatccactggtctgggaagatgttgggccccaagatcgggcccggctctaaaggcgcgcaatggctgcagtag

SEQ ID NO: 35029 - DNA, 973 bp, Artificial Sequence
  derived and/or modified sequence
ggagaggcattccataccagattctgtggcctgcaggtgacatgctgcctaagagaagcaggagaacagtcagcaaaagcattggtcccacctgcccctttgctggaagctgtgaagtcagcaagactcagaggcgccactgcccagcctgcaggttgcagaagtgcttagatgctggcatgaggaaagacatgatactgtcggcagaagccctggcattgcggcgagcaaagcaggcccagcggcgggcacagcaaacacctgtgcaactgagtaaggagcaagaagagctgatccggacactcctgggggcccacacccgccacatgggcaccatgtttgaacagtttgtgcagtttaggcctccagctcatctgttcatccatcaccagcccttgcccaccctggcccctgtgctgcctctggtcacacacttcgcagacatcaacactttcatggtactgcaagtcatcaagtttactaaggacctgcccgtcttccgttccctgcccattgaagaccagatctcccttctcaagggagcagctgtggaaatctgtcacatcgtactcaataccactttctgtctccaaacacaaaacttcctctgcgggcctcttcgctacacaattgaagatggagcccgtgtggggttccaggtagagtttttggagttgctctttcacttccatggaacactacgaaaactgcagctccaagagcctgagtatgtgctcttggctgccatggccctcttctctcctgaccgacctggagttacccagagagatgagattgatcagctgcaagaggagatggcactgactctgcaaagctacatcaagggccagcagcgaaggccccgggatcgctcacctggaacaccctggatacactggagtgggaaaatgctgggaccaaagattgggccgggttcaaagggagcccagtggttgcaatgaaagactaaagc

SEQ ID NO: 35030 - DNA, 921 bp, Artificial Sequence
  derived and/or modified sequence
atgctgcccaagaggagcagaagaacagtgtccaagagcatcggccccacctgcccctttgctggcagctgtgaggtgtccaagacccagaggaggcactgcccagcctgccgcctgcagaagtgcctggatgctggcatgaggaaggacatgatcctgtctgctgaggccctggccctgcggcgggccaagcaggcccagaggcgggcccagcagacccctgtgcagctgagcaaggagcaggaggagctgatccgcaccctgctgggcgcccacaccaggcacatgggcaccatgtttgagcagtttgtgcagttccggcccccagcccacctgttcatccaccaccagcccctgcccaccctggcccctgtgctgcccctggtgacccactttgctgacatcaacaccttcatggtgctgcaggtgatcaagttcaccaaggacctgcctgtgttccgcagcctgcccatcgaggaccagatcagcctgctgaagggagctgctgtggagatctgccacatcgtgctgaacaccaccttctgcctgcagacccagaacttcctgtgtggccccctgcgctacaccattgaagatggagcccgggtgggcttccaggtggagttcctggagctgctcttccacttccacggcaccctgaggaagctgcagctgcaggagccagaatatgtgctgctggccgccatggccctcttctccccagacaggcctggggtgacccagagagatgaaattgaccagctgcaggaggagatggccctgaccctgcagagctacatcaagggccagcagaggcggccccgggacaggagccctggcaccccctggatccactggagcggcaagatgctgggccccaagattggccctggcagcaagggggcccagtggctgcagtag

SEQ ID NO: 35031 - DNA, 921 bp, Artificial Sequence
  derived and/or modified sequence
atgctgcccaagcggagccggcggaccgtgagcaagagcatcggccccacatgtcctttcgctggctcatgtgaagtgagcaagactcaacggaggcattgcccagcttgtcgcctgcaaaaatgcctggatgcagggatgcggaaagatatgatcctttcagctgaagcgcttgccctcagacgggctaaacaagcccaacgacgcgcacagcaaacgccggtgcagctgtccaaagaacaggaggaacttattcggactctcctgggggcccatacgcgccacatgggtaccatgtttgagcaattcgtgcagtttcgtccacctgcacaccttttcatccatcatcagcccctgcccaccttggcccccgtactgccattagtcacacattttgctgatatcaataccttcatggtgttgcaggtgattaaattcactaaggacctgccggtctttcggtctctgcccatcgaggatcaaataagcctgttgaagggcgcagctgtggaaatttgtcatattgtgctgaacacgaccttctgtctgcagacgcaaaatttcctgtgtggcccacttcgttacaccattgaggacggggccagggttggtttccaagtcgagtttcttgagctgctgttccacttccacggaacattgcgaaaactgcagctccaggagccagagtacgttctactggctgccatggccctcttctcccctgatcgcccaggtgtgacccagcgcgacgaaatcgatcaactccaggaagaaatggcactgacattgcagagctatataaaaggtcagcagagacgcccccgtgacagatccccaggaaccccctggattcactggagcggaaaaatgttgggacctaagattggcccagggtccaaaggggctcagtggctgcagtag

SEQ ID NO: 35032 - DNA, 921 bp, Artificial Sequence
  derived and/or modified sequence
atgctccctaagagaagtagaaggaccgtcagtaagtccatcggccctacctgcccctttgccggaagctgtgaggtgtcaaaaacacaacggagacactgtccggcatgtcggcttcaaaaatgtttggatgcgggaatgcggaaagatatgatcctgtctgccgaagcattggccctacggagagcaaagcaggcccagagaagggcccagcaaaccccagtccagctgtctaaggaacaagaggagctgattcggactctcctgggtgcacatacacgacatatgggcactatgtttgagcagttcgtgcagtttagacccccagctcatctgttcatccatcaccaaccacttccgacgttagccccagttttgcccctggttacacatttcgccgatattaacacattcatggtgttgcaagtgattaaatttacaaaagatcttcccgtttttcgctctctgcccatcgaagatcagatttcactcctgaagggagcggcagtcgagatttgccatatagtgctcaacaccacattttgcttacagactcagaacttcctctgcggccctctgagatacactatcgaggatggggctcgggtgggctttcaagttgagtttttagaactgctcttccactttcacggaaccctccggaaactgcagctgcaggaaccagaatatgtactattggccgctatggcactcttcagtcccgacaggccaggagtgactcagagggatgagatcgatcaattgcaggaagagatggccttaactctgcagagctatattaagggccagcaaagaaggcctagagatcgttctccgggaaccccttggattcactggtcaggaaaaatgctcggtcctaagattgggcctggcagcaagggtgctcagtggctgcaatag

SEQ ID NO: 35033 - DNA, 921 bp, Artificial Sequence
  derived and/or modified sequence
atgctgcccaagagaagcagaagaaccgtgagcaagagcatcggccccacctgccccttcgccggcagctgcgaggtgagcaagacccagagaagacactgccccgcctgcagactgcagaagtgcctggacgccggcatgagaaaggacatgatcctgagcgccgaggccctggccctgagaagagccaagcaggcccagagaagagcccagcagacccccgtgcagctgagcaaggagcaggaggagctgatcagaaccctgctgggcgcccacaccagacacatgggcaccatgttcgagcagttcgtgcagttcagaccccccgcccacctgttcatccaccaccagcccctgcccaccctggcccccgtgctgcccctggtgacccacttcgccgacatcaacaccttcatggtgctgcaggtgatcaagttcaccaaggacctgcccgtgttcagaagcctgcccatcgaggaccagatcagcctgctgaagggcgccgccgtggagatctgccacatcgtgctgaacaccaccttctgcctgcagacccagaacttcctgtgcggccccctgagatacaccatcgaggacggcgccagagtgggcttccaggtggagttcctggagctgctgttccacttccacggcaccctgagaaagctgcagctgcaggagcccgagtacgtgctgctggccgccatggccctgttcagccccgacagacccggcgtgacccagagagacgagatcgaccagctgcaggaggagatggccctgaccctgcagagctacatcaagggccagcagagaagacccagagacagaagccccggcaccccctggatccactggagcggcaagatgctgggccccaagatcggccccggcagcaagggcgcccagtggctgcagtag

SEQ ID NO: 35034 - protein, 339 aa, Artificial Sequence
  derived and/or modified sequence
MASREDELRNCVVCGDQATGYHFNALTCEGCKGFFRRTVSKSIGPTCPFAGSCEVSKTQRRHCPACRLQKCLDAGMRKDMILSAEALALRRAKQAQRRAQQTPVQLSKEQEELIRTLLGAHTRHMGTMFEQFVQFRPPAHLFIHHQPLPTLAPVLPLVTHFADINTFMVLQVIKFTKDLPVFRSLPIEDQISLLKGAAVEICHIVLNTTFCLQTQNFLCGPLRYTIEDGARVSPTVGFQVEFLELLFHFHGTLRKLQLQEPEYVLLAAMALFSPDRPGVTQRDEIDQLQEEMALTLQSYIKGQQRRPRDRSPGTPWIHWSGKMLGPKIGPGSKGAQWLQ

SEQ ID NO: 35035 - DNA, 1020 bp, Artificial Sequence
  derived and/or modified sequence
atggctagtagggaagatgaactgcggaattgcgttgtgtgtggtgaccaggcaacaggttatcacttcaacgcactaacctgcgagggctgcaaagggttctttcgccgcaccgtctcgaaaagcattggtccaacatgtcctttcgccggttcctgtgaagtatccaagactcaacggaggcactgccctgcctgtagactgcagaaatgtctggatgcaggaatgagaaaagacatgattctaagcgccgaagcactggcccttcgcagggccaaacaggcccaaagacgagcgcagcagactccagtgcagttgtccaaggaacaagaggaattgatcagaactctgcttggcgcgcacaccagacatatgggtaccatgttcgagcagttcgttcagttccggccacccgctcacctatttatccaccaccagccgttgcccaccctggctccggtgctccccctggtaacccattttgccgacattaacaccttcatggttctccaggtaattaagtttacaaaagatctcccagtattccgatctttgccaatcgaggaccagatcagcttactgaagggggcagccgtggagatctgccatattgttctgaacactacgttctgcttgcaaacgcagaatttcctttgtgggcccctgcgatacactatcgaagacggcgcccgggtgagccctacagttgggtttcaggtagagttcctggagctgctatttcacttccatggcactctcaggaaattgcagctccaggaacccgaatatgtgctcttggcggcgatggccctgttctcacctgataggcccggggtcacacaacgggatgagatcgatcagctgcaagaggagatggctctcactctgcagtcctatatcaaaggccagcagagaagaccacgcgatcgcagcccaggaacaccatggattcattggtctgggaaaatgctgggccccaagatcgggcctggaagcaagggcgcccagtggttacagtag

SEQ ID NO: 35036 - DNA, 1114 bp, Artificial Sequence
  derived and/or modified sequence
ggagaggcattccataccagattctgtggcctgcaggtgacatgctgcctaagagaagcaggagtctgtgacagccaccccaacacgtgacgtcatggccagtagggaagatgagctgaggaactgtgtggtatgtggggaccaagccacaggctaccactttaatgcgctgacttgtgagggctgcaagggtttcttcaggagaacagtcagcaaaagcattggtcccacctgcccctttgctggaagctgtgaagtcagcaagactcagaggcgccactgcccagcctgcaggttgcagaagtgcttagatgctggcatgaggaaagacatgatactgtcggcagaagccctggcattgcggcgagcaaagcaggcccagcggcgggcacagcaaacacctgtgcaactgagtaaggagcaagaagagctgatccggacactcctgggggcccacacccgccacatgggcaccatgtttgaacagtttgtgcagtttaggcctccagctcatctgttcatccatcaccagcccttgcccaccctggcccctgtgctgcctctggtcacacacttcgcagacatcaacactttcatggtactgcaagtcatcaagtttactaaggacctgcccgtcttccgttccctgcccattgaagaccagatctcccttctcaagggagcagctgtggaaatctgtcacatcgtactcaataccactttctgtctccaaacacaaaacttcctctgcgggcctcttcgctacacaattgaagatggagcccgtgtatctcccacagtggggttccaggtagagtttttggagttgctctttcacttccatggaacactacgaaaactgcagctccaagagcctgagtatgtgctcttggctgccatggccctcttctctcctgaccgacctggagttacccagagagatgagattgatcagctgcaagaggagatggcactgactctgcaaagctacatcaagggccagcagcgaaggccccgggatcgctcacctggaacaccctggatacactggagtgggaaaatgctgggaccaaagattgggccgggttcaaagggagcccagtggttgcaatga

SEQ ID NO: 35037 - DNA, 1020 bp, Artificial Sequence
  derived and/or modified sequence
atggccagcagagaagatgagctgaggaactgtgtggtgtgtggggaccaggccaccggctaccacttcaatgccctgacctgtgagggctgcaagggcttcttccggaggacagtgtccaagagcatcggccccacctgcccctttgctggcagctgtgaggtgtccaagacccagaggaggcactgcccagcctgccgcctgcagaagtgcctggatgctggcatgaggaaggacatgatcctgtctgctgaggccctggccctgcggcgggccaagcaggcccagaggcgggcccagcagacccctgtgcagctgagcaaggagcaggaggagctgatccgcaccctgctgggcgcccacaccaggcacatgggcaccatgtttgagcagtttgtgcagttccggcccccagcccacctgttcatccaccaccagcccctgcccaccctggcccctgtgctgcccctggtgacccactttgctgacatcaacaccttcatggtgctgcaggtgatcaagttcaccaaggacctgcccgtcttccgcagcctgcccatcgaggaccagatcagcctgctgaagggagctgctgtggagatctgccacatcgtgctgaacaccaccttctgcctgcagacccagaacttcctgtgtggccccctgcgctacaccattgaagatggagcccgggtgagccccaccgtgggcttccaggtggagttcctggagctgctcttccacttccacggcaccctgaggaagctgcagctgcaggagccagaatatgtgctgctggccgccatggccctcttctccccagacaggcctggggtgacccagagagatgaaattgaccagctgcaggaggagatggccctgaccctgcagagctacatcaagggccagcagaggcggccccgggacaggagccctggcaccccctggatccactggagcggcaagatgctgggccccaagattggccctggcagcaaaggagcccagtggctgcagtag

SEQ ID NO: 35038 - DNA, 1020 bp, Artificial Sequence
  derived and/or modified sequence
atggccagccgggaggacgagctgcggaactgcgtggtgtgcggcgaccaggctaccggctaccatttcaatgcacttacttgtgaggggtgtaagggcttctttagaagaacggtctcaaagagcattgggccaacctgtcccttcgccgggtcttgcgaggtgtccaagacccagaggcggcactgtccagcatgtcggctacagaaatgtctcgacgctggcatgaggaaagatatgatcctaagtgccgaggctctggcccttagaagagctaaacaagcacaaagacgggcacaacaaacccccgtgcagctttcgaaagaacaggaggagctaattagaactcttctgggcgcccacacaaggcatatgggtactatgtttgagcaatttgtgcagtttagaccacccgctcatcttttcatccaccatcagcccttgcccacgctggcgccggtgctgccgcttgtaacgcacttcgccgacattaacacttttatggttctacaggttatcaagttcaccaaggacctgcccgtgttcagaagccttccgatcgaggatcagatctctctgctcaagggtgctgccgtcgagatctgtcacatcgtgttaaacaccacattctgcctgcagactcagaattttctctgcggacccctgcggtacaccatcgaagacggagccagagtgagtccaactgtggggtttcaggtggaatttttagaacttcttttccacttccatggaaccctgaggaaactgcagctgcaggaacctgaatatgtgctgctcgctgcaatggccctgttctcgccagacagacctggggtgacacagagagacgaaattgaccagctccaggaagagatggccctgacattgcagagctacatcaagggccagcagaggaggcctagggacaggagcccagggacgccctggattcactggagcggaaaaatgctgggacctaaaattggtcccggatcgaagggcgctcagtggcttcagtag

SEQ ID NO: 35039 - DNA, 1020 bp, Artificial Sequence
  derived and/or modified sequence
atggccagccgagaagacgaattgcggaactgcgttgtgtgcggcgaccaggctacaggttatcactttaacgccctgacgtgtgagggatgcaaagggttctttcgcagaaccgtgtctaaaagtatcgggcctacttgcccatttgccggatcttgcgaagtttccaaaactcagcgtcgtcattgtccagcatgccgtctgcaaaagtgtcttgatgccggtatgaggaaagatatgatccttagcgccgaggcattggccctccgccgagctaagcaggcccagagaagggcccaacagactcccgtgcaattgtccaaggagcaagaggagctgatacgcacgctactcggagcacacactaggcacatgggcactatgtttgaacagtttgtgcagttcagaccacctgcacatctgtttattcaccatcagccccttccaactctagcacctgtgctacctttggtgacacactttgcggacatcaacacctttatggtgctccaggtcatcaagtttaccaaggacctcccggtgtttagatcactgcctatcgaggaccagatcagcctgttgaagggtgctgctgtggagatctgccacattgtgttaaatacgaccttctgcttgcaaacccaaaacttcctctgtggccctctgcgctataccattgaagacggagctagggttagccctaccgttgggtttcaggtggagttcctagaactgctgtttcatttccatggtaccctgcgcaagctgcagctgcaggagccggagtatgtcctgctggcggcaatggccctgttttctcctgatcgacctggtgtcacccagagagacgagatagaccaattgcaagaagaaatggcacttactctgcagtcttacatcaaagggcagcagaggcgacctcgggacagatctcccggtactccatggattcattggtcaggcaagatgttgggccctaagattgggcctgggtctaaaggcgctcaatggcttcaatag

SEQ ID NO: 35040 - DNA, 1020 bp, Artificial Sequence
  derived and/or modified sequence
atggccagcagagaggacgagctgagaaactgcgtggtgtgcggcgaccaggccaccggctaccacttcaacgccctgacctgcgagggctgcaagggcttcttcagaagaaccgtgagcaagagcatcggccccacctgccccttcgccggcagctgcgaggtgagcaagacccagagaagacactgccccgcctgcagactgcagaagtgcctggacgccggcatgagaaaggacatgatcctgagcgccgaggccctggccctgagaagagccaagcaggcccagagaagagcccagcagacccccgtgcagctgagcaaggagcaggaggagctgatcagaaccctgctgggcgcccacaccagacacatgggcaccatgttcgagcagttcgtgcagttcagaccccccgcccacctgttcatccaccaccagcccctgcccaccctggcccccgtgctgcccctggtgacccacttcgccgacatcaacaccttcatggtgctgcaggtgatcaagttcaccaaggacctgcccgtgttcagaagcctgcccatcgaggaccagatcagcctgctgaagggcgccgccgtggagatctgccacatcgtgctgaacaccaccttctgcctgcagacccagaacttcctgtgcggccccctgagatacaccatcgaggacggcgccagagtgagccccaccgtgggcttccaggtggagttcctggagctgctgttccacttccacggcaccctgagaaagctgcagctgcaggagcccgagtacgtgctgctggccgccatggccctgttcagccccgacagacccggcgtgacccagagagacgagatcgaccagctgcaggaggagatggccctgaccctgcagagctacatcaagggccagcagagaagacccagagacagaagccccggcaccccctggatccactggagcggcaagatgctgggccccaagatcggccccggcagcaagggcgcccagtggctgcagtag

SEQ ID NO: 35041 - protein, 90 aa, Artificial Sequence
  derived and/or modified sequence
MLPKRSRRTVSKSIGPTCPFAGSCEVSKTQRRHCPACRLQKCLDAGMRKDTSSSSVHPSPALAHPGPCAASGHTLRRHQHFHGTASHQVY

SEQ ID NO: 35042 - protein, 118 aa, Artificial Sequence
  derived and/or modified sequence
MLPKRSRRTVSKSIGPTCPFAGSCEVSKTQRRHCPACRLQKCLDAGMRKDIPCPLKTRSPFSREQLWKSVTSYSIPLSVSKHKTSSAGLFATQLKMEPVTDLELPREMRLISCKRRWH

SEQ ID NO: 35043 - protein, 319 aa, Artificial Sequence
  derived and/or modified sequence
MLPKRSRRTVSKSIGPTCPFAGSCEVSKTQRRHCPACRLQKCLDAGMRKDMILSAEALALRRAKQAQRRAQQTPVQLSKEQEELIRTLLGAHTRHMGTMFEQFVQFRPPAHLFIHHQPLPTLAPVLPLVTHFADINTFMVLQVIKFTKDLPVFRSLPIEDQISLLKGAAVEICHIVLNTTFCLQTQNFLCGPLRYTIEDGARVGFQVEFLELLFHFHGTLRKLQLQEPEYVLLAAMALFSPDRPGVTQRDEIDQLQEEMALTLQSYIKGQQRRPRDRFLYAKLLGLLAELRSINEAYGYQIQHIQGLSAMMPLLQEICS

SEQ ID NO: 35044 - DNA, 960 bp, Artificial Sequence
  derived and/or modified sequence
atgctccctaagaggagccggcggactgtgtctaaaagcattggccctacgtgtccgttcgccggatcctgcgaagtgtcgaaaactcaaagaagacactgcccggcttgtcgacttcagaaatgtttggatgctggtatgcggaaagatatgatcctgagcgcagaagccctcgctcttaggagagcgaagcaggcccagcgacgcgctcagcaaactccagttcaactgtccaaagagcaggaggaattgattcggacgctcttgggcgctcacaccaggcatatggggacaatgtttgaacagtttgtccaatttcgccctccagcgcacctcttcatccaccatcagcctctcccgactctggcgccggtgttacctctggtgacacactttgcagacattaatacctttatggttcttcaggttatcaagtttaccaaagacttacccgtcttcaggagcctgcccatagaggaccaaatttctctactgaaaggggccgctgtcgagatctgccacattgttctcaatactaccttctgtttgcagactcaaaactttttgtgcgggcctttgcggtatactatagaagacggggctagagttggcttccaggtggagttcctcgaactcctgtttcattttcacggtaccctgagaaaactccagctgcaggagcccgagtacgtcttgctggcagccatggccttgttcagccccgaccgtccaggcgtcactcagcgcgacgaaatcgaccagctgcaagaagagatggcactcactttgcagtcttacataaagggccagcagcgacgacctagggacaggtttctttacgctaagttattgggtttgctggccgagctccggtcaattaatgaagcctacggctatcaaatacagcatatccagggcttaagcgcgatgatgcccttgctgcaagagatttgtagctag

SEQ ID NO: 35045 - DNA, 891 bp, Artificial Sequence
  derived and/or modified sequence
ggagaggcattccataccagattctgtggcctgcaggtgacatgctgcctaagagaagcaggagaacagtcagcaaaagcattggtcccacctgcccctttgctggaagctgtgaagtcagcaagactcagaggcgccactgcccagcctgcaggttgcagaagtgcttagatgctggcatgaggaaagacacctccagctcatctgttcatccatcaccagcccttgcccaccctggcccctgtgctgcctctggtcacacacttcgcagacatcaacactttcatggtactgcaagtcatcaagtttactaaggacctgcccgtcttccgttccctgcccattgaagaccagatctcccttctcaagggagcagctgtggaaatctgtcacatcgtactcaataccactttctgtctccaaacacaaaacttcctctgcgggcctcttcgctacacaattgaagatggagcccgtgtggggttccaggtagagtttttggagttgctctttcacttccatggaacactacgaaaactgcagctccaagagcctgagtatgtgctcttggctgccatggccctcttctctcctgaccgacctggagttacccagagagatgagattgatcagctgcaagaggagatggcactgactctgcaaagctacatcaagggccagcagcgaaggccccgggatcggtttctgtatgcgaagttgctaggcctgctggctgagctccggagcattaatgaggcctacgggtaccaaatccagcacatccagggcctgtctgccatgatgccgctgctccaggagatctgcagctgaggccatgctcacttccttccccagctcacctggaacaccctggatacactggagtgggaa

SEQ ID NO: 35046 - DNA, 960 bp, Artificial Sequence
  derived and/or modified sequence
atgctgcccaagaggagcagaagaacagtgtccaagagcatcggccccacctgcccctttgctggcagctgtgaggtgtccaagacccagaggaggcactgcccagcctgccgcctgcagaagtgcctggatgctggcatgaggaaggacatgatcctgtctgctgaggccctggccctgcggcgggccaagcaggcccagaggcgggcccagcagacccctgtgcagctgagcaaggagcaggaggagctgatccgcaccctgctgggcgcccacaccaggcacatgggcaccatgtttgagcagtttgtgcagttccggcccccagcccacctgttcatccaccaccagcccctgcccaccctggcccctgtgctgcccctggtgacccactttgctgacatcaacaccttcatggtgctgcaggtgatcaagttcaccaaggacctgcctgtgttccgcagcctgcccatcgaggaccagatcagcctgctgaagggagctgctgtggagatctgccacatcgtgctgaacaccaccttctgcctgcagacccagaacttcctgtgtggccccctgcgctacaccattgaagatggagcccgggtgggcttccaggtggagttcctggagctgctcttccacttccacggcaccctgaggaagctgcagctgcaggagccagaatatgtgctgctggccgccatggccctcttctccccagacaggcctggggtgacccagagagatgaaattgaccagctgcaggaggagatggccctgaccctgcagagctacatcaagggccagcagaggcggccccgggaccgcttcctgtatgccaagctgctgggcctgctggccgagctgcggagcatcaatgaggcctacggctaccagatccagcacatccagggcctgagcgccatgatgcccctgctgcaggagatctgcagctag

SEQ ID NO: 35047 - DNA, 960 bp, Artificial Sequence
  derived and/or modified sequence
atgctgcccaagcggagccggcggaccgtgagcaagagcatcggcccaacatgccctttcgccgggagttgcgaagtgagcaagacccaaagacgacactgcccagcatgccggttgcagaagtgcctggacgcagggatgagaaaggatatgatcctgtccgctgaagcactggctcttaggcgagccaagcaggcacaacgacgtgcccagcagactccagttcagctgtctaaggaacaggaagaattgattaggacccttctgggagcccacacacgacacatgggcactatgttcgagcagtttgtccaattccgtcccccagcgcacttgttcatccaccaccagcccctgcctaccctggcgcccgtactgcccctggtgacccacttcgctgacattaacactttcatggtactgcaggtgatcaagtttacgaaggatttgcctgtgtttagatcactgcctatcgaggatcaaatcagtttgttgaaaggtgccgcggttgaaatctgccatattgtactcaatacgactttttgtctccagacacaaaacttcttatgcggaccactccgttacacgatcgaagacggggccagagtcggcttccaggtggagtttctggagctcctgttccacttccatggtaccctgcgaaagctgcagctgcaagagccagagtatgtcctgctcgccgccatggctctgttcagcccagacagacccggagttacgcagcgcgatgagattgatcagctccaagaagagatggctctcaccctgcagagctacatcaaggggcagcaacgcaggccaagagaccgctttctatacgctaagctcctaggcctgctcgccgagctgagaagtatcaatgaggcttatggctatcagatacagcacatccaaggcctgtctgccatgatgccactgcttcaggaaatatgcagctag

SEQ ID NO: 35048 - DNA, 960 bp, Artificial Sequence
  derived and/or modified sequence
atgcttccgaaaaggagcagacgcacggtgagcaaaagtatcggacctacctgtccatttgccggaagctgtgaggtgtcaaaaacccagcggagacattgtcccgcttgtagactccaaaaatgtctcgacgccggaatgaggaaggacatgattctgtccgcggaggctctggccctgcgccgtgccaaacaggcccagcggagggcacaacagactcccgtgcaattgagcaaagagcaggaggagctgattcgcacgctccttggcgcacataccaggcacatgggcacaatgtttgaacagttcgtgcagttccgccctcctgcacatctctttatccaccaccaacctttgccaaccctcgcccctgtgctgccacttgtcacacattttgccgacatcaacacattcatggtcctgcaggtcattaagttcactaaggacctccccgtgtttaggtcattacccatcgaagaccagatttcactcctcaagggcgctgccgtggaaatatgtcacatagtgttaaataccaccttttgcttgcagacccagaatttcctgtgcggtcccctgcgctatactattgaagatggcgcacgggttgggtttcaggtggaatttctggaactcctgttccattttcacggaactctgcggaagctgcagctccaggaacctgaatacgtgttgcttgctgcaatggcgctctttagccctgatagaccaggagtcacgcagcgagacgaaatcgaccaactccaggaagaaatggccctgaccctccagtcctacatcaaagggcagcagcgcaggccaagggatcggtttctgtacgcgaaactcttgggacttctggcagagctgcgttcaattaacgaggcatacggttaccagatccagcatatacaggggctctccgccatgatgcctcttcttcaggagatatgttcgtag

SEQ ID NO: 35049 - DNA, 960 bp, Artificial Sequence
  derived and/or modified sequence
atgctgcccaagagaagcagaagaaccgtgagcaagagcatcggccccacctgccccttcgccggcagctgcgaggtgagcaagacccagagaagacactgccccgcctgcagactgcagaagtgcctggacgccggcatgagaaaggacatgatcctgagcgccgaggccctggccctgagaagagccaagcaggcccagagaagagcccagcagacccccgtgcagctgagcaaggagcaggaggagctgatcagaaccctgctgggcgcccacaccagacacatgggcaccatgttcgagcagttcgtgcagttcagaccccccgcccacctgttcatccaccaccagcccctgcccaccctggcccccgtgctgcccctggtgacccacttcgccgacatcaacaccttcatggtgctgcaggtgatcaagttcaccaaggacctgcccgtgttcagaagcctgcccatcgaggaccagatcagcctgctgaagggcgccgccgtggagatctgccacatcgtgctgaacaccaccttctgcctgcagacccagaacttcctgtgcggccccctgagatacaccatcgaggacggcgccagagtgggcttccaggtggagttcctggagctgctgttccacttccacggcaccctgagaaagctgcagctgcaggagcccgagtacgtgctgctggccgccatggccctgttcagccccgacagacccggcgtgacccagagagacgagatcgaccagctgcaggaggagatggccctgaccctgcagagctacatcaagggccagcagagaagacccagagacagattcctgtacgccaagctgctgggcctgctggccgagctgagaagcatcaacgaggcctacggctaccagatccagcacatccagggcctgagcgccatgatgcccctgctgcaggagatctgcagctag

SEQ ID NO: 35050 - protein, 352 aa, Artificial Sequence
  derived and/or modified sequence
MASREDELRNCVVCGDQATGYHFNALTCEGCKGFFRRTVSKSIGPTCPFAGSCEVSKTQRRHCPACRLQKCLDAGMRKDMILSAEALALRRAKQAQRRAQQTPVQLSKEQEELIRTLLGAHTRHMGTMFEQFVQFRPPAHLFIHHQPLPTLAPVLPLVTHFADINTFMVLQVIKFTKDLPVFRSLPIEDQISLLKGAAVEICHIVLNTTFCLQTQNFLCGPLRYTIEDGARVSPTVGFQVEFLELLFHFHGTLRKLQLQEPEYVLLAAMALFSPDRPGVTQRDEIDQLQEEMALTLQSYIKGQQRRPRDRFLYAKLLGLLAELRSINEAYGYQIQHIQGLSAMMPLLQEICS

SEQ ID NO: 35051 - DNA, 1059 bp, Artificial Sequence
  derived and/or modified sequence
atggctagtcgcgaagacgaactcaggaactgcgtcgtgtgtggcgaccaggccaccggctatcactttaatgccctgacctgcgagggctgtaaaggcttctttagacggacagtgtcgaaatcaatcgggccgacatgcccattcgcaggcagctgtgaggtatcaaagactcaacgtagacactgtccagcatgcagactccagaagtgcttagacgctgggatgagaaaagacatgatcctgtctgctgaggccctggccctgcggcgggccaaacaagctcagcggcgagcccaacagaccccagttcagctgtcgaaggaacaggaagagctcattcgaacgctgttaggcgctcacactagacatatggggacaatgttcgaacagtttgttcagtttcggccgcctgcccacctctttatacaccatcaacctttacctaccctcgcgccagtcttaccactagtcactcattttgctgacattaatacctttatggtgttacaggtcataaaatttaccaaggacttgccagtctttcgttcactccccatcgaagatcagattagtcttctgaagggcgccgccgtggaaatttgccatattgttttgaacaccactttttgtcttcagacccagaactttctttgcggccccctacggtacaccatagaggacggagcgcgggtgtctcccactgtgggcttccaggttgaatttctggagttgctcttccatttccatggtacgcttaggaagctacagttgcaagaaccggagtatgttttacttgcagcaatggccctgtttagcccagatagaccaggagtgacacagcgcgacgaaattgaccagctgcaggaagagatggcactgacactccagtcttatataaagggacagcagagaaggcccagagaccgcttcttgtacgcaaagctgttgggcctgctggccgaacttaggagtatcaatgaggcttacggataccaaatccaacatattcagggcctgagtgccatgatgccactgctgcaagaaatctgcagctag

SEQ ID NO: 35052 - DNA, 1322 bp, Artificial Sequence
  derived and/or modified sequence
taactccaatcactggcaactcctgagatcagaggaaaaccagcaacagcgtgggagtttggggagaggcattccataccagattctgtggcctgcaggtgacatgctgcctaagagaagcaggagtctgtgacagccaccccaacacgtgacgtcatggccagtagggaagatgagctgaggaactgtgtggtatgtggggaccaagccacaggctaccactttaatgcgctgacttgtgagggctgcaagggtttcttcaggagaacagtcagcaaaagcattggtcccacctgcccctttgctggaagctgtgaagtcagcaagactcagaggcgccactgcccagcctgcaggttgcagaagtgcttagatgctggcatgaggaaagacatgatactgtcggcagaagccctggcattgcggcgagcaaagcaggcccagcggcgggcacagcaaacacctgtgcaactgagtaaggagcaagaagagctgatccggacactcctgggggcccacacccgccacatgggcaccatgtttgaacagtttgtgcagtttaggcctccagctcatctgttcatccatcaccagcccttgcccaccctggcccctgtgctgcctctggtcacacacttcgcagacatcaacactttcatggtactgcaagtcatcaagtttactaaggacctgcccgtcttccgttccctgcccattgaagaccagatctcccttctcaagggagcagctgtggaaatctgtcacatcgtactcaataccactttctgtctccaaacacaaaacttcctctgcgggcctcttcgctacacaattgaagatggagcccgtgtatctcccacagtggggttccaggtagagtttttggagttgctctttcacttccatggaacactacgaaaactgcagctccaagagcctgagtatgtgctcttggctgccatggccctcttctctcctgaccgacctggagttacccagagagatgagattgatcagctgcaagaggagatggcactgactctgcaaagctacatcaagggccagcagcgaaggccccgggatcggtttctgtatgcgaagttgctaggcctgctggctgagctccggagcattaatgaggcctacgggtaccaaatccagcacatccagggcctgtctgccatgatgccgctgctccaggagatctgcagctgaggccatgctcacttccttccccagctcacctggaacaccctggatacactggagtgggaaaatgctgggaccaaagattgggccgggttcaaagggagcccagtggt

SEQ ID NO: 35053 - DNA, 1059 bp, Artificial Sequence
  derived and/or modified sequence
atggccagcagagaagatgagctgaggaactgtgtggtgtgtggggaccaggccaccggctaccacttcaatgccctgacctgtgagggctgcaagggcttcttccggaggacagtgtccaagagcatcggccccacctgcccctttgctggcagctgtgaggtgtccaagacccagaggaggcactgcccagcctgccgcctgcagaagtgcctggatgctggcatgaggaaggacatgatcctgtctgctgaggccctggccctgcggcgggccaagcaggcccagaggcgggcccagcagacccctgtgcagctgagcaaggagcaggaggagctgatccgcaccctgctgggcgcccacaccaggcacatgggcaccatgtttgagcagtttgtgcagttccggcccccagcccacctgttcatccaccaccagcccctgcccaccctggcccctgtgctgcccctggtgacccactttgctgacatcaacaccttcatggtgctgcaggtgatcaagttcaccaaggacctgcccgtcttccgcagcctgcccatcgaggaccagatcagcctgctgaagggagctgctgtggagatctgccacatcgtgctgaacaccaccttctgcctgcagacccagaacttcctgtgtggccccctgcgctacaccattgaagatggagcccgggtgagccccaccgtgggcttccaggtggagttcctggagctgctcttccacttccacggcaccctgaggaagctgcagctgcaggagccagaatatgtgctgctggccgccatggccctcttctccccagacaggcctggggtgacccagagagatgaaattgaccagctgcaggaggagatggccctgaccctgcagagctacatcaagggccagcagaggcggccccgggaccgcttcctgtatgccaagctgctgggcctgctggccgagctgcggagcatcaatgaggcctacggctaccagatccagcacatccagggcctgagcgccatgatgcccctgctgcaggagatctgcagctag

SEQ ID NO: 35054 - DNA, 1059 bp, Artificial Sequence
  derived and/or modified sequence
atggccagccgggaggacgagctgcggaactgcgtggtgtgcggcgaccaggccactgggtatcactttaatgcattaacctgtgaaggctgtaagggcttctttcggcgcacagtttcgaaaagtatcggccccacatgcccatttgctggctcctgcgaggtgtctaaaacacagaggagacattgtccggcttgccgtcttcaaaagtgtctcgatgcgggaatgagaaaggatatgatcttatcagcagaggctcttgctctgcgccgggctaagcaggcccagcgcagagctcagcaaacaccagtgcagctctcaaaggaacaagaagaactcattcggaccttgttgggggcacacaccagacacatgggcactatgtttgagcaatttgtgcagtttaggccgcccgcccatctgttcatacaccatcagcctttgcctactctggcccctgtcttgcctcttgtcactcatttcgcagatatcaataccttcatggtgcttcaggtgattaaattcacaaaggacctcccggtgttccgcagcctcccaatcgaagatcaaatctcgctcctcaaaggagccgctgtggaaatctgccacatcgtgttgaatacaacattctgtctgcagacacagaacttcctctgtggacctctccgttatactatagaagatggagctcgcgtgagcccgactgttggatttcaggtggagttcctcgagctactttttcattttcacgggaccctgagaaagttacagcttcaggagccggaatacgtcctactggcagccatggctctgttctcaccagacagacctggggtcacccagcgtgatgagatcgaccaattgcaggaggagatggccctgactctgcaatcctacattaagggtcagcaaaggagaccacgagaccgctttctgtacgctaagctcctcggcttactagcagagttaaggagcataaacgaggcgtatgggtaccagattcaacatatccaaggcctgtccgcaatgatgccactcctgcaggaaatatgttcctag

SEQ ID NO: 35055 - DNA, 1059 bp, Artificial Sequence
  derived and/or modified sequence
atggcctctcgcgaagacgaattgaggaattgcgtagtctgcggggaccaggctacagggtatcacttcaatgccttaacttgtgagggttgcaaaggattctttcgaagaaccgtgagtaagtccattggacctacctgtccatttgcgggaagctgcgaagtatcaaagactcaaagaagacactgccccgcatgccgactccagaagtgtttggatgcaggcatgcgtaaagatatgatcttgtctgcggaggccctggctttgcgtagagccaaacaggcccagagaagagcacagcaaacccctgtccagctcagcaaggagcaggaagaactgatacgaaccctgctgggggcacatacccgacatatgggcacaatgttcgagcagtttgttcagttcagaccccctgcccacctattcattcatcatcagcctttgcctacattggccccagttctgcctcttgtgacccacttcgccgacataaatacctttatggtacttcaggtcatcaaatttacaaaagatctgcccgtgtttagaagcctccccattgaggaccagatttccctactgaagggcgctgcagtggaaatctgtcatatcgttctgaacacaaccttctgcttgcagacgcagaacttcctctgcgggccattgcgctatactattgaagacggagccagagtctcccccacagtgggatttcaagtggagttcctagaactgctttttcattttcacggaacgttgcgcaagctgcagctgcaagaacccgagtacgtcctgctcgccgctatggctctcttctctccagacaggcctggagttacccagagagacgaaattgatcagcttcaggaagaaatggcactcacccttcagagttacatcaaaggacagcagcggagaccgagggaccgatttctgtacgcaaagctgctgggtctgcttgcagaacttcgatctataaatgaagcatacgggtatcaaattcagcatattcagggcttgagcgccatgatgcctttgcttcaggagatctgcagctag

SEQ ID NO: 35056 - DNA, 1059 bp, Artificial Sequence
  derived and/or modified sequence
atggccagcagagaggacgagctgagaaactgcgtggtgtgcggcgaccaggccaccggctaccacttcaacgccctgacctgcgagggctgcaagggcttcttcagaagaaccgtgagcaagagcatcggccccacctgccccttcgccggcagctgcgaggtgagcaagacccagagaagacactgccccgcctgcagactgcagaagtgcctggacgccggcatgagaaaggacatgatcctgagcgccgaggccctggccctgagaagagccaagcaggcccagagaagagcccagcagacccccgtgcagctgagcaaggagcaggaggagctgatcagaaccctgctgggcgcccacaccagacacatgggcaccatgttcgagcagttcgtgcagttcagaccccccgcccacctgttcatccaccaccagcccctgcccaccctggcccccgtgctgcccctggtgacccacttcgccgacatcaacaccttcatggtgctgcaggtgatcaagttcaccaaggacctgcccgtgttcagaagcctgcccatcgaggaccagatcagcctgctgaagggcgccgccgtggagatctgccacatcgtgctgaacaccaccttctgcctgcagacccagaacttcctgtgcggccccctgagatacaccatcgaggacggcgccagagtgagccccaccgtgggcttccaggtggagttcctggagctgctgttccacttccacggcaccctgagaaagctgcagctgcaggagcccgagtacgtgctgctggccgccatggccctgttcagccccgacagacccggcgtgacccagagagacgagatcgaccagctgcaggaggagatggccctgaccctgcagagctacatcaagggccagcagagaagacccagagacagattcctgtacgccaagctgctgggcctgctggccgagctgagaagcatcaacgaggcctacggctaccagatccagcacatccagggcctgagcgccatgatgcccctgctgcaggagatctgcagctag

SEQ ID NO: 35057 - protein, 314 aa, Artificial Sequence
  derived and/or modified sequence
MASREDELRNCVVCGDQATGYHFNALTCEGCKGFFRRTVSKSIGPTCPFAGSCEVSKTQRRHCPACRLQKCLDAGMRKDMILSAEALALRRAKQAQRRAQQTPVQLSKEQEELIRTLLGAHTRHMGTMFEQFVQFRPPAHLFIHHQPLPTLAPVLPLVTHFADINTFMVLQVIKFTKDLPVFRSLPIEDQISLLKGAAVEICHIVLNTTFCLQTQNFLCGPLRYTIEDGARAPYLTDRPGVTQRDEIDQLQEEMALTLQSYIKGQQRRPRDRFLYAKLLGLLAELRSINEAYGYQIQHIQGLSAMMPLLQEICS

SEQ ID NO: 35058 - DNA, 945 bp, Artificial Sequence
  derived and/or modified sequence
atggctagcagagaggatgagctgcgcaactgtgtggtttgcggagatcaagcaaccggatatcactttaatgcattaacctgcgagggctgcaagggattctttcggaggacagtgtctaagagcatcggcccaacctgccccttcgcgggctcatgcgaggttagcaaaacccagcgccgacattgccctgcctgtcgcctgcagaagtgcttagacgcaggtatgcgtaaggacatgattctgagcgctgaagctctcgctcttcgtagagctaaacaagctcaacggcgagcccagcaaacccccgtgcagctgagtaaggagcaggaagaacttatccggacactgcttggagcacacaccaggcatatgggaaccatgttcgagcaatttgtccagtttcggccacctgcccacctcttcatccaccaccagcctttgcctacattagctccagtgctgcctcttgtaacccactttgcagatatcaatacatttatggttctgcaagtgattaaatttactaaggatcttcccgtcttccgcagtctgcctatcgaggatcaaattagcttgctgaagggcgcagccgtggaaatatgtcacatagtgttgaacaccacattttgtctgcagactcagaattttctgtgcggtcctcttcggtatactatcgaggatggcgctagggccccctatctgacggaccgccccggagtgacccagcgggacgaaattgatcagttgcaggaggagatggcgcttaccctgcagtcctacataaaaggacagcagcgacgcccgcgagatcgctttctatacgccaaacttcttgggttactggccgagctgcgcagtattaatgaagcctatggctatcagattcagcatattcagggcctgagcgccatgatgccgctactgcaagagatttgttcatag

SEQ ID NO: 35059 - DNA, 1074 bp, Artificial Sequence
  derived and/or modified sequence
gggagtttggggagaggcattccataccagattctgtggcctgcaggtgacatgctgcctaagagaagcaggagtctgtgacagccaccccaacacgtgacgtcatggccagtagggaagatgagctgaggaactgtgtggtatgtggggaccaagccacaggctaccactttaatgcgctgacttgtgagggctgcaagggtttcttcaggagaacagtcagcaaaagcattggtcccacctgcccctttgctggaagctgtgaagtcagcaagactcagaggcgccactgcccagcctgcaggttgcagaagtgcttagatgctggcatgaggaaagacatgatactgtcggcagaagccctggcattgcggcgagcaaagcaggcccagcggcgggcacagcaaacacctgtgcaactgagtaaggagcaagaagagctgatccggacactcctgggggcccacacccgccacatgggcaccatgtttgaacagtttgtgcagtttaggcctccagctcatctgttcatccatcaccagcccttgcccaccctggcccctgtgctgcctctggtcacacacttcgcagacatcaacactttcatggtactgcaagtcatcaagtttactaaggacctgcccgtcttccgttccctgcccattgaagaccagatctcccttctcaagggagcagctgtggaaatctgtcacatcgtactcaataccactttctgtctccaaacacaaaacttcctctgcgggcctcttcgctacacaattgaagatggagcccgtgctccctatcttacagaccgacctggagttacccagagagatgagattgatcagctgcaagaggagatggcactgactctgcaaagctacatcaagggccagcagcgaaggccccgggatcggtttctgtatgcgaagttgctaggcctgctggctgagctccggagcattaatgaggcctacgggtaccaaatccagcacatccagggcctgtctgccatgatgccgctgctccaggagatctgcagctgaggccatgctcacttccttccccagc

SEQ ID NO: 35060 - DNA, 1093 bp, Artificial Sequence
  derived and/or modified sequence
aaccccacagtcactgagagcaactggaggccacataaaacagacatctcttgttttccagatactacgggtcataatccctaactccaatcactggcaactcctgagatcagaggaaaaccagcaacagcgtgggagtttggggagaggcattccataccagattctgtggcctgcaggtgacatgctgcctaagagaagcaggagtctgtgacagccaccccaacacgtgacgtcatggccagtagggaagatgagctgaggaactgtgtggtatgtggggaccaagccacaggctaccactttaatgcgctgacttgtgagggctgcaagggtttcttcaggagaacagtcagcaaaagcattggtcccacctgcccctttgctggaagctgtgaagtcagcaagactcagaggcgccactgcccagcctgcaggttgcagaagtgcttagatgctggcatgaggaaagacatgatactgtcggcagaagccctggcattgcggcgagcaaagcaggcccagcggcgggcacagcaaacacctgtgcaactgagtaaggagcaagaagagctgatccggacactcctgggggcccacacccgccacatgggcaccatgtttgaacagtttgtgcagtttaggcctccagctcatctgttcatccatcaccagcccttgcccaccctggcccctgtgctgcctctggtcacacacttcgcagacatcaacactttcatggtactgcaagtcatcaagtttactaaggacctgcccgtcttccgttccctgcccattgaagaccagatctcccttctcaagggagcagctgtggaaatctgtcacatcgtactcaataccactttctgtctccaaacacaaaacttcctctgcgggcctcttcgctacacaattgaagatggagcccgtggtgagatggtgctagagcaatagggggcatgtgtcctcatggtacaggatgtggtcaggtgacctagaggctcctaatcctagtatctcccacagtggggttccaggtagagtttttggagttgctctttcacttccatggaacactacgaaaactgcagct

SEQ ID NO: 35061 - DNA, 945 bp, Artificial Sequence
  derived and/or modified sequence
atggccagcagagaagatgagctgaggaactgtgtggtgtgtggggaccaggccaccggctaccacttcaatgccctgacctgtgagggctgcaagggcttcttccggaggacagtgtccaagagcatcggccccacctgcccctttgctggcagctgtgaggtgtccaagacccagaggaggcactgcccagcctgccgcctgcagaagtgcctggatgctggcatgaggaaggacatgatcctgtctgctgaggccctggccctgcggcgggccaagcaggcccagaggcgggcccagcagacccctgtgcagctgagcaaggagcaggaggagctgatccgcaccctgctgggcgcccacaccaggcacatgggcaccatgtttgagcagtttgtgcagttccggcccccagcccacctgttcatccaccaccagcccctgcccaccctggcccctgtgctgcccctggtgacccactttgctgacatcaacaccttcatggtgctgcaggtgatcaagttcaccaaggacctgcccgtcttccgcagcctgcccatcgaggaccagatcagcctgctgaagggagctgctgtggagatctgccacatcgtgctgaacaccaccttctgcctgcagacccagaacttcctgtgtggccccctgcgctacaccattgaagatggagcccgggccccctacctgacagacaggcctggggtgacccagagagatgaaattgaccagctgcaggaggagatggccctgaccctgcagagctacatcaagggccagcagaggcggccccgggaccgcttcctgtatgccaagctgctgggcctgctggccgagctgcggagcatcaatgaggcctacggctaccagatccagcacatccagggcctgagcgccatgatgcccctgctgcaggagatctgcagctag

SEQ ID NO: 35062 - DNA, 945 bp, Artificial Sequence
  derived and/or modified sequence
atggccagccgggaggacgagctgcggaactgcgtggtgtgcggcgatcaggctaccggatatcactttaacgccctgacctgtgaaggctgcaaggggtttttcaggcgaacggtgtccaagtcaatagggcccacctgccccttcgcaggttcgtgcgaggtatcaaagacccagcggcgacactgcccagcctgtaggctacagaagtgcctggacgcaggaatgagaaaggacatgatactgtccgcagaggcgttggcccttaggagggctaagcaagcccagcggcgagctcagcagactcccgtgcagctcagcaaagaacaggaggagctaattaggactctgctcggtgcacatactcgtcatatgggaactatgttcgagcaatttgttcagtttcggccgcctgcccacctgtttattcaccaccagccgcttcctaccctggctcccgtgctccctctagtgactcatttcgcagatattaatacctttatggtactgcaggttattaaattcacaaaggacctaccagtgtttcggagcctgccaattgaggaccagatcagcctcctgaaaggagccgcggtagagatttgtcacatcgtactcaacacaactttctgcctgcagactcagaatttcctctgtggaccattgcggtacacaatcgaagatggagcccgcgctccatacctgacagacaggcccggcgtcactcaacgggatgagatcgatcagctgcaggaagagatggcactcactctgcagtcctacatcaagggtcagcaaaggagaccccgcgatcggtttttatatgccaagttactgggcctgttagcagaactaagaagtattaatgaagcttatggctaccaaatccagcacatccagggactgagcgcaatgatgccgctgctgcaagagatatgcagttag

SEQ ID NO: 35063 - DNA, 945 bp, Artificial Sequence
  derived and/or modified sequence
atggcgtctcgagaggacgaactgcgcaactgcgtagtctgcggcgatcaggccaccggatatcactttaatgctttgacgtgcgaggggtgtaagggtttctttagacgaactgtgtctaagagcatcggccctacctgtcccttcgcgggatcctgcgaggtaagcaagactcaacgacgacactgccccgcttgccggctgcagaaatgcctcgacgctggcatgcggaaagacatgatacttagcgctgaggctctggcacttaggcgtgctaagcaggctcagaggcgggcacagcagactcccgtacagctgtccaaggaacaggaggagctaatcagaaccctcctcggggctcacacacgccacatggggaccatgtttgaacagttcgttcagttccgtcctcctgcacacctttttatccaccatcagcctctgccgacgttagccccagtgctccctcttgtgacccactttgccgacataaacactttcatggttctgcaagtgatcaaattcaccaaggacttaccagtgtttcgatcgctcccaatcgaagatcagattagtctgttgaagggcgcagcagtcgagatatgtcacattgttctcaacacaactttctgcctccagacgcagaacttcctgtgtggaccactgaggtatacaatagaagatggtgccagagcgccttaccttacagaccgcccaggtgtcacacaacgggatgaaatcgatcagttacaggaggaaatggccctgactcttcagagctacattaaaggacagcaacggcgtccccgagaccgttttctgtatgcaaagctgcttggcctccttgccgaattgcgatcgattaacgaagcatatggatatcaaattcagcatatccagggcctgagcgccatgatgcccttgctccaggagatctgttcctag

SEQ ID NO: 35064 - DNA, 945 bp, Artificial Sequence
  derived and/or modified sequence
atggccagcagagaggacgagctgagaaactgcgtggtgtgcggcgaccaggccaccggctaccacttcaacgccctgacctgcgagggctgcaagggcttcttcagaagaaccgtgagcaagagcatcggccccacctgccccttcgccggcagctgcgaggtgagcaagacccagagaagacactgccccgcctgcagactgcagaagtgcctggacgccggcatgagaaaggacatgatcctgagcgccgaggccctggccctgagaagagccaagcaggcccagagaagagcccagcagacccccgtgcagctgagcaaggagcaggaggagctgatcagaaccctgctgggcgcccacaccagacacatgggcaccatgttcgagcagttcgtgcagttcagaccccccgcccacctgttcatccaccaccagcccctgcccaccctggcccccgtgctgcccctggtgacccacttcgccgacatcaacaccttcatggtgctgcaggtgatcaagttcaccaaggacctgcccgtgttcagaagcctgcccatcgaggaccagatcagcctgctgaagggcgccgccgtggagatctgccacatcgtgctgaacaccaccttctgcctgcagacccagaacttcctgtgcggccccctgagatacaccatcgaggacggcgccagagccccctacctgaccgacagacccggcgtgacccagagagacgagatcgaccagctgcaggaggagatggccctgaccctgcagagctacatcaagggccagcagagaagacccagagacagattcctgtacgccaagctgctgggcctgctggccgagctgagaagcatcaacgaggcctacggctaccagatccagcacatccagggcctgagcgccatgatgcccctgctgcaggagatctgcagctag

SEQ ID NO: 35065 - protein, 357 aa, Artificial Sequence
  derived and/or modified sequence
MASREDELRNCVVCGDQATGYHFNALTCEGCKGFFRRTVSKSIGPTCPFAGSCEVSKTQRRHCPACRLQKCLDAGMRKDMILSAEALALRRAKQAQRRAQQTPVQLSKEQEELIRTLLGAHTRHMGTMFEQFVQFRPPAHLFIHHQPLPTLAPVLPLVTHFADINTFMVLQVIKFTKDLPVFRSLPIEDQISLLKGAAVEICHIVLNTTFCLQTQNFLCGPLRYTIEDGARVSPTVGFQVEFLELLFHFHGTLRKLQLQEPEYVLLAAMALFSPAPYLTDRPGVTQRDEIDQLQEEMALTLQSYIKGQQRRPRDRFLYAKLLGLLAELRSINEAYGYQIQHIQGLSAMMPLLQEICS

SEQ ID NO: 35066 - protein, 119 aa, Artificial Sequence
  derived and/or modified sequence
MASREDELRNCVVCGDQATGYHFNALTCEGCKGFFRRTVSKSIGPTCPFAGSCEVSKTQRRHCPACRLQKCLDAGMRKDTSSSSVHPSPALAHPGPCAASGHTLRRHQHFHGTASHQVY

SEQ ID NO: 35067 - DNA, 1074 bp, Artificial Sequence
  derived and/or modified sequence
atggcctcgagagaagacgaactgcggaactgtgtggtttgtggcgaccaggccaccggttaccacttcaacgctctgacctgtgagggatgtaagggatttttcaggaggacagtatctaaaagtatcggcccaacctgcccatttgcaggaagttgcgaagttagcaagactcagaggagacactgccccgcttgccgcctccagaaatgtctggacgcgggaatgcggaaggacatgattctgtctgccgaagctcttgctctgcgcagggctaagcaagcacaacggcgcgcgcagcaaacccccgtgcaattgtcaaaagagcaagaagagctaatccggaccctactgggagcccacacacgtcacatgggtactatgttcgagcagttcgtgcaattccgcccaccagcccacttgttcattcaccaccagccgttacccacactagccccggtgctgcctctggtgacccacttcgctgacatcaacacatttatggtgctgcaggtgataaagtttacaaaagacttgcccgtttttcggtccctccctatagaagatcagataagcctgctcaagggggccgccgttgaaatctgccacattgtactgaacaccaccttttgcctgcagacacaaaactttttgtgtggtccactgcggtacaccatagaggatggcgcaagggtttctcctacggtgggatttcaggtggagttcctcgagctgctcttccacttccacgggacattaaggaagctgcagcttcaggaaccagagtacgtccttctggcagctatggcattgttctcgccggccccatatctcactgaccgcccgggcgttacgcaaagggatgagatcgatcagctgcaagaggagatggccctcaccctccagtcttacataaaaggccagcaacgtcgcccaagagataggtttctgtacgctaaattgctcggacttcttgccgaactccgctccatcaacgaggcctatggttaccaaatccagcacatacagggtctgtccgctatgatgcccctgttgcaagaaatctgcagctag

SEQ ID NO: 35068 - DNA, 1074 bp, Artificial Sequence
  derived and/or modified sequence
atggccagtagggaagacgagttgcgcaattgcgttgtgtgtggggaccaggctactggctaccactttaacgccctgacgtgcgaaggctgcaaaggctttttccgccgaacagtgtccaagtcaatcggtcccacatgtccatttgcgggctcatgtgaggtcagcaagacccagcgccgccactgtcccgcgtgtcggctgcaaaaatgtcttgacgctgggatgcgtaaggacatgatcttgtccgctgaggcacttgccttgcgccgcgccaaacaggctcagcgacgcgcccagcagactcctgtccagttgagcaaggaacaggaggagctcataagaacccttttaggagctcacaccagacacatgggtacaatgttcgagcagttcgtgcaatttagaccaccggctcacctgtttatacatcaccaaccgttacctactttagctcccgtgctcccactggtcacacacttcgccgacattaacacattcatggtcctccaagtgattaagttcacgaaggatctgccggtattccgctctttaccaattgaagaccaaatctcactactgaagggcgccgccgtggagatatgtcacatcgtcctgaacacaacattctgtctgcaaacacagaatttcctctgtgggcccctgaggtacaccatagaagatggagctcgggtgagcccaacagtgggattccaggtggaattcttggaactgttgttccactttcatggaaccctccggaaactgcagctacaggagcccgagtacgtgctgttggccgctatggctttgtttagccccgcaccttacctgacggatcgcccaggtgttacacaaagggacgagattgaccagctgcaggaggagatggctttaactcttcagagttatattaaagggcagcagagacgccccagagaccgcttcctgtacgcgaagcttctcggcctcctcgctgaactccggagcattaatgaagcctacggatatcaaattcaacatattcaagggctttcagctatgatgccactgttgcaggagatttgctcatag

SEQ ID NO: 35069 - DNA, 1074 bp, Artificial Sequence
  derived and/or modified sequence
atggccagtagggaagatgagctgaggaactgtgtggtatgtggggaccaagccacaggctaccactttaatgcgctgacttgtgagggctgcaagggtttcttcaggagaacagtcagcaaaagcattggtcccacctgcccctttgctggaagctgtgaagtcagcaagactcagaggcgccactgcccagcctgcaggttgcagaagtgcttagatgctggcatgaggaaagacatgatactgtcggcagaagccctggcattgcggcgagcaaagcaggcccagcggcgggcacagcaaacacctgtgcaactgagtaaggagcaagaagagctgatccggacactcctgggggcccacacccgccacatgggcaccatgtttgaacagtttgtgcagtttaggcctccagctcatctgttcatccatcaccagcccttgcccaccctggcccctgtgctgcctctggtcacacacttcgcagacatcaacactttcatggtactgcaagtcatcaagtttactaaggacctgcccgtcttccgttccctgcccattgaagaccagatctcccttctcaagggagcagctgtggaaatctgtcacatcgtactcaataccactttctgtctccaaacacaaaacttcctctgcgggcctcttcgctacacaattgaagatggagcccgtgtatctcccacagtggggttccaggtagagtttttggagttgctctttcacttccatggaacactacgaaaactgcagctccaagagcctgagtatgtgctcttggctgccatggccctcttctctcctgctccctatcttacagaccgacctggagttacccagagagatgagattgatcagctgcaagaggagatggcactgactctgcaaagctacatcaagggccagcagcgaaggccccgggatcggtttctgtatgcgaagttgctaggcctgctggctgagctccggagcattaatgaggcctacgggtaccaaatccagcacatccagggcctgtctgccatgatgccgctgctccaggagatctgcagctga

SEQ ID NO: 35070 - DNA, 1408 bp, Artificial Sequence
  derived and/or modified sequence
ataaaacagacatctcttgttttccagatactacgggtcataatccctaactccaatcactggcaactcctgagatcagaggaaaaccagcaacagcgtgggagtttggggagaggcattccataccagattctgtggcctgcaggtgacatgctgcctaagagaagcaggagtctgtgacagccaccccaacacgtgacgtcatggccagtagggaagatgagctgaggaactgtgtggtatgtggggaccaagccacaggctaccactttaatgcgctgacttgtgagggctgcaagggtttcttcaggagaacagtcagcaaaagcattggtcccacctgcccctttgctggaagctgtgaagtcagcaagactcagaggcgccactgcccagcctgcaggttgcagaagtgcttagatgctggcatgaggaaagacatgatactgtcggcagaagccctggcattgcggcgagcaaagcaggcccagcggcgggcacagcaaacacctgtgcaactgagtaaggagcaagaagagctgatccggacactcctgggggcccacacccgccacatgggcaccatgtttgaacagtttgtgcagtttaggcctccagctcatctgttcatccatcaccagcccttgcccaccctggcccctgtgctgcctctggtcacacacttcgcagacatcaacactttcatggtactgcaagtcatcaagtttactaaggacctgcccgtcttccgttccctgcccattgaagaccagatctcccttctcaagggagcagctgtggaaatctgtcacatcgtactcaataccactttctgtctccaaacacaaaacttcctctgcgggcctcttcgctacacaattgaagatggagcccgtgtatctcccacagtggggttccaggtagagtttttggagttgctctttcacttccatggaacactacgaaaactgcagctccaagagcctgagtatgtgctcttggctgccatggccctcttctctcctgctccctatcttacagaccgacctggagttacccagagagatgagattgatcagctgcaagaggagatggcactgactctgcaaagctacatcaagggccagcagcgaaggccccgggatcggtttctgtatgcgaagttgctaggcctgctggctgagctccggagcattaatgaggcctacgggtaccaaatccagcacatccagggcctgtctgccatgatgccgctgctccaggagatctgcagctgaggccatgctcacttccttccccagctcacctggaacaccctggatacactggagtgggaaaatgctgggaccaaagattgggccgggttcaaagggagcccagtggttgcaatgaaagactaaagcaataa

SEQ ID NO: 35071 - DNA, 1074 bp, Artificial Sequence
  derived and/or modified sequence
atggccagcagagaagatgagctgaggaactgtgtggtgtgtggggaccaggccaccggctaccacttcaatgccctgacctgtgagggctgcaagggcttcttccggaggacagtgtccaagagcatcggccccacctgcccctttgctggcagctgtgaggtgtccaagacccagaggaggcactgcccagcctgccgcctgcagaagtgcctggatgctggcatgaggaaggacatgatcctgtctgctgaggccctggccctgcggcgggccaagcaggcccagaggcgggcccagcagacccctgtgcagctgagcaaggagcaggaggagctgatccgcaccctgctgggcgcccacaccaggcacatgggcaccatgtttgagcagtttgtgcagttccggcccccagcccacctgttcatccaccaccagcccctgcccaccctggcccctgtgctgcccctggtgacccactttgctgacatcaacaccttcatggtgctgcaggtgatcaagttcaccaaggacctgcccgtcttccgcagcctgcccatcgaggaccagatcagcctgctgaagggagctgctgtggagatctgccacatcgtgctgaacaccaccttctgcctgcagacccagaacttcctgtgtggccccctgcgctacaccattgaagatggagcccgggtgagccccaccgtgggcttccaggtggagttcctggagctgctcttccacttccacggcaccctgaggaagctgcagctgcaggagccagaatatgtgctgctggccgccatggccctcttcagccctgccccctacctgacagacaggcctggggtgacccagagagatgaaattgaccagctgcaggaggagatggccctgaccctgcagagctacatcaagggccagcagaggcggccccgggaccgcttcctgtatgccaagctgctgggcctgctggccgagctgcggagcatcaatgaggcctacggctaccagatccagcacatccagggcctgagcgccatgatgcccctgctgcaggagatctgcagctag

SEQ ID NO: 35072 - DNA, 1074 bp, Artificial Sequence
  derived and/or modified sequence
atggccagccgggaggacgagctgcggaactgcgtggtgtgcggcgaccaggccaccggctaccattttaatgccctcacttgtgaggggtgcaagggtttctttagacggacggtgagcaagtctatcggccccacatgccctttcgccggcagttgtgaggtgtcaaagacacaaagacggcactgcccagcatgccgactccagaaatgcctcgacgccggtatgaggaaggacatgatcctgagcgccgaggccctcgcccttagaagagctaaacaggcacaacgccgcgcacagcagacacccgttcaactaagcaaagagcaggaagagttaatccgaaccctccttggagctcacacccggcacatgggcactatgttcgaacagttcgtgcaatttagaccaccggcacaccttttcatccatcaccagcctctgccgacactggcaccagtgctccctctggttacccactttgccgacattaatacgttcatggtgctccaggtgatcaagtttacaaaggatctgccagtgtttagatcactccctatcgaggaccagatcagtctattgaaaggcgccgcagtcgagatctgccatatcgttctcaacaccacattctgtttgcaaacgcagaattttctatgcggccctctgcggtatacgatcgaagatggtgctcgggtttcaccgacagtcggcttccaagtcgaattcctggagctgttatttcacttccatggaactctgaggaagctccagctgcaggaacccgagtacgtcctgctggccgccatggcacttttcagcccagcgccatacctcacggatagaccgggggtaactcagcgggacgaaatagaccagcttcaggaagagatggccttaactctgcagtcctatatcaaaggacaacaacggaggcctcgggaccgcttcctgtatgctaagcttctggggctccttgctgagcttagatcaattaatgaggcttatggctaccaaatccaacacattcaggggctcagcgccatgatgccgctgctgcaggaaatttgctcatag

SEQ ID NO: 35073 - DNA, 1074 bp, Artificial Sequence
  derived and/or modified sequence
atggccagccgggaggacgagctgcggaactgcgtggtgtgcggcgaccaggccaccggctatcattttaatgcgctcacgtgcgaaggatgtaagggtttttttcggcgaaccgtctccaaaagcattggcccaacatgtccattcgcaggcagttgtgaggtctccaagactcaacggaggcactgccctgcttgtcggctgcagaagtgtttagatgctggtatgaggaaagatatgatccttagcgcagaggctctggctctgcgtcgagctaaacaagcccagcgcagagcgcagcagaccccggtccagctaagcaaggaacaggaggagcttatccgtacgctgctcggcgctcatacacggcacatggggacgatgtttgaacagttcgtgcagtttagacccccagcccatctgtttattcaccatcagcccttgccaactctcgccccagtgctcccgctggtgacccatttcgccgacattaacacattcatggtgctgcaggtgataaagttcactaaagatctgccggtgttccgttccctccctattgaagaccaaattagcctgttgaaaggcgctgccgtggaaatctgccacattgtccttaacacaacattttgcctgcaaacccagaactttctctgtggtccgctgcggtataccattgaggacggagcccgggtcagccccacagtcggtttccaggtggagtttctcgaactgctgtttcatttccacggcactcttagaaaactgcagctgcaggagcccgagtacgtgctgctggccgccatggccttgttttctccggctccttatctgaccgatcgacccggagtcactcagcgcgatgaaattgatcaactccaggaagaaatggccctcactttacagagctatattaaggggcagcagcgccgtccaagagatagatttctttatgccaaactgcttggactcctagccgaactcagatccataaacgaagcttacggctatcagatccagcacatacagggcctctctgctatgatgccccttctgcaggaaatctgtagttag

SEQ ID NO: 35074 - DNA, 1074 bp, Artificial Sequence
  derived and/or modified sequence
atggcgtcgagggaggacgagttgcgcaattgtgtagtgtgcggcgaccaggctacgggttaccattttaatgctttgacttgtgaggggtgtaaaggattcttccgccgtacagtatctaaatctattgggccaacatgcccatttgccggatcatgcgaagtctctaaaacccagagaaggcattgtcctgcttgtcgcttacagaagtgcctggacgcgggaatgcgtaaagacatgattctctcagccgaggccctggccctccgtagagcaaagcaagcccaacggagagcgcagcagacgcctgtgcagttaagcaaggagcaggaagagctaattcggacgctccttggcgctcatacaagacacatgggaactatgttcgagcagttcgtgcaattcagaccccctgcccatctgtttatccaccatcaacctcttccaacccttgccccagtgttgcctctggtgactcatttcgctgatattaacacatttatggtgctgcaggtaataaagttcaccaaagacctgcctgtgttcaggtccctcccgatagaggatcagattagcttgttgaagggcgcagccgtggagatttgtcacatcgttctgaacaccaccttttgtctccaaacccagaattttctgtgcggacctctgcgatacactatcgaggatggggctcgcgtgtcccccactgtaggattccaggttgagttcctggaactcctctttcatttccatggcacgctccggaagctgcagctgcaggagcctgagtatgttttgcttgctgccatggcgctatttagtcccgctccctacctaactgatagaccaggggtgacccagcgggatgagatcgaccagttgcaggaagaaatggctctgacattgcagagttacatcaaaggacagcagcgtcgccctagagataggttcctttacgcaaagctgttgggcttactagcggagctacggagcattaacgaagcctacgggtatcagatccaacacatccagggtctttctgccatgatgcctcttctgcaagaaatttgtagttag

SEQ ID NO: 35075 - DNA, 1074 bp, Artificial Sequence
  derived and/or modified sequence
atggcatctagggaggatgagttgcggaactgtgtggtgtgcggggatcaggccaccggttatcattttaatgctctgacgtgcgagggttgtaaaggtttctttaggaggacggtgagcaagagtattggaccaacctgccctttcgccggttcatgcgaggtctctaagacgcagaggcgccattgcccagcctgcaggctccagaaatgcctggacgcaggcatgcgaaaggacatgatactgtccgcagaagccttggcactgcggagagccaaacaagcacagaggagggcccaacagacacccgtgcaattaagtaaggaacaggaggaactgatccgtaccctcttgggagctcacacgagacacatgggcacgatgtttgagcagttcgtccagttccgcccacctgcccatctgtttatccaccaccagcctcttcctacgctcgctcccgtcctcccccttgtgacccatttcgctgatattaacaccttcatggtgctgcaagtgattaagtttactaaagacctgccggtgtttcgtagcctaccaattgaggaccagatcagtctcctgaaaggggctgctgtagagatctgtcacatcgtcttgaacaccacattttgcctgcaaactcaaaacttcttgtgtggccctctcaggtacacaatcgaggatggcgcacgagtatccccaactgttggctttcaagtcgaatttctggagctactatttcactttcatggcaccttacgtaagctgcaactgcaggagccagagtatgtattgctggctgccatggccctgttcagtcctgcgccttatctcactgatcggcctggtgtcacccagagagacgagatagaccagctgcaggaagagatggccctgaccctccagagttatattaaggggcagcagcgcaggccacgcgacaggttcctatacgccaagctgctgggccttctggcagagctgcgcagcataaacgaggcctacgggtatcaaattcagcacattcaagggctgagtgccatgatgcctcttctccaggagatctgcagctag

SEQ ID NO: 35076 - DNA, 1074 bp, Artificial Sequence
  derived and/or modified sequence
atggccagcagagaggacgagctgagaaactgcgtggtgtgcggcgaccaggccaccggctaccacttcaacgccctgacctgcgagggctgcaagggcttcttcagaagaaccgtgagcaagagcatcggccccacctgccccttcgccggcagctgcgaggtgagcaagacccagagaagacactgccccgcctgcagactgcagaagtgcctggacgccggcatgagaaaggacatgatcctgagcgccgaggccctggccctgagaagagccaagcaggcccagagaagagcccagcagacccccgtgcagctgagcaaggagcaggaggagctgatcagaaccctgctgggcgcccacaccagacacatgggcaccatgttcgagcagttcgtgcagttcagaccccccgcccacctgttcatccaccaccagcccctgcccaccctggcccccgtgctgcccctggtgacccacttcgccgacatcaacaccttcatggtgctgcaggtgatcaagttcaccaaggacctgcccgtgttcagaagcctgcccatcgaggaccagatcagcctgctgaagggcgccgccgtggagatctgccacatcgtgctgaacaccaccttctgcctgcagacccagaacttcctgtgcggccccctgagatacaccatcgaggacggcgccagagtgagccccaccgtgggcttccaggtggagttcctggagctgctgttccacttccacggcaccctgagaaagctgcagctgcaggagcccgagtacgtgctgctggccgccatggccctgttcagccccgccccctacctgaccgacagacccggcgtgacccagagagacgagatcgaccagctgcaggaggagatggccctgaccctgcagagctacatcaagggccagcagagaagacccagagacagattcctgtacgccaagctgctgggcctgctggccgagctgagaagcatcaacgaggcctacggctaccagatccagcacatccagggcctgagcgccatgatgcccctgctgcaggagatctgcagctag

SEQ ID NO: 35077 - protein, 395 aa, Artificial Sequence
  derived and/or modified sequence
MGCLGNSKTEDQRNEEKAQREANKKIEKQLQKDKQVYRATHRLLLLGAGESGKSTIVKQMRILHVNGFNGEGGEEDPQAARSNSDGSEKATKVQDIKNNLKEAIETIVAAMSNLVPPVELANPENQFRVDYILSVMNVPDFDFPPEFYEHAKALWEDEGVRACYERSNEYQLIDCAQYFLDKIDVIKQADYVPSDQDLLRCRVLTSGIFETKFQVDKVNFHMFDVGGQRDERRKWIQCFNDVTAIIFVVASSSYNMVIREDNQTNRLQEALNLFKSIWNNRWLRTISVILFLNKQDLLAEKVLAGKSKIEDYFPEFARYTTPEDATPEPGEDPRVTRAKYFIRDEFLRISTASGDGRHYCYPHFTCAVDTENIRRVFNDCRDIIQRMHLRQYELL

SEQ ID NO: 35078 - DNA, 1188 bp, Artificial Sequence
  derived and/or modified sequence
atgggctgcctgggtaactcaaaaactgaagaccagaggaatgaggagaaggcccaaagggaagccaacaagaaaattgagaagcagctccagaaggacaagcaggtctatcgagcgacacataggctgctgctgctgggggccggcgaatcaggtaagagcacaatcgttaaacagatgcgcatccttcatgtcaacggctttaatggcgaggggggcgaggaggacccccaggcagcccggtccaactcagatgggtcggaaaaagctactaaagttcaggatataaaaaacaatctcaaggaggccattgagactattgtagccgccatgagcaatctggttcctcccgtggaactcgctaacccagaaaaccaattccgcgtggattacattttgtccgtaatgaatgtcccagattttgatttcccacctgagttttacgaacacgctaaggctctttgggaagacgagggagtccgggcctgttacgagcgcagtaatgagtatcagctaatcgattgtgctcagtacttcttggataaaattgatgtgatcaaacaggccgattacgtgcccagtgaccaagacctcctgcgttgtcgcgtgctaacctccggcatcttcgagaccaagttccaggttgacaaagttaacttccatatgtttgacgttggcggccagcgtgacgaaaggcggaagtggattcagtgtttcaatgacgtaaccgcgatcattttcgtcgtcgcttcatcctcgtacaacatggttatcagagaggacaaccagaccaataggttacaggaggctctgaatctttttaagtctatttggaacaatcgctggctgcgaactatctctgtgatactgtttcttaacaaacaggatttactcgctgagaaggttcttgcggggaagagtaaaatcgaagattactttcctgagttcgctcggtacaccactcccgaggacgctacacccgagccgggtgaggatccaagggtgacaagagccaaatatttcatcagagatgagttccttcgcatttccaccgcctcaggggacgggaggcattactgttacccacactttacatgcgccgtagatacagaaaacattcgcagagtgtttaacgactgccgtgatattattcagcgcatgcacttgcgacagtatgaacttctgtag

SEQ ID NO: 35079 - DNA, 1975 bp, Artificial Sequence
  derived and/or modified sequence
tcgccgccgccgcctcctcctccccccgcctccccccgcccgccgcggcgcttttggctcggggcggcggcgggggcccggccgaggcaataagagcggcggcggcggcagcggcggcagcagctcccgcagctcctgctctggtccgcctcggcccggcggcggccatcagccccctcggcctcggctcgaggggcggggagctgcgcgcgcccctcggtccgaccgacaccctccccttcccgcccgtccgcgcgccccgcggcccgcggcccgcagtccgccccgcgcgctccttgccgaggagccgagcccgcgcccggcccgcccgcccggcgctgccccggccctcccggcccgcgtgaggccgcccgcgcccgccgccgccgcagcccggccgcgccccgccgccgccgccgccgccatgggctgcctcgggaacagtaagaccgaggaccagcgcaacgaggagaaggcgcagcgtgaggccaacaaaaagatcgagaagcagctgcagaaggacaagcaggtctaccgggccacgcaccgcctgctgctgctgggtgctggagaatctggtaaaagcaccattgtgaagcagatgaggatcctgcatgttaatgggtttaatggagagggcggcgaagaggacccgcaggctgcaaggagcaacagcgatggcagtgagaaggcaaccaaagtgcaggacatcaaaaacaacctgaaagaggcgattgaaaccattgtggccgccatgagcaacctggtgccccccgtggagctggccaaccccgagaaccagttcagagtggactacatcctgagtgtgatgaacgtgcctgactttgacttccctcccgaattctatgagcatgccaaggctctgtgggaggatgaaggagtgcgtgcctgctacgaacgctccaacgagtaccagctgattgactgtgcccagtacttcctggacaagatcgacgtgatcaagcaggctgactatgtgccgagcgatcaggacctgcttcgctgccgtgtcctgacttctggaatctttgagaccaagttccaggtggacaaagtcaacttccacatgtttgacgtgggtggccagcgcgatgaacgccgcaagtggatccagtgcttcaacgatgtgactgccatcatcttcgtggtggccagcagcagctacaacatggtcatccgggaggacaaccagaccaaccgcctgcaggaggctctgaacctcttcaagagcatctggaacaacagatggctgcgcaccatctctgtgatcctgttcctcaacaagcaagatctgctcgctgagaaagtccttgctgggaaatcgaagattgaggactactttccagaatttgctcgctacactactcctgaggatgctactcccgagcccggagaggacccacgcgtgacccgggccaagtacttcattcgagatgagtttctgaggatcagcactgccagtggagatgggcgtcactactgctaccctcatttcacctgcgctgtggacactgagaacatccgccgtgtgttcaacgactgccgtgacatcattcagcgcatgcaccttcgtcagtacgagctgctctaagaagggaacccccaaatttaattaaagccttaagcacaattaattaaaagtgaaacgtaattgtacaagcagttaatcacccaccatagggcatgattaacaaagcaacctttcccttcccccgagtgattttgcgaaacccccttttcccttcagcttgcttagatgttccaaatttagaaagcttaaggcggcctacagaaaaaggaaaaaaggccacaaaagttccctctcactttcagtaaaaataaataaaacagcagcagcaaacaaataaaatgaaataaaagaaacaaatgaaataaatattgtgttgtgcagcattaaaaaaaatcaaaataaaaattaaatgtgagcaaagaa

SEQ ID NO: 35080 - DNA, 2551 bp, Artificial Sequence
  derived and/or modified sequence
agtctcctctgtcctctcccaggcaagaggaccggcggaggcacctctctcgagtcttaggctgcggaatctaagactcagcgagaggagcccgggaggagacagaactttccccttttttcccatcccttcttcttgctcagagaggcaagcaaggcgcggagctttagaaagttcttaagtggtcaggaaggtaggtgcttccctttttctcctcacaaggaggtgaggctgggacctccgggccagcttctcacctcatagggtgtacctttcccggctccagcagccaatgtgcttcggagccactctctgcagagccagagggcaggccggcttctcggtgtgtgcctaagaggatggatcggaggtcccgggctcagcagtggcgccgagctcgccataattacaacgacctgtgcccgcccataggccgccgggcagccaccgcgctcctctggctctcctgctccatcgcgctcctccgcgcccttgccacctccaacgcccgtgcccagcagcgcgcggctgcccaacagcgccggagcttccttaacgcccaccaccgctccggcgcccaggtattccctgagtcccccgaatcggaatctgaccacgagcacgaggaggcagaccttgagctgtccctccccgagtgcctagagtacgaggaagagttcgactacgagaccgagagcgagaccgagtccgaaatcgagtccgagaccgacttcgagaccgagcctgagaccgcccccaccactgagcccgagaccgagcctgaagacgatcgcggcccggtggtgcccaagcactccaccttcggccagtccctcacccagcgtctgcacgctctcaagttgcgaagccccgacgcctccccaagtcgcgcgccgcccagcactcaggagccccagagccccagggaaggggaggagctcaagcccgaggacaaagatccaagggaccccgaagagtcgaaggagcccaaggaggagaagcagcggcgtcgctgcaagccaaagaagcccacccgccgtgacgcgtccccggagtccccttccaaaaagggacccatccccatccggcgtcactaatggaggacgccgtccagattctccttgttttcatggattcaggtgctggagaatctggtaaaagcaccattgtgaagcagatgaggatcctgcatgttaatgggtttaatggagagggcggcgaagaggacccgcaggctgcaaggagcaacagcgatggcagtgagaaggcaaccaaagtgcaggacatcaaaaacaacctgaaagaggcgattgaaaccattgtggccgccatgagcaacctggtgccccccgtggagctggccaaccccgagaaccagttcagagtggactacatcctgagtgtgatgaacgtgcctgactttgacttccctcccgaattctatgagcatgccaaggctctgtgggaggatgaaggagtgcgtgcctgctacgaacgctccaacgagtaccagctgattgactgtgcccagtacttcctggacaagatcgacgtgatcaagcaggctgactatgtgccgagcgatcaggacctgcttcgctgccgtgtcctgacttctggaatctttgagaccaagttccaggtggacaaagtcaacttccacatgtttgacgtgggtggccagcgcgatgaacgccgcaagtggatccagtgcttcaacgatgtgactgccatcatcttcgtggtggccagcagcagctacaacatggtcatccgggaggacaaccagaccaaccgcctgcaggaggctctgaacctcttcaagagcatctggaacaacagatggctgcgcaccatctctgtgatcctgttcctcaacaagcaagatctgctcgctgagaaagtccttgctgggaaatcgaagattgaggactactttccagaatttgctcgctacactactcctgaggatgctactcccgagcccggagaggacccacgcgtgacccgggccaagtacttcattcgagatgagtttctgaggatcagcactgccagtggagatgggcgtcactactgctaccctcatttcacctgcgctgtggacactgagaacatccgccgtgtgttcaacgactgccgtgacatcattcagcgcatgcaccttcgtcagtacgagctgctctaagaagggaacccccaaatttaattaaagccttaagcacaattaattaaaagtgaaacgtaattgtacaagcagttaatcacccaccatagggcatgattaacaaagcaacctttcccttcccccgagtgattttgcgaaacccccttttcccttcagcttgcttagatgttccaaatttagaaagcttaaggcggcctacagaaaaaggaaaaaaggccacaaaagttccctctcactttcagtaaaaataaataaaacagcagcagcaaacaaataaaatgaaataaaagaaacaaatgaaataaatattgtgttgtgcagcattaaaaaaaatcaaaataaaaattaaatgtgagcaaagaa

SEQ ID NO: 35081 - DNA, 1188 bp, Artificial Sequence
  derived and/or modified sequence
atgggctgcctgggcaacagcaagacagaggaccagagaaatgaggagaaggcccagcgggaggccaacaagaagattgagaagcagctgcagaaggacaagcaggtgtaccgggccacccaccggctgctgctgctgggcgctggggagagcggcaagagcaccatcgtgaagcagatgaggatcctgcacgtgaatggcttcaatggagagggcggggaggaggacccccaggccgcccggagcaacagtgatggcagcgagaaggccaccaaggtgcaggacatcaagaacaacctgaaggaggccatcgagaccatcgtggccgccatgagcaacctggtgccccctgtggagctggccaaccctgagaaccagttccgggtggactacatcctgtctgtgatgaatgtgcctgactttgacttccccccagagttctatgagcacgccaaggccctgtgggaggatgaaggagtgcgggcctgctatgaaagaagcaatgagtaccagctgattgactgtgcccagtacttcctggacaagattgatgtgatcaagcaggccgactatgtgcccagcgaccaggacctgctgcgctgccgggtgctgaccagcggcatctttgagaccaagttccaggtggacaaggtgaacttccacatgtttgatgtgggcggccagagagatgagaggaggaagtggatccagtgcttcaatgatgtgacagccatcatctttgtggtggccagcagcagctacaacatggtgatccgggaggacaaccagaccaaccggctgcaggaggccctgaacctcttcaagagcatctggaacaaccgctggctgcggaccatcagcgtcatcctcttcctgaacaagcaggacctgctggccgagaaggtgctggccggcaagagcaagattgaggactacttccctgagtttgcccgctacaccaccccagaagatgccaccccagagcctggagaggacccccgggtgacccgggccaagtacttcatcagagatgagttcctgcgcatcagcacagccagcggagatggccgccactactgctacccccacttcacctgtgctgtggacacagagaacatccggcgggtcttcaatgactgccgggacatcatccagaggatgcacctgcggcagtatgagctgctgtag

SEQ ID NO: 35082 - DNA, 1188 bp, Artificial Sequence
  derived and/or modified sequence
atgggctgcctgggcaacagcaagaccgaggaccagcggaacgaggaaaaggcccagcgtgaggccaacaagaagatcgagaaacagcttcagaaggataaacaagtgtatcgggccacccatagactcttgcttcttggcgccggcgagtctggcaaaagcaccatcgttaaacagatgcgaatcctacacgttaacggttttaatggagagggcggagaggaggatccgcaggcagccagatccaactctgacggctcggaaaaggccaccaaggtccaagatatcaagaacaacctaaaggaggcaatcgaaacaattgtcgcagccatgtccaatctagtcccaccagtcgagttggcaaatcccgagaatcagttcagagtagattacatactgtctgtaatgaacgttccagattttgactttcctcctgaattttacgagcacgcaaaagctctctgggaggacgagggtgtccgtgcctgctatgaacgatctaacgagtatcagctgattgactgcgcccagtattttctggacaaaattgacgtaattaaacaggctgactacgtcccgagcgaccaagacttgctgcggtgcagggtgttgacaagcggaatcttcgagacgaagtttcaagtggataaagtaaacttccatatgttcgacgtgggagggcagcgggacgagagacgcaaatggattcagtgcttcaacgacgtgacggctattatcttcgtcgttgctagctctagttacaatatggtgatccgcgaagataaccagaccaatagattacaggaagcgctgaatctcttcaaatcgatttggaacaatcgctggttacgcacgatcagtgtgattcttttcttgaacaagcaggacctcttagccgagaaagtactggccgggaagagcaagatagaggactatttccctgaatttgccaggtatactacaccagaagacgcgactcccgagcctggcgaggatcccagggtgacccgtgccaagtattttattagagacgaatttctgaggatctccactgccagtggcgatggtcgacactattgttatcctcacttcacgtgtgcagtggacacggagaacattcgcagagtcttcaatgattgtcgggacatcattcagcgcatgcacttacggcaatacgagctgctctag

SEQ ID NO: 35083 - DNA, 1188 bp, Artificial Sequence
  derived and/or modified sequence
atgggttgcctcggcaattcaaagaccgaggatcaacgcaacgaagagaaagcgcagcgggaggccaacaagaagatcgaaaagcaattgcagaaggacaaacaggtttaccgcgctacacacagactactgctcctaggcgcaggggagagtggaaagagtacaattgtaaaacagatgcggattctccatgtgaatggatttaacggagaaggcggtgaggaagatcctcaggccgctaggtccaattctgatggatctgagaaggcgacaaaagttcaggatatcaagaataacttaaaggaagcaatcgagactatcgtcgccgctatgtctaatctcgttccacctgttgaacttgccaaccctgaaaaccagtttagggtagactacattttgtcggtgatgaatgtacctgacttcgatttcccaccagaattctatgagcatgctaaggccctgtgggaggatgagggtgtgcgggcatgttacgagcggagcaacgagtatcagctgattgactgtgctcagtattttttggacaagatagacgtgatcaagcaggctgattatgtgcctagtgaccaggatctgctgcgatgtcgtgttctaacttctggcattttcgagactaagtttcaggtggacaaggtgaacttccatatgtttgatgtcggaggacaaagagacgaacgcagaaaatggatccaatgcttcaacgacgttactgcaattatttttgtcgtcgccagttcaagttataacatggttattagagaggataaccagacaaaccgccttcaagaagccttgaacctctttaagtcaatatggaataatcgctggttacgcacgatctcagttattctcttcctgaataaacaggatttgctggcagagaaggttcttgccggaaagagcaaaattgaggactactttccggaattcgcccgttacacaacacctgaagatgccaccccggagcccggagaggatcccagagttacgcgcgctaaatactttatccgggacgagttcctgcggatctctaccgccagcggagacgggaggcattattgttacccccacttcacctgcgcagtggatacagaaaacataagaagggtgtttaatgattgccgcgatattatccagaggatgcatctgagacagtacgagctgctttag

SEQ ID NO: 35084 - DNA, 1188 bp, Artificial Sequence
  derived and/or modified sequence
atgggctgcctgggcaacagcaagaccgaggaccagagaaacgaggagaaggcccagagagaggccaacaagaagatcgagaagcagctgcagaaggacaagcaggtgtacagagccacccacagactgctgctgctgggcgccggcgagagcggcaagagcaccatcgtgaagcagatgagaatcctgcacgtgaacggcttcaacggcgagggcggcgaggaggacccccaggccgccagaagcaacagcgacggcagcgagaaggccaccaaggtgcaggacatcaagaacaacctgaaggaggccatcgagaccatcgtggccgccatgagcaacctggtgccccccgtggagctggccaaccccgagaaccagttcagagtggactacatcctgagcgtgatgaacgtgcccgacttcgacttcccccccgagttctacgagcacgccaaggccctgtgggaggacgagggcgtgagagcctgctacgagagaagcaacgagtaccagctgatcgactgcgcccagtacttcctggacaagatcgacgtgatcaagcaggccgactacgtgcccagcgaccaggacctgctgagatgcagagtgctgaccagcggcatcttcgagaccaagttccaggtggacaaggtgaacttccacatgttcgacgtgggcggccagagagacgagagaagaaagtggatccagtgcttcaacgacgtgaccgccatcatcttcgtggtggccagcagcagctacaacatggtgatcagagaggacaaccagaccaacagactgcaggaggccctgaacctgttcaagagcatctggaacaacagatggctgagaaccatcagcgtgatcctgttcctgaacaagcaggacctgctggccgagaaggtgctggccggcaagagcaagatcgaggactacttccccgagttcgccagatacaccacccccgaggacgccacccccgagcccggcgaggaccccagagtgaccagagccaagtacttcatcagagacgagttcctgagaatcagcaccgccagcggcgacggcagacactactgctacccccacttcacctgcgccgtggacaccgagaacatcagaagagtgttcaacgactgcagagacatcatccagagaatgcacctgagacagtacgagctgctgtag

SEQ ID NO: 35085 - protein, 379 aa, Artificial Sequence
  derived and/or modified sequence
MGCLGNSKTEDQRNEEKAQREANKKIEKQLQKDKQVYRATHRLLLLGAGESGKSTIVKQMRILHVNGFNGDEKATKVQDIKNNLKEAIETIVAAMSNLVPPVELANPENQFRVDYILSVMNVPDFDFPPEFYEHAKALWEDEGVRACYERSNEYQLIDCAQYFLDKIDVIKQADYVPSDQDLLRCRVLTSGIFETKFQVDKVNFHMFDVGGQRDERRKWIQCFNDVTAIIFVVASSSYNMVIREDNQTNRLQEALNLFKSIWNNRWLRTISVILFLNKQDLLAEKVLAGKSKIEDYFPEFARYTTPEDATPEPGEDPRVTRAKYFIRDEFLRISTASGDGRHYCYPHFTCAVDTENIRRVFNDCRDIIQRMHLRQYELL

SEQ ID NO: 35086 - DNA, 1140 bp, Artificial Sequence
  derived and/or modified sequence
atgggatgcctgggaaattcaaaaactgaggatcagcgcaatgaagaaaaggcccaaagggaggctaacaaaaaaattgagaagcagctgcagaaggataaacaggtgtatagagcgacccacagattgttgttgctgggcgcaggtgagagcggaaaatctactattgtgaagcaaatgcgtatcttgcatgtgaatgggttcaatggcgacgagaaggctactaaggtgcaggacatcaagaacaacctcaaggaggcaatcgaaaccatcgtagctgcaatgtccaatctggtgccaccagtcgagcttgcaaatcctgaaaatcagttccgggtagattacatactgtctgtgatgaatgtgcccgacttcgactttcctccggaattctacgagcatgcaaaagccctgtgggaggacgagggcgtgcgcgcttgttacgagcggtccaatgaataccagctgatcgattgcgctcagtactttctggataaaatcgatgtcataaagcaggccgactacgtgccctccgatcaagaccttctgaggtgccgggttctgacctccggtatttttgagactaaattccaagttgacaaggtgaattttcacatgtttgacgtaggtggccaacgggacgagcgccggaagtggatccagtgcttcaatgacgttaccgctatcattttcgtcgttgcatcatcctcctacaacatggtgatacgggaagataaccagactaacaggctccaggaagctttaaatctgtttaagagcatatggaacaataggtggttgcggaccatcagcgtgatcttattcttgaataagcaggacttgctggcagaaaaggtcctggccgggaagtcaaagatcgaggactactttcctgaatttgcacgctacaccacgcctgaggacgccactccggagccaggcgaggatccccgggtgaccagggctaagtattttattagggatgaatttcttagaatcagcactgctagcggggacggacgacactattgttacccgcattttacatgtgctgtggacactgagaatattcgtagggttttcaatgactgtcgagatataatccagaggatgcatctgcgacagtacgaactactgtag

SEQ ID NO: 35087 - DNA, 1866 bp, Artificial Sequence
  derived and/or modified sequence
gggcggcggcgggggcccggccgaggcaataagagcggcggcggcggcagcggcggcagcagctcccgcagctcctgctctggtccgcctcggcccggcggcggccatcagccccctcggcctcggctcgaggggcggggagctgcgcgcgcccctcggtccgaccgacaccctccccttcccgcccgtccgcgcgccccgcggcccgcggcccgcagtccgccccgcgcgctccttgccgaggagccgagcccgcgcccggcccgcccgcccggcgctgccccggccctcccggcccgcgtgaggccgcccgcgcccgccgccgccgcagcccggccgcgccccgccgccgccgccgccgccatgggctgcctcgggaacagtaagaccgaggaccagcgcaacgaggagaaggcgcagcgtgaggccaacaaaaagatcgagaagcagctgcagaaggacaagcaggtctaccgggccacgcaccgcctgctgctgctgggtgctggagaatctggtaaaagcaccattgtgaagcagatgaggatcctgcatgttaatgggtttaatggagatgagaaggcaaccaaagtgcaggacatcaaaaacaacctgaaagaggcgattgaaaccattgtggccgccatgagcaacctggtgccccccgtggagctggccaaccccgagaaccagttcagagtggactacatcctgagtgtgatgaacgtgcctgactttgacttccctcccgaattctatgagcatgccaaggctctgtgggaggatgaaggagtgcgtgcctgctacgaacgctccaacgagtaccagctgattgactgtgcccagtacttcctggacaagatcgacgtgatcaagcaggctgactatgtgccgagcgatcaggacctgcttcgctgccgtgtcctgacttctggaatctttgagaccaagttccaggtggacaaagtcaacttccacatgtttgacgtgggtggccagcgcgatgaacgccgcaagtggatccagtgcttcaacgatgtgactgccatcatcttcgtggtggccagcagcagctacaacatggtcatccgggaggacaaccagaccaaccgcctgcaggaggctctgaacctcttcaagagcatctggaacaacagatggctgcgcaccatctctgtgatcctgttcctcaacaagcaagatctgctcgctgagaaagtccttgctgggaaatcgaagattgaggactactttccagaatttgctcgctacactactcctgaggatgctactcccgagcccggagaggacccacgcgtgacccgggccaagtacttcattcgagatgagtttctgaggatcagcactgccagtggagatgggcgtcactactgctaccctcatttcacctgcgctgtggacactgagaacatccgccgtgtgttcaacgactgccgtgacatcattcagcgcatgcaccttcgtcagtacgagctgctctaagaagggaacccccaaatttaattaaagccttaagcacaattaattaaaagtgaaacgtaattgtacaagcagttaatcacccaccatagggcatgattaacaaagcaacctttcccttcccccgagtgattttgcgaaacccccttttcccttcagcttgcttagatgttccaaatttagaaagcttaaggcggcctacagaaaaaggaaaaaaggccacaaaagttccctctcactttcagtaaaaataaataaaacagcagcagcaaacaaataaaatgaaataaaagaaacaaatgaaataaatattgtgttgtgcagcattaaaaaaaatcaaaataaaaattaaatgtgagcaaagaa

SEQ ID NO: 35088 - DNA, 729 bp, Artificial Sequence
  derived and/or modified sequence
ccaccactgagcccgagaccgagcctgaagacgatcgcggcccggtggtgcccaagcactccaccttcggccagtccctcacccagcgtctgcacgctctcaagttgcgaagccccgacgcctccccaagtcgcgcgccgcccagcactcaggagccccagagccccagggaaggggaggagctcaagcccgaggacaaagatccaagggaccccgaagagtcgaaggagcccaaggaggagaagcagcggcgtcgctgcaagccaaagaagcccacccgccgtgacgcgtccccggagtccccttccaaaaagggacccatccccatccggcgtcactaatggaggacgccgtccagattctccttgttttcatggattcaggtgctggagaatctggtaaaagcaccattgtgaagcagatgaggatcctgcatgttaatgggtttaatggagatgagaaggcaaccaaagtgcaggacatcaaaaacaacctgaaagaggcgattgaaaccattgtggccgccatgagcaacctggtgccccccgtggagctggccaaccccgagaaccagttcagagtggactacatcctgagtgtgatgaacgtgcctgactttgacttccctcccgaattctatgagcatgccaaggctctgtgggaggatgaaggagtgcgtgcctgctacgaacgctccaacgagtaccagctgattgactgtgcccagta

SEQ ID NO: 35089 - DNA, 1140 bp, Artificial Sequence
  derived and/or modified sequence
atgggctgcctgggcaacagcaagacagaggaccagagaaatgaggagaaggcccagcgggaggccaacaagaagattgagaagcagctgcagaaggacaagcaggtgtaccgggccacccaccggctgctgctgctgggcgctggggagagcggcaagagcaccatcgtgaagcagatgaggatcctgcacgtgaatggcttcaatggagatgagaaggccaccaaggtgcaggacatcaagaacaacctgaaggaggccatcgagaccatcgtggccgccatgagcaacctggtgccccctgtggagctggccaaccctgagaaccagttccgggtggactacatcctgtctgtgatgaatgtgcctgactttgacttccccccagagttctatgagcacgccaaggccctgtgggaggatgaaggagtgcgggcctgctatgaaagaagcaatgagtaccagctgattgactgtgcccagtacttcctggacaagattgatgtgatcaagcaggccgactatgtgcccagcgaccaggacctgctgcgctgccgggtgctgaccagcggcatctttgagaccaagttccaggtggacaaggtgaacttccacatgtttgatgtgggcggccagagagatgagaggaggaagtggatccagtgcttcaatgatgtgacagccatcatctttgtggtggccagcagcagctacaacatggtgatccgggaggacaaccagaccaaccggctgcaggaggccctgaacctcttcaagagcatctggaacaaccgctggctgcggaccatcagcgtcatcctcttcctgaacaagcaggacctgctggccgagaaggtgctggccggcaagagcaagattgaggactacttccctgagtttgcccgctacaccaccccagaagatgccaccccagagcctggagaggacccccgggtgacccgggccaagtacttcatcagagatgagttcctgcgcatcagcacagccagcggagatggccgccactactgctacccccacttcacctgtgctgtggacacagagaacatccggcgggtcttcaatgactgccgggacatcatccagaggatgcacctgcggcagtatgagctgctgtag

SEQ ID NO: 35090 - DNA, 1140 bp, Artificial Sequence
  derived and/or modified sequence
atgggctgcctgggcaacagcaagaccgaggaccagcggaacgaggagaaagctcaaagggaggccaacaaaaaaattgagaagcaattgcagaaagataaacaggtatatagggcaacacaccggctcttattgctgggcgctggagaaagcggtaagtctactatagttaaacagatgagaatcctccacgtcaacggatttaatggggatgagaaggcaacgaaagttcaggatataaagaataaccttaaggaggctattgagacaattgtagctgccatgtccaacctggttcccccagtagagcttgccaatcccgaaaaccaattccgtgtagactacatcctatcagtgatgaacgtgccagatttcgactttcctcccgagttctacgagcacgccaaggcgctttgggaggacgaaggggttagagcctgttacgagcgctctaatgagtatcagctgatcgactgtgcccagtacttcctcgacaaaatagacgttatcaagcaagcagactacgtgccctcagatcaggatctgctgcgctgcagagtcctcacctcaggcattttcgaaacgaaattccaggtagacaaggtgaattttcatatgtttgacgttggaggccagagagatgagcggcggaagtggattcaatgcttcaatgatgtgacagcaattatcttcgtggtggccagcagtagctataatatggttattagagaggataaccagactaaccgtcttcaggaagctctcaatttattcaagtctatctggaataatcggtggctgcggaccatcagtgtaattctgttcctcaacaagcaggaccttctcgctgagaaggtgctggctgggaagtcaaaaattgaagattactttcctgagtttgcccggtatacaacccctgaggatgcaaccccagagccaggagaagaccctcgtgtgacccgcgccaaatattttatcagagatgagttcttaaggatctccacagcatccggtgacggaagacactactgctacccccacttcacctgcgccgtggatacggagaacatacggcgtgtgtttaacgattgcagagacattatccagcgaatgcaccttcgacagtacgagctgttatag

SEQ ID NO: 35091 - DNA, 1140 bp, Artificial Sequence
  derived and/or modified sequence
atgggctgtctcggcaactccaagactgaagaccagcggaatgaggagaaagctcagcgtgaggcaaacaagaagattgagaagcagctgcagaaggacaaacaggtgtaccgggcaacgcataggctgctgctcctgggagcaggggagagcggcaaaagcactatagtgaaacagatgcgcatcctgcacgtaaatggattcaacggcgatgagaaggccactaaggtgcaggacattaaaaataacctgaaggaggccatcgaaaccatcgtggcggctatgtccaacctggttcctccagtagagctcgccaatcctgagaaccaatttagagtggactacatcctgagcgtgatgaacgtgcccgatttcgacttcccacctgagttttacgagcatgccaaggccttgtgggaggatgaaggtgtgagagcctgctacgagcgcagtaatgaataccaactcatcgactgtgcccagtatttccttgataaaatcgatgttatcaaacaggctgattacgtcccctccgaccaggatctactgcgatgtcgagtgctgacaagcgggatattcgagacgaaatttcaagtggacaaagttaattttcatatgttcgacgtaggcggtcagagagatgaaagacgaaaatggattcagtgcttcaatgacgtgacagccattatatttgtagtggctagttcctcctataatatggtgatccgggaggataatcagactaacaggctgcaggaagcacttaacctgtttaaatcaatttggaacaatagatggctccgcacgataagtgttatcctattcctcaataagcaggaccttctagcagaaaaagtgctcgctgggaagtctaagatcgaggactacttccctgaatttgcacgctacactacgccagaagatgcaacgccagagcctggggaagacccgcgtgtgacacgtgccaaatacttcatccgtgatgagtttctgcggatctctacggcctccggagacggacggcactattgctacccacatttcacctgtgcagtcgatacagagaacatacgcagggtgttcaacgactgtcgtgacatcatacagcggatgcacttgaggcaatatgagttactatag

SEQ ID NO: 35092 - DNA, 1140 bp, Artificial Sequence
  derived and/or modified sequence
atgggctgcctgggcaacagcaagaccgaggaccagagaaacgaggagaaggcccagagagaggccaacaagaagatcgagaagcagctgcagaaggacaagcaggtgtacagagccacccacagactgctgctgctgggcgccggcgagagcggcaagagcaccatcgtgaagcagatgagaatcctgcacgtgaacggcttcaacggcgacgagaaggccaccaaggtgcaggacatcaagaacaacctgaaggaggccatcgagaccatcgtggccgccatgagcaacctggtgccccccgtggagctggccaaccccgagaaccagttcagagtggactacatcctgagcgtgatgaacgtgcccgacttcgacttcccccccgagttctacgagcacgccaaggccctgtgggaggacgagggcgtgagagcctgctacgagagaagcaacgagtaccagctgatcgactgcgcccagtacttcctggacaagatcgacgtgatcaagcaggccgactacgtgcccagcgaccaggacctgctgagatgcagagtgctgaccagcggcatcttcgagaccaagttccaggtggacaaggtgaacttccacatgttcgacgtgggcggccagagagacgagagaagaaagtggatccagtgcttcaacgacgtgaccgccatcatcttcgtggtggccagcagcagctacaacatggtgatcagagaggacaaccagaccaacagactgcaggaggccctgaacctgttcaagagcatctggaacaacagatggctgagaaccatcagcgtgatcctgttcctgaacaagcaggacctgctggccgagaaggtgctggccggcaagagcaagatcgaggactacttccccgagttcgccagatacaccacccccgaggacgccacccccgagcccggcgaggaccccagagtgaccagagccaagtacttcatcagagacgagttcctgagaatcagcaccgccagcggcgacggcagacactactgctacccccacttcacctgcgccgtggacaccgagaacatcagaagagtgttcaacgactgcagagacatcatccagagaatgcacctgagacagtacgagctgctgtag

SEQ ID NO: 35093 - protein, 167 aa, Artificial Sequence
  derived and/or modified sequence
MPKRKKQNHHQPPTQQQPPLPEREETGDEEDGSPIALHRGPPGSRGPLIPPLLSLPPPPWGRGPIRRGLGPRSSPYGRGWWGVNAEPPFPGPGHGGPTRGSFHKEQRNPRRLKSWSLIKNTCPPKDDPQVMEDKSDRPVCRHFAKKGHCRYEDLCAFYHPGVNGPPL

SEQ ID NO: 35094 - DNA, 504 bp, Artificial Sequence
  derived and/or modified sequence
atgcccaaaaggaaaaaacaaaaccatcaccagccccccacccagcagcagccccctctgccagagcgcgaagaaacaggcgatgaggaggacgggtcaccaatcgctctccatagagggcctccgggaagcagaggacctctgattccaccacttttaagtctgccaccgcccccatgggggagagggcccatccggcgaggcctgggcccccggtcatcgccttatggccgaggttggtggggagttaatgctgagcctccctttccaggcccgggccacggaggacctacccgcggatcctttcacaaggagcaaaggaacccccgtcgtctaaagtcatggtccctgatcaaaaacacttgtccacccaaagatgaccctcaggtgatggaagataaatctgaccggcccgtatgtaggcatttcgccaaaaaggggcactgtcgctatgaggatctttgcgccttttaccaccctggagtgaatggaccgccactgtag

SEQ ID NO: 35095 - DNA, 504 bp, Artificial Sequence
  derived and/or modified sequence
atgccgaagaggaagaagcaaaatcatcatcagcctcccactcagcagcaacccccgttgcccgaacgagaggagaccggtgacgaagaggacggctcacctatcgccctgcatagaggaccacctggatcacgggggccattaataccgcccttactcagcctccctccgcctccttggggaaggggtccaatccgccgtgggttgggcccccgttctagcccatacggacgcggatggtggggagtaaatgctgaacccccattccccggccctggtcatggcggacccacaagaggatcattccataaggaacaaaggaatcccagacggctcaaaagctggagtctcataaagaatacgtgtcctccaaaggatgatccgcaggtcatggaagacaaaagtgacaggcccgtgtgccggcacttcgctaaaaagggacactgtagatacgaggatctgtgtgcgttttaccatcctggcgtcaacggacccccactttag

SEQ ID NO: 35096 - DNA, 504 bp, Artificial Sequence
  derived and/or modified sequence
atgccaaaaagaaaaaagcaaaatcaccaccagccccctacacagcagcaacctccattgcccgagcgggaagagaccggcgacgaagaggacggctcacccattgcgttgcaccggggccctccagggagccggggcccattgatccccccactattatctcttcctcctcccccgtggggccgcggccctatcaggagaggccttggtcctcgcagcagcccctatggccgcgggtggtggggagtcaacgcggaacctcccttcccaggcccgggccatggcgggcccacccgggggagttttcataaggagcagagaaatccacgccggttgaagtcctggagcctcataaagaacacctgcccaccaaaggatgatccccaagtgatggaagataaaagcgaccgtccggtttgccgccatttcgctaagaagggccattgccggtacgaggatctctgcgccttctaccacccaggtgtgaatgggcctccactgtag

SEQ ID NO: 35097 - DNA, 504 bp, Artificial Sequence
  derived and/or modified sequence
atgcccaaacgaaaaaaacagaatcatcatcaaccgccaactcagcaacaaccgcccctgccagaaagagaagaaacaggggacgaagaggatgggtcccccattgcacttcatcggggtccacctggttcaaggggacctctgatcccacccctgttgtcattacccccgccgccatggggccgcggccccatcagacgcggccttggcccccgctcttcaccatacgggcgaggctggtggggcgttaatgccgagccaccattccccgggcccggccatggtgggcctacccgtggatcgtttcacaaggagcagcggaatccccgtcggctgaagtcctggagcttgatcaaaaacacttgtcccccaaaggacgatccgcaggtcatggaagataaaagtgaccggcctgtttgtaggcactttgccaagaagggccactgtcggtacgaagacttatgtgccttctaccatcccggagttaacggcccacctctctag

SEQ ID NO: 35098 - DNA, 504 bp, Artificial Sequence
  derived and/or modified sequence
atgccgaaaagaaagaagcagaaccatcaccaacctcccacgcagcagcaaccaccactccccgaaagagaggaaaccggagatgaagaggatgggtctccgattgctctccatcgcggtccacccgggagcagaggacctttaattcccccacttctctctcttccgcctccaccttgggggcgcggtcccatacggcgaggacttggccccagatcgtccccttatggtcgtggttggtggggggtgaacgccgaaccaccttttcctgggcctggtcatggtggccctacgcgcggtagtttccacaaagaacaacgaaaccctaggcgtttaaagtcttggtcactaattaagaatacctgtcctcccaaggatgatccacaggtgatggaggataagagcgaccgcccagtgtgtcgccattttgctaaaaagggtcattgtagatacgaagacctatgtgccttttatcaccccggcgtgaatggccctccactgtag

SEQ ID NO: 35099 - DNA, 504 bp, Artificial Sequence
  derived and/or modified sequence
atgccaaaacgcaagaagcagaaccaccatcagccgccgacacagcagcaacccccgctgcccgagagggaagagaccggagacgaggaggatggcagtcccatcgctttgcaccgggggcctcccggcagtaggggcccactcattcctccactcctgagcttacctccacccccgtggggacggggccccattaggaggggactaggacctaggtcctctccctacgggagagggtggtggggcgtgaatgccgagccaccattccctggaccgggacacggaggccccacacgcggctcatttcataaagagcaacgtaaccctcggagactgaaatcttggagccttatcaagaatacgtgcccaccaaaagatgatccacaagtcatggaagacaagtccgaccgacccgtctgccgtcacttcgctaagaaagggcattgtaggtacgaagacctctgcgccttttatcatcctggggtgaatgggccgccactgtag

SEQ ID NO: 35100 - DNA, 504 bp, Artificial Sequence
  derived and/or modified sequence
atgccgaagaggaagaaacagaaccaccatcagccacctacccagcaacagcccccgctcccagagcgggaggaaaccggggatgaggaggatggctcacccattgccctccatcggggcccacccggctctcggggccccttaatcccacccctgctgtccctgcctccacctccttgggggaggggccctatcagaagaggtttaggccctcgtagctcgccttatgggcgcggttggtggggtgtcaatgctgagccccccttcccgggaccaggccatggcggccccaccagagggagtttccataaagaacagcgaaaccctcggaggttgaagagttggagtctgattaagaacacctgcccccctaaggacgatcctcaagttatggaggacaagtcagatagaccagtttgccgacattttgcgaagaaggggcactgtcgttacgaagacctctgtgccttctaccacccaggggtcaatggtcctcctctgtag

SEQ ID NO: 35101 - DNA, 504 bp, Artificial Sequence
  derived and/or modified sequence
atgcccaagaggaagaagcagaaccaccaccagccccccacccagcagcagccccccctgcctgagcgggaggagactggagatgaggaggatggcagccccatcgccctgcaccggggccccccaggcagccggggccccctcatcccccccctgctgagcctgcccccaccaccctggggccggggccccatccggcggggcctgggccccaggagcagcccctacggccggggctggtggggcgtgaatgctgagccccccttccctggccctggccacggcggccccacccggggcagcttccacaaggagcagaggaacccccggcggctgaagtcctggagcctcatcaagaacacctgcccccccaaggatgacccccaggtgatggaggacaagagtgacaggcctgtgtgccgccactttgccaagaagggccactgccgctatgaggacctgtgtgccttctaccaccctggggtgaatggaccacccctgtag

SEQ ID NO: 35102 - DNA, 504 bp, Artificial Sequence
  derived and/or modified sequence
atgcccaagcggaagaagcagaaccaccaccagccccccacccagcagcagccccctctgccggagcgcgaagagacaggcgacgaagaggatgggtcccctatcgctctgcaccgaggccccccaggatcaagaggtcctctgatcccaccgctcctctccctgccaccccccccatgggggaggggacccatccgccgcggcctcgggcccagaagcagcccctatggacgaggctggtggggcgtgaatgctgaaccacctttccccggccccggccacgggggaccaacaaggggcagcttccataaggagcaaagaaatccacgacggttaaagtcctggagcttgatcaagaatacctgtcctcctaaggatgacccacaagtgatggaagataagtcagatcgaccagtgtgtcgacattttgcaaaaaagggtcattgccgctatgaggatctctgcgctttctaccaccccggcgtcaacggacctccactatag

SEQ ID NO: 35103 - DNA, 504 bp, Artificial Sequence
  derived and/or modified sequence
atgcccaagcggaagaagcagaaccaccaccagccccccacccagcagcagccgcccctgcctgaacgtgaagagaccggcgacgaggaggatgggagtccaatcgctcttcaccgcgggcctccaggttcacggggcccgcttatccctcccctgctcagtctcccgccacccccttggggcaggggccctatacgcaggggcctgggaccccggtcttccccatatggccggggatggtggggggtgaacgcggaaccacccttcccaggacctgggcatgggggacccacccgcggatcatttcacaaagagcagagaaatccccggagactgaagtcctggagcctcatcaaaaacacttgtccgccaaaagacgacccccaggtgatggaagataaatctgaccggcccgtgtgtcgccacttcgctaagaagggacactgccgttacgaagacttgtgcgccttttatcacccaggagtgaacggcccccccctgtag

SEQ ID NO: 35104 - DNA, 504 bp, Artificial Sequence
  derived and/or modified sequence
atgcccaagcggaagaagcagaaccaccaccagccccccacccagcagcagcctcccctgcctgagcgcgaagagacaggggatgaggaggacggttccccgatagcgctgcatcggggacctcccggttcacgcgggccactgataccacctctgctgagcttacctcctcccccttggggccgaggccccattagaagaggcttaggtccgcgctcttccccatatggaaggggatggtggggagtgaacgctgaaccgccctttccgggacccggccacggcggacccacccgaggatccttccacaaagagcagcggaatccccgtcggctgaagagctggtcgttaattaagaatacttgcccacccaaagacgacccacaagtgatggaggataagtccgacaggccagtctgcagacatttcgccaaaaaaggacattgtaggtatgaggacctctgcgcgttctaccaccctggcgtgaacgggcctccactctag

SEQ ID NO: 35105 - DNA, 504 bp, Artificial Sequence
  derived and/or modified sequence
atgcccaagcggaagaagcagaaccaccaccagccccccacccagcagcagccaccactcccagagcgcgaggaaactggcgatgaggaagatggaagtcccattgcccttcacaggggacctccgggaagcagagggcccctcatccccccccttctgagcttgcccccaccaccgtggggtcggggaccaattcgtcggggactgggacccaggtcttccccctatgggcgcggctggtggggggttaatgcagagccgccatttccaggtccgggacacggcgggcccacacggggtagcttccataaggagcagcgcaacccacgaaggctgaagagctggagtctcattaaaaatacgtgcccccctaaggacgatcctcaagtgatggaagacaagagcgatcggcctgtttgcaggcacttcgcgaagaaaggacattgtaggtatgaggacctctgcgcgttttaccatcctggtgtgaacggcccccccttatag

SEQ ID NO: 35106 - DNA, 504 bp, Artificial Sequence
  derived and/or modified sequence
atgcccaagcggaagaagcagaaccaccaccagccccccacccagcaacagccaccgctcccagagcgtgaagaaacaggtgacgaggaggatggctctcccatcgccctacatcggggacctcccggttccaggggcccactgatcccccccttactcagccttccgcccccaccgtggggtcgaggcccaattaggcgggggctcggacctaggtcatctccgtatggaaggggatggtggggcgtaaatgccgaaccaccatttcctggcccaggacatggcgggccaactagagggagcttccataaggagcaacggaaccccaggcggctgaagtcctggtctctaatcaagaacacctgccctccaaaggacgacccccaggtaatggaggacaaaagcgatcgcccagtgtgccggcatttcgctaagaagggccattgccgctatgaggacttatgtgccttttatcaccccggtgtgaacgggccgcccctctag

SEQ ID NO: 35107 - DNA, 504 bp, Artificial Sequence
  derived and/or modified sequence
atgcccaagcggaagaagcagaaccaccaccagccccccacccagcagcaaccccctctccctgagcgcgaggaaacaggcgatgaggaggatgggtctcccatagcattgcaccgtggacccccagggagtcggggcccactgatcccacctctattgtctctgccgcctccgccttggggcaggggccctatccgccggggtttaggaccgagatctagcccttatggcagagggtggtggggggtcaacgccgaaccaccattccccggtccaggacatggcggccctacccgcggcagtttccacaaggagcagaggaacccaagacgactaaaatcctggtcgctaattaaaaatacttgtccgcccaaggacgaccctcaggtgatggaggataagtctgaccgccccgtctgcaggcactttgccaagaaagggcactgccgttacgaggacctgtgtgcattctatcacccaggcgtaaatggacccccactctag

SEQ ID NO: 35108 - DNA, 504 bp, Artificial Sequence
  derived and/or modified sequence
atgcccaagcggaagaagcagaaccaccaccagccccccacccagcagcagcccccattaccggaacgcgaggaaaccggcgatgaagaagacggttcaccaatcgcactgcatagaggcccccccgggtctcggggccccttgatcccccctctgctgagcctgcctccaccgccctggggaagaggcccgatcagacggggcctgggacccagaagctccccctatggccgcgggtggtggggcgtcaacgcggaaccacctttcccaggtcccggccacggcggacctaccagggggtcttttcacaaagaacagagaaacccccgccgactgaaaagctggtccctgatcaaaaacacttgtcctccaaaagacgatccccaggtcatggaggacaagagcgacagacctgtgtgtagacactttgccaagaagggacactgccggtatgaagatctgtgtgctttttatcatcccggggtgaacggcccacctctatag

SEQ ID NO: 35109 - DNA, 504 bp, Artificial Sequence
  derived and/or modified sequence
atgcccaagagaaaaaaacaaaatcatcaccagccccctactcaacagcaaccacccttaccagagcgcgaggagaccggagacgaggaggatggatcccccatcgcccttcatcgcggacccccaggcagtaggggccctctgattcctcctttgctttccttgccgcctcctccatggggcagagggccaatcagacgcggattgggtcccaggtcatccccctacggcagagggtggtggggtgtgaatgccgagccccctttcccgggaccgggacacggaggccctactcggggaagctttcacaaggagcagcggaatcctcgccgtcttaagtcttggagtctgatcaaaaatacatgtccgccaaaagacgatccccaggtgatggaggacaagagtgaccgccctgtatgcagacacttcgccaagaagggccactgccgttacgaggacctttgcgccttctatcatcccggtgtaaatgggcctccgctctag

SEQ ID NO: 35110 - DNA, 504 bp, Artificial Sequence
  derived and/or modified sequence
atgcctaaacggaaaaagcagaatcaccatcagccgccaacacaacagcagcccccactgcctgaaagggaggaaaccggggacgaggaagacggctctcctatcgcactgcaccggggaccaccaggatcgagggggccattaatccccccacttctatcccttccccctcctccatgggggagggggccaatccggagaggcttaggtcctaggagtagcccatacggtagaggttggtggggagtcaatgccgagcctcctttccctggcccaggacatggagggcctacacgcggatcctttcacaaggaacagcgtaacccccgtcgattgaaaagttggtccctgatcaagaatacttgccctccaaaagacgatcctcaagtgatggaagacaaatctgacagaccagtctgtcgacacttcgcaaagaaaggccactgtaggtatgaagatctctgtgcattctaccaccccggtgtgaacggtcctccactgtag

SEQ ID NO: 35111 - DNA, 504 bp, Artificial Sequence
  derived and/or modified sequence
atgccaaagcggaagaagcagaatcaccaccaaccaccaacacagcagcagccaccccttcccgaaagagaggaaaccggcgatgaggaagacgggtcccctatcgcactgcacagaggacctcccggtagccggggacccctgattccgccacttcttagtttgccccctcccccttggggtagaggcccaatacgccgaggtctgggccctcggtcttctccatacggaagaggctggtggggtgtgaatgcagagcccccattcccgggtcctggtcacgggggacccacgcggggttcattccacaaggaacagcgcaacccacggagactaaagagctggtccctcatcaagaacacttgtccacccaaggatgaccctcaggttatggaggataaatctgacagacctgtgtgtcggcactttgcaaaaaaaggacattgtcgctacgaagacctctgtgccttctaccaccctggcgtgaatgggccaccactctag

SEQ ID NO: 35112 - DNA, 504 bp, Artificial Sequence
  derived and/or modified sequence
atgcccaaacgcaagaaacaaaaccaccaccagcctccgactcaacagcaaccccctctgcctgagcgggaagagaccggggacgaagaggacggaagccctatcgctctgcacagaggaccccctggtagccgcggaccattgattccaccactgctgtcactgcccccacccccatggggcaggggtcctatcagacgtggtctcggcccacgcagcagcccatatggtcgaggctggtggggtgtgaacgctgagcctccattcccagggcctgggcatggtggacctaccaggggcagttttcacaaagagcagaggaatccacgtcggctgaagtcgtggagtctcatcaaaaacacttgcccacccaaagacgacccccaggttatggaggataagagcgacagacctgtgtgcaggcactttgcaaagaaagggcactgcagatacgaggacttatgcgcgttctatcatcctggggtgaacggtccccctctgtag

SEQ ID NO: 35113 - DNA, 504 bp, Artificial Sequence
  derived and/or modified sequence
atgcccaagcgcaaaaagcaaaatcaccatcagcctccaacgcaacagcaaccccctcttcccgaacgagaggaaactggcgacgaggaagacggctcccctatagctctacacagggggcctccaggttctcgtggccctctcatcccgcctttgcttagcctgccgccacctccatggggccgtggccctatccgtagggggcttggaccaaggtcttcaccgtatggcagggggtggtggggagtgaacgccgaaccacctttccctggccctggccatggagggcctactcggggatcctttcacaaggaacagcggaatccacgtcggttgaaaagttggtctctgattaagaatacgtgcccaccaaaagatgatccccaagtaatggaagacaagtccgatagaccggtctgccggcattttgctaaaaaggggcactgtagatatgaggatctgtgtgccttttaccacccgggagtcaacggcccaccgttatag

SEQ ID NO: 35114 - DNA, 504 bp, Artificial Sequence
  derived and/or modified sequence
atgccgaaacgcaagaagcagaaccatcatcagccaccaacacagcagcagcctccattaccggaaagggaagagacgggggacgaagaggatggatcccctatcgccttacacaggggaccgcctgggtctcggggacccttaataccccctttgctgtctctaccacccccaccttggggtagggggccaatcagacgaggccttgggccaagatccagcccttatggcaggggctggtggggcgtgaatgccgagccgccttttcctggtccgggtcatgggggacccacccggggttcctttcacaaggagcagcggaatcctagacggcttaagtcatggtctctgatcaaaaacacctgcccaccgaaggacgacccccaggtaatggaagataagagcgaccgacccgtgtgccgtcactttgccaaaaagggacattgccgatacgaggatttatgtgcgttctatcacccgggagtgaatggccctccgctttag

SEQ ID NO: 35115 - DNA, 504 bp, Artificial Sequence
  derived and/or modified sequence
atgcccaagaggaagaagcagaatcatcatcagccccctacacagcagcagccaccccttccagaacgcgaagagacaggggatgaggaggacggttccccaatcgccctgcacaggggccctccgggtagccgaggcccactgatcccacctcttcttagcttgccacctcctccatggggtcggggaccaattcggagggggctggggcctcggagtagtccctacgggcgtggatggtggggcgtgaacgcggaaccacccttcccaggccctggacatggcggacccacgagagggtcttttcataaagagcagcgaaacccaagacgtctcaaaagctggagtctcataaagaatacctgtccacccaaggacgatcctcaggtgatggaggataagtctgatcggccagtctgtcgtcattttgccaagaaaggccattgtcgctatgaggacctgtgcgctttttaccacccaggtgtcaacggccctccactgtag

SEQ ID NO: 35116 - DNA, 1797 bp, Artificial Sequence
  derived and/or modified sequence
agaatccccgcgtgccccttcctcactaccctccaaatcccgctgcagccattgccgcagacacgatgccgaaacgaaagaagcagaatcatcaccagccaccgacacagcagcagcccccgctgcccgagcgggaagagactggagatgaggaggatgggagtcccatcgctcttcacagaggtcctccaggatcaaggggaccactgattccaccactgctgagtctcccacctcctccttggggtagaggcccaattcggagagggcttggccccaggtctagcccatatggtcgtggttggtggggagtcaatgcagaacctccttttccggggccaggccatgggggtcccaccaggggaagctttcacaaggaacagagaaaccctcgaaggctcaaaagctggtctcttatcaagaatacctgcccgcccaaggatgacccccaggttatggaagacaaatccgaccgccctgtctgccgacattttgccaaaaagggccactgtcgatatgaggacctctgtgccttctaccatccaggcgtcaatggacctcctctgtgagactgtgccttcccatccaggctggaaggagctctctgtgacctagcggccatttatttctctgtagccctatgatggctactgtgaggctcttctaacaccctcagtcagtgacacacccatcccatccaccacttcccccgtgtggggtccagagtggtgttgcatcactggtgcgcggcatacgcgctttcttctgatccagcctgtagagactcgcctttgggacccatctttgcttcctttcagttgcctcctggatcttctttcccgtcatcaaatgactgctgaacaggaaacctctttggtgctgtttcttgtgcatctgtccacctgttccccagtattgccctcaattcctgagagccctggagcggtttcctaccattcccttcttttagctgcttgttttaagtcctttttatgtgacattccctacccccaatgttgtcagctgcttgtgaaactcagccaggttgtctaacctggggtcaagtttgggtgactggtgcagagttacttcctaaaaggccactctccctgcctttggatttcatagtttctctgtcagtagcatgatccccaccgctatggtctatctatgatcaccgtgctttgtgaaactgtgcatccccttgtagcctttctcagtgtccgtggcatttttgtgacttcccagcactagaataagttttcctgccaaaatgagtgaggcgcttggtgccctctggactttcccacttcccaacatgggagaattgtgaactttccatcagactgcctccctggccctccccattcttctcctgttggttattctgagtctgacacagacccatgacatgtcttataaagcctccaatggctttatcctacctagatcccttccagcccattttaattagactatgtcattgtgaggccaccagtccattcatttgaattctgtgaatctccaccttgcctatctttgggtagaagctggacagtactgttgccctcttccaatcctcttcccctacatccctggcactggttgttttctgtgaaaacagcagtgaacaggttcagttttgaactggccctgaggaaatgggtcaggagttgtattggcaagagggaggggtgagagctgttggagaactgagaatgaggttttttttttttttttctttttaactttttttatattagtaataaatgcagtggaaaccagcattttatttaa

SEQ ID NO: 35117 - DNA, 1797 bp, Artificial Sequence
  derived and/or modified sequence
agaatccccgcgtgccccttcctcactaccctccaaatcccgctgcagccattgccgcagacacgatgccgaaacgaaagaagcagaatcatcaccagccaccgacacagcagcagcccccgctgcccgagcgggaagagactggagatgaggaggatgggagtcccatcgctcttcacagaggtcctccaggatcaaggggaccactgattccaccactgctgagtctcccacctcctccttggggtagaggcccaattcggagagggcttggccccaggtctagcccatatggtcgtggttggtggggagtcaatgcagaacctccttttccggggccaggccatgggggtcccaccaggggaagctttcacaaggaacagagaaaccctcgaaggctcaaaagctggtctcttatcaagaatacctgcccgcccaaggatgacccccaggttatggaagacaaatccgaccgccctgtctgccgacattttgccaaaaagggccactgtcgatatgaggacctctgtgccttctaccacccaggcgtcaatggacctcctctgtgagactgtgccttcccatccaggctggaaggagctctctgtgacctagcggccatttatttctctgtagccctatgatggctactgtgaggctcttctaacaccctcagtcagtgacacacccatcccatccaccacttcccccgtgtggggtccagagtggtgttgcatcactggtgcgcggcatacgcgctttcttctgatccagcctgtagagactcgccttcgggacccatctttgcttcctttcagttgcctcctggatcttctttcccgtcatcaaatgactgctgaacaggaaacctctttggtgctgtttcttgtgcatctgtccacctgttccccagtattgccctcaattcctgagagccctggagcggtttcctaccattcccttcttttagctgcttgttttaagtcctttttatgtgacattccctacccccaatgttgtcagctgcttgtgaaactcagccaggttgtctaacctggggtcaagtttgggtgactggtgcagagttacttcctaaaaggccactctccctgcctttggatttcatagtttctctgtcagtagcatgatccccaccgctatggtctatctatgatcaccgtgctttgtgaaactgtgcatccccttgtagcctttctcagtgtccgtggcatttttgtgacttcccagcactagaataagttttcctgccaaaatgagtgaggcgcttggtgccctctggactttcccacttcccaacatgggagaattgtgaactttccatcagactgcctccctggccctccccattcttctcctgttggttattctgagtctgacacagacccatgacatgtcttataaagcctccaatggctttatcctacctagatcccttccagcccattttaattagactatgtcattgtgaggccaccagtccattcatttgaattctgtgaatctccaccttgcctatctttgggtagaagctggacagtactgttgccctcttccaatcctcttcccctacatccctggcactggttgttttctgtgaaaacagcagtgaacaggttcagttttgaactggccctgaggaaatgggtcaggagttgtattggcaagagggaggggtgagagctgttggagaactgagaatgaggttttttttttttttttctttttaactttttttatattagtaataaatgcagtggaaaccagcattttatttaa

SEQ ID NO: 35118 - DNA, 504 bp, Artificial Sequence
  derived and/or modified sequence
atgcccaagagaaagaagcagaaccaccaccagccccccacccagcagcagccccccctgcccgagagagaggagaccggcgacgaggaggacggcagccccatcgccctgcacagaggcccccccggcagcagaggccccctgatcccccccctgctgagcctgcccccccccccctggggcagaggccccatcagaagaggcctgggccccagaagcagcccctacggcagaggctggtggggcgtgaacgccgagccccccttccccggccccggccacggcggccccaccagaggcagcttccacaaggagcagagaaaccccagaagactgaagagctggagcctgatcaagaacacctgcccccccaaggacgacccccaggtgatggaggacaagagcgacagacccgtgtgcagacacttcgccaagaagggccactgcagatacgaggacctgtgcgccttctaccaccccggcgtgaacggcccccccctgtag

SEQ ID NO: 35119 - protein, 96 aa, Artificial Sequence
  derived and/or modified sequence
MLPCLALLLLMELSVCTVAGDGGEEQTLSTEAETWEGAGPSIQLQLQEVKTGKASQFFGLMGKRVGAYQLEHTFQGLLGKRSLFTEGREDEAQGSE

SEQ ID NO: 35120 - DNA, 624 bp, Artificial Sequence
  derived and/or modified sequence
atgctgccttgcctcgccctgcttctcctgatggagctgtccgtgtgcactgtggcaggtgatggtggagaggaacagacactcagcactgaagcagagacctgggaaggcgctggccccagcattcagctccagctgcaggaggtgaagacgggcaaggcaagccagttctttgggctgatggggaagcgagtgggagcatatcagctggaacacacgttccagggcctcctgggcaagagaagcctgttcacagaaggcagagaggatgaggcccaaggttcagagtaaaagcccccaccacagacttcccagaggacacggtgccgcttcttcctacctggatgtcacagctgacaagccggcaggccaactctcttctctgtgtctcctgtcctcatcgctggcacttcacacaaggcccacactgaacccactgggcttcttcctggactctcagtgtcaagcagcagtcctgcataaatgcacagcttcgccgtagcaagctgcactgactctgccctccctcacactcagagttggcatctcactgcacagcagtgaggagactcgcacactctgtatcctgtgcctagcacacagtaggcactcaataaatgagtg

SEQ ID NO: 35121 - DNA, 291 bp, Artificial Sequence
  derived and/or modified sequence
atgctcccctgtctggccctgctcttgttgatggagctgagtgtgtgtactgtcgccggagacggcggtgaagagcagacactgtcgaccgaggccgagacgtgggagggggctggccctagcattcagctgcagctccaggaagtcaagactggtaaagcttcccagttcttcggactcatgggtaagcgggttggcgcttaccagctagaacacacatttcaggggctgctgggcaagaggtctttattcactgaggggcgtgaggatgaggcccaaggtagtgagtag

SEQ ID NO: 35122 - DNA, 291 bp, Artificial Sequence
  derived and/or modified sequence
atgctcccatgtctggcgctcctccttttaatggaactttcagtttgtaccgtggcaggagatggtggtgaggaacagacactaagcaccgaagccgaaacttgggaaggcgctggcccttctattcagctccaactgcaggaggtcaaaaccggtaaggctagccagtttttcggcctgatgggaaaacgcgtgggcgcctatcagctcgagcacactttccagggcctgctgggaaagcgatcgctgtttacagaaggacgcgaagatgaggctcaggggtccgaatag

SEQ ID NO: 35123 - DNA, 291 bp, Artificial Sequence
  derived and/or modified sequence
atgctgccctgcctggccctgctgctgctgatggagctgagcgtgtgcaccgtggccggcgacggcggcgaggagcagaccctgagcaccgaggccgagacctgggagggcgccggccccagcatccagctgcagctgcaggaggtgaagaccggcaaggccagccagttcttcggcctgatgggcaagagagtgggcgcctaccagctggagcacaccttccagggcctgctgggcaagagaagcctgttcaccgagggcagagaggacgaggcccagggcagcgagtag

SEQ ID NO: 35124 - DNA, 291 bp, Artificial Sequence
  derived and/or modified sequence
atgttgccctgtctggccctcctcctcttaatggaactgagtgtgtgcaccgtcgccggagacgggggggaggagcagaccctgagcaccgaggcggaaacatgggagggtgcaggaccaagcatccagcttcagctacaggaagtaaagacgggcaaggctagtcagttctttggcctgatgggtaaacgagtcggggcgtatcagctcgaacatacattccaggggcttctggggaagcgtagcctgtttacagaaggaagggaggacgaagcccaaggatccgaatag

SEQ ID NO: 35125 - DNA, 291 bp, Artificial Sequence
  derived and/or modified sequence
atgctgccctgcctggccctgctgctgctgatggagctgtctgtgtgcaccgtggccggagatggaggagaggagcagaccctgagcacagaggccgagacctgggagggcgccggccccagcatccagctgcagctgcaggaggtgaagacaggcaaggccagccagttcttcggcctgatgggcaagagggtgggcgcctaccagctggagcacaccttccagggcctgctgggcaagaggagcctcttcacagagggcagagaagatgaggcccagggcagcgagtag

SEQ ID NO: 35126 - DNA, 291 bp, Artificial Sequence
  derived and/or modified sequence
atgctgccctgcctggccctgctgctgctgatggagctgagcgtgtgtacagtggccggagatggcggggaagaacagacactgtccaccgaggccgaaacctgggagggggcaggtccttcaatccagctgcagctccaagaggttaaaactggtaaagcgtcccagttctttggactgatgggcaaacgcgtcggcgcctatcagctggagcatacatttcagggcctgctgggtaagcgaagtttgtttaccgaggggcgtgaggacgaggctcagggtagcgagtag

SEQ ID NO: 35127 - RNA, 291 nt, Artificial Sequence
  derived and/or modified sequence
augcucccaugucuggcgcuccuccuuuuaauggaacuuucaguuuguaccguggcaggagaugguggugaggaacagacacuaagcaccgaagccgaaacuugggaaggcgcuggcccuucuauucagcuccaacugcaggaggucaaaaccgguaaggcuagccaguuuuucggccugaugggaaaacgcgugggcgccuaucagcucgagcacacuuuccagggccugcugggaaagcgaucgcuguuuacagaaggacgcgaagaugaggcucagggguccgaauag

SEQ ID NO: 35128 - protein, 87 aa, Artificial Sequence
  derived and/or modified sequence
MLPCLALLLLMELSVCTVAGDGGEEQTLSTEAETWEGAGPSIQLQLQEVKTGKASQFFGLMGKRVGGRPLIQPRRKKGREDEAQGSE

SEQ ID NO: 35129 - DNA, 264 bp, Artificial Sequence
  derived and/or modified sequence
atgttaccatgtctggcccttctgctgttgatggagctgtccgtgtgtaccgtggcaggtgatggtggcgaggagcagaccttatcaactgaagctgagacctgggagggcgctggcccatccatccagctgcaactacaggaagtgaagacaggtaaggccagccagttttttggactcatgggaaagagagtgggcggtagaccgttgattcagcccagaaggaagaagggcagagaagacgaggcccaggggtccgagtag

SEQ ID NO: 35130 - DNA, 264 bp, Artificial Sequence
  derived and/or modified sequence
atgctcccttgcctcgcactcctgctactcatggaattgtctgtttgtacggttgccggggatggcggagaggaacagactttgtcaaccgaagctgagacgtgggaaggtgcagggccttcaattcaactccagctgcaggaagtcaaaacaggaaaagctagccagtttttcgggttaatgggaaagcgggtaggcggcagaccactgatccaaccaagaagaaaaaaaggtcgagaggatgaggctcagggctccgagtag

SEQ ID NO: 35131 - DNA, 264 bp, Artificial Sequence
  derived and/or modified sequence
atgctgccctgcctggccctgctgctgctgatggagctgagcgtgtgcaccgtggccggcgacggcggcgaggagcagaccctgagcaccgaggccgagacctgggagggcgccggccccagcatccagctgcagctgcaggaggtgaagaccggcaaggccagccagttcttcggcctgatgggcaagagagtgggcggcagacccctgatccagcccagaagaaagaagggcagagaggacgaggcccagggcagcgagtag

SEQ ID NO: 35132 - DNA, 597 bp, Artificial Sequence
  derived and/or modified sequence
atgctgccttgcctcgccctgcttctcctgatggagctgtccgtgtgcactgtggcaggtgatggtggagaggaacagacactcagcactgaagcagagacctgggaaggcgctggccccagcattcagctccagctgcaggaggtgaagacgggcaaggcaagccagttctttgggctgatggggaagcgagtgggaggaagacctctgatccagccaaggagaaaaaaaggcagagaggatgaggcccaaggttcagagtaaaagcccccaccacagacttcccagaggacacggtgccgcttcttcctacctggatgtcacagctgacaagccggcaggccaactctcttctctgtgtctcctgtcctcatcgctggcacttcacacaaggcccacactgaacccactgggcttcttcctggactctcagtgtcaagcagcagtcctgcataaatgcacagcttcgccgtagcaagctgcactgactctgccctccctcacactcagagttggcatctcactgcacagcagtgaggagactcgcacactctgtatcctgtgcctagcacacagtaggcactcaataaatgagtg

SEQ ID NO: 35133 - DNA, 264 bp, Artificial Sequence
  derived and/or modified sequence
atgctgccatgtctggccctcctacttcttatggagttaagcgtttgtacggtcgctggtgacggaggggaagagcaaacactgagcaccgaagccgaaacatgggaaggcgccggtccaagcatccagttacagcttcaggaggtcaaaaccgggaaagcttctcagttttttggactcatgggcaaacgagtggggggccggcctttaatccaaccccggcggaagaaaggtcgagaggatgaagcccagggttcagagtag

SEQ ID NO: 35134 - DNA, 264 bp, Artificial Sequence
  derived and/or modified sequence
atgctgccctgcctggccctgctgctgctgatggagctgtctgtgtgcaccgtggccggagatggaggagaggagcagaccctgagcacagaggccgagacctgggagggcgccggccccagcatccagctgcagctgcaggaggtgaagacaggcaaggccagccagttcttcggcctgatgggcaagagggtgggcggccggcccctcatccagcccaggaggaagaagggccgggaggatgaggcccagggcagcgagtag

SEQ ID NO: 35135 - DNA, 264 bp, Artificial Sequence
  derived and/or modified sequence
atgctgccctgcctggccctgctgctgctgatggagctgagcgtgtgcacagttgccggcgacggcggagaggagcagacactgagtaccgaggcagagacttgggagggagccggacctagcatacagcttcaactgcaagaagtcaagacaggcaaggcttcacagttctttgggctcatgggtaagcgagtcggaggccgcccacttatacaaccccggaggaagaaaggcagagaagacgaggcccaggggagtgaatag

SEQ ID NO: 35136 - RNA, 264 nt, Artificial Sequence
  derived and/or modified sequence
augcucccuugccucgcacuccugcuacucauggaauugucuguuuguacgguugccggggauggcggagaggaacagacuuugucaaccgaagcugagacgugggaaggugcagggccuucaauucaacuccagcugcaggaagucaaaacaggaaaagcuagccaguuuuucggguuaaugggaaagcggguaggcggcagaccacugauccaaccaagaagaaaaaaaggucgagaggaugaggcucagggcuccgaguag

SEQ ID NO: 35137 - protein, 76 aa, Artificial Sequence
  derived and/or modified sequence
MLPCLALLLLMELSVCTVAGDGGEEQTLSTEAETWEGAGPSIQLQLQEVKTGKASQFFGLMGKRVGGREDEAQGSE

SEQ ID NO: 35138 - DNA, 231 bp, Artificial Sequence
  derived and/or modified sequence
atgcttccatgcttggccttactgttgctcatggaattaagcgtgtgcacagtggccggtgacggcggagaagagcagactctttctaccgaagcggagacttgggagggggcaggaccctcaatccagctgcaattgcaggaagtcaagacgggaaaggcatcccagtttttcggactcatgggtaagagagtgggcggaagggaagatgaagcccagggtagcgagtag

SEQ ID NO: 35139 - DNA, 231 bp, Artificial Sequence
  derived and/or modified sequence
atgcttccttgccttgccttgcttttacttatggaattgtctgtctgcacagttgccggtgatggaggggaagaacagactctgagcacggaggccgagacgtgggagggggcaggtcccagcatacagctacagctccaagaagtcaaaaccggcaaagcatcccagttttttggacttatgggaaaacgggtgggagggagagaggacgaagcccaggggtctgaatag

SEQ ID NO: 35140 - DNA, 231 bp, Artificial Sequence
  derived and/or modified sequence
atgctgccctgcctggccctgctgctgctgatggagctgagcgtgtgcaccgtggccggcgacggcggcgaggagcagaccctgagcaccgaggccgagacctgggagggcgccggccccagcatccagctgcagctgcaggaggtgaagaccggcaaggccagccagttcttcggcctgatgggcaagagagtgggcggcagagaggacgaggcccagggcagcgagtag

SEQ ID NO: 35141 - DNA, 231 bp, Artificial Sequence
  derived and/or modified sequence
atgctgccatgccttgcactgctccttcttatggagctgagtgtctgcacagtggcaggagatgggggcgaggaacaaactctctccacagaagccgaaacatgggagggtgcaggtccttctatccagctgcagttgcaggaggtgaagacggggaaggctagccagtttttcgggcttatgggcaaaagagtaggcggacgagaggacgaagcccaaggtagtgagtag

SEQ ID NO: 35142 - DNA, 564 bp, Artificial Sequence
  derived and/or modified sequence
atgctgccttgcctcgccctgcttctcctgatggagctgtccgtgtgcactgtggcaggtgatggtggagaggaacagacactcagcactgaagcagagacctgggaaggcgctggccccagcattcagctccagctgcaggaggtgaagacgggcaaggcaagccagttctttgggctgatggggaagcgagtgggaggcagagaggatgaggcccaaggttcagagtaaaagcccccaccacagacttcccagaggacacggtgccgcttcttcctacctggatgtcacagctgacaagccggcaggccaactctcttctctgtgtctcctgtcctcatcgctggcacttcacacaaggcccacactgaacccactgggcttcttcctggactctcagtgtcaagcagcagtcctgcataaatgcacagcttcgccgtagcaagctgcactgactctgccctccctcacactcagagttggcatctcactgcacagcagtgaggagactcgcacactctgtatcctgtgcctagcacacagtaggcactcaataaatgagtg

SEQ ID NO: 35143 - DNA, 231 bp, Artificial Sequence
  derived and/or modified sequence
atgctgccctgcctggccctgctgctgctgatggagctgtctgtgtgcaccgtggccggagatggaggagaggagcagaccctgagcacagaggccgagacctgggagggcgccggccccagcatccagctgcagctgcaggaggtgaagacaggcaaggccagccagttcttcggcctgatgggcaagagggtgggcggcagagaagatgaggcccagggcagcgagtag

SEQ ID NO: 35144 - DNA, 231 bp, Artificial Sequence
  derived and/or modified sequence
atgctgccctgcctggccctgctgctgctgatggagctgagcgtgtgcaccgtggcgggggacggtggggaggaacaaacactgtctacagaagcagagacttgggaaggcgctggccccagcatacagctacagctccaggaagtgaaaacgggcaaggcctctcagttctttgggcttatgggcaaacgggtgggcggtagagaagacgaagcccaggggagcgagtag

SEQ ID NO: 35145 - RNA, 231 nt, Artificial Sequence
  derived and/or modified sequence
augcuuccuugccuugccuugcuuuuacuuauggaauugucugucugcacaguugccggugauggaggggaagaacagacucugagcacggaggccgagacgugggagggggcaggucccagcauacagcuacagcuccaagaagucaaaaccggcaaagcaucccaguuuuuuggacuuaugggaaaacgggugggagggagagaggacgaagcccaggggucugaauag

SEQ ID NO: 35146 - protein, 107 aa, Artificial Sequence
  derived and/or modified sequence
MLPCLALLLLMELSVCTVAGDGGEEQTLSTEAETWEGAGPSIQLQLQEVKTGKASQFFGLMGKRVGGRPLIQPRRKKAYQLEHTFQGLLGKRSLFTEGREDEAQGSE

SEQ ID NO: 35147 - DNA, 324 bp, Artificial Sequence
  derived and/or modified sequence
atgctgccgtgtctcgcccttctgctactgatggagctgagtgtctgcactgtggccggagatggaggcgaggagcagaccctgagcacggaggcggagacttgggagggagctggtccatctatccagttgcagctgcaggaggtgaagacaggtaaggcgtcccaattcttcgggcttatgggtaagcgagtcggtggaaggcctttgattcagccacgcagaaagaaagcttatcaattggagcacaccttccagggcctcctcggcaagagatcactgtttaccgagggcagggaggatgaggcccaggggtctgaatag

SEQ ID NO: 35148 - DNA, 324 bp, Artificial Sequence
  derived and/or modified sequence
atgctaccctgcctggcactgctattacttatggaactgtcggtgtgcacagtagcaggagacggtggcgaagaacagaccctttcgacggaggctgagacctgggagggagcaggtccgagcattcagctgcagctgcaggaagtaaaaacaggtaaggcaagtcaattctttggcttgatggggaagcgagtcggggggcggccattgatacaacctagacgcaagaaagcgtatcagttggagcataccttccaaggattgctcggtaaacggtcactttttactgaaggacgggaagacgaggcccagggaagtgagtag

SEQ ID NO: 35149 - DNA, 657 bp, Artificial Sequence
  derived and/or modified sequence
atgctgccttgcctcgccctgcttctcctgatggagctgtccgtgtgcactgtggcaggtgatggtggagaggaacagacactcagcactgaagcagagacctgggaaggcgctggccccagcattcagctccagctgcaggaggtgaagacgggcaaggcaagccagttctttgggctgatggggaagcgagtgggaggaagacctctgatccagccaaggagaaaaaaagcatatcagctggaacacacgttccagggcctcctgggcaagagaagcctgttcacagaaggcagagaggatgaggcccaaggttcagagtaaaagcccccaccacagacttcccagaggacacggtgccgcttcttcctacctggatgtcacagctgacaagccggcaggccaactctcttctctgtgtctcctgtcctcatcgctggcacttcacacaaggcccacactgaacccactgggcttcttcctggactctcagtgtcaagcagcagtcctgcataaatgcacagcttcgccgtagcaagctgcactgactctgccctccctcacactcagagttggcatctcactgcacagcagtgaggagactcgcacactctgtatcctgtgcctagcacacagtaggcactcaataaatgagtg

SEQ ID NO: 35150 - DNA, 324 bp, Artificial Sequence
  derived and/or modified sequence
atgctaccctgcctggcactgctattacttatggaactgtcggtgtgcacagtagcaggagacggtggcgaagaacagaccctttcgacggaggctgagacctgggagggagcaggtccgagcattcagctgcagctgcaggaagtaaaaacaggtaaggcaagtcaattctttggcttgatggggaagcgagtcggggggcggccattgatacaacctagacgcaagaaagcgtatcagttggagcataccttccaaggattgctcggtaaacggtcactttttactgaaggacgggaagacgaggctcaaggatcagaatag

SEQ ID NO: 35151 - DNA, 324 bp, Artificial Sequence
  derived and/or modified sequence
atgctgccctgcctggccctgctgctgctgatggagctgagcgtgtgcaccgtggccggcgacggcggcgaggagcagaccctgagcaccgaggccgagacctgggagggcgccggccccagcatccagctgcagctgcaggaggtgaagaccggcaaggccagccagttcttcggcctgatgggcaagagagtgggcggcagacccctgatccagcccagaagaaagaaggcctaccagctggagcacaccttccagggcctgctgggcaagagaagcctgttcaccgagggcagagaggacgaggcccagggcagcgagtag

SEQ ID NO: 35152 - DNA, 324 bp, Artificial Sequence
  derived and/or modified sequence
atgctgccttgcttagccctgttgctgctgatggagctttcagtttgtaccgtggcgggagacggtggtgaagagcagactctgagcactgaggcggaaacctgggagggagccggtcccagtattcagctgcagcttcaggaggttaagacaggcaaggcgagtcagtttttcggattgatggggaagagggtcggaggtaggccactcatccagccacgccgaaagaaggcttaccagctggagcacaccttccaaggactgcttgggaagaggagtctgtttactgagggtcgtgaggacgaagcacagggctccgaatag

SEQ ID NO: 35153 - DNA, 324 bp, Artificial Sequence
  derived and/or modified sequence
atgctgccctgcctggccctgctgctgctgatggagctgtctgtgtgcaccgtggccggagatggaggagaggagcagaccctgagcacagaggccgagacctgggagggcgccggccccagcatccagctgcagctgcaggaggtgaagacaggcaaggccagccagttcttcggcctgatgggcaagagggtgggcggccggcccctcatccagcccaggaggaagaaggcctaccagctggagcacaccttccagggcctgctgggcaagaggagcctcttcacagagggccgggaggatgaggcccagggcagcgagtag

SEQ ID NO: 35154 - DNA, 324 bp, Artificial Sequence
  derived and/or modified sequence
atgctgccctgcctggccctgctgctgctgatggagctgagcgtgtgtactgtggctggcgacggcggcgaggaacagacactttccactgaagcagagacatgggaaggtgcggggccttcaattcagctccaactgcaggaggtgaagactggcaaagccagccaattttttggacttatgggaaagcgagtcggaggacgccccctaatccaacctaggcgcaaaaaggcttaccagcttgagcatacctttcaagggctgttaggtaagaggtctctcttcactgaaggaagggaagacgaggcccagggaagcgagtag

SEQ ID NO: 35155 - RNA, 324 nt, Artificial Sequence
  derived and/or modified sequence
augcuacccugccuggcacugcuauuacuuauggaacugucggugugcacaguagcaggagacgguggcgaagaacagacccuuucgacggaggcugagaccugggagggagcagguccgagcauucagcugcagcugcaggaaguaaaaacagguaaggcaagucaauucuuuggcuugauggggaagcgagucggggggcggccauugauacaaccuagacgcaagaaagcguaucaguuggagcauaccuuccaaggauugcucgguaaacggucacuuuuuacugaaggacgggaagacgaggcccagggaagugaguag

SEQ ID NO: 35156 - RNA, 324 nt, Artificial Sequence
  derived and/or modified sequence
augcuacccugccuggcacugcuauuacuuauggaacugucggugugcacaguagcaggagacgguggcgaagaacagacccuuucgacggaggcugagaccugggagggagcagguccgagcauucagcugcagcugcaggaaguaaaaacagguaaggcaagucaauucuuuggcuugauggggaagcgagucggggggcggccauugauacaaccuagacgcaagaaagcguaucaguuggagcauaccuuccaaggauugcucgguaaacggucacuuuuuacugaaggacgggaagacgaggcucaaggaucagaauag

SEQ ID NO: 35157 - protein, 469 aa, Artificial Sequence
  derived and/or modified sequence
MARGLGAPHWVAVGLLTWATLGLLVAGLGGHDDLHDDLQEDFHGHSHRHSHEDFHHGHSHAHGHGHTHESIWHGHTHDHDHGHSHEDLHHGHSHGYSHESLYHRGHGHDHEHSHGGYGESGAPGIKQDLDAVTLWAYALGATVLISAAPFFVLFLIPVESNSPRHRSLLQILLSFASGGLLGDAFLHLIPHALEPHSHHTLEQPGHGHSHSGQGPILSVGLWVLSGIVAFLVVEKFVRHVKGGHGHSHGHGHAHSHTRGSHGHGRQERSTKEKQSSEEEEKETRGVQKRRGGSTVPKDGPVRPQNAEEEKRGLDLRVSGYLNLAADLAHNFTDGLAIGASFRGGRGLGILTTMTVLLHEVPHEVGDFAILVQSGCSKKQAMRLQLLTAVGALAGTACALLTEGGAVGSEIAGGAGPGWVLPFTAGGFIYVATVSVLPELLREASPLQSLLEVLGLLGGVIMMVLIAHLE

SEQ ID NO: 35158 - protein, 450 aa, Artificial Sequence
  derived and/or modified sequence
MARGLGAPHWVAVGLLTWATLGLLVAGLGGHDDLHDDLQEDFHGHGHTHESIWHGHTHDHDHGHSHEDLHHGHSHGYSHESLYHRGHGHDHEHSHGGYGESGAPGIKQDLDAVTLWAYALGATVLISAAPFFVLFLIPVESNSPRHRSLLQILLSFASGGLLGDAFLHLIPHALEPHSHHTLEQPGHGHSHSGQGPILSVGLWVLSGIVAFLVVEKFVRHVKGGHGHSHGHGHAHSHTRGSHGHGRQERSTKEKQSSEEEEKETRGVQKRRGGSTVPKDGPVRPQNAEEEKRGLDLRVSGYLNLAADLAHNFTDGLAIGASFRGGRGLGILTTMTVLLHEVPHEVGDFAILVQSGCSKKQAMRLQLLTAVGALAGTACALLTEGGAVGSEIAGGAGPGWVLPFTAGGFIYVATVSVLPELLREASPLQSLLEVLGLLGGVIMMVLIAHLE

SEQ ID NO: 35159 - DNA, 1410 bp, Artificial Sequence
  derived and/or modified sequence
atggccaggggactcggcgcacctcattgggtcgctgttgggctgctgacttgggcgactctgggactgctggtcgccggccttggaggacatgatgacctgcacgacgacttacaggaagatttccacgggcactctcacagacactctcatgaggatttccaccatggccactcccatgcccacgggcacgggcatactcatgagtcaatatggcacggtcatacccatgatcacgatcacggccactctcacgaagatctgcatcatggacattctcacggctactctcacgagtcattgtaccacagggggcatggtcatgatcacgagcactcccacggtggctacggcgagtcgggggccccgggaataaaacaagatctggatgccgtgaccctgtgggcctatgccttgggggccactgtgctgatttccgctgcccctttctttgtactcttcctcattccagtggaatccaattccccacggcaccgctcactgttgcagattctgctgtccttcgcatccggagggctgctcggagacgctttcctccacctcatcccccatgcgcttgaaccacattcacatcacacattggaacagcctggtcacggacactcccactctggccaaggccctatactgagcgtggggctgtgggtgctgtccggcatcgtagccttcctggtggtcgaaaagttcgttcgccatgtgaaaggtggacacggccattctcacggacatggccatgctcattcccacactcgtggttcgcacgggcatggtcgccaagaaaggagtaccaaggaaaagcagtcctccgaggaggaagaaaaggagacgcgcggcgtccagaagagacgtgggggtagtaccgtgccgaaagacggccccgtccgccctcaaaacgcagaggaggaaaagcggggccttgatctccgggtgtcggggtacttgaaccttgcagccgacctagcgcacaattttacggacggccttgcgattggcgcttccttccgggggggcagaggcctcggcatactgacaaccatgactgtcctgctgcatgaagtgccccatgaagtcggggactttgccattttggtccagtctggatgctctaaaaaacaggcaatgcggctgcagctgctcactgccgtgggggctctggccggcacagcatgtgcgctcctgactgaaggaggtgccgtggggtcagagattgctgggggggcaggccctggatgggttttgccttttaccgcaggtggtttcatttacgttgctaccgtgtccgtccttccagaactgctacgagaagcatcgcccctgcaatccctgctagaggtgctgggcctgctgggcggagtgattatgatggtgctcattgcccatctggagtag

SEQ ID NO: 35160 - DNA, 1410 bp, Artificial Sequence
  derived and/or modified sequence
atggccagagggctgggcgccccccactgggtggctgtcggacttctcacctgggcgactctcggtctgctggtggcgggcctgggaggccacgacgatcttcacgatgatctccaggaggactttcatggccattcacatagacatagccacgaagacttccatcacggccatagccatgcgcatgggcatgggcacacccatgagtctatctggcacgggcatacccatgaccacgaccacggtcattcacacgaggacctgcatcatgggcactctcacggttatagccacgagtccctctaccatagggggcacggccacgatcacgagcacagccatggaggatacggtgagtcaggagccccaggtatcaagcaggatcttgacgctgtcacattgtgggcctatgccctaggagccactgtgctgatttctgccgcgccattttttgtgcttttcctcattccagtggaatccaatagccctagacatcgatccttgcttcagattcttttaagctttgcatcgggagggcttctgggggatgccttcctccatcttataccccacgcgttggagccacactcccaccataccctggaacagccagggcatggccatagtcattccggccaggggccgatcctaagcgtgggattgtgggtcctatccggtattgtcgcctttctggtggtggaaaagttcgtgcgccacgttaaagggggccacgggcactctcatggacatggccacgctcacagccacacacgagggagccatggacacggccgacaggaaagatccaccaaggaaaagcagtccagcgaagaggaagagaaagagacccgaggtgtccagaagagacgggggggtagtacggtacccaaagacggtcctgtccgcccccaaaatgccgaggaggagaagcggggactggacctgcgtgtgagcggctacctcaatctggcggcagaccttgctcacaatttcaccgatgggctggctataggggccagctttcgggggggtcggggactgggaattctcactactatgacagttctgttgcatgaagtgccacatgaggtgggggactttgccatcctggtgcagtctggctgctcaaagaaacaagcaatgagacttcagctcctgactgcagtgggggcgctggcaggaacggcctgtgcactgctcaccgagggcggggccgtcggatctgaaatcgccgggggagccggccctgggtgggttctgccctttacagccggcggatttatatacgtggccaccgtctccgtactacctgaactactacgggaggcatccccccttcaaagtcttctcgaggtgttgggactcctgggaggggtgatcatgatggtcctcatcgcacatttggagtag

SEQ ID NO: 35161 - DNA, 1410 bp, Artificial Sequence
  derived and/or modified sequence
atggcacgagggctgggtgcgccccactgggttgctgtcgggctcttgacctgggctacgttgggcttgctggtggcaggcctgggcgggcatgatgatttgcacgatgacctacaggaggattttcacgggcattcccacagacactctcatgaggattttcaccacggccattctcatgcccacggccacggccacacacacgaaagcatttggcacggccatactcacgatcacgatcatggccatagccacgaagacctgcaccacggccactctcatggctatagtcacgagtccctctaccaccgaggccatggccacgaccacgagcactcacacgggggatacggagaatctggcgcccccgggattaagcaggatcttgacgccgtaacgttatgggcttacgcgctgggcgctaccgttctcatcagtgccgcaccttttttcgtgctgtttctcataccagttgaatccaatagccccaggcacagaagcctgttacagatcttactgtcctttgcgtctggggggctgctgggcgatgctttcttacatcttattccacatgccctagagccacacagccatcacacactggaacagcccgggcacggccactcgcacagcggacaggggcctattctcagtgtggggctgtgggtgttgtcaggcattgtggcatttctggtggttgaaaagttcgtgagacacgtcaagggaggacatggacactcgcatgggcatggacatgctcacagtcacacacgaggcagccacggtcatgggcggcaggagcggagtaccaaagaaaagcagagcagtgaggaagaagagaaagaaacgcgcggggtccagaaaaggagaggcggcagtacagtgcctaaagacggacccgtgcggccccagaatgccgaagaggagaagcggggcctcgacctgagggtttctggttatctcaacctggcggctgacctcgcccataacttcacagacgggctcgcaataggcgcctcattcagaggcggacggggtctgggcatactaacaaccatgaccgtattgctacacgaagttccgcacgaagtaggcgattttgccattctagtacagagtggatgctcgaagaaacaggctatgaggctgcagctgctgactgccgtgggtgccctggctggcacagcctgtgcactgttaacagaaggcggagccgtcgggtccgagatcgccggcggggccggccccgggtgggtgctgccattcaccgccggggggtttatctacgttgccaccgtgagcgttctgcccgagttactgcgcgaagcctctcctctgcagtctcttttggaagtgctcggattgctcggcggcgtgatcatgatggtgcttatcgcgcacttggaatag

SEQ ID NO: 35162 - DNA, 1410 bp, Artificial Sequence
  derived and/or modified sequence
atggctcggggtctcggagctccccactgggtggccgtggggttgcttacatgggctaccctcgggctcctcgtagccggcctgggcgggcacgatgatctgcatgacgatttgcaggaagattttcatggacatagtcatagacactcccacgaggatttccaccatggccactcccatgcccatggacacgggcatactcacgagagtatctggcatggtcacacccacgaccacgatcatggccatagccatgaggaccttcatcacggccactcccatggatactcacatgagtcgctgtaccaccgcgggcatggtcatgaccacgaacacagtcacggcggatacggtgagtctggcgccccgggcattaagcaggacctggacgccgtgactctgtgggcatacgcactaggagccactgtcttgatttctgccgcacctttctttgtcctcttcctgattccagtggaatccaacagccctagacaccgctcgctcctccaaatccttctgagctttgcctcaggaggactgcttggtgacgcgttcttgcatttgatccctcacgccctggagccccattctcaccacactctggagcagcctggtcacggacactcacattccggacagggcccgattctttcagttggactgtgggttctgtcaggcatcgtggcctttctggttgtcgaaaagttcgttcgccatgtcaagggtggccacggccacagtcacggccatggccatgcccactctcatacccgcggctcacacggacatggaaggcaggagagatcgactaaggaaaaacagtcttctgaggaagaggagaaagagactcggggagtacagaaaaggcgcggaggttccacagtgccaaaagacggccctgtgagacctcaaaacgcggaggaagagaagaggggcctcgacctcagggtgtccgggtatctgaacctagccgccgacttagctcataactttactgacggtcttgctatcggggccagctttcgcgggggcagaggacttggtatactcacaaccatgaccgtcctcttgcatgaagtcccgcacgaggtgggagacttcgccatcctcgtgcagagtggctgctccaagaagcaggctatgcgtttgcaattgctgacagccgtgggagcgctcgccggtacagcctgcgcactgcttacagagggtggcgcagtcgggagcgagatcgccggaggtgccggtcccggctgggttttaccgttcacagccggtggattcatctacgtggctacagtcagcgtgctcccagagctgctgagagaggcatccccgctgcagtcactcctggaagtgctcggactgctgggtggggtaatcatgatggtgctgattgctcacctggaatag

SEQ ID NO: 35163 - DNA, 663 bp, Artificial Sequence
  derived and/or modified sequence
atggacagctctttgcccgaatgtagacacattggcaagggcatcagggctaaagtggagcggaatttcttgttttcacgagacttaaaagctggccttcctcgaccgtcaaagcccggtaaggaaaggatccccgagcctgctctgggagccacagtcctcatctctgccgctcctttcttcgtactgttcttaatacctgttgaatcgaactctccacggcatagaagtctgctgcaaatcctgttgagctttgctagcggtgggctcctaggcgacgcctttctgcatctcatcccccatgcactggagcctcattctcatcataccctcgaacagccaggccacggccacagccattctggccagggccccatcctttctgtggggctatgggttttgagcggtatagtggcttttcttgtggttgagaagttcgttagacacgttaagggcggccatggacactctcacggacatgggcacgctcactctcatacgcgcggatcacacggacatggtagacaggagcgctctacaaaggagaagcagtcctccgaagaggaagagaaagagacgagaggcgtgcagaagcgccgcggggggtcaaccgtgccaaaagacggacctgtcaggccacagaacgccgaagaagaaaagtag

SEQ ID NO: 35164 - DNA, 663 bp, Artificial Sequence
  derived and/or modified sequence
atggactcctctctgccagagtgtaggcacatcggcaaggggatacgcgccaaagtggagagaaacttcctattttcccgcgacctgaaagccgggctgcctaggccctctaaaccaggcaaagagcggattccggagcctgcccttggtgccaccgttctaatatcagcagcgccttttttcgttctattcctgattccagtggagtccaattctcctcgccacagatccctgctgcagatcttgctcagcttcgccagcgggggcttactgggggatgccttccttcacctcatcccacacgctctagaacctcacagccaccatacactcgagcagcccggacacggacacagtcattcaggccagggtccaatactgagtgtcggcctttgggtgctgtccggcattgtcgcatttttggtggtggagaagtttgtcaggcacgtgaaaggggggcacggtcacagtcacggccatggccatgcacactcgcataccaggggttctcacggtcacggtcgtcaggagagatcgacaaaagaaaagcagtcctcggaggaagaggaaaaggagacacggggggtccaaaagagacggggggggagcacagtgcccaaagatggacctgttagaccacagaacgcggaagaagaaaagtag

SEQ ID NO: 35165 - DNA, 1410 bp, Artificial Sequence
  derived and/or modified sequence
atggcaagagggttaggcgccccacactgggttgcggtagggctgctcacatgggccactctgggactgctcgtggcggggctgggcggccatgacgatctccacgatgatctgcaggaggacttccacggacactctcatcgccactcccatgaagactttcaccacggccattctcacgcccatggccatggacacacacatgaatcaatctggcacggtcacacgcacgaccatgatcacggtcactcacatgaagatctccatcatgggcactcacatggttacagccacgagagcctgtatcatcgggggcacggacatgatcatgagcacagtcatggtggctacggagaatccggtgcacccgggatcaagcaggatctcgacgccgtaactttatgggcctatgcactgggggccactgttctgatatccgctgctccattcttcgtgctctttctgatccccgtagaatctaactcaccccgacaccgatctctgctccaaattttgctgtcttttgcctcaggtggcttactgggggatgcgtttctccacttgattccccacgctctcgagccacattcacaccatacacttgaacaaccaggtcacggtcattcccactctggacaggggcctatcctttctgtgggattgtgggtcttgagcggtatcgtcgcttttctggtcgttgagaaattcgtccgccacgtgaagggcggacacggtcatagccacgggcacggacatgctcattcgcatacgcgaggctctcacggacacgggagacaagagaggagcacaaaggaaaaacagtcctcagaggaagaggagaaagagaccagaggcgtgcagaagcgccggggaggctcgacagtacctaaagatggcccagtgcggccccagaatgcagaagaagagaagcggggtttggacctgcgcgtgagcggatatctcaacctggccgccgatctggctcacaattttaccgacgggctggcaattggagcaagctttcgggggggccgaggcctcggaatccttactaccatgacggtcttactgcacgaggtgccacacgaagtgggggattttgctattttagtgcaatctggctgttccaagaagcaggcgatgagactacagctcctgacggctgtgggcgcccttgcaggtactgcctgcgctttattgaccgaggggggggccgtggggtccgagatcgcaggaggtgccgggccagggtgggtgctgccattcaccgccggaggtttcatctacgtcgccacagtctcagtcctgcctgaactactgagggaagcatcccctctgcagtccctccttgaggtcctgggtcttctgggcggggtgataatgatggtgctgatcgcacatcttgaatag

SEQ ID NO: 35166 - DNA, 1410 bp, Artificial Sequence
  derived and/or modified sequence
atggcccgggggctgggcgccccacactgggtggcggtgggtcttctgacctgggccaccctgggcctgctggtcgccgggcttggcgggcacgatgatctgcacgacgacctgcaagaagattttcatggccactcacaccggcactcacatgaagacttccaccacggtcacagtcacgcgcatggacacggtcacacacacgagtctatctggcatgggcatacccacgatcacgaccatgggcacagtcacgaagacctccaccacggtcacagccatggatactctcacgagtccctctatcatcggggccatggtcatgaccatgaacactcccatgggggctacggcgaatccggagcaccgggtatcaagcaggatctcgacgccgtgaccctgtgggcgtatgccctgggggcaacagtcttaatctccgccgcccccttcttcgtgctgtttctaatacccgttgaaagtaactcaccacgacaccgatctctgctgcagatcttgttaagctttgccagcggaggcctgctaggggacgccttcctccacttgatcccccacgctcttgagccacactcccaccacacattggagcaacctggccatgggcattcacattcagggcaaggaccgatcctctccgtgggtctgtgggtgctgtccggtatcgttgcctttctggtggtcgagaagtttgtccgacatgttaagggaggacacggccactctcacggccacggccacgcccattcacatacaaggggctctcatgggcacggacggcaggaacggtctaccaaggagaagcagagcagcgaggaggaggaaaaagagaccaggggagttcagaagaggagggggggctccacagtccctaaagacggtcccgtaagaccacaaaacgccgaggaagagaaacggggtctggatctgcgcgtaagtgggtaccttaacctggctgctgacttagctcataactttaccgacgggctggccattggcgcctccttccgcggtggccggggcctcgggattctgacaaccatgacagtacttctgcacgaggtgccccatgaggtgggtgacttcgccattctagttcagtctggatgttccaaaaagcaggcaatgcgactccaactgcttacggcagtgggtgccctagcagggacagcctgcgcgctcttaacggaaggaggcgctgttggctctgagatagcaggaggcgccgggcctgggtgggtactgcccttcacagccggcgggtttatatacgtggctaccgtgtccgtcttgccagagctgctgcgcgaggcctccccgctccaatccctgctggaggtgttgggcctcctggggggagtcatcatgatggtcctgatagctcatctggaatag

SEQ ID NO: 35167 - DNA, 1410 bp, Artificial Sequence
  derived and/or modified sequence
atggcccgcgggctcggtgctccccattgggtcgccgtcggcctccttacctgggccactctcggcctcctcgtagccgggttgggagggcacgacgatttacatgacgatctgcaggaggacttccacggccacagccatcgccattcgcacgaggacttccaccacgggcacagccacgcacatggtcacggccatacccacgagtctatatggcatggccatacacacgatcatgaccacgggcactctcacgaggatcttcaccatggacacagccacggctattcacacgagtccttataccatagagggcatggccacgatcatgagcattcacacggagggtatggagaatctggagctcccggaatcaaacaggatctggatgccgtgactttgtgggcatacgcgttaggcgccacggtacttatctccgcggcaccgttttttgtgctgtttctcatcccagtcgaaagcaactcgccgcggcatcgttctctactgcagatcctactcagtttcgcgagtggagggctcttaggcgatgcattccttcacctgatcccccacgcactggagccacactctcaccataccttggaacagcccggtcatggacactctcactcagggcagggtcccatcctgtccgtgggcctatgggttttatcgggaatagtagctttcctggtggtggaaaagtttgttaggcatgtgaagggcgggcatggacactcacatggccacggccacgcccacagtcacacccgggggagccacggccatgggagacaggagagaagtaccaaagaaaaacagagtagcgaggaggaggagaaagaaacccggggggttcagaaacgcagggggggcagcaccgtgcctaaggatgggcccgttagacctcagaatgccgaagaagaaaagcgggggctggatttgagagtttcgggctaccttaatctggccgcagacctggcccataacttcactgacggccttgctattggcgcgagcttcagaggggggcgcggccttggcatcctgacgacaatgacagtcctacttcatgaggtcccgcatgaagtgggagacttcgcaattctggtgcagtccggctgttccaagaagcaggcaatgagactgcagttactgacggctgtaggggcgttagccggtacggcctgtgcactgctaacagaagggggggccgtgggatctgaaattgccggcggagctggacccggctgggtcctgcctttcactgcaggcggattcatatacgtagcaactgtatcagtattgccagagctgctgcgtgaagccagccctctgcagtccctgctagaggtcctgggattactcggcggagtgattatgatggtgctgatcgcccatctggaatag

SEQ ID NO: 35168 - DNA, 663 bp, Artificial Sequence
  derived and/or modified sequence
atggactcctcccttcccgaatgtcgccacataggcaaaggtatccgggccaaagttgagcgaaacttcctcttttctcgagatctgaaggcgggcttgccaaggcccagcaagcctggcaaggaacgaatacccgagccggcactgggggctaccgtacttatcagcgctgcacctttcttcgtcctgttcctgattcccgtggaatcaaatagcccccgacaccgtagcttactgcagattctgctctcattcgcatcaggcggtctgctgggcgacgccttcctgcacttgattccacatgctctcgagccacactcccaccatacactcgagcagcccggacacggccacagtcattctgggcaagggccaatcctttccgtgggactctgggtcctgagtgggattgtagccttcttggtggtcgagaaatttgtgcgccatgtaaaaggcggtcacggacattcccacggacacggccatgctcactcccacactagggggtctcacggccacggaagacaggagagaagcaccaaagagaagcagtcttctgaggaagaagagaaggaaacaagaggcgtgcagaagcggcggggcggctctactgtgcccaaggatggacctgtgcgcccccagaacgctgaggaggaaaaatag

SEQ ID NO: 35169 - DNA, 663 bp, Artificial Sequence
  derived and/or modified sequence
atggacagcagtctgccggagtgccggcatattggcaaaggcatacgagccaaggtcgagcgcaactttctgttctcccgggacctgaaggctggtcttcccaggccatctaagccgggtaaggaaagaataccggagcccgccctaggcgccactgtgcttatctctgcagcacccttcttcgttctgtttctcatccccgtggagtcaaattcgcccaggcataggtcgctgttgcagattcttctaagcttcgcttctggcggactgttgggcgacgcctttctgcacctaattccacacgcactagagccgcattctcatcacacactcgagcaaccaggacatgggcattcgcactcaggtcaaggccctatcctgagtgtaggcctctgggtgttgtcgggaatagtcgctttcctagtggtggaaaagttcgtcagacacgtgaaaggcggccacggccactcccacggtcacgggcacgctcattctcacacccgaggctcacatggccacggacggcaggaaaggtctaccaaagaaaagcagtctagcgaagaagaagagaaagaaaccagaggcgtgcagaagcgacgcgggggaagtaccgtgcctaaggatgggccagtcaggccgcagaatgctgaggaagaaaaatag

SEQ ID NO: 35170 - DNA, 1410 bp, Artificial Sequence
  derived and/or modified sequence
atggcgcgtggactgggcgccccccattgggtcgccgtcggcctgctgacgtgggcgaccctcggactactggtagcagggctaggcgggcatgacgaccttcacgacgatctgcaggaggactttcacggccacagccatcgacactcccatgaagatttccaccacgggcatagccatgcacatgggcacgggcacactcacgagtccatttggcacggccacacccacgatcacgatcacgggcatagtcatgaggatctccatcacgggcactcacatggctactcccatgaatcactgtaccatcgtggccacggtcacgaccatgagcatagtcacggaggatatggagaatcaggagcccccggtatcaaacaggatttggatgcggtgactctgtgggcatacgcacttggcgcaacagtgcttatttctgccgccccattctttgttctgttcttgattccagtagagtcaaactcccctagacatcggagcttattgcagatactgctctccttcgctagcggcggactcctgggagatgcattcctacatctgattcctcacgccctggaaccacattcccatcacacgctagagcaaccagggcacggacactcacattcgggccaaggaccaatattgtctgtgggtctgtgggtgctctctggtattgtcgcgttcctggtggttgagaagtttgtgaggcacgtgaaaggaggtcatggccatagtcatgggcacggccatgcccactcccataccaggggctcacatggacacgggcggcaagagagaagcactaaagagaagcaaagcagcgaagaagaggagaaagaaacccgaggcgtgcaaaagcggaggggcggctcgactgtgcccaaggatgggccagttaggccgcaaaacgcagaggaggagaagagaggccttgacctccgagtgtcaggttatctcaatttggcagccgatcttgcgcataactttacagacgggctggcaattggcgcctcattccggggggggcgtgggttgggaatcctgacaactatgacggtgctcctgcatgaagtgcctcatgaagtgggcgatttcgcaatcctggtacaatccgggtgctctaagaaacaagcgatgcggctacagttactgacagccgtgggggctcttgcgggcaccgcctgcgctctgctgaccgagggtggggccgttgggtcggagatcgccggcggagctgggccagggtgggtgcttccttttaccgccgggggctttatctatgttgctacagtgagcgttctgccagagctgttaagggaagcctcacccctgcagtctcttttagaagtgttaggactgttgggtggggttataatgatggtgcttatagctcatctggaatag

SEQ ID NO: 35171 - DNA, 1410 bp, Artificial Sequence
  derived and/or modified sequence
atggctcgcggcctgggagctccccattgggtcgccgtgggactgctcacctgggccactctgggtctactggttgcgggtctcggcggccacgatgacctccacgacgatctccaggaggacttccacgggcacagtcataggcactctcacgaggactttcatcacgggcattcacacgcccacggtcacgggcacactcatgaatccatctggcacggacacacgcacgatcatgatcacggccacagtcacgaagacttacaccacggacattcacatgggtacagtcacgaaagtctgtaccaccgcgggcacgggcacgaccatgaacatagtcatggagggtacggcgagtccggcgccccaggaattaagcaggacctagatgccgttaccctgtgggcctacgctcttggggcaacagtgctcatatccgccgccccattttttgtcctcttcctcatccctgtggagagcaattcaccccgacacagaagcttactacaaatcctactgtctttcgccagcggaggactgctgggagacgctttcttgcatctcatcccccacgcgttggaaccacacagtcaccacacccttgagcagcctggacacggccacagccactccgggcaaggccccatcctttcagtggggctgtgggttctgtcaggaatcgtcgctttccttgtggtcgagaagtttgtcagacatgtgaaaggagggcatggacacagccatggacatgggcacgcccactctcatacgaggggaagccacggccatggccgtcaggagcggtcgaccaaagaaaagcaatcaagcgaggaggaagagaaggaaactcgcggggtccagaagaggaggggaggtagtacggtgcccaaggatggaccagtgagacctcagaacgctgaggaagagaaaaggggcctggacctcagggtcagcggctacctgaatctggccgcggatttagcccataattttactgacggtctagccatcggggccagcttccgtggaggaaggggcttgggcatattaacaaccatgaccgtcctcttacacgaggtcccccacgaggtgggggacttcgctattctcgttcaatctggctgctctaagaagcaagccatgcgtttacagctcctcactgccgtaggcgcactggccggaactgcgtgtgccctccttactgagggaggcgccgtcggcagtgaaatcgcgggaggagccggccctggttgggtgcttcccttcaccgctggagggttcatctacgtggccactgtctccgtgttacctgagctactgcgcgaagcttcaccattacagtcattactcgaagttctgggtctgctgggaggggtcatcatgatggtgttaatcgctcatttggaatag

SEQ ID NO: 35172 - DNA, 1410 bp, Artificial Sequence
  derived and/or modified sequence
atggcccgtgggctcggtgctccccactgggtggcagttgggctcctcacatgggccacactgggtcttctggtcgccggactgggtggccacgacgatctccatgacgacctgcaggaagatttccatgggcattctcatcggcacagccacgaggatttccatcacggacatagccacgctcacgggcacggccatacccacgagtccatttggcacggccacacacacgaccacgaccacggacattctcacgaggaccttcatcacggtcactctcatggatattcacacgagtccctgtatcaccgaggacacgggcatgatcacgaacatagtcatgggggctatggagagtctggagcaccaggcataaaacaggatttggatgcggttacgctgtgggcttacgcgttaggagccaccgtcttgataagtgccgctcccttctttgtgctgtttctcataccagtggaatctaactctccccggcaccgctccctgctgcagattctcttgtccttcgcctcaggaggcctgctgggtgacgcgttcctccacttaatcccacatgctctggagcctcacagccaccacacactggaacagcctgggcatggccactctcattccggacagggacctatcctgagtgtcgggctctgggtactatccggcattgtggcctttctggtggtcgagaaatttgtgcgccatgtgaagggcggccacgggcactcgcacgggcacggacacgcgcatagtcatactcgcggctcccacggacacggccgacaggagcgcagcactaaggagaaacaatcatctgaggaagaggagaaggaaactcggggagtgcagaagcggcgcgggggcagtaccgttccgaaagacggcccagtgcgcccccaaaacgcagaggaggagaaaagagggcttgatctaagggtgagcggctatctgaacctggccgccgatctcgctcataacttcactgacggattggccattggagctagcttccgcgggggccgcggcctaggcatactaacgactatgacagtgctgctccacgaagttccccatgaggtgggcgactttgctatattagtgcagagtggctgctcaaagaaacaggctatgaggctgcaattgctaacagctgttggggctttggcaggaaccgcatgcgccctgctgacggagggaggcgcagtggggagcgaaatcgccggaggggccggccccggttgggtcctgcccttcaccgccgggggattcatatatgtcgccacggtatctgtactgcccgagctgctgcgagaggcctcaccgctgcagtcgctgttggaggtattagggctgctgggcggcgtgatcatgatggtgctgattgcacacttggagtag

SEQ ID NO: 35173 - DNA, 1410 bp, Artificial Sequence
  derived and/or modified sequence
atggcaagagggttgggtgcgccccactgggtcgccgtgggactgctgacctgggctactctaggtctgctggtcgctggattggggggacatgatgacttgcatgatgatctccaggaagatttccatgggcattcccataggcattcccatgaggattttcatcatggccattcccatgcgcatggtcacggccacacccatgaatccatatggcatggccatacgcacgaccacgatcacggtcacagccacgaagatttgcaccatggtcatagccatggttattctcacgaatccctctaccaccgaggccacggccatgaccacgagcattcccacgggggttacggagagtccggcgcccctggcatcaaacaggacctcgacgcagtgacattgtgggcctacgcacttggtgctacggttcttatctcagcagcgccttttttcgtgctattcctgattccggtcgaatcgaatagcccccgtcaccggtctctgctccaaattttgctgagcttcgcgtccggaggcctgttaggcgacgcttttctacatcttataccacatgcacttgagcctcactctcaccataccctcgagcagcctgggcacggccacagccattcaggccaaggacccattttgagcgttggcctgtgggtgctatcaggtatagtcgccttcttagtcgtggaaaaatttgtacggcacgttaagggagggcatggccattcgcatggacacggtcatgcccacagtcacacaaggggatctcatggtcacggaaggcaagagaggagcacgaaagaaaaacagtcatccgaagaagaggagaaagagacaagaggcgtgcagaaaaggcgaggaggcagcactgtcccgaaggatggacccgtgaggcctcagaacgccgaagaggagaagagggggctagatctccgagtcagcggttatttaaacctggcggcagaccttgcgcacaacttcacagacgggctggccattggcgcctccttccggggcggccgaggactggggatccttacaacgatgacagtgctgctccacgaggtcccgcatgaagtgggggactttgcgatcttggtgcaaagcggctgttcaaagaaacaggctatgaggctccagctactgacagctgttggtgctctggctggcaccgcatgcgccttgttgaccgagggcggcgcggtgggctctgagattgctggtggagccggtccgggctgggtgttgccgttcactgctgggggtttcatttatgttgctactgtatccgtactgcccgagctgcttagagaggccagcccactgcagtctctcctcgaggtcttgggccttctgggcggggtaatcatgatggtgctgattgctcacctggagtag

SEQ ID NO: 35174 - DNA, 663 bp, Artificial Sequence
  derived and/or modified sequence
atggacagtagccttcccgagtgccgacacattgggaaaggcatccgtgctaaagttgaacgtaatttcctctttagccgcgacttaaaggcggggctcccacgccctagtaagcctggcaaggaacggatcccagagcctgctctgggggccactgtgctgattagcgcagccccatttttcgtgctgttccttattcctgtagaatccaattcacccaggcatagatcgttattacagatcctcttgtccttcgcctctggagggttgctgggggacgcattcctacacctgattccacacgctctggaaccccatagccaccacacgttggaacagcctggtcatggacatagccatagcggacagggaccaatcttgagcgtcgggctgtgggttcttagcggcatcgtggcgttcttagtcgtggagaaattcgtccggcacgtgaagggcggccacggccactcgcacggccacggccatgcccactcgcataccagaggcagccatggccacgggaggcaggagcgatctaccaaagaaaagcagagctcggaagaagaagaaaaggagacgagaggggtgcaaaaacggcgagggggctcgactgtgcccaaagacggacccgttagaccccaaaatgccgaagaggaaaaatag

SEQ ID NO: 35175 - DNA, 1353 bp, Artificial Sequence
  derived and/or modified sequence
atggctcggggcctgggggccccccactgggtggccgtcggccttctgacatgggccactttgggacttctggttgcgggattgggagggcacgatgatctgcacgacgatctccaagaggattttcatggccatggccacactcatgagagtatctggcatggccacactcacgatcacgatcacgggcacagtcacgaggacctgcatcacggccacagtcacgggtatagccatgagtccctctatcaccgaggccatggacatgaccatgagcactcccatggcggatatggggagagcggcgcaccgggcattaagcaggacctagatgccgttactctctgggcttacgcactgggtgctaccgtgctgatatctgctgctcctttctttgttctctttctgatcccagtggaatcaaattcaccccgacatcggagtttattacagatccttctctcattcgcaagtgggggcctcttgggcgacgctttcctccacctgatcccccatgctttagaaccgcattcgcaccatacccttgagcagccggggcatggccatagtcacagtggacagggcccaatacttagtgttggcctctgggtgctgtcaggtatagtggccttcctcgtagtggaaaagtttgtacgccatgtcaagggagggcacggacattctcatggccacggacatgctcattctcatactcggggctcacatgggcatggccgtcaggagcgctccaccaaggagaagcagtcgtctgaagaagaagaaaaggaaaccaggggtgttcagaagaggagggggggctctaccgtccctaaggatgggcctgtgcgtccccaaaacgcagaggaggaaaagcggggacttgatctgagggtgagtgggtatctcaacctggccgccgatttggcccataattttacagacggcctcgcgattggcgcctcttttcggggcggtcgaggccttgggattctcactactatgaccgtcctgctccatgaagtccctcacgaggtcggcgactttgctatcctcgtgcagtctgggtgttctaagaaacaggccatgaggctgcagctgctgacagccgtaggagcactggcaggcacagcgtgtgcactcctgaccgaaggaggcgcagttggatcagagatcgccggcggagcgggtccggggtgggtcctgccatttactgcaggtggctttatctatgttgccacagtgtcggttctgccagagctgctgcgcgaggcctccccactgcagtccctgttagaagtattgggattgctgggaggggtgattatgatggttttaatcgcccatcttgaatag

SEQ ID NO: 35176 - DNA, 663 bp, Artificial Sequence
  derived and/or modified sequence
atggacagcagcctcccagaatgtcggcacatcgggaaaggcattagagccaaagtcgagaggaatttcctgttcagccgggacctgaaagccggcctgcctcgaccgtccaagcccgggaaagagagaataccagagccggccttgggagccacggtgctcatttccgcggccccgttctttgtgctctttctcataccagtggagagcaacagtccgcggcaccgcagcctgctgcagatcctgctttctttcgcatcaggaggcctgctcggggatgctttcctgcaccttatcccccacgccctcgagccacactctcatcatacccttgaacagcccggacacggccattcgcactcagggcagggtcctattctgagtgtgggtctgtgggtgctgagtggcatcgtagcctttctggtggtagagaaattcgtgcgacacgtcaagggggggcatggccattcccatggccatggccacgcccacagtcacacgcgaggaagtcacggccacggccgtcaagaacggtcaacaaaagagaaacagtcgtctgaagaggaagagaaagagacccgtggcgttcagaaacgtaggggcgggtctaccgtacctaaagacggccccgtaagaccgcaaaatgccgaggaggaaaaatag

SEQ ID NO: 35177 - DNA, 1410 bp, Artificial Sequence
  derived and/or modified sequence
atggcccgaggcctgggcgcgcctcattgggtagcagttggattgctgacttgggcaacactcgggctgcttgtggcggggctgggtggccacgatgacctgcatgacgatctgcaggaggactttcacggccactctcaccggcacagccacgaggatttccaccacggacactctcacgcacatggtcacggccacacccacgagtccatttggcatggccacacacacgatcacgatcacggacactcgcacgaagatttgcaccatggacattcccacggttatagccacgagagtctgtatcataggggacatgggcacgaccatgagcacagccacggcgggtacggtgagtccggagccccaggtatcaagcaagatctggacgccgtcaccctgtgggcttatgccctcggggccacagtgctcatatcggctgccccattctttgtgctctttctcattcctgttgagtcgaactcccctcgacacaggagccttttgcagatacttctgtcattcgcgtcgggcgggctcttgggagacgctttcctgcatcttataccccatgctctagagccacacagccaccacaccctggaacagcccggccatggccacagtcattctggccagggccccatactcagtgtgggtctgtgggttttgtccgggatcgtggccttcctggtggtcgagaagttcgtgcgacacgttaaagggggccacggccattctcatggccacggccacgcgcatagtcacacacgaggcagccacggccacggtcgtcaggagaggtcaacaaaggaaaaacagtcctcagaagaggaggaaaaagaaacaaggggcgttcagaaacggagaggaggttctacagtcccgaaagatggacccgtgagaccacaaaatgccgaagaggagaagcgcggattagatctgagggtgagcggatacctgaatcttgcagcagatctggcccacaactttacggatggactggcaataggcgcatcttttcgtggtgggagaggcttggggattttaacaaccatgaccgttcttttacatgaggtgccgcatgaggtaggagattttgctattctggtccagagtggctgctctaagaaacaggcaatgcgcttgcaactgctcaccgcagttggtgcccttgcgggcacggcttgcgctctccttactgagggcggtgctgtcggtagcgaaattgcaggtggcgctggccctggctgggtgctgccattcaccgcaggtggtttcatatacgttgcaacagtttccgttctccccgagctactgagagaagccagccctctgcagtccctacttgaagttctgggtcttctcggtggcgtgattatgatggtgctgattgcccaccttgagtag

SEQ ID NO: 35178 - DNA, 1353 bp, Artificial Sequence
  derived and/or modified sequence
atggcccgcggactgggggctccacattgggtcgccgttggattgctgacttgggcaactctgggtttgcttgtggcgggactggggggccacgatgacttgcacgacgacctccaggaagattttcacggccacggccacacccacgagtccatctggcacggacacacccatgaccacgaccatggacattcccatgaagatcttcaccatggacattcacacgggtatagccacgaatccctttatcaccgtggccacggccacgaccacgaacacagccacgggggatacggggagtctggagctccaggaatcaagcaggatcttgatgccgtcactctctgggcatacgcgctgggggctactgttctgattagcgccgcaccgttctttgtgcttttcttaatccctgtggaaagcaactccccgaggcatcgctctctcttgcaaatccttctcagcttcgcctccggaggacttttaggcgatgcttttctccatctgatcccacatgcacttgaacctcatagccatcacaccctcgagcagccaggacacgggcattctcactctggtcaggggcctattctgtctgtggggctctgggttttatcgggcatagtggccttcttagtggtggagaaattcgtgcggcacgtgaaaggcggccacggacatagccatgggcacgggcatgcccattcccacactcgaggtagccacggacatgggcgccaggagcggtccaccaaagagaaacagtcatccgaagaggaagagaaagaaacccgtggagtgcaaaaacgcaggggagggtccactgttcccaaggatggccccgtgagaccacagaacgctgaggaggagaagaggggactcgaccttcgcgtgtcaggttatctgaacctcgccgccgatcttgcacacaactttacggacggcctggctattggcgcatccttcagaggcggacgaggcctgggtatattgaccaccatgacagtcctactgcatgaagtacctcacgaggtgggagatttcgctatattagtgcaatctggatgctcaaaaaagcaggccatgcgcctccagctgttgacggctgtgggagcattggccgggaccgcctgtgccctgctaaccgaaggtggcgctgtgggatccgaaattgcaggaggggcaggtcctgggtgggtcctcccattcacggctggcggatttatctacgtggcgacagtatctgtgctccctgagctgctgcgcgaggcctcacccctgcaatcccttctagaggtactgggactgcttggtggagtgattatgatggtgttaatcgctcacctggaatag

SEQ ID NO: 35179 - DNA, 1353 bp, Artificial Sequence
  derived and/or modified sequence
atggccaggggactcggggcgccacactgggttgccgtcggactgctgacgtgggcgacactgggactcctggtggctggtctgggaggtcacgacgatcttcacgatgatttgcaggaggatttccatgggcatgggcatactcatgaatcaatatggcatggacacactcatgatcatgaccacgggcactcccacgaagacttgcaccatggccacagtcacgggtattcacacgaaagcttatatcatcggggccacgggcacgatcatgagcactcccatggaggatacggagaaagcggcgctcctggcataaaacaggatctcgacgcagtcaccctctgggcctacgctctgggagcaacggtgctgattagcgccgccccgttcttcgtgctgtttctgatccctgtcgaaagtaattctcccagacaccgctcattactgcagattctactgtccttcgccagcggcgggctgctgggagacgcatttctgcacctgatccctcatgccctcgagccacactcccaccacaccctggaacagccggggcacggccacagtcacagcggccaaggccccattttgtccgttggcctgtgggtactttcaggtatcgtcgcctttctggtggtggagaaatttgtcaggcatgttaagggcggccatggacattcgcatggccatgggcatgcccactcacatacaagggggtcccacggccacggtcgccaagaacgctctaccaaggagaaacaatctagcgaagaagaagaaaaggagacaagaggcgtccagaaacggcggggaggtagcaccgtaccaaaggatggtccggttagaccccaaaatgccgaggaggaaaagcgaggtctggacctgagagtgagcggctatctgaacctcgctgccgacctagcacataacttcaccgacgggctcgctataggtgcatcttttcgaggcggacgtgggctgggcatcctgaccaccatgacagtgcttctccacgaggtgccacacgaggttggcgatttcgccattctcgttcagtccggatgttccaaaaagcaggccatgcggctacagctgctgaccgctgtgggcgcactggccgggacagcctgcgccctcctgacagaaggaggcgctgtgggttctgagatcgcaggcggcgcaggacccgggtgggtgcttccctttaccgcaggaggcttcatttacgtggccactgtgagcgtcctccctgagctcctgagagaagcctcacccttgcagtctttgctcgaagtcctcggcctgctggggggggtcataatgatggttctgatcgctcatctggagtag

SEQ ID NO: 35180 - DNA, 1353 bp, Artificial Sequence
  derived and/or modified sequence
atggctaggggcctcggggccccccattgggtggctgttggcctgctgacatgggccaccttagggctactcgtcgccggtttagggggacacgatgaccttcatgacgacttacaggaagattttcacggccacggccatacccacgagtcaatctggcatggtcacacacatgaccacgatcacggccattctcacgaggatctgcatcatggccattcacacggttattcacatgagtccctgtatcatagaggccatggccacgatcacgagcacagtcatggaggctacggcgaaagcggcgcccctggcatcaagcaggacctcgacgcagtgaccctatgggcttacgctctgggcgctactgtgctcatcagcgcagcccctttcttcgtgttgttcctgatcccggtcgagagtaactcccctcggcatcggtcgctgttacagatcctgttgagctttgcatccggtggactgcttggcgatgctttcctgcacctgataccgcacgccctggaacctcactcgcaccatactttggagcaaccgggacacggccattcccactccgggcagggcccaattctctctgtcggactatgggtgctgtccgggattgtggccttcctcgttgtggaaaagttcgtgaggcatgttaaaggtggccatggccattcgcacggccatggccacgcccattcacacacaagaggaagccacggtcatggccgccaggagagatccacaaaagaaaagcaaagcagcgaagaagaggagaaagagactcgaggggtgcaaaaaaggcgcgggggctctactgtcccaaaggacggccccgtgcgcccccagaatgcggaggaagaaaagcggggcctggacttgcgagttagcgggtatctcaacttagctgctgatcttgctcataacttcaccgatgggctcgccataggtgctagctttcgggggggccgcggtctgggcattttgaccacaatgacagtcttgctgcatgaagtgccgcatgaggtgggagactttgcgattttggtacaaagcgggtgcagtaagaaacaggcaatgcgcctgcaactcctcactgctgttggcgctctagccggaaccgcttgcgctctccttactgagggtggagccgtgggctctgagatcgcaggtggtgccggtccgggatgggtcctccccttcaccgcaggcggcttcatatacgtcgccaccgtttctgttttgcccgaactactgcgtgaggccagccccttacaaagtctactggaagtactgggcctcctgggcggtgttatcatgatggtgctgatcgctcacctcgagtag

SEQ ID NO: 35181 - DNA, 1353 bp, Artificial Sequence
  derived and/or modified sequence
atggcccgcgggctgggtgccccccattgggtggcggtcggacttctcacctgggcaacactgggcctgctcgtggccggactgggaggacatgatgatctgcatgatgatttgcaagaggactttcatggacacggccatacccatgaatccatttggcacgggcacacacatgaccacgatcacggacactcgcacgaggacttgcatcacgggcacagccacgggtactcacacgaatccctatatcatcgtggccatggccacgaccacgagcattctcatggcgggtacggagaaagcggcgcacctggtattaaacaagacctcgatgccgtcactctctgggcctatgctctgggggctacggtgttgatttctgctgcccccttctttgtgctgtttctgatcccagtggagtccaatagcccacgccaccggtcactgctgcagatccttctcagttttgcttccgggggcctgcttggagacgctttcctgcacctgatcccacacgcgcttgagcctcacagccaccacacccttgagcagcccggtcacgggcactcacattcaggccaaggcccaatactgtcagtcggtctgtgggtactatctggcatagtcgctttccttgtagtcgagaagtttgtacgtcacgtgaaaggtggacatgggcattcacatggccatggtcacgcccattcacacacccgcggctcccacggacacggacgtcaggagaggagtactaaagagaaacaatcatctgaagaagaagagaaggagacccgcggagtgcaaaagaggagagggggttcaaccgtcccaaaggacgggcccgtgcggccacaaaatgcagaagaagagaaaagaggactagatctcagggtctctggctatttaaatctggccgctgacctggctcacaatttcactgacgggcttgccattggtgctagcttccgcggtggcagggggctcgggatactcacgaccatgaccgtgcttctgcacgaagttccgcatgaggttggggattttgcaatcctcgtgcagtcaggttgcagtaagaaacaggccatgagactgcagctgctgacagccgtgggagctctggctggcacagcctgcgccctgttgaccgagggtggcgccgtcggttcggaaatcgccggtggagccggccctggctgggtcctgcctttcacggccgggggctttatttacgtggcaaccgtgtctgtcctgcctgagctgctccgcgaggccagtcctcttcaaagcttgctggaggtcctcggattgctaggtggtgtaatcatgatggtgctgattgctcatctggagtag

SEQ ID NO: 35182 - DNA, 1353 bp, Artificial Sequence
  derived and/or modified sequence
atggcacgaggcctgggcgctccacactgggtggccgtaggcctgctcacttgggccactctgggccttttggtcgctggtctagggggccacgatgatcttcacgatgatcttcaggaagattttcacgggcacggacacacgcacgagtccatttggcatggccacacacacgaccatgaccatggtcactcccacgaagacctccaccatggccactcacacggctacagtcatgagtccctgtaccatagaggtcatgggcacgatcatgaacacagtcacggcgggtacggagagtctggggcacctggaataaaacaggacctagacgccgtgaccctctgggcctacgctctgggcgccacagttctcatctctgccgccccattctttgttttattcctgattccagtcgaatccaattcaccacgccataggtcactgcttcagatattactcagctttgccagtggtggcttgctgggcgatgcctttctgcacctgatccctcacgctttagagccacatagtcatcacacgctcgaacaacccgggcatggccattctcattccggccaggggcctatcttgtctgtcggattgtgggtgctcagcggcattgttgccttcctcgttgtagaaaaatttgtaagacacgttaaaggtgggcacgggcacagccacggtcatgggcatgcccactcccatacaaggggtagtcatggccacggacgacaggagcgtagcacgaaagaaaaacagtctagcgaagaagaggaaaaggagactagaggcgtgcagaagcgacgtggagggagtactgtcccgaaggacggaccagtgcgcccacagaacgccgaggaggagaagcgaggactcgaccttcgcgtctctggttacctcaacttagccgctgatttagcccataatttcactgacggcttggccatcggggcaagtttccgagggggtcgaggactaggtatcttgactacaatgactgtgctcctgcatgaggtaccccatgaggtcggcgatttcgccatactcgtccagagcggctgctctaagaagcaggccatgcggctgcagctgctgactgcagtgggggcattagctgggacggcttgtgccctcttgacagagggaggggcagtgggtagcgagatagcgggtggtgctggccctgggtgggtgctcccctttaccgcaggtggcttcatctatgtggctaccgtctcggtgctgcctgagctcctccgcgaagcatctcccttacagtctcttctcgaagtgcttggactgctgggaggggtcatcatgatggtgttaatcgctcacctggagtag

SEQ ID NO: 35183 - DNA, 1410 bp, Artificial Sequence
  derived and/or modified sequence
atggcccggggcctgggcgccccccactgggtggccgtgggcctgctgacctgggccaccctgggcctgctggtggccggcctgggcggccatgatgacctgcatgatgacctgcaggaggacttccacggccacagccaccgccacagccatgaggacttccaccacggccacagccacgcccacggccacggccacacccatgagagcatctggcacggccacacccatgaccatgaccacggccacagccatgaggacctgcaccacggccacagccacggctacagccatgagagcctgtaccaccggggccacggccatgaccacgagcacagccacggcggctatggagagagcggggcccctggcatcaagcaggacctggatgctgtgaccctgtgggcctatgccctgggcgccaccgtgctgatctctgctgcccccttctttgtgctcttcctgatccctgtggagagcaacagccccaggcacaggagcctgctgcagatcctgctgagctttgccagcggcggcctgctgggagatgccttcctgcacctgatcccccacgccctggagccccacagccaccacaccctggagcagcccggccacggccacagccacagcggccagggccccatcctgtctgtgggcctgtgggtgctgtctggaattgtggccttcctggtggtggagaagtttgtgagacatgtgaagggcggccacggccacagccacggccacggccacgcccacagccacacccggggcagccacggccacggccggcaggagaggagcaccaaggagaagcagagcagcgaggaggaggagaaggagacccggggcgtgcagaagagaagaggaggcagcacagtgcccaaggatggccctgtgcggccccagaatgctgaggaggagaagaggggcctggacctgcgggtgtctggctacctgaacctggccgctgacctggcccacaacttcacagatggcctggccatcggggccagcttccggggcggccggggcctgggcatcctgaccaccatgacagtgctgctgcacgaggtgccccatgaggtgggggactttgccatcctggtgcagagcggctgcagcaagaagcaggccatgaggctgcagctgctgacagctgtgggcgccctggccggcacagcctgtgccctgctgacagaaggaggagctgtgggcagcgagattgctggaggagctggccctggctgggtgctgcccttcaccgctgggggcttcatctacgtggccaccgtgtctgtgctgcctgagctgctgcgggaggccagccccctgcagagcctgctggaggtgctgggcctgctgggcggcgtcatcatgatggtgctgattgcccacctggagtag

SEQ ID NO: 35184 - DNA, 663 bp, Artificial Sequence
  derived and/or modified sequence
atggacagcagcctgcctgaatgtcgccacatcggcaagggcatccgggccaaggtggagaggaacttcctgttcagccgggacctgaaggccggcctgccccggcccagcaagccaggcaaggagcgcatccctgagcccgccctgggcgccaccgtgctgatctctgctgcccccttctttgtgctcttcctgatccctgtggagagcaacagccccaggcacaggagcctgctgcagatcctgctgagctttgccagcggcggcctgctgggagatgccttcctgcacctgatcccccacgccctggagccccacagccaccacaccctggagcagcccggccacggccacagccacagcggccagggccccatcctgtctgtgggcctgtgggtgctgtctggaattgtggccttcctggtggtggagaagtttgtgagacatgtgaagggcggccacggccacagccacggccacggccacgcccacagccacacccggggcagccacggccacggccggcaggagaggagcaccaaggagaagcagagcagcgaggaggaggagaaggagacccggggcgtgcagaagagaagaggaggcagcacagtgcccaaggatggccctgtgcggccccagaatgctgaggaggagaagtag

SEQ ID NO: 35185 - DNA, 1353 bp, Artificial Sequence
  derived and/or modified sequence
atggcccggggcctgggcgccccccactgggtggccgtgggcctgctgacctgggccaccctgggcctgctggtggccggcctgggcggccatgatgacctgcatgatgacctgcaggaggacttccacggccacggccacacccatgagagcatctggcacggccacacccatgaccatgaccacggccacagccatgaggacctgcaccacggccacagccacggctacagccatgagagcctgtaccaccggggccacggccatgaccacgagcacagccatggaggctacggggagagcggggcccctggcatcaagcaggacctggatgctgtgaccctgtgggcctatgccctgggcgccaccgtgctgatctctgctgcccccttctttgtgctcttcctgatccctgtggagagcaacagccccaggcacaggagcctgctgcagatcctgctgagctttgccagcggcggcctgctgggagatgccttcctgcacctgatcccccacgccctggagccccacagccaccacaccctggagcagcccggccacggccacagccacagcggccagggccccatcctgtctgtgggcctgtgggtgctgagcggcatcgtggccttcctggtggtggagaagtttgtgcgccacgtgaagggcggccacggccacagccacggccacggccacgcccacagccacacccggggcagccacggccacggccggcaggagaggagcaccaaggagaagcagagcagcgaggaggaggagaaggagacccggggcgtgcagaagaggcggggcggcagcacagtgcccaaggatggccctgtgcggccccagaatgctgaggaggagaagaggggcctggacctgcgggtgtctggctacctgaacctggccgctgacctggcccacaacttcacagatggcctggccatcggggccagcttccggggcggccggggcctgggcatcctgaccaccatgacagtgctgctgcacgaggtgccccatgaggtgggggactttgccatcctggtgcagagcggctgcagcaagaagcaggccatgaggctgcagctgctgacagctgtgggcgccctggccggcacagcctgtgccctgctgacagagggcggcgctgtgggcagcgagattgctgggggcgccggccctggctgggtgctgcccttcaccgctgggggcttcatctacgtggccaccgtgtctgtgctgcctgagctgctgcgggaggccagccccctgcagagcctgctggaggtgctgggcctgctgggcggcgtcatcatgatggtgctgattgcccacctggagtag

SEQ ID NO: 35186 - DNA, 1410 bp, Artificial Sequence
  derived and/or modified sequence
atggcccggggcctgggcgccccccactgggtggccgtgggcctgcttacgtgggctaccctcgggttactggtagctggactaggcggacatgacgacctacacgacgatctccaggaggatttccatgggcactctcaccgacatagccatgaggacttccaccatggccactcgcacgcccacggacatggacacacacatgagtcgatctggcatggacacacacatgaccacgatcacgggcactcccacgaagacctacaccacggccacagccacggatacagccacgaaagtctgtaccaccgtggccacggacacgatcacgaacacagccatggtggctatggagaatcaggcgccccgggcataaagcaggacttagatgcggtgacactgtgggcctatgcgcttggggctacagtgctgatttccgctgctccgttcttcgttttattcctgattcctgtcgaatccaattcccctcggcacaggtccctgcttcagatcctcctttcatttgcatcaggcggtctactcggagatgcttttctgcacctcataccccacgccttagagccccactcccaccacacactggagcagcctggccacggacattcacactccggccagggtccgattctgagcgtggggctatgggtcctgtccggtattgtcgcctttcttgtggtcgagaaatttgtgcggcatgtcaagggcggacacggccatagccatggtcatgggcacgcccattcacatactcgcggctctcacggacacggcagacaggagcgctctacaaaagaaaagcaaagcagtgaggaggaggaaaaagagacaagaggcgttcagaaacggcggggcggaagcaccgtacccaaggacggcccagtgaggcctcaaaacgcagaagaggagaaacgcggactggacttgcgggtgagcggatatcttaacctggctgccgatctggctcataatttcacggatggattggctatcggcgccagttttcggggtggacgcggactcgggatacttactactatgaccgtgctcctgcatgaggtcccacacgaggtaggggattttgccatcctggtacagtccggatgctccaagaagcaggccatgcggttgcagctactgacagccgtgggggccttagccggaaccgcatgcgctcttctcactgagggcggcgcagtggggagtgagatcgccggaggcgctggaccaggatgggtattaccttttactgccggaggcttcatctacgtagccacagtcagcgtgctcccagagctactgcgtgaggcctcaccactgcagtctctcctggaggtgctcggtctgctgggcggcgtcataatgatggttttgatcgctcatttggagtag

SEQ ID NO: 35187 - DNA, 1410 bp, Artificial Sequence
  derived and/or modified sequence
atggcccggggcctgggcgccccccactgggtggccgtgggcctgttaacctgggccaccctggggctcctggtcgccgggctcggcggacacgatgaccttcacgacgacctgcaagaagacttccatggccattcccaccggcacagtcacgaggactttcaccacggtcactcccatgcacacggccatggccacacccatgagagtatctggcatggccacacgcatgatcacgatcacgggcactctcacgaagatcttcatcacggtcactcccatggctacagccacgagtccctgtatcaccgtggccatggtcacgaccacgagcactctcatgggggctacggtgagagtggcgctcctggaatcaaacaggaccttgacgcagtaaccctgtgggcctacgcacttggagccaccgtgttaatctcggcagcccctttctttgttctgtttctcatccccgtggagtccaactcgccacgacatcgctctcttctgcaaatcctgctgagctttgccagcggaggcctccttggggacgcttttttgcacctgataccacatgctcttgagcctcattcgcaccacacccttgaacaacccggacatgggcacagccactccggccagggacccatcttgtccgtggggctgtgggttctctctggcatcgtggcgtttctcgtcgtggaaaaatttgtgaggcatgtgaagggcggccatggccattctcacggccacggtcatgcccacagtcatactaggggcagtcacgggcacgggaggcaggaaagatccacgaaagagaaacagagcagtgaggaggaggagaaagaaacaaggggagttcagaagcgcagagggggcagcacagtgcctaaggatggtcccgtgcggccccagaacgccgaggaagaaaaaagaggattggatctgcgagtgagtggctacctgaaccttgccgcagatctggctcacaattttacagatgggctagcaattggggcttcttttcgggggggacgaggtttggggatcctgactacaatgaccgtactgctgcatgaagtgccacacgaggttggggatttcgccatcctggtccagtcggggtgtagcaaaaaacaggctatgagactgcagttgctcactgctgtgggcgctctggccgggactgcgtgtgcattactgacagaggggggagccgtgggctccgagattgctgggggggccggacctggctgggtactcccctttaccgcaggcgggtttatctatgtcgcaaccgtcagtgtcctgccggaactgctccgggaagctagccccctgcagtccctgcttgaggtgcttggccttttagggggtgtcattatgatggtgctgatcgctcatctggaatag

SEQ ID NO: 35188 - DNA, 1410 bp, Artificial Sequence
  derived and/or modified sequence
atggcccggggcctgggcgccccccactgggtggccgtgggcctgctgacatgggctacccttggactgctggtcgcggggctcggaggccatgacgacctgcatgacgatcttcaagaggattttcacgggcactcgcaccggcactctcatgaggatttccaccatggtcatagtcacgctcatgggcacggacatacccatgaatccatatggcacgggcacacacacgatcacgaccacggacactctcacgaggatctgcatcacgggcacagtcacgggtatagccatgagagtttgtaccaccggggacacggacatgatcacgagcattctcacggagggtacggcgaatcgggggctcccggaatcaaacaggacctcgacgctgtcactctttgggcgtatgcattgggcgccacggttctcatttcggccgcaccgttcttcgtcctgtttctgattccagtagagtccaactcgcctagacatcgtagcctgctccagatcctcttgagtttcgcttccggggggctgctgggtgacgcctttctccacctcatcccacacgccctggagccgcacagccaccatacactcgagcaacccggtcacggacatagtcacagcgggcagggcccgattctatcagtcggactctgggtactcagcgggatcgtggcattcctggtggtggagaaattcgttcgacacgtgaaaggtggtcatggtcactcgcacgggcatggtcatgcccatagccacacccgcggctcacacgggcacgggcggcaggagcgatccacaaaagaaaagcagtcatcggaggaagaagaaaaggaaaccaggggagtccaaaaacgccgagggggaagcaccgtgccaaaagacggcccagtgagaccacagaatgccgaagaggaaaaaagaggattagatcttcgggtctccggctacctaaacctggcggctgatttagcacataatttcactgacggtctcgccataggggctagtttcaggggtggtcgcggcttaggtattctgacaaccatgacggtacttcttcatgaagtgccccacgaggtaggcgatttcgcgatcctggtgcagagcggatgttcaaaaaagcaggccatgaggttgcagctgctgaccgcggttggagccctcgccggcacggcctgcgccctcctgacagaaggtggggccgtaggctcagaaatcgccgggggcgccgggcctgggtgggttttgccattcactgctggtggcttcatctacgtcgcaaccgtttccgtcctgcccgaacttctgagagaagcttcccctctgcagagcctcttggaagtgctcggactcctgggcggggttatcatgatggtacttatagcacacttggagtag

SEQ ID NO: 35189 - DNA, 1410 bp, Artificial Sequence
  derived and/or modified sequence
atggcccggggcctgggcgccccccactgggtggccgtgggcctgctgacctgggctacactggggcttctggtggccggtttgggcggtcacgatgatctgcacgatgacctacaagaagacttccacggccacagtcaccgccattcacatgaagactttcaccacggccactcccatgcacacggacatggacatacccacgagtcgatctggcatggacacacacatgatcacgatcatgggcactcccacgaggatctacatcacggacactcacatggttacagccatgaatcactgtaccaccgcgggcacggacatgaccacgaacattcacacggcggctacggtgaaagcggagctccaggaatcaagcaggacctggacgctgttaccctttgggcctatgcattgggtgccacagtgttgatatccgcagccccattctttgtgctgttccttattccagtcgagtcgaattcgcctcggcatcgcagcctgctgcagattctcctgagcttcgcgagcggcggccttcttggagacgcatttcttcatctcatcccacacgctctagaaccccactcccaccatactctggagcagccgggccacggccacagccattccggccaggggcccatcctgagcgtggggttgtgggtgctgtctggaatagtcgccttcttggtggtcgagaaatttgtccgccatgtgaagggtgggcacggtcattcccatggccatggccatgcgcattcacacaccaggggctcccacggtcatggtaggcaggaacgcagcacaaaagagaaacagtccagcgaggaggaagagaaggagacgcgaggcgtgcagaaaaggcgcgggggaagtacggtccctaaagacggccccgtgcgcccccaaaacgcagaggaggagaagagaggcctggatttgagggtgagtgggtatctgaacttagctgcggatctggcccacaattttactgacggactagccatcggggcatctttcaggggcggacgcgggctaggcattctcacaacaatgaccgtccttctgcatgaggttccccatgaagtcggagacttcgcaatcttggtgcagagtggatgtagcaagaagcaggcaatgagactgcagctcttgaccgcggtaggcgctctggccggcacagcatgtgcgctgcttacagagggcggggctgtgggaagtgaaatcgctggaggagccgggcctgggtgggtgctaccattcactgcgggagggtttatctacgtggccactgtgtcagtgttgcctgaattactgcgcgaggccagtccgctacagtccctactggaggtgctgggcctcctaggtggcgttataatgatggtgcttatagcccacctagagtag

SEQ ID NO: 35190 - DNA, 663 bp, Artificial Sequence
  derived and/or modified sequence
atggacagcagcctgcccgagtgccggcacatcggcaagggcatcagggctaaggtggagcgaaacttcctgttttctcgcgacctgaaagccggcctgcctagaccgtccaagccaggaaaagagaggatccccgagccagcactgggagcaaccgttcttattagcgccgctccattctttgtcctatttctgatccctgtggagagcaacagccccagacatcgatcactcctccagatcttgctgagctttgcctccgggggcctgctgggagacgcatttctgcatctgatcccacacgcccttgagccccactcgcatcacacgctggagcaaccaggccatggccacagccattctggtcagggccctattctgagtgtaggactgtgggtgctgagcggcatagttgctttcctcgtagtagagaagtttgtgcggcacgtgaaaggaggccacgggcactcccacggccacgggcatgcccacagccacacccggggatcacacgggcacggtaggcaggaaagaagtacaaaagaaaaacagtcatctgaagaagaggagaaggaaacccggggcgttcagaagaggagggggggatctacagtgcctaaggacggccccgttcgtccccagaacgcagaagaggagaaatag

SEQ ID NO: 35191 - DNA, 663 bp, Artificial Sequence
  derived and/or modified sequence
atggacagcagcctgcccgagtgccggcacatcggcaagggcatccgggctaaggtagaacgcaactttctattcagtcgggacctgaaagccggcctcccgaggccttctaaaccaggaaaagaacggatccccgaacccgcactcggggctaccgttcttattagcgctgctcccttctttgtgctctttctcatacccgtcgaatcgaatagccccagacaccgctctctgctccagatcctcctcagctttgcctccggaggcctgctaggtgatgccttcctgcatttgattcctcacgccttggagcctcacagccaccacactctcgaacaaccaggccacggacatagccattccggccaggggcctatcctgtcagtcggtctctgggtcctgtcagggatagtggcttttctggtcgtcgagaaattcgtaagacatgtgaaaggaggtcatggccacagtcatggtcacgggcatgcccactctcatacacgtgggtcccacggacacgggagacaggagagatctacgaaggaaaagcagtcatcagaagaggaagaaaaggagacgcggggcgtacagaagagaagagggggctcaaccgtcccaaaggatgggcccgtgcgccctcagaatgctgaagaggagaagtag

SEQ ID NO: 35192 - DNA, 1410 bp, Artificial Sequence
  derived and/or modified sequence
atggcccggggcctgggcgccccccactgggtggccgtgggcctgcttacgtgggccactctggggctgttggttgctggccttggcgggcatgatgatctgcatgatgacttacaggaggattttcacgggcattctcacagacacagtcacgaggactttcaccacggtcattcacatgcccacggccatggacatacccatgaaagcatatggcatggtcacactcacgaccacgaccacggtcacagccacgaggacctacatcacgggcactctcatggatacagccacgaaagcttgtaccaccgcggtcacggccacgaccacgagcattcacacggcggctacggagagagtggtgcccccgggatcaaacaggacctggacgccgtgactctgtgggcctacgccttgggagctaccgtcctcattagtgcagcccccttctttgttctgttcttgattccagttgagtccaattctcctagacacagaagcctactgcagatccttctctcctttgcctctgggggcctactgggggacgcattccttcacttgattccccacgcgctggagccgcactcacaccacaccttggagcaacctggacacggacattcccattccggtcagggcccgattctcagcgtgggcctgtgggtgctgtctggcattgtggcgttcctggtcgtggagaagttcgtacgacacgttaagggggggcacggtcatagccacggacatgggcatgcacattcccatacgcgcggctcccatgggcatggacgtcaggagcggagcactaaggaaaaacagtctagtgaggaggaggagaaggagaccagaggggtgcaaaaaaggcgcggaggtagtaccgtgccgaaagacgggcctgtgcgcccccagaacgccgaggaagagaaacgcggactagatctgagggtgtcagggtaccttaatctcgctgccgacctagcccacaacttcacagatggactagccatcggggccagctttcgggggggaagagggttggggattcttactaccatgacagtgctactgcatgaagtgcctcacgaagtgggggacttcgccattctcgtgcagtcaggatgtagcaagaaacaagcgatgcgtctgcagctcttaaccgcagttggggcccttgccggcacagcctgtgcactacttaccgaaggtggagcggtgggctcagagatcgccggcggagctggcccaggttgggtcctcccctttacggccggggggttcatttatgtggctactgtgtccgtcctgcctgagcttttgcgcgaggcatcaccccttcagagtctcctagaagtgctgggcctgctaggtggtgtgattatgatggtgctgattgctcatctggaatag

SEQ ID NO: 35193 - DNA, 1410 bp, Artificial Sequence
  derived and/or modified sequence
atggcccggggcctgggcgccccccactgggtggccgtgggcctgctcacgtgggccacattaggcctcctggttgcaggcctgggtggccatgacgatctacacgacgatcttcaggaagatttccacggacactcccatcgccactcacatgaggattttcaccatggccacagccatgcacacggacatgggcatactcacgaatccatctggcacggacacacccacgaccatgaccacggacactcacatgaagatttgcaccatggtcacagccacggttactcacacgaatccctttaccacagaggtcacggccacgaccacgaacactctcatggcggatatggggaatctggggccccgggtattaagcaagacctggacgccgtcacactgtgggcatacgcgcttggcgcaacagtgctgatcagcgctgcacccttcttcgtcctgtttctgattcccgtggagtcgaatagtccacggcaccggtcacttctccaaatcctcctgagcttcgcttctggaggactcctcggcgacgcttttttacatctaataccacacgctctggaacctcattcgcatcataccttggagcagcccggccacgggcattctcacagtggccaaggtccaatcctgagcgttggcctgtgggttctcagtgggatcgtggcttttctcgttgtcgagaagttcgtgcgccacgttaaggggggacatgggcacagtcatggccacggacatgcacacagccacaccagagggtcccatgggcacggccggcaggagaggagtaccaaagagaaacagagttcggaagaggaggaaaaagagacccgaggagtgcagaaacggaggggaggttccactgtgcccaaagatgggccagtacgcccccagaatgccgaagaggaaaaacgtgggcttgatctgagggtgtcaggatacctgaacctggcggccgatctagcccataatttcaccgatgggctcgcaattggcgcctccttccggggcggccgcggcctgggcatactgaccaccatgacagtcctgctgcacgaagtgccgcacgaggtgggcgactttgccattctggtccagagcgggtgtagcaaaaagcaggctatgcggctccaactattgaccgccgtgggcgctttggcaggcaccgcttgcgctcttttgacggaaggtggcgctgtggggagcgagatcgccggcggcgctggacccggctgggtgctgccattcactgccggaggtttcatttatgtcgccacagtgagtgttctgccagagttacttagagaagcttcacctctccagtcactcctggaggtcctgggtttacttgggggagtcattatgatggttctgatcgcccaccttgaatag

SEQ ID NO: 35194 - DNA, 1410 bp, Artificial Sequence
  derived and/or modified sequence
atggcccggggcctgggcgccccccactgggtggccgtgggcctgctgacatgggctaccttaggtcttctcgtagctgggctgggcggacacgacgatttgcacgacgacctgcaggaagattttcacggacatagccatagacattcacacgaagactttcaccacgggcactctcatgcacacggccatggccacacccacgagagcatctggcatggtcatacacacgaccatgatcatggccacagccatgaggatctccaccacggtcactctcacgggtatagtcacgagtcattataccatcgcggccatggccatgatcacgaacatagtcatggaggatatggcgaatccggagctcctggcattaaacaggatcttgacgcagtgacactgtgggcatacgccctgggcgcgacagtccttatttcagctgctcccttttttgtgctgttcctgatccctgtcgaatcaaattctccacggcaccgttccctactccagatactgctatccttcgcttcagggggcttgctcggagacgcattcctccatctcatcccacatgctctcgaacctcatagccatcacacgctggagcagccaggccatggtcactctcacagcggccagggccctatcctcagcgtgggcctgtgggttttgagtgggatcgtcgcttttcttgtggtcgagaaattcgtcagacatgtcaagggcggccatggccacagccacggtcacgggcacgcgcacagccatactagaggaagtcacggtcacgggcggcaggaaagatcaacgaaagagaagcagtcttccgaggaggaggagaaagaaacccgaggagtacaaaaacggcggggcggttcaactgtgcccaaagacggtccggtccggccacagaatgccgaggaggaaaaaagagggctggacctccgagtctccgggtatctgaacctggcggccgatctcgctcacaactttaccgacggcctggctataggcgccagcttcaggggcggccgggggctcggcatcctcactaccatgacggtactgctccacgaagtcccccatgaggtcggagactttgctattctagttcagagtggctgcagtaagaaacaagccatgcgactccaactcctcactgccgtgggtgccctggcgggcactgcttgtgccctgctgactgagggaggcgccgtggggtccgaaatagcaggaggcgctggccccggctgggttcttcccttcactgctggcggattcatctacgtcgctaccgtctccgtgctgcccgaactgctgagagaagcaagccccttgcagtccctgttggaggtgctgggactgttgggaggggtgataatgatggtccttattgctcacctcgaatag

SEQ ID NO: 35195 - DNA, 663 bp, Artificial Sequence
  derived and/or modified sequence
atggacagcagcctgcccgagtgccggcacatcggcaagggcatccgtgctaaggtagagcgaaattttttattttcacgcgatctgaaggcaggtctgccccgcccttctaagccagggaaggaacgtattccggaacccgctctgggagctactgtcctgatttctgctgctccgttttttgtgctgtttctaatacctgtggaatctaatagccctcggcaccgctccctgctgcagatcctgttatcctttgcttctggaggactactgggcgacgcattcctgcacttaatacctcatgcgctggagccccactcccatcacacacttgagcagccagggcacggccactcacattccggccagggcccaattctttcagttgggttatgggtcctaagcggaatcgtcgccttcttggtcgtcgaaaagttcgttcgccatgtgaaaggtggtcacggccattctcatgggcacggtcacgcccacagccatactaggggatcccacggacatggcaggcaggagcggtctaccaaggaaaaacagagcagcgaggaagaggagaaagagaccaggggagtgcagaaaagaaggggagggtcaaccgtcccaaaagacgggcccgtgcggccacaaaatgcagaagaagagaaatag

SEQ ID NO: 35196 - DNA, 663 bp, Artificial Sequence
  derived and/or modified sequence
atggacagcagcctgcccgagtgccggcacatcggcaagggcatccgggccaaggtagagagaaattttctgttttccagggacctgaaggctggcctccctagaccctccaagccaggcaaggaaagaatccctgagccagctcttggcgccactgtactaatctcagccgcgcccttctttgtactgtttctcattcccgtggagtctaacagtccacgtcaccggtcactgttgcagatcctcctctcatttgcatctgggggactgctcggcgacgccttcctccatcttattccccatgctcttgagccccacagtcaccataccctggagcagccaggccacggacatagtcattctggtcaagggcccatcctgagtgtgggcctttgggtattgtccggaattgtggccttcctggtcgtcgagaaatttgttcggcacgtgaaggggggccatggccacagtcacggccacggtcacgcccatagtcacacaaggggatctcatggccatggaaggcaggagcgcagtaccaaagagaagcagtcctcggaggaggaagagaaagaaactaggggcgtgcagaaaaggcgcggggggtcaacagttcctaaggacggacctgtccgcccacaaaatgccgaagaggaaaaatag

SEQ ID NO: 35197 - DNA, 1410 bp, Artificial Sequence
  derived and/or modified sequence
atggcccggggcctgggcgccccccactgggtggccgtgggcctgctcacctgggcaacgcttgggctgctggtcgcagggctgggcgggcatgacgatctacacgatgatctgcaggaggacttccacggccatagccatcgacatagccacgaggattttcaccatggacactcacacgctcacggacatgggcatactcacgagtcaatctggcacgggcacacacacgatcacgaccatggacattcccacgaggatcttcaccacggccatagtcatggctattcccatgagagcctctaccacagaggccacgggcacgatcatgagcatagtcatgggggctatggagagagcggcgctcctgggattaaacaggatttagacgccgtgaccctgtgggcctacgccctcggcgccacggttctcatatctgcagcgcctttttttgtcttattcctcatcccagtggaaagcaattccccaaggcaccggagcttgctgcagattctactcagctttgcctctggaggcctgctgggcgatgcgttcctgcacctgatcccacatgccctcgagccccactctcaccataccctcgaacagcccgggcacggccattcccactctggacagggccccatactgagcgtgggactatgggtgctgagcggcatagtagcgtttctcgttgtggagaagttcgtgcgccatgttaagggcggccatggtcactcgcacggacacgggcacgcccactcccacactagaggctctcacggccatgggcggcaggagaggagtacaaaagagaaacagtctagtgaagaagaggagaaggaaaccagaggtgtgcagaaacgcagaggagggagcacagttccgaaagatggcccagtgcggccccagaacgcagaagaggagaagaggggactcgacctgagagtatctgggtatctgaatctcgccgctgacctcgctcataacttcaccgacggactggctattggagcctcctttcgcgggggtagggggttgggcatcctgaccacaatgacagttctgctccatgaggtcccacatgaagtaggtgatttcgcgatactggtgcagagcggctgctccaagaaacaggccatgaggctgcagctgctcacggctgtcggtgccctggctggcaccgcctgcgcactcttaaccgagggtggagcagtcggctctgagattgcgggcggcgccgggccgggttgggtccttcctttcacagcgggaggatttatatacgtggcgacagtaagcgtcctcccagaactgctgcgggaggcgtctccattgcagagcctgcttgaggtcttgggacttctcgggggggtgatcatgatggtactgatcgcccatttggagtag

SEQ ID NO: 35198 - DNA, 1410 bp, Artificial Sequence
  derived and/or modified sequence
atggcccggggcctgggcgccccccactgggtggccgtgggcctgctgacatgggctactctggggctgctcgtggccggcctgggaggtcatgatgacttgcacgacgacctgcaggaagattttcacggacattctcacagacacagccacgaggacttccaccacgggcactcacatgcccacggccacggccacactcacgaatcaatttggcacggtcatacccatgatcacgaccacggccacagccacgaggatttgcaccatggacactctcacggatattctcacgagtccctgtatcacagggggcacggtcatgaccatgaacacagtcatgggggttatggcgagagcggagccccaggcatcaagcaggatctggacgctgtgaccttgtgggcttatgccctgggggcaacagtcctgattagcgctgcccctttctttgtcctttttctgattcctgtcgaatccaattctccccgacaccggagtttgttgcagatcctgcttagcttcgccagcggtggcctgctcggtgatgcctttttgcacttgatcccacacgcccttgaacctcactctcatcacacacttgaacagcctggccacggacacagtcacagtggccaggggcctatcctgagtgtcggactctgggtgttatcgggcatcgtggcatttttggtggtagagaaattcgtgcgtcatgtgaaaggtgggcatgggcactctcacggccacgggcacgctcactcccatacccgggggagccatggacatggcagacaagaacggtctactaaagagaaacagagctcagaagaggaagagaaagaaacccggggggtgcagaaacgtagaggaggctcaacggtacccaaagacggacccgtccgcccccagaacgccgaggaggagaaacgaggtttagaccttagagtctcaggctacctcaacctggccgccgacctggcccacaactttaccgatgggctggctatcggtgcttctttcaggggcggtcgcggacttggcattctgactaccatgactgtcctgctgcacgaagtgccacacgaggtaggggacttcgcaatcctggtacagtcggggtgcagtaagaagcaagctatgaggcttcagttattgacagcagtaggggctcttgccggcacagcatgcgccctacttactgagggaggggctgttggttcagagatagcaggaggtgccggccccgggtgggtcctgccttttaccgccggagggttcatctacgtcgccactgtgagcgtgttacccgagctcctaagagaagcctcacccctgcagtctcttctggaagtattgggattattgggaggagtcattatgatggtccttatcgctcaccttgagtag

SEQ ID NO: 35199 - DNA, 1410 bp, Artificial Sequence
  derived and/or modified sequence
atggcccggggcctgggcgccccccactgggtggccgtgggcctgctgacctgggcaaccctgggacttctcgtggcagggctgggcggccacgatgatttgcatgacgatctgcaagaggactttcacgggcactcccacaggcattctcatgaagattttcatcacggccactcccatgcccatggccacggtcatactcacgaatctatctggcacggccatacacatgaccacgatcatgggcattctcatgaggacctccaccatggacactctcacggctacagtcacgagagtttgtatcacagagggcacggccatgatcacgagcactcccatggaggctacggcgaatcaggagcgcccggaatcaagcaagatctggacgccgtgaccctgtgggcttacgcgctgggcgcaaccgtactcataagtgccgcccctttctttgtgctgtttttgatccctgtagagtcaaactctcccagacatcggtcgctgctccagattctgctgagtttcgcctccggaggacttctgggagatgccttcctgcacctgatccctcacgccctggagccccactcacatcacacactcgaacagcctggccacggccacagccactctggtcaggggcctattttgtccgtcgggctctgggtgctgagcgggatagtcgccttcctcgtggtagaaaaatttgtgaggcatgttaaaggtggccatggacactctcacggccacggccatgcccattcacacactaggggaagccacggacatggtcgacaagagcgcagtaccaaggaaaaacagtcctcggaagaggaagaaaaagagactcgcggtgtgcaaaagcgaaggggcggcagcactgttccaaaggacggtccagtcagaccgcagaacgccgaggaggaaaaacgcggcctcgatttgcgcgtgtctggataccttaacctcgcggccgacctcgcgcacaatttcactgacgggctggccattggggcgagttttagggggggacgcgggctggggattctgactactatgacggtcctgcttcatgaagttccacacgaggttggggatttcgcgatcctcgtccagtccggctgctccaagaagcaggctatgcggctgcagcttctgacagctgttggagcccttgccggcaccgcttgtgccctcctgacggaaggcggggctgtcggaagtgaaatcgccggcggagccgggccaggatgggtgctgccttttacagccggcggctttatatacgtcgccaccgtaagtgttctgcccgagctgctgcgggaggcaagccccctgcagtcgctattggaggtgttaggtctccttggaggggtcattatgatggtgttgatcgcccaccttgagtag

SEQ ID NO: 35200 - DNA, 1410 bp, Artificial Sequence
  derived and/or modified sequence
atggcccggggcctgggcgccccccactgggtggccgtgggcctgcttacatgggccacactgggcctgcttgtggctggcctgggggggcatgacgacctgcatgacgatctgcaagaggactttcatgggcacagtcacaggcactcacatgaggatttccaccacgggcattcacacgcccacggacacggccatacacatgagtccatctggcacgggcatactcatgatcacgaccatggccacagccatgaagacctccaccacggccacagccatggctatagtcacgaaagtctctatcaccgcggacatggtcacgaccatgaacatagccacggcggttatggagagtcaggcgctcctggaattaagcaggatctggatgctgtgaccctgtgggcatatgccctgggcgccactgtgctcataagtgccgcaccattttttgtgctgtttctgattccagtggagtccaactctccgcgtcatagaagcctgctccagatattgctctcatttgcctccggggggctcctgggggacgcattcctacatcttattccacacgccttggagccgcactctcaccacactctggagcagcccggccacgggcactcacattctggacagggtcccattctaagtgtgggtctctgggtgctgtctgggatcgtagcttttctcgtggttgaaaaatttgtccggcatgttaagggtggccatggccactctcacggccacggacacgcacactcccacacaaggggatcacacggccacggcaggcaggagcgaagtactaaggagaaacagagttcagaggaagaggagaaagagaccaggggcgtgcagaagaggcgcggggggtctaccgtgccgaaagatggcccggtgcggccacagaacgctgaggaagaaaagcgggggctcgacctgagagtgtccggctatctaaatctagccgcagacttagcccacaatttcactgacggtctggcaatcggggcatccttcaggggcggtcgtggtttgggcattttaaccacgatgacagtcctgctgcatgaagtaccacacgaggtgggcgattttgcaatcttagtacaatccggctgtagcaagaagcaggctatgaggctgcagctgctcacagccgttggtgcacttgcggggactgcttgcgccctacttactgaaggtggggctgtgggcagcgaaatcgctgggggcgccggtcctggctgggttctgcccttcaccgctggcgggttcatatacgtggccaccgtgagcgtgctccctgaattgctgagggaagcaagccctcttcaatccctgctggaggtcctaggccttctcggcggcgtcataatgatggtccttattgcccacctggagtag

SEQ ID NO: 35201 - DNA, 663 bp, Artificial Sequence
  derived and/or modified sequence
atggacagcagcctgcccgagtgccggcacatcggcaagggcatccgcgctaaagtagaaaggaatttcctctttagtagagatttgaaggccggccttcctcgtcctagcaaaccaggcaaggagagaattcccgagcccgccctgggcgcaaccgtacttatctccgctgcccccttttttgtgctctttctcattcccgttgagagcaactcccctagacaccgctcactgctgcagattctcctgtcattcgccagcggcggcttattaggagacgcgttcctgcacctcattccccacgctcttgagccccactcccaccatacactcgagcagccaggccatggacactcccattcgggccagggaccaatcttgagcgtgggcctttgggtcttgtcaggcattgttgcgttcctagtcgtggagaagtttgttcgacatgtgaaagggggccacgggcacagtcacgggcacggacatgctcacagccacactcgaggatctcatggccatggccggcaggagcgctctactaaggaaaaacaaagttcagaagaagaagaaaaggagacccgcggagttcagaaaagacgagggggatcgacggttcccaaagacggacccgtcaggccccagaacgctgaagaggagaagtag

SEQ ID NO: 35202 - DNA, 1353 bp, Artificial Sequence
  derived and/or modified sequence
atggcccggggcctgggcgccccccactgggtggccgtgggcctgcttacatgggcaactctgggactgttagttgccggactcggaggacacgatgacttacatgacgatctgcaagaagatttccatggacatggccacacccacgagagtatctggcacgggcacactcacgatcacgatcacggacatagtcatgaggatcttcaccacggccatagccatggctattcacacgaatctctgtaccaccgcggtcatggccacgaccacgaacatagccatggcggttacggggagagtggcgcccctgggattaaacaggaccttgatgccgtgaccctgtgggcctatgcgcttggcgcaacagttcttattagcgcagccccctttttcgtgctgtttctcatccctgtcgaaagcaattcaccccgtcacagaagcctcttgcagattctactgagcttcgctagcggtggtctgctcggcgatgcctttctgcacctcattcctcacgctttggagcctcatagccatcacacattggaacagccagggcacgggcactctcatagcgggcagggccctatcctgtcagtgggactgtgggtgctcagtggaattgtcgcgttcctggtcgttgaaaaattcgtgcgtcacgtgaagggaggacatggtcactcccatggtcacggccatgctcacagccacacaagaggctcccatgggcacggtcgccaagagagatctacgaaggaaaagcaaagtagcgaggaagaagagaaagaaactcggggcgtccagaagcgccgaggcggcagcactgtgccgaaagacgggcccgtcagaccccagaatgctgaggaagagaagagggggctggacttgagagtctcgggctatcttaacttagctgccgacctcgcccacaactttactgacggcttggccatcggcgctagcttccgggggggcaggggcttgggcatattaacgactatgacagtacttcttcatgaggtcccccatgaagtcggtgactttgccattcttgtccaaagtgggtgctccaaaaaacaggctatgcggctgcaactgctcactgccgtgggagcacttgcaggcaccgcttgcgccttgttgaccgaggggggcgccgtcggttccgaaatcgcagggggggccggacctggctgggtattgcccttcactgcaggcggatttatttacgtcgcaaccgtaagcgtcctgccagagctattaagagaggcttctcctttacagtctctccttgaagtgttaggtctactcggaggcgtgatcatgatggttttgatcgcccatctggagtag

SEQ ID NO: 35203 - DNA, 663 bp, Artificial Sequence
  derived and/or modified sequence
atggacagcagcctgcccgagtgccggcacatcggcaagggcatcagagctaaggtcgaacgaaacttccttttctccagggacctcaaggcgggcctgccaaggcccagtaaacctggcaaagaacggatacctgaacccgctctcggcgccacagtgctgatctccgctgcccctttcttcgtgctttttctgatacccgtggagagcaactcacctcgacacaggagcttgttgcaaattctgctgtcgtttgcctcgggaggccttctgggcgacgctttccttcatctcatcccacacgccctcgaacctcacagtcaccatacactggaacagcctggccatggacactcacattcaggtcaaggccccatattgtcagtcgggctgtgggtcctgtccggcatcgttgcattcctggtggtggaaaaatttgtgcgtcatgtgaaggggggacacgggcactcgcacggtcacggccatgcacattcacatacccgcgggtcgcacggtcacggtcgacaggaaaggagtactaaggagaagcagtcgtctgaggaagaggagaaggagactcggggggtgcagaagcgacgcggaggttctactgtcccgaaggacggacctgtgcggcctcagaacgctgaagaggaaaagtag
